United States Patent Application Publication US 2026/0191920 A1 - sequence listing, part 17

SEQ ID NO: 76478 - protein, 380 aa, unidentified
  source 1..380: note = Empedobacter haloabium
  REGION 1..380: note = tr|A0A5C7BZY4|A0A5C7BZY4_9FLAO Epoxyqueuosine reductase OS=Empedobacter haloabium OX=592317 GN=queG PE=3; SV = 1
MSPSPEELTALAAAIKAWGQELGFAEVRIADIDLAAAEAGLQAWLDAGMHGEMDYMATHGMKRARPAELVPGTVRVITARMNYLPESAGAGWRERERARLADPQAAVISVYARGRDYHKVLRARLQQLADRIQGAIGAFGYRVFTDSAPVMELPLAEKSGLGWRGKHTLLLNRAAGSMFFMGEILVDLPLPIDAPTEAHCGQCSACITACPTQAILGPGRLDARRCISYLTIELKGAIPEELRPLLGNRVYGCDDCQTACPWNKFAQRATLPDFDERHGLGSASMLALFAWSEEEFNRNMEGSPIRRIGHERWLRNLAVGLGNAADAGARGDAAIVAGLLARAEHPSALVREHVAWALARHGVDATRGVRHLSGGVAAPG

SEQ ID NO: 76479 - protein, 315 aa, Empedobacter sp.
  REGION 1..315: note = tr|A0A4Z1BUI6|A0A4Z1BUI6_9FLAO Epoxyqueuosine reductase OS=Empedobacter sp. MRS2 OX=2491114 GN=queG PE=3; SV = 1
MLLQTEEHIKIKWSQCIKEKAEALGFISCGIAKADFLEEEAPHLEAWLKNNYHGEMQYMENHFDMRLDPRLLVEEAKSVISLAYNYYQNLDRNPNSYKVAMYAQGEDYHFVVKEKVRELLDFIQEEIGEVSGRAFTDSAPILEHAWAKKAGIGWVGKNSLTLSKQKGSFFFLSELIIDLDLAYDSPIETDHCGKCTRCIDACPTEAILPNKTVNGSQCISYFTIELKDQIPIEMKGKFDDWIFGCDVCQEVCPWNRFSLPTKETRFIGHEKINQFSKKDWEEITEDVFREIFKKSPVKRTKFDGLKRNIDFVKSL

SEQ ID NO: 76480 - protein, 312 aa, Emticicia sp.
  REGION 1..312: note = tr|A0A4Q5M2N7|A0A4Q5M2N7_9BACT Epoxyqueuosine reductase OS=Emticicia sp. 17J42-9 OX=2492393 GN=queG PE=3; SV = 1
MLQSYAVKYANLIKTKARELGFDYCGISKAEFLEEEAPRLEAWLSKNYHGKMAYMANYFDKRLDPRLLVEGAKSVITLILNYYPEKTLPQAPENLKLSKYAYGKDYHFVMKDKLKDLMEAISEEIGEVNGRVFVDSAPVMDKAWAKKSGAGWLGKHTNLINREIGSFFFIGEIICDLEIQPDGAIKDYCGTCTRCIDACPTDAIVEPYVVDGSKCISYYTIELKEAIPDEVKGKMENWIFGCDICQDVCPWNSFARPHSTPEFNLNPQLAEFTKKDWEEITEELFQEIFRRSAVKRTKLEGLKRNIDFVREE

SEQ ID NO: 76481 - protein, 312 aa, Emticicia sp.
  REGION 1..312: note = tr|A0A2N4X9L7|A0A2N4X9L7_9BACT Epoxyqueuosine reductase OS=Emticicia sp. TH156 OX=2067454 GN=queG PE=3; SV = 1
MFQSYAVKYANLIKTKATELGFDFCGISKAEFLEEEAPRLEAWLNKNYHGKMAYMANHFDKRLDPRKLVDGAKSVITLILNYYPEQTLSESASDLKLSKYAYGTDYHFVMKDKLKDLVEAIADEIGEVNGRVFVDSAPVMDKVWAKKSGVGWVGKHTNLINREIGSFFFIGEIICDLELEPDGPIKDYCGTCTRCIDACPTDAITEPYVVNGSKCISYFTIELKEAIPEEMKGKFNNWMFGCDICQDVCPWNSFARPHKTAQFEVNPQLKEFTRKDWEEITEELFQEIFRRSAVKRTKLEGLRRNITFLKTD

SEQ ID NO: 76482 - protein, 358 aa, Escarpia spicata
  REGION 1..358: note = tr|A0A370DT67|A0A370DT67_9GAMM Epoxyqueuosine reductase OS=endosymbiont of Escarpia spicata OX=2200908; GN = queG PE=3 SV=1
MDRAPIPNHQQLAANIKIWGAELGFQQVGITDTELSLAEARFNDWLQKGFHGEMSYMARHGNKRSRPAELEPGTRRIISVRLDYLPEPTRKSREILESPAQAFISRYALGRDYHKLMRKRLQKLAQKISGEIGDFGYRVYVDSAPVLEKPLAEKAGLGWIGKHSNLINRKAGSWFFLGEIYTDLPLPIDQPASNHCGSCRACLDICPTQAIVEPYVVDARRCISYLTIEQHGPIPESLRSRIGNRIYGCDDCQQVCPWNRFAKLGREQDFAPRNGLGNATLTELFEWDETNFLKRTEGSAIRRIGHQSWLRNIAVALGNAPHSENIEAILKVREHDPAELVREHVRWALARQRSKSPD

SEQ ID NO: 76483 - protein, 356 aa, unidentified
  source 1..356: note = Unknown
  REGION 1..356: note = tr|S6BI27|S6BI27_9GAMM Epoxyqueuosine reductase; OS = endosymbiont of unidentified scaly snail isolate Monju; OX = 1248727 GN=queG PE=3 SV=1
MSKGGDIDYAQLSRRIKQWGHELGFGAVGICDTDLTEAEHHLHSWLAKGYHGTMDYMHRHGSKRTRPAELVPGTLRIISVRLDYRPPEPDPGSVLRDPAAAFISRYALGRDYHKVLRARLKKLAQRIADEIGDFGYRVFTDSAPVMEKAIAQKAGLGWVGKHSNILSRDAGSWFFLGELYTDLPLPVDSPVSDHCGECTACIDVCPTRAIVAPYQVDARRCISYLTIELHGPIPEALRPLMGNRIYGCDDCQLCCPWNRFANDTTEADFLPRHGLDTATLVELFAWDEATFLKRTEGSAIRRIGHERWLRNIAVALGNSGEAAAESALRARTDHPSELVREHVAWALTRLRALLRP

SEQ ID NO: 76484 - protein, 357 aa, unidentified
  source 1..357: note = Endozoicomonadaceae bacterium
  REGION 1..357: note = tr|A0A3S3TTH9|A0A3S3TTH9_9GAMM Epoxyqueuosine reductase OS=Endozoicomonadaceae bacterium GTF-13; OX = 2506149 GN=queG PE=3 SV=1
MPNKPDIDYQQLAADIHRWGRELGFQQIGIGPVELDEHEQHLQHWLEQGYHGEMDYLARHGNLRSRPAELLPGTLRVISARIDYLPPETDCIRILNNPEKAYLSRYALGRDYHKLVRKRLTQLGKQIEAVVGQHGYRAFVDSAPVLERALGSRSGLGWIGKNTMLINRQAGSWFFLGELFTDLPLPLDSADDADHCGRCSRCLEVCPTRAFVNAHQLDARRCISYLTIELKGAIPMELREAMGNRVFGCDDCQLVCPWNRFAKASPESDFRPRHQLDSSDLADLFGWSETEFLDRTAGSPIRRSGYSGWLRNLAVGLGNAPSSPRVIEALRARRHYPEPMVREHIQWALARHGITPD

SEQ ID NO: 76485 - protein, 350 aa, Endozoicomonas elysicola
  REGION 1..350: note = tr|A0A081K771|A0A081K771_9GAMM Epoxyqueuosine reductase OS=Endozoicomonas elysicola OX=305900 GN=queG; PE = 3 SV=1
MENLVDKIRIWARELGFQEIGIAEAKVPESDIHHLSNWLEKGYHGDMTYMAQHKELRAKPDQLHPGSLRVISARMDYLPADTETVKLLSEPDKAYISRYALGRDYHKLVRKRLTQLGKQIESAVGEHGYRAFVDSAPIMERPLAQQAGLGWMGKHSLILNRQAGSFFFLGELFTNLPLPVDKPYESNHCGRCTSCIDKCPTQAIVAPYQVDARRCISYLTIENKGPIPEELRPLMGNRIYGCDDCQLACPWNRFAKPTQESDFQPRHHLDASDLIDLFNWSEEQFLERTAGSPIRRAGYDSWLRNIAVALGNAPTDETIIAALQNRLNYPSELVHEHIQWALRQHINGTY

SEQ ID NO: 76486 - protein, 349 aa, Endozoicomonas montiporae
  REGION 1..349: note = tr|A0A081MZF4|A0A081MZF4_9GAMM Epoxyqueuosine reductase OS=Endozoicomonas montiporae OX=1027273 GN=queG; PE = 3 SV=1
MDFAQLAEDIRQWARELGFQAIGISEGKVPEQDQQHFKEWLAMGFNGDLDYMERNQDLRFNPEALHPGMIRIISARMDYLPADTETVKILGEPEKAYVSRYALGRDYHKLIRKRLTQLGKKIESAVGDHGYRAFVDSAPVMERPLAQQAGLGWMGKHSLIINRQAGSFFFLGELFTNLPLPVDEPYDKNHCGRCSSCMDKCPTGAIVEPYRVDARKCISYLTIENSGSIPVELRSLMGNRIFGCDDCQLACPWNRFAKPTQESDFRPRHSLDAVDLADLFLWTEEEFLERTAGSAIRRAGFECWLRNIAVGLGNAPASDKVIQALKTRENDPSELVQEHVQWALDQHMK

SEQ ID NO: 76487 - protein, 381 aa, Endozoicomonas montiporae
  REGION 1..381: note = tr|A0A142B7L4|A0A142B7L4_9GAMM Epoxyqueuosine reductase OS=Endozoicomonas montiporae CL-33 OX=570277; GN = queG PE=3 SV=1
MLLNRLYPQESVSKNPTNPEFTEHFTEPASAKIDFAQLAEDIRQWARELGFQAIGISEGKVPEQDQQHFKEWLAMGFNGDLDYMERNQDLRFNPEALHPGMIRIISARMDYLPADTETVKILGEPEKAYVSRYALGRDYHKLIRKRLTQLGKKIESAVGDHGYRAFVDSAPVMERPLAQQAGLGWMGKHSLIINRQAGSFFFLGELFTNLPLPVDEPYDKNHCGRCSSCMDKCPTGAIVEPYRVDARKCISYLTIENSGSIPVELRSLMGNRIFGCDDCQLACPWNRFAKPTQESDFRPRHSLDAVDLADLFLWTEEEFLERTAGSAIRRAGFECWLRNIAVGLGNAPASDKVIQALKTRENDPSELVQEHVQWALDQHMK

SEQ ID NO: 76488 - protein, 363 aa, unidentified
  source 1..363: note = Endozoicomonas numazuensis
  REGION 1..363: note = tr|A0A081NIH4|A0A081NIH4_9GAMM Epoxyqueuosine reductase OS=Endozoicomonas numazuensis OX=1137799 GN=queG; PE = 3 SV=1
MSNTNTSPESLDYQKLADDIRLWARELGFQAVGITEARIPEQDKKHFQEWLDQGLHGDLEYMERHKELRCHPEKLHEGVIRIISARMDYLPAETETIKILQEPEKAYISRYALGRDYHKLIRKRLTRLGKKIEEVTGEHGYRAFVDSAPVMERPLAQQAGLGWMGKHSLIINRQAGSFFFLGELFTNLPLPTDDPYDKNHCGRCSACIDICPTSAIVEPFKVDARKCISYLTIENSGPIPVELRSKMGNRVFGCDDCQLTCPWNRFAKHTQESDFQPRHHLDNSDLADLFLWTEEEFLERTAGSPIRRAGFECWLRNLAVGLGNAPTTEKVLAALHQRKDYPSELVKEHVDWALKQHSPQRDN

SEQ ID NO: 76489 - protein, 347 aa, Endozoicomonas sp.
  REGION 1..347: note = tr|A0A1D2X652|A0A1D2X652_9GAMM Epoxyqueuosine reductase OS=Endozoicomonas sp. (ex Bugula neritina AB1); OX = 1868284 GN=queG PE=3 SV=1
MDELAKNIRQWSRELGFQDMGITEAKVPEQEMKRFQQWLDNGFNGDLDYMARNVDLRANPAALHEGTVRVISVRMDYLPENTETVKILNEPNKAYISRYALGRDYHKLIRKRLTQLGKKIEEATGDHGYRAFVDSAPVMERPLAQQAGLGWVGKHSLIINRQAGSLFFLGELFTNLPLPVDNPYEDSHCGRCTSCLTKCPTQAIVAPYQVDARRCISYLTIENSGPIPEELRPMIGNRVFGCDDCQLVCPWNRFAKPTLESDFKPRHHLDDCNLAEIFLWTEEQFLDRTAGSAIRRAGFECWLRNLAVALGNASSSDIVIDALKARADHSSELVREHVLWALAQHHA

SEQ ID NO: 76490 - protein, 357 aa, Endozoicomonas sp.; identical to SEQ ID NO: 76484
  REGION 1..357: note = tr|A0A3P3VHX7|A0A3P3VHX7_9GAMM Epoxyqueuosine reductase OS=Endozoicomonas sp. GTF13 OX=2528527 GN=queG; PE = 3 SV=1

SEQ ID NO: 76491 - protein, 392 aa, Enhydrobacter aerosaccus
  REGION 1..392: note = tr|A0A1T4STY2|A0A1T4STY2_9PROT Epoxyqueuosine reductase OS=Enhydrobacter aerosaccus OX=225324 GN=queG; PE = 3 SV=1
MAARPPIPKRAPRPAGPSELRQAIRDEALRLGFDAVGFAPATAGTEARRERLQHLATYVAQGFHGDMGWLSERTEQRADPSTLWPEARTVVSLALNYAPPDDPRLVQESPDRAAISVYAHGRDYHDVVKSKLKALGRFVWDIYRHEIKVFVDTAPLMEKPAAQAAGLGWQGKHTNLVSRAFGSWLFLGELLLSVELPCDTPEQDHCGHCRACLDACPTGAFPAPHRLEARRCISYLTIEHKGPIAPELRPLLGNRIYGCDDCLAVCPWNKFAQEARETTLRPHPAQAAPLLTDLAQLDDAAFRRKFSGSAIKRIGRDRFVRNVAYALGNSGKADTALPAVERLLDDPSPLVRGAAVWALSQLAPQEFERRRTGAQDANESVRREWERPSAAP

SEQ ID NO: 76492 - protein, 386 aa, Enhydrobacter sp.
  REGION 1..386: note = tr|A0A5C8P843|A0A5C8P843_9PROT Epoxyqueuosine reductase OS=Enhydrobacter sp. CC-CFT640 OX=2586908; GN = queG PE=3 SV=1
MTVHPAPGLKRRAPSDPHAIREEIRAEALRLGFDAVGFTPAQAPPEQREALVAFVRSGWHGTMDWLAQDIDRRADPARLWPGARTLIALGLRYTPEGDPLAVLAQRDRAAISVYAQGRDYHLVVKSRLKALGLWMWNRWGRDLKVFVDTAPVMERPAAARAGLGWQGKHTNLVSRAHGSWLFLGEILTTLALPPDAPEHDHCGTCQACLDICPTAAFPAPGRLDARRCISYLTIEHPGPIPHELRAAMGNRVYGCDDCLAVCPWNKFAQAAREAAFAPRPGLATPRLTDLAALDDAAFRTLFAGTAVKRIGRDRFVRNVAIALGNSGDAEGSLPAVRRLLDDASPLVRGAAVWALARLSPAAFAGERASRLPAEADADVRAEWAAV

SEQ ID NO: 76493 - protein, 375 aa, Enhydrobacter sp.
  REGION 1..375: note = tr|A0A1V2GNP3|A0A1V2GNP3_9PROT tRNA epoxyqueuosine(34) reductase QueG OS=Enhydrobacter sp. H5; OX = 1907940 GN=BKE17_08645 PE=4 SV=1
MLDTTNELNALKGWIKAQAKALGFADCGFVHPANPIFVKQLDALQTWLAQGKHGDMLFFEDNHDKRANPALLVDKTQSIISVRLDYLVTPPPKRSVPDNERPNSAIIARYARGRDYHKTMRGLLKTLARLIQDKLTTDYPQYANDFVFRPFSDSAPIFERALAEQAGLGWTGKHTLLIHPQAGSFFVLGELFTSLPLAEDKKQIETISSHCGSCRACIHVCPTHAIRKTPTGHYDVDARLCISYLTIELDGKIPVELRPKIGNRIFGCDDCQLICPWNKFARLATIEDFNPRHRLDEVSLLELWAWDAQDFLTKTEGSPIRRTGYDNFMRNVAVALGNAPFSQAIIDKLQQKRPMLGENTQEHIDWAIQQQLNKS

SEQ ID NO: 76494 - protein, 362 aa, Enhygromyxa salina
  REGION 1..362: note = tr|A0A2S9XBC4|A0A2S9XBC4_9DELT Epoxyqueuosine reductase OS=Enhygromyxa salina OX=215803 GN=queG PE=4 SV=1
MLTLDDDDLAALTERAEALGLLRLGAVNLDHSGFEPARAALAEYLDRGAEGEMAFMSRTRAVRMDPGQMLDGARSALVAVVPYEGEAGPIARYAQWVDYHFELHRRFAELSEALRERVPKVESLACVDTKPVLERAVAVLAGLGFLGKNGCLIVPGLGSYVLIGVLLTTARFVGRDRAPEHASAQATGGPWDVCGSCRLCLDHCPTEAFEAPGKLEPRRCIAYLTIEHRGPIPESLAPHMGQRVAGCDVCQEVCPYNRSSTRAQRIPLVARLEQPPGRARTPDLPRLANIGSNQYRQFVKHTALNRIPRRALRRNAILAIGNGEQAVSEAEREALARAARDPSPELAALAHWAARRRGLDLS

SEQ ID NO: 76495 - protein, 367 aa, Enhygromyxa salina
  REGION 1..367: note = tr|A0A2S9YU13|A0A2S9YU13_9DELT Epoxyqueuosine reductase OS=Enhygromyxa salina OX=215803 GN=queG PE=4 SV=1
MTPRPDPLLDDDELAALAELAADLGLLRLGAVSLDHPGFAPARATLADYLDRSAEGEMAFLSRTRAVRMDPAQMLPGARSALVAVVPYAGEPGPVARYAQWSDYHTEIHRRLERLSEHLHARVPDIESLICVDTKPVLERAVAVLAGLGFLGKNGCLIVPGLGSYVLIAVLLTTAQWTGTDRSPTYAHDHSHPPWDACGSCRLCLEHCPTDAFDSPGKLDPRRCISYLTIEHRGPIPEALATRMGQRIAGCDVCQEVCPYNRSSTREDRVPASAWLDPPPGHARVPDLPRLANVGNNQHRQFVKQTALNRIPRAALRRNAILALGNGDGPANEHEAEALRLAMADPSPELAALARWAAARRCVESPE

SEQ ID NO: 76496 - protein, 390 aa, Ensifer adhaerens
  REGION 1..390: note = tr|A0A2V4Y8V0|A0A2V4Y8V0_ENSAD Epoxyqueuosine reductase OS=Ensifer adhaerens OX=106592 GN=queG PE=3 SV=1
MPGIDAKADSEERRRLKLTAFLKAEAADKGFDLCRITRPDAIPQAPARLRDFLDESFHGTMDWLEETAERRSDPRTLWSEVRSVVMFAMNYGPEHDPRGILERTDRGAISVYAQNRDYHDIIKGKLKEVATRFAARAGEYVKVFVDTAPVMEKPLAEQSGLGWQGKHTNLVSREFGSWLFLGSLFTTADLAFDEAERDHCGSCRACLDACPTDAFPATYRIDARRCISYLTIEHKGPIDPEFRPLIGNRIYGCDDCLAACPWNKFAQAASEMKLRARDDLKAPSLETLLDLDDPSFRSLFSGSPVKRIGRDRFVRNVLIAAGNSGSQALVPAVKARVNDTSAVVRAMAVWALSRLVAPAALAEFAEQCEPETDEDVLNEWQIAGVSRCMS

SEQ ID NO: 76497 - protein, 390 aa, Ensifer adhaerens
  REGION 1..390: note = tr|W8I7K1|W8I7K1_ENSAD Epoxyqueuosine reductase; OS = Ensifer adhaerens OV14 OX=1416753 GN=queG PE=3 SV=1
MPGSAAKAENQERRRQKLTEFLKAEAADKGFDVCRITRPDAIPEAPARLVEFLDEGFHGTMEWLAETAERRSDPRTLWSNVRSVVMFGMNYGPEEDPRGILDQPDRGAISVYAQNRDYHDIIKGRLKEVATRFAARAGEDVKVFVDTAPVMEKPLAEKAGIGWQGKHTNLVSREFGSWLFLGSLFTTAELAFDAAERDHCGSCRACVNACPTAAFPAPYRIDARRCISYLTIEHKGPIDPTLRPLIGNRIYGCDDCLAACPWNKFAQQASEMKLKARDDLKAPSLAFLLTLDDPTFRTFFSGSPVKRIGRDRFVRNVLIAAGNSGDDSLVAACKTLTSDTSPMVRAMAVWALSLLISPDALAAHERQCGAESDEEVLSEWQMAGVSRCMS

SEQ ID NO: 76498 - protein, 390 aa, unidentified
  source 1..390: note = Ensifer alkalisoli
  REGION 1..390: note = tr|A0A1E3VAZ6|A0A1E3VAZ6_9RHIZ Epoxyqueuosine reductase OS=Ensifer alkalisoli OX=1752398 GN=queG PE=3; SV = 1
MPGNAQRAENQDRKRRTLTAFLKEEAAAKGFDICRITRPDAIPRAPEQLKAFLSAGRHGTMEWLAETAERRSDPRVLWGEVRSIALLGMNYGPNADPRDILGKRDRGAISVYAQNRDYHDVVKGRLKEIATRFAARCSEDVKVFVDTAPVMEKPLAEKAGLGWQGKHTNLVSRDFGSWLFLGSLFTTADLEIDAPEHDHCGSCRACLDACPTGAFPAPYQIDARRCISYLTIEYKGRIEPELRPLIGNRIYGCDDCLAACPWNKFAREACEMKLKAREDLKQPELAFLLTLDDAAFRAFFSGSPVKRIGRDRFVRNVLIAAGNSGEEDLVSACKGLASDASPTVRAMAVWALSRLMPKGEFIAFAGKCPPETDEEVVSEWKMAGVSRCMS

SEQ ID NO: 76499 - protein, 390 aa, unidentified
  source 1..390: note = Ensifer glycinis
  REGION 1..390: note = tr|A0A178Y2K1|A0A178Y2K1_9RHIZ Epoxyqueuosine reductase OS=Ensifer glycinis OX=1472378 GN=queG PE=3 SV=1
MPGDAAKAGNQDRKRRTLTAFLKEEAAAKGFDLCRMTRPDAIPEAPGRLRQFLEAGCHGTMEWLSETAERRSDPRVLWSEVRSIVLFGMNYGPDTDPLAILAKRDRGAISVYAQNRDYHDVVKGRLKEIATRFAARAGEDVKVFVDTAPVMEKPLAEKAGIGWQGKHTNLVSREFGSWLFLGSLFTTADLDIDVPERDHCGSCRACLDACPTGAFPAPYQIDARRCISYLTIEHKGPIDPELRPLIGNRIYGCDDCLAVCPWNKFARSASEMKLTAREDLKEPELAALLTLDDAAFRSLFSGSPVKRIGRDRFVRNVLIAAGNSGEERFVPACKALARDASPTVRAMAVWALSRLMAADELAAFASECEQESDDEVLAEWQMAGVSRCMS

SEQ ID NO: 76500 - protein, 390 aa, Ensifer sojae
  REGION 1..390: note = tr|A0A249PH05|A0A249PH05_9RHIZ Epoxyqueuosine reductase OS=Ensifer sojae CCBAU 05684 OX=716928 GN=queG; PE = 3 SV=1
MPGNAQQAENQDRKRRTLTAFLKEEAAAKGFDICRITRSDAIPHAPERLQAFLAAGCHGTMGWLAETAERRADPRVLWGEVRSIALFGMNYGPDTDPRDILAMRDRGAISVYAQNRDYHDVVKGRLKEIATRFGARAGEDVKVFVDTAPVMEKPLAEKAGLGWQGKHTNLVSRDFGSWLFLGSLFTTADLEVDAPERDHCGSCRACLDACPTGAFPAPYQIDARRCISYLTIEHKGPIEPELRPLIGNRIYGCDDCLAACPWNKFAREASEMKLKAREDLKQPELALLLTLDDAAFRAFFSGSPVKRIGRDRFVRNCLIAAGNSGEEALVPACMALTRDPSPPVRGMAVWALSRLMPQEELIAFARECPPETDEEVVSEWIMAGVSRCMS

SEQ ID NO: 76501 - protein, 390 aa, Ensifer sp.
  REGION 1..390: note = tr|A0A2V4ZLP7|A0A2V4ZLP7_9RHIZ Epoxyqueuosine reductase OS=Ensifer sp. AP48 OX=2135475 GN=queG PE=3 SV=1
MPGIAAKADNGDRRRLKLTEFLKAEAADKGFDLCRITRPDAIPEAPARLQDFLDDGFHGTMDWLAETAERRSDPRTLWSDVRSVVMFAMNYGPEDDPRGILEKTDRGAISVYAQNRDYHDIIKGKLKEVATRFAARAGEDVKVFVDTAPVMEKPLSEKAGLGWQGKHTNLVSREFGSWLFLGSLFTTADLVIDEPERDHCGSCRACLDACPTGAFPAPYQIDARRCISYLTIEHKGPIDPELRPLMGNRIYGCDDCLAACPWNKFAQAASEMKLKAREDLKAPSLEALLGLDDPAFRSLFSGSPVKRIGRDRFVRNVLIAAGNSGDQALVPAVRARIGDTSPVVRAMAVWALSRLVAPAALAEFAEQCEPETDEDVLNEWQMAGVSRCKS

SEQ ID NO: 76502 - protein, 390 aa, Ensifer sp.
  REGION 1..390: note = tr|A0A1G9RXA5|A0A1G9RXA5_9RHIZ Epoxyqueuosine reductase OS=Ensifer sp. YR511 OX=1855294 GN=queG PE=3 SV=1
MPGIDAKADSEERRRLKLTAFLKAEAADKGFDLCRITRPDAIPQAPARLRDFLDESFHGTMDWLEETAERRSDPRTLWSEVRSVVMFAMNYGPEHDPRGILERTDRGAISVYAQNRDYHDIIKGKLKEVATRFAARAGEYVKVFVDTAPVMEKPLAEQSGLGWQGKHTNLVSREFGSWLFLGSLFTTADLAFDEAERDHCGSCRACLDACPTDAFPAPYRIDARRCISYLTIEHKGPIDPEFRPLIGNRIYGCDDCLAACPWNKFAQAASEMKLRARDDLKAPSLETLLDLDDPSFRSLFSGSPVKRIGRDRFVRNVLIAAGNSGSQALVPAVKARVNDTSAVVRAMAVWALSRLVAPAALAEFAEQCEPETDEDVLNEWQIAGVSRCMS

SEQ ID NO: 76503 - protein, 379 aa, unidentified
  source 1..379: note = Enterobacillus tribolii
  REGION 1..379: note = tr|A0A370R117|A0A370R117_9ENTR Epoxyqueuosine reductase OS=Enterobacillus tribolii OX=1487935 GN=queG; PE = 3 SV=1
MSYPLDLNQLAQHIKQWGQSLGFQQVGICDTDLSAEEPRLQEWLDKQYHGEMAWMARHGMMRARPHELLPGTLRVISVRMNYLPAKAAFASTLKNPRLGYISRYALGRDYHKLLRNRLKKLGEMIQEHCTDTNFRPFVDSAPLLERPLAAKAGLGWVGKHSLLLNRDAGSWFFLGELLIDLPLPVDSPQGEQCGRCVACMTTCPTGAIVEPYVVDARRCISYLTIELDGAIPEEFRPLMGNRIYGCDDCQMICPWNRFSQLTDEEDFSPRRQLHTPELLTLFAWDEATFLKVTEGSAIRRIGYARWLRNISVALGNAPYEEQIFVALRARLGISAMLDEHIIWAMEQQKIKRAAQGIEVLNSQQNRLVRAVEKGLPRDA

SEQ ID NO: 76504 - protein, 379 aa, unidentified
  source 1..379: note = Enterobacter agglomerans
  REGION 1..379: note = tr|A0A4V5UJG8|A0A4V5UJG8_ENTAG Epoxyqueuosine reductase OS=Enterobacter agglomerans OX=549 GN=queG PE=3; SV = 1
MSYPLDLHQFAQQIKQWGLDLGFQQVGITDTDLSAEEPRLQAWLDKQYHGEMEWMARHGMMRARPHELLPGTLRVISVRMNYLPAKAAFASTLKNPQLGYVSRYALGRDYHKVLRNRLKKLGEMIQQQCGELNFRPFVDSAPLLERPLAAKAGLGWTGKHSLILNREAGSWFFLGELLIDIPLPVDTPQQEQCGRCVACMTICPTSAIVEPYVVDARRCISYLTIELEGAIPEEFRPLMGNRIYGCDDCQLICPWNRYGQLSDESDFSPRAALHAPELIDLFQWDEAKFLRITEGSAIRRIGHLRWLRNIAVALGNAPWSPEIVQVLEQRLGESDLLDEHILWAITQQQQKREQLVVEVQPAQQKRLVRAVEKGLPRDA

SEQ ID NO: 76505 - protein, 361 aa, unidentified
  source 1..361: note = Enterobacter agglomerans
  REGION 1..361: note = tr|A0A379AB65|A0A379AB65_ENTAG Epoxyqueuosine reductase OS=Enterobacter agglomerans OX=549 GN=queG PE=3; SV = 1
MDLGFQQVGITDTDLSAEEPRLQAWLDKQYHGEMEWMARHGMMRARPHELLPGTLRVISVRMNYLPAKAAFASTLKNPQLGYVSRYALGRDYHKVLRNRLKKLGEMIQQHCGELNFRPFVDSAPLLERPLAAKAGLGWTGKHSLILNREAGSWFFLGELLIDIPLPVDTPQQEQCGRCVACMTICPTSAIVEPYVVDARRCISYLTIELEGAIPEEFRPLMGNRIYGCDDCQLICPWNRYGQLSDESDFSPRAALHAPELIDLFQWDEAKFLRITEGSAIRRIGHLRWLRNIAVALGNAPWSPEIVQVLEQRLGESDLLDEHILWAITQQQQKREQLVVEVQPAQQKRLVRAVEKGLPRDA

SEQ ID NO: 76506 - protein, 379 aa, Enterobacter asburiae
  REGION 1..379: note = tr|A0A263VQB4|A0A263VQB4_ENTAS Epoxyqueuosine reductase OS=Enterobacter asburiae OX=61645 GN=queG PE=3; SV = 1
MSQPLDLNELAQKIKQWGAELGFQKVGITDTDLSASEPKLQAWLDKQYHGEMEWMARHGMMRARPHELLPGTLRVISVRMNYLPANAAFARTLKNPSLGYVSRYALGRDYHKLLRNRLKKLGETIQQHCVSLNFRPFVDSAPILERPIAEKAGLGWTGKHSLILSRDAGSFFFLGELLIDLPLPVDGPVEEGCGRCVACMTICPTGAIVEPYTVDARRCISYLTIELEGDIPEEFRPLIGNRIYGCDDCQLICPWNRYSQLTDEEDFSPRKALHAPQLVELFAWTEAWFLKVTEGSAIRRIGHLRWLRNVAVALGNAPWDEANIQALESRKGEHPLLDEHIEWAIAQQIEKRNACTIEVQQPKKQRLVRVIEKGLTRDA

SEQ ID NO: 76507 - protein, 379 aa, Enterobacter asburiae
  REGION 1..379: note = tr|A0A5D1YN82|A0A5D1YN82_ENTAS Epoxyqueuosine reductase OS=Enterobacter asburiae OX=61645 GN=queG PE=3; SV = 1
MSQPLDLNELAQKIKQWGAELGFQKVGITDTDLSASEPKLQAWLDKQYHGEMEWMARHGMMRARPHELLPGTLRVISVRMNYLPANAAFARTLKNPSLGYVSRYAMGRDYHKLLRNRLKKLGETIQQHCVSLNFRPFVDSAPILERPIAEKAGLGWTGKHSLILSRDAGSFFFLGELLIDLPLPVDGPVEEGCGRCVACMTICPTGAIVEPYTVDARRCISYLTIELEGAIPEEFRPLIGNRIYGCDDCQLICPWNRYSQLTDEEDFSPRKALHAPQLVELFAWTEAWFLKVTEGSAIRRIGHLRWLRNVAVALGNAPWDEANIRALESRRGEHPLLDEHIEWAIAQQIEKRNACAIEVQLPKKQRLVRVIEKGLPRDA

SEQ ID NO: 76508 - protein, 379 aa, unidentified
  source 1..379: note = Enterobacter bugandensis
  REGION 1..379: note = tr|A0A4S3SLU6|A0A4S3SLU6_9ENTR Epoxyqueuosine reductase OS=Enterobacter bugandensis OX=881260 GN=queG; PE = 3 SV=1
MSQPLDLNELAQKIKQWGAELGFQKVGITDTDLSASEPKLQAWLDKQYHGEMEWMARHGMMRARPHELLPGTLRVISVRMNYLPANAAFARTLKNPSLGYVSRYALGRDYHKLLRNRLKKLGETVQQHCDSLNFRPFVDSAPVLERPIAEKAGLGWTGKHSLILSRDAGSFFFLGELLIDLPLPVDGPVEEGCGRCVACMTICPTGAIVEPYTVDARRCISYLTIELEGAIPEEFRPLIGNRIYGCDDCQLICPWNRYSQLTDEEDFSPRKALHAPQLIELFAWTEAWFLKVTEGSAIRRIGHLRWLRNVAVALGNAPWDEANIQALESRRGEHPLLDEHIEWAIAQQIEKRNACVVEVQLPKKQRLVRVIEKGLTRDA

SEQ ID NO: 76509 - protein, 379 aa, unidentified
  source 1..379: note = Enterobacter bugandensis
  REGION 1..379: note = tr|A0A167JNJ7|A0A167JNJ7_9ENTR Epoxyqueuosine reductase OS=Enterobacter bugandensis OX=881260 GN=queG; PE = 3 SV=1
MSQPLDLNELAQKIKQWGAELGFQKVGITDTDLSASEPKLQAWLDKQYHGEMEWMARHGMMRARPHELLPGTLRVISVRMNYLPANAAFARTLKNPSLGYVSRYALGRDYHKLLRNRLKKLGETIQQHCDSLNFRPFVDSAPVLERPIAEKAGLGWTGKHSLILSRDAGSFFFLGELLIDLPLPVDGPVEEGCGRCVACMTICPTGAIVEPYTVDARRCISYLTIELEGAIPEEFRPLIGNRIYGCDDCQLICPWNRYSQLTDEEDFSPRKALHAPQLIELFAWTEAWFLKVTEGSAIRRIGHLRWLRNVAVALGNAPWDEANIQALESRRGEHPLLDEHIEWAIAQQIEKRNACVVEVQLPKKQRLVRVIEKGLARDA

SEQ ID NO: 76510 - protein, 379 aa, Enterobacter cancerogenus
  REGION 1..379: note = tr|A0A484XY30|A0A484XY30_9ENTR Epoxyqueuosine reductase OS=Enterobacter cancerogenus OX=69218 GN=yjeS; PE = 3 SV=1
MSQPLDLNQLAQKIKQWGAELGFQKVGITDTDLSASEPKLQAWLDKQYHGEMEWMARHGMMRARPHELLPGTLRVISVRMNYLPANAAFARTLKNPSLGYVSRYALGRDYHKLLRNRLKKLGETIQQHCVSLNFRPFVDSAPILERPIAEKAGLGWTGKHSLILSRDAGSFFFLGELLIDLPLPIDGPVEEGCGRCVACMTICPTGAIVEPYVVDARRCISYLTIELEGAIPEAFRPLIGNRIYGCDDCQLICPWNRYSQLTEEEDFSPRKALHAPQLIELFAWTEAWFLKVTEGSAIRRIGHLRWLRNVAVALGNAPWDEANIQALERRRGEHPLLDEHIEWAIAQQIEKRNACVVEVQLPKKQRLVRVIEKGLIRDA

SEQ ID NO: 76511 - protein, 379 aa, Enterobacter cancerogenus
  REGION 1..379: note = tr|D2ZLI7|D2ZLI7_9ENTR Epoxyqueuosine reductase; OS = Enterobacter cancerogenus ATCC 35316 OX=500639 GN=queG; PE = 3 SV=1
MSQPLDLNQLAQKIKQWGAELGFQKVGITDTDLSASEPKLQAWLDKQYHGEMEWMARHGMMRARPHELLPGTLRVISVRMNYLPANAAFARTLKNPSLGYVSRYALGRDYHKLLRNRLKKLGETIQQHCVSLNFRPFVDSAPILERPIAEKAGLGWTGKHSLILSRDAGSFFFLGELLIDLPLPIDGPVEEGCGRCVACMTICPTGAIVEPYVVDARRCISYLTIELEGAIPEAFRPLIGNRIYGCDDCQLVCPWNRYSQLTEEEDFSPRKALHAPQLIELFAWTEAWFLKVTEGSAIRRIGHLRWLRNVAVALGNAPWDEANIQALESRRGEHPLLDEHIEWAIAQQIEKRNACVVEVQLPKKQRLVRVIEKGLIRDA

SEQ ID NO: 76512 - protein, 379 aa, unidentified
  source 1..379: note = Enterobacter chengduensis
  REGION 1..379: note = tr|A0A0F4AZ12|A0A0F4AZ12_9ENTR Epoxyqueuosine reductase OS=Enterobacter chengduensis OX=2494701 GN=queG; PE = 3 SV=1
MSQPLDLNELAQKIKQWGAELGFQKVGITDTDLSASEPKLQAWLDKQYHGEMEWMARHGMMRARPHELLPGTLRVISVRMNYLPANAAFARTLKDPSLGYVSRYALGRDYHKLLRNRLKKLGETIQQHCVSLNFRPFVDSAPILERPIAEKAGLGWTGKHSLILSRDAGSFFFLGELLIDLPLPIDGPVEEGCGRCVACMTICPTGAIVEPYTVDARRCISYLTIELEGAIPEEFRPLIGNRIYGCDDCQLICPWNRYSQLTDEEDFSPRKALHAPQLVELFAWTEAWFLKVTEGSAIRRIGHLRWLRNVAVALGNAPWDEANLRALESRRGEHPLLDEHIEWAIAQQIEKRNACVVEVQLPKKQRLVRVIEKGLTRDA

SEQ ID NO: 76513 - protein, 379 aa, unidentified
  source 1..379: note = Enterobacter chuandaensis
  REGION 1..379: note = tr|A0A3A3ZCG1|A0A3A3ZCG1_9ENTR Epoxyqueuosine reductase OS=Enterobacter chuandaensis OX=2497875 GN=queG; PE = 3 SV=1
MSQPLDLNELAQKIKQWGAELGFQKVGITDTNLSASEPKLQAWLDKQYHGEMEWMARHGMMRARPHELLPGTLRVISVRMNYLPANAAFARTLKNPSLGYVSRYALGRDYHKLLRNRLKKLGETIQQHCVSLNFRPFVDSAPILERPIAEKAGLGWTGKHSLILSRDAGSFFFLGELLIDLPLPVDGPVEEGCGRCVACMTICPTGAIVEPYTVDARRCISYLTIELEGAIPEEFRPLIGNRIYGCDDCQLICPWNRYSQLTDEEDFSPRKALHAPQLIELFAWSEAWFLKVTEGSAIRRIGHLRWLRNVAVALGNAPWDVANIQALESRRGEHPLLDEHIEWAIAQQIEKRNACVVEVQLPKKQRLVRVIEKGLTRDA

SEQ ID NO: 76514 - protein, 379 aa, Enterobacter cloacae
  REGION 1..379: note = tr|A0A2T4Y494|A0A2T4Y494_ENTCL Epoxyqueuosine reductase OS=Enterobacter cloacae OX=550 GN=queG PE=3 SV=1
MSQPLDLNQLAQKIKQWGAELGFQKVGITDTDLSASEPKLQAWLDKQYHGEMEWMARHGMMRARPHELLPGTLRVISVRMNYLPANAAFARTLKNPSLGYVSRYALGRDYHKLLRNRLKKLGETIQQHCVSLNFRPFVDSAPILERPIAEKAGLGWTGKHSLILSRDAGSFFFLGELLIDLPLPVDGPVEEGCGRCVACMTICPTGAIVEPYTVDARRCISYLTIELEGAIPEEFRPLIGNRIYGCDDCQLICPWNRYSQLTDEEDFSPRKALHAPQLVELFAWSEAWFLKVTEGSAIRRIGHLRWLRNVAVALGNAPWDEANIQALESRRGEHPLLDEHIEWAVAQQIEKRNACVVEVQLPKKQRLVRVIEKGLTRDA

SEQ ID NO: 76515 - protein, 379 aa, Enterobacter cloacae
  REGION 1..379: note = tr|A0A0H3CFT0|A0A0H3CFT0_ENTCC Epoxyqueuosine reductase OS=Enterobacter cloacae subsp. cloacae (strain ATCC 13047 / DSM 30054 / NBRC 13535 / NCDC 279-56); OX = 716541 G N=queG PE=3 SV=1
MSQPLDLNQLAQKIKQWGAELGFQKVGITDTDLSASEPKLQAWLDKQYHGEMEWMARHGMMRARPHELLPGTLRVISVRMNYLPANAAFARTLKNPSLGYVSRYALGRDYHKLLRNRLKKLGETIQQHCVSLNFRPFVDSAPVLERPIAEKAGLGWTGKHSLILSRDAGSFFFLGELLIDLPLPVDGPVEEGCGRCVACMTICPTGAIVEPYTVDARRCISYLTIELEGAIPEEFRPLIGNRIYGCDDCQLICPWNRYSQLTDEEDFSPRKALHAPQLIELFAWSEAWFLKVTEGSAIRRIGHLRWLRNVAVALGNAPWDEANIRALESRRGEHPLLDEHIEWAIAQQIEKRNACVVEVQPPQKQRLVRVIEKGLPRDA

SEQ ID NO: 76516 - protein, 379 aa, unidentified
  source 1..379: note = Enterobacter genomosp.
  REGION 1..379: note = tr|A0A0X4EL00|A0A0X4EL00_9ENTR Epoxyqueuosine reductase OS=Enterobacter genomosp. O OX=2364150 GN=queG; PE = 3 SV=1
MSQPLDLNQLAQKIKQWGAELGFQKVGITDTDLSASEPKLQDWLDKQYHGEMEWMARHGMMRARPHELLPGTLRVISVRMNYLPANAAFARTLKNPSLGYVSRYALGRDYHKLLRNRLKKLGETIQQHCVSLNFRPFVDSAPIIERPIAEKAGLGWTGKHSLILSRDAGSFFFLGELLIDLPLPVDGPVEEGCGRCVACMTICPTGAIVEPYTVDARRCISYLTIELEGAIPEEFRPLIGNRIYGCDDCQLICPWNRYSQLTDEEDFSPRKALHAPQLIELFAWTEAWFLKVTEGSAIRRIGHLRWLRNIAVALGNAPWEEANIRALESRRGEHPLLDEHIEWAIAQQIEKRNACVVEVQLPKKQRLVRVIEKGLTRDA

SEQ ID NO: 76517 - protein, 379 aa, Enterobacter hormaechei
  REGION 1..379: note = tr|A0A2J0PYQ0|A0A2J0PYQ0_9ENTR Epoxyqueuosine reductase OS=Enterobacter hormaechei OX=158836 GN=queG; PE = 3 SV=1
MSQPLDLNELAQKIKQWGAELGFQKVGITDTDLSASEPKLQAWLDKQYHGEMEWMARHGMMRARPHELLPGTLRVISVRMNYLPANAAFARTLKNPSLGYVSRYALGRDYHKLLRNRLKKLGETIQQHCVSLNFRPFVDSAPILERPIAEKAGLGWTGKHSLILSRDAGSFFFLGELLIDLPLPVDGPVEEGCGRCVACMTICPTGAIVEPYTVDARRCISYLTIELEGAIPEEFRPLIGNRIYGCDDCQLICPWNRYSQLTDEEDFSPRKALHAPQLIELFAWSEAWFLKVTEGSAIRRIGHLRWLRNVAVALGNAPWDEANLQALESRRGEHPLLDEHIEWAIAQQIEKRNAGVVEVQLPKKQRLVRVIEKGLPRDV

SEQ ID NO: 76518 - protein, 379 aa, Enterobacter hormaechei
  REGION 1..379: note = tr|A0A4V7S4W5|A0A4V7S4W5_9ENTR Epoxyqueuosine reductase OS=Enterobacter hormaechei subsp. xiangfangensis; OX = 1296536 GN=queG PE=3 SV=1
MSQPLDLNELAQKIKQWGAELGFQKVGITDTDLSASEPKLQAWLDKQYHGEMEWMARHGMMRARPHELLPGTLRVISVRMNYLPANAAFARTLKNPSLGYVSRYALGRDYHKLLRNRLKKLGETIQQHCVSLNFRPFVDSAPILERPIAEKAGLGWTGKHSLILSRDAGSFFFLGELLIDLPLPVDSPVEEGCGRCVACMTICPTGAIVEPYTVDARRCISYLTIELEGAIPEEFRPLIGNRIYGCDDCQLICPWNRYSQLTDEEDFSPRKALHASQLIELFAWSEAWFLKVTEGSAIRRIGHLRWLRNVAVALGNAPWDEANLQALESRRGEHPLLDEHIEWAIAQQIEKRNAGIVEVQLPKKQRLVRVIEKGLPRDV

SEQ ID NO: 76519 - protein, 379 aa, unidentified
  source 1..379: note = Enterobacter huaxiensis
  REGION 1..379: note = tr|A0A3R9W232|A0A3R9W232_9ENTR Epoxyqueuosine reductase OS=Enterobacter huaxiensis OX=2494702 GN=queG; PE = 3 SV=1
MSQPLDLNQLAQNIKQWGAELGFQKVGITDTDLSASEPKLQAWLDKQYHGEMEWMARHGMMRARPHELLPGTLRVISVRMNYLPANAAFARTLKNPSLGYVSRYALGRDYHKLLRNRLKKLGETIQQHCVSLNFRPFVDSAPILERPIAEKAGLGWTGKHSLILSRDAGSFFFLGELLIDLPLPIDGPVEEGCGRCVACMTICPTGAIVEPYTVDARRCISYLTIELEGAIPEEFRPLIGNRIYGCDDCQLICPWNRYSQLTEEEDFSPRKALHAPQLVELFAWTEAWFLKVTEGSAIRRIGHLRWLRNVAVALGNAPWDEANIQALESRRGEHPLLDEHIEWAIAQQIEKRNACVVEVQLPKKQRLVRVIEKGLTRDA

SEQ ID NO: 76520 - protein, 379 aa, Enterobacter kobei
  REGION 1..379: note = tr|A0A5A9B5U4|A0A5A9B5U4_9ENTR Epoxyqueuosine reductase OS=Enterobacter kobei OX=208224 GN=queG PE=3 SV=1
MSQPLDLNELAQKIKQWGTELGFQKVGITDTDLSASEPKLQAWLDKQYHGEMEWMARHGMMRARPHELLPGTLRVISVRMNYLPANAAFARTLKNPSLGYVSRYALGRDYHKLLRNRLKKLGETIQQHCVSLNFRPFVDSAPILERPIAEKAGLGWTGKHSLILSRDAGSFFFLGELLIDLPLPIDGPVEEGCGRCVACMTICPTGAIVEPYTVDARRCISYLTIELEGAIPEEFRPLIGNRIYGCDDCQLICPWNRYSQLTDEEDFSPRKALHAPQLIELFAWSEAWFLKVTEGSAIRRIGHLRWLRNVAVALGNAPWDEANIQALESRRGEHPLLDEHIEWAIAQQIEKRNACVVEVQLPKKQRLVRVIEKGLTRDA

SEQ ID NO: 76521 - protein, 379 aa, Enterobacter kobei
  REGION 1..379: note = tr|A0A144XXB1|A0A144XXB1_9ENTR Epoxyqueuosine reductase OS=Enterobacter kobei OX=208224 GN=queG PE=3 SV=1
MSQPLDLNELAQKIKQWGAELGFQKVGITDTDLSASEPKLQAWLDKQYHGEMEWMARHGMMRARPHELLPGTLRVISVRMNYLPANAAFARTLKNPSLGYVSRYALGRDYHKLLRNRLKKLGETIQQHCVSLNFRPFVDSAPILERPIAEKAGLGWTGKHSLILSRDAGSFFFLGELLIDLPLPIDGPVEEGCGRCVACMTICPTGAIVEPYTVDARRCISYLTIELEGAIPEEFRPLIGNRIYGCDDCQLICPWNRYSQLTDEEDFSPRKALHAPQLIELFAWSEAWFLKVTEGSAIRRIGHLRWLRNVAVALGNAPWDEANIQALESRRGEHPLLDEHIEWAIAQQIEKRNACVVEVQLPKKQRLVRVIEKGLTRDA

SEQ ID NO: 76522 - protein, 379 aa, unidentified
  source 1..379: note = Enterobacter lignolyticus
  REGION 1..379: note = tr|E3GDC4|E3GDC4_ENTLS Epoxyqueuosine reductase; OS = Enterobacter lignolyticus (strain SCF1) OX=701347; GN = queG PE=3 SV=1
MSQPLDLNQLAQQIKQWGTELGFQQVGIADTDLSASEPKLQAWLDKQYHGEMEWMARHGMMRARPHELLPGTLRVISVRMNYLPANAAFARTLKNPALGYVSRYALGRDYHKLLRNRLKKLGEMIQEQYASLNFRPFVDSAPVLERPLAEKAGLGWTGKHSLILSRDAGSFFFLGELLIDLPLPVDSPVEEGCGRCVACMTICPTGAIVEPYTVDARRCISYLTIELEGAIPEEFRPLIGNRIYGCDDCQLICPWNRYSQLTDEDDFAPRKALHAPALIELFSWSEAWFLKVTEGSAIRRIGHLRWLRNIAVALGNAPWDDANIQALESRKGEHPLLDEHIDWALAQQIEKRNACVVEVQLPQKQRLVRVIEKGLPRDA

SEQ ID NO: 76523 - protein, 395 aa, Enterobacter ludwigii
  REGION 1..395: note = tr|G8LII2|G8LII2_9ENTR Epoxyqueuosine reductase; OS = Enterobacter ludwigii OX=299767 GN=yjeS PE=3 SV=1
MECGILSGFFFTVWSVMSQPLDLNELAQKIKQWGAELGFQKVGITDTDLSASEPKLQAWLDKQYHGEMEWMARHGMMRARPHELLPGTLRVISVRMNYLPANAAFARTLKNPALGYVSRYALGRDYHKLLRNRLKKLGETIQQHCVSLNFRPFVDSAPVLERPIAEKAGLGWTGKHSLILSRDAGSFFFLGELLIDLPLPVDGPVEEGCGRCVACMTICPTGAIVEPYTVDARRCISYLTIELEGAIPEEFRPLIGNRIYGCDDCQLICPWNRYSQLTDEDDFSPRKALHAPQLIELFAWSEAWFLKVTEGSAIRRIGHLRWLRNVAVALGNAPWDEANIQALESRRGEHPLLDEHIEWAIAQQIEKRNACVVEVQLPKKQRLVRVIEKGLVRDA

SEQ ID NO: 76524 - protein, 379 aa, Enterobacter ludwigii
  REGION 1..379: note = tr|A0A5A9AQM6|A0A5A9AQM6_9ENTR Epoxyqueuosine reductase OS=Enterobacter ludwigii OX=299767 GN=queG PE=3; SV = 1
MSQPLDLNELAQKIKQWGAELGFQKVGITDTDLSASEPKLQAWLDKQYHGEMEWMARHGMMRARPHELLPGTLRVISVRMNYLPANAAFARTLKNPALGYVSRYALGRDYHKLLRNRLKKLGETIQQHCVSLNFRPFVDSAPVLERPIAEKAGLGWTGKHSLILSRDAGSFFFLGELLIDLPLPVDGPVEEGCGRCVACMTICPTGAIVEPYTVDARRCISYLTIELEGAIPEEFRPLIGNRIYGCDDCQLICPWNRYSQLTDEDDFSPRKALHAPQLIELFAWSEAWFLKVTEGSAIRRIGHLRWLRNVAVALGNAPWDEANIQALESRRGEHPLLDEHIEWAIAQQIEKRNACVVEVQLPKKQRLVRVIEKGLVRDA

SEQ ID NO: 76525 - protein, 379 aa, Enterobacter mori
  REGION 1..379: note = tr|A0A2J0NW88|A0A2J0NW88_9ENTR Epoxyqueuosine reductase OS=Enterobacter mori OX=539813 GN=queG PE=3 SV=1
MSQPLDLNQLAQNIKQWGAELGFQKVGITDTDLSASEPKLQAWLDKQYHGEMEWMARHGMMRARPHELLPGTLRVISVRMNYLPANAAFARTLKNPSLGYVSRYALGRDYHKLLRNRLKKLGEMIQQHCVSLNFRPFVDSAPILERPIAEKAGLGWTGKHSLILSRDAGSFFFLGELLIDLPLPVDGPVEEGCGRCVACMTICPTGAIVEPYTVDARRCISYLTIELEGAIPEEFRPLIGNRIYGCDDCQLICPWNRYSQLTDEEDFSPRKALHAPPLIELFAWTEAWFLKVTEGSAIRRIGHLRWLRNVAVALGNAPWDEANIQALESRRGEHPLLDEHIEWAVAQQIEKRNACVVEVQLPKKQRLVRVIEKGLTRDA

SEQ ID NO: 76526 - protein, 78 aa, Enterobacter mori
  REGION 1..78: note = tr|A0A2U2NDN3|A0A2U2NDN3_9ENTR Epoxyqueuosine reductase (Fragment) OS=Enterobacter mori OX=539813; GN = DEM28_29520 PE=4 SV=1
MITNIPFEPDVPIEDMCGSCTKCLDACPTGALVNPGQLNAQRCISFLTQTKGFLPDEFRTKIGNRLYGCDTCQTVCPL

SEQ ID NO: 76527 - protein, 379 aa, unidentified
  source 1..379: note = Enterobacter roggenkampii
  REGION 1..379: note = tr|A0A384GMW0|A0A384GMW0_9ENTR Epoxyqueuosine reductase OS=Enterobacter roggenkampii OX=1812935 GN=queG; PE = 3 SV=1
MSQPLDLNELAQKIKQWGAELGFQKVGITDTDLSASEPKLQAWLDKQYHGEMEWMARHGMMRARPHELLPGTLRVISVRMNYLPANAAFARTLKDPSLGYVSRYALGRDYHKLLRNRLKKLGETIQQHCVSLNFRPFVDSAPILERPIAEKAGLGWTGKHSLILSRDAGSFFFLGELLIDLPLPVDGPVEEGCGRCVACMAICPTGAIVEPYTVDARRCISYLTIELEGAIPEEFRPLIGNRIYGCDDCQLICPWNRYSQLTDEEDFSPRKALHAPPLAELFAWTEAWFLKVTEGSAIRRIGHLRWLRNVAVALGNAPWDEANIRALESRRGEHPLLDEHIEWAIAQQVEKRNACVVEVQLPKKQRLVRVIEKGLPRDA

SEQ ID NO: 76528 - protein, 379 aa, unidentified
  source 1..379: note = Enterobacter roggenkampii
  REGION 1..379: note = tr|A0A0F1DA05|A0A0F1DA05_9ENTR Epoxyqueuosine reductase OS=Enterobacter roggenkampii OX=1812935 GN=queG; PE = 3 SV=1
MSQPLDLNELAQKIKQWGAELGFQKVGITDTDLSASEPKLQAWLDKQYHGEMEWMARHGMMRARPHELLPGTLRVISVRMNYLPANAAFARTLKDPSLGYVSRYALGRDYHKLLRNRLKKLGETIQQHCVSLNFRPFVDSAPILERPIAEKAGLGWTGKHSLILSRDAGSFFFLGELLIDLPLPVDGPVEEGCGRCVACMTICPTGAIVEPYTVDARRCISYLTIELEGAIPEEFRPLIGNRIYGCDDCQLICPWNRYSQLTDEEDFSPRKALHAPPLAELFAWTEAWFLKVTEGSAIRRIGHLRWLRNVAVALGNAPWDEANIRALESRRGEHPLLDEHIEWAIAQQVEKRNACVVEVQLPKKQRLVRVIEKGLPRDA

SEQ ID NO: 76529 - protein, 379 aa, unidentified
  source 1..379: note = Enterobacter sichuanensis
  REGION 1..379: note = tr|A0A0F1BEA6|A0A0F1BEA6_9ENTR Epoxyqueuosine reductase OS=Enterobacter sichuanensis OX=2071710 GN=queG; PE = 3 SV=1
MSQPLDLNQLAQKIKQWGAELGFQKVGITDTDLSASEPKLQAWLDKQYHGEMEWMARHGMMRARPHELLPGTLRVISVRMNYLPANAAFARTLKNPSLGYVSRYALGRDYHKLLRNRLKKLGETIQQHCVSLNFRPFVDSAPILERPIAEKAGLGWTGKHSLILSRDAGSFFFLGELLIDLPLPVDGPVEEGCGRCVACMTICPTGAIVEPYTVDARRCISYLTIELEGAIPEEFRPLIGNRIYGCDDCQLICPWNRYSQLTDEEDFSPRKALHAPQLIELFAWTEAWFLKVTEGSAIRRIGHLRWLRNVAVALGNAPWDEANIRALESRRGEHPLLDEHIDWAIAQQIEKRNACVVEVQLPQKQRLVRVIEKGLTRDA

SEQ ID NO: 76530 - protein, 379 aa, Enterobacter soli
  REGION 1..379: note = tr|A0A198GUJ1|A0A198GUJ1_9ENTR Epoxyqueuosine reductase OS=Enterobacter soli ATCC BAA-2102 OX=1354262; GN = queG PE=3 SV=1
MSQPLDLNQLAQKIKQWGAELGFQKVGITDTDLSASEPKLQAWLDKQYHGEMEWMARHGMMRARPHELLPGTLRVISVRMNYLPANAAFARTLKNPSLGYVSRYALGRDYHKLLRNRLKKLGETIQQHCVSLNFRPFVDSAPILERPIAEKAGLGWTGKHSLILSRDAGSFFFLGELLIDLPLPVDGPVEEGCGRCVACMTICPTGAIVEPYTVDARRCISYLTIELEGAIPEEFRPLIGNRIYGCDDCQLICPWNRYSQLTDEEDFSPRKALHAPQLIELFAWTEAWFLKVTEGSAIRRIGHLRWLRNVAVALGNAPWDEANVQALESRRGEHPLLDEHIEWAIAQQIEKRNACVVEVQLPKKQRLVRVIEKGLTRDA

SEQ ID NO: 76531 - protein, 55 aa, Enterobacter sp.
  REGION 1..55: note = tr|A0A3D2B3I6|A0A3D2B3I6_9ENTR tRNA epoxyqueuosine(34) reductase QueG (Fragment); OS = Enterobacter sp. OX=42895 GN=DE191_02385 PE=4 SV=1
MSQPLDLNQLAQNIKQWGAELGFQHVGITDTDLSASEPKLQAWLDNQYHGEMEWM

SEQ ID NO: 76532 - protein, 369 aa, Enterobacter sp.
  REGION 1..369: note = tr|A0A4S5BUA5|A0A4S5BUA5_9ENTR Epoxyqueuosine reductase OS=Enterobacter sp. Z1 OX=2561927 GN=queG PE=3; SV = 1
MASSTPSEKSLDKIELQQLDPQELKTWIKAQALDLGFSDCVIAKPDAQDQMPHFKEYLERGYHADMHYLEENLEKRANPTLLVPGTKSIICVRMNYLVASPQPRYVPFEPNSAIIARYARGRDYHKVMRGRLKTLASQIKEKVGDFESRPFADSAPIFEKSLAESAGMGWTGKHTLLIHKKSGSFFVLGELFTSLELPFDQPATAHCGSCTACIDICPTQAIVEPYMLDARKCIAYLTIEYKGIIPEELRQGIGNRIFGCDDCQLICPWNSFAKMATIPDFDARHGLDNISLLDIWQWDEATFLANTEGSPIRRTGYQSFKRNIAIGLGNAPYSVDVVTQLQEAKPLHDEIVNVHIDWAIEQQLQRANV

SEQ ID NO: 76533 - protein, 395 aa, unidentified
  source 1..395: note = Enterobacterales bacterium
  REGION 1..395: note = tr|A0A389M7S8|A0A389M7S8_9GAMM Epoxyqueuosine reductase OS=Enterobacterales bacterium OX=1993870 GN=queG; PE = 3 SV=1
MTLPLDLIQLAQLIKQWGQSFGFQQVGICDTDLSAEEPKLQAWLDNQYHGEMEWMARHGMLRARPHELLPGTLRVISVRMNYLPAKAAFAKTLNNPELGYVSRYALGRDYHKLLRQRLKKLGDKIQAYCTEHTDSQTIDGQEKHGTEITFRPFVDSAPIMERPLAAKAGIGWVGKHSLILNREAGSWFFLGELLIDLPLPVDQPQEEKCGKCVACITTCPTGAIVAPYTVDARRCISYLTIELEGAIPEEFRPLMGNRIYGCDDCQLICPWNRYSQLTDEADFSPRDALHAPELIELFAWSEEKFLRITEGSPIRRIGHLRWLRNISIALGNAPYAENVLLALQRRQGENSLLDEHIEWAIAEQRKRRDENRVEVQSSQTKRLIRAVEKGLPRDA

SEQ ID NO: 76534 - protein, 379 aa, unidentified
  source 1..379: note = Enterobacterales bacterium
  REGION 1..379: note = tr|A0A2I0FVI5|A0A2I0FVI5_9GAMM Epoxyqueuosine reductase OS=Enterobacterales bacterium CwR94 OX=2025587; GN = queG PE=3 SV=1
MSHPLDLISLATQIKQWGQELGFQQVGICDTDLSLEEPKLQAWLDKQYHGEMDWMARHGMMRARPHELLPGTLRVISVRMNYLPAKAAFASTLKNARLGYVSRYALGRDYHKVLRNRLKQLGDRIRDHCGALNYRPFVDSAPLLERPLAQKAGLGWTGKHSLILNRDAGSWFFLGELLIDLPLPVDTPQEEQCGRCVACLTICPTGAIVEPYVVDARRCISYLTIELEGAIPEALRPLIGNRIYGCDDCQLICPWNRYSQLSDEDDFSPRRVLHAPELTELFSWDEARFLKVTEGSAIRRIGHLRWLRNIAVAMGNAPWDSTIFEALHRRLGEHPLLDEHIHWAIAQQQQRRSDSAIEVQQAQQKRLIRAVEKGLPRDA

SEQ ID NO: 76535 - protein, 175 aa, unidentified
  source 1..175: note = Enterobacteriaceae bacterium
  REGION 1..175: note = tr|A0A3C0H0N5|A0A3C0H0N5_9ENTR tRNA epoxyqueuosine(34) reductase QueG (Fragment); OS = Enterobacteriaceae bacterium OX=1849603 GN=queG PE=4; SV = 1
MSQPLDLTLLAQKIKQWGTELGFQHVGITDTDLSPHEPALQAWLDKQYHGEMEWMARHGMMRARPHELLPGTLRVISVRMNYLPADAAFARTLKDPSLGYISRYALGRDYHKLMRNRLKKLGETIQAQYASLNFRPFVDSAPVLERPLAAKAGLGWTGKHSLILDRNAGSFFFLG

SEQ ID NO: 76536 - protein, 379 aa, unidentified
  source 1..379: note = Enterobacteriaceae bacterium
  REGION 1..379: note = tr|A0A2S0VEF0|A0A2S0VEF0_9ENTR Epoxyqueuosine reductase OS=Enterobacteriaceae bacterium S05 OX=2052938; GN = queG PE=3 SV=1
MSQPLDLVQLAQQIKQWGTELGFQQVGIADTDLSASEPKLQAWLDKQYHGEMEWMARHGMMRARPHELLPGTLRVISVRMNYLPANAAFARTLKDPALGYVSRYALGRDYHKLLRNRLKKLGEKIQEQCASLNFRPFVDSAPILERPIAEKAGLGWTGKHSLILSRDAGSFFFLGELLIDLPLPVDSPVAEECGRCVACMTICPTGAIVEPYTVDARRCISYLTIELEGAIPEEFRPLIGNRIYGCDDCQLICPWNRFSQLTDEEDFSPRQALHAPPLVELFAWSEAWFLKVTEGSAIRRIGHLRWLRNIAVALGNAPWDEAHLRALESRLGEHPLLDEHIEWAMAQQLKKRSADAVEVQLPKKLRLVRVVEKGLPRDA

SEQ ID NO: 76537 - protein, 388 aa, Enterococcus aquimarinus
  REGION 1..388: note = tr|A0A1L8QXQ6|A0A1L8QXQ6_9ENTE Iron-sulfur cluster-binding protein OS=Enterococcus aquimarinus; OX = 328396 GN=RU93_GL000195 PE=4 SV=1
MLDLLSLKEKIIQKSKELGIDKIGFATAEPFDHLKESLMEQKEKGFTSGFEHQNIDERLYPELTFEQPKSIISIALAYPNKFHGEVPRDVKRGQFARASWGEDYHSILQDRLKKLVAYIESEASSEEEKNKWRFSPQVDTGEYVDVAVAQRAGLGFIGLNGLLITKEFGSFVYLGEITTNIQFEPDEPVPNGCGDCTRCITACPTKALLGDGRMNAKLCLSYQTQTKGMMPREFRKKTRNVLYGCDICQLVCPYNQGIDSHFHPEMEPIVDEVFPKLEPILTLSNREFKAQFGRLAGSWRGKKPLQRNALIALANLGGRESLPAIINCLDDPRPVIRGTAVWAITELTKRDPKETIGLFEQLQVKETDPEVLLEITEAFETFKNPRRK

SEQ ID NO: 76538 - protein, 384 aa, Enterococcus asini
  REGION 1..384: note = tr|A0A413AKI4|A0A413AKI4_9ENTE tRNA epoxyqueuosine(34) reductase QueG OS=Enterococcus asini; OX = 57732 GN=queG PE=4 SV=1
MTSLKEQIIAESRRLGIDKIGFTTAMPFTELEEPLNRQRELGHNSGFEHQNIPERIYPELTFEGPQSIIAIALAYPTKIREEIPKDEKRGMFARASWGVDYHQILAEKMQQLVAFIETLQAPDEETWRFAPQVDTGEFVDVAVAQRAGLGFVGRNGLLITKEYGSFVYLGEIVTNIALEPDEPGVFGCGDCTRCIKACPTQALLGDGSMNAQRCLSYQTQTKGVMPEEYRKKIRNVIYGCDICQLVCPYNQDKDFHFHQEMEPAVDEVYPKLRPMLKLSNKEFKQQFGHLAGAWRGKKPLQRNAIIALANTGDKESLPLLWELVQEDPRPVIRATALWSISRLGKKDAALWQERLAQQQAQEKDPEVLQAYQEALAVFEKKLRP

SEQ ID NO: 76539 - protein, 386 aa, Enterococcus asini
  REGION 1..386: note = tr|R2PIE3|R2PIE3_9ENTE Iron-sulfur cluster-binding protein OS=Enterococcus asini ATCC 700915 OX=1158606; GN = UAS_02472 PE=4 SV=1
MALQTLKEQIIAESRRLGIDKIGFTTAMPFTELEEPLNRQRELGHNSGFEHQNIPERIYPELTFEGPQSIIAIALAYPTKIREEIPKDEKRGMFARASWGVDYHQILAEKMQQLVAFIETLQAPDAETWRFAPQVDTGEFVDVAVAQRAGLGFVGRNGLLITKEYGSFVYLGEIVTNIALEPDEPGVFGCGDCTRCIKACPTQALLGDGSMNAQRCLSYQTQTKGVMPEEYRKKIRNVIYGCDICQLVCPYNQDKDFHFHQEMEPAVDEVYPKLRPMLKLSNKEFKQQFGHLAGAWRGKKPLQRNAIIALANTGDKESLPLLWELVQEDPRPVIRATALWSISRLGKKDAALWQERLTQRQAQEKDPEVLQAYQEALAVFEKKLHP

SEQ ID NO: 76540 - protein, 380 aa, Enterococcus avium
  REGION 1..380: note = tr|A0A564T764|A0A564T764_ENTAV Epoxyqueuosine reductase OS=Enterococcus avium OX=33945 GN=queG PE=3 SV=1
MQTLKERIIAESKQLGIDKIGFTTADSFDYMEESLLEQRALGHTSGFEHQNIKERLYPEETFENPKSIIAIALAYPTKIHDKVPRDEKRGQFARASWGTDYHFILEERLTRLIDFIKEQAETEQVQAQWRFAPQVDTGELVDVAVAQRAGLGFIGRNGLLITEEYGSFVYLGEIITNIQFEPDQPVPNGCGDCTRCITGCPTGALLGDGRMNAKKCLSYQTQTKGMMPEQYRKKMRNVIYGCDICQLVCPYNRGKDFHFHEEMEPKVDEVHPKLAPLLSISNREFKEQFGHLAGSWRGKKPLQRNALIALANLGGKEALPEIQACLQDQRPVIRGTAVWALGQLTKKAPEETIGLLQELKDTETDSEVLTEIANVLEKLG

SEQ ID NO: 76541 - protein, 380 aa, Enterococcus avium
  REGION 1..380: note = tr|S0SG85|S0SG85_ENTAV Epoxyqueuosine reductase; OS = Enterococcus avium ATCC 14025 OX=1140002 GN=queG PE=3; SV = 1
MQTLKERIIAESKQLGIDKIGFTTADPFDYMEESLLEQRALGHTSGFEHQNIKERLYPEETFEDPKSIIAIALAYPTKIHDKVPRDEKRGQFARASWGTDYHFILEERLTRLIDFIKEQAETEQVQAQWRFAPQVDTGELVDVAVAQRAGLGFIGRNGLLITEEYGSFVYLGEIITNIQFEPDQPVPNGCGDCTRCITGCPTGALLGDGRMNAKKCLSYQTQTKGMMPEQYRKKMRNVIYGCDICQLVCPYNRGKDFHFHEEMEPKVDEVHPKLAPLLSISNREFKEQFGHLAGSWRGKKPLQRNALIALANLGGKEALPEIQACLQDQRPVIRGTAVWALGQLTKKAPEETIGLLQELKETETDSEVLTEIANVLERLS

SEQ ID NO: 76542 - protein, 381 aa, Enterococcus caccae
  REGION 1..381: note = tr|R3WS13|R3WS13_9ENTE Iron-sulfur cluster binding protein OS=Enterococcus caccae ATCC BAA-1240 OX=1158612; GN = UC7_02158 PE=4 SV=1
MTLKQKIIAESKRLGIDKIGFASAEPFYELEDSLKEQRERGFNSGFEHQVIEERVYPEKTFENPKTIISIALAYPTKIEGKVPRDEKRGMFARASWGIDYHDVLRDRLAKLIEFIQSQAQSLEETEAWRFAPQVDTGELVDVAVAQRAGLGFIGRNGLLITEEFGSFVYLGEIVTNIDFEVDKPVPFGCGDCTRCVTACPTQALLGNGSMNAKKCLSYQTQTKDMMPEEYRKKMHNVIYGCDICQLVCPYNRGKDFHFHQEMEPEVDTVYPKLKPMLSISNKEFKETFGHLSGSWRGKKPLQRNALIALANLGDRSALPEIYVCATEDVRPVIRGTAAWAIGKLGNKEAEKWLGVLNELLKVEPEEEVLEEIRNAIKQLEK

SEQ ID NO: 76543 - protein, 348 aa, Enterococcus canis
  REGION 1..348: note = tr|A0A1L8RE33|A0A1L8RE33_9ENTE Iron-sulfur cluster-binding protein OS=Enterococcus canis OX=214095; GN = RU97_GL002067 PE=4 SV=1
MEDSLKEQKAAGHTSGFEHQVLEERLYPEKIFSQPRTIIAIALAYPTKLSQPVKKGRVKRGQFARASWGLDYHTILREKMAELITAIKELVPETTFKPMVDTGELIDVAVAQRAGLGFIGRNGLLITPEFGSYVYLGEIITNLALPPDEPQENQCGTCTRCIDFCPPQALLGDGRLNAPRCLSYQTQTKGFMAEEFRPMIKNVIYGCDICQQVCPFNKGKDFHFHPEMEPVVEEVMPELQPLLTISNREFKERFGRLAGSWRGKKPLQRNAIIALANTRDRSAIPALLAAMEDTRPVIRGTAAWAIATITRQSNQELVTFMAEKLQQETDEEAAQEISQALARLKETL

SEQ ID NO: 76544 - protein, 391 aa, Enterococcus casseliflavus
  REGION 1..391: note = tr|A0A377KZ00|A0A377KZ00_ENTCA Iron-sulfur cluster-binding protein OS=Enterococcus casseliflavus; OX = 37734 GN=queG PE=4 SV=1
MSLKEKIIAESKRLGIDKIGFASAEPFLALEPSLREQKAKGHTSGFEHPVIEERIYPERTFENPQTIIAIALAYPTKIKEKVPRDEKRGMFARASWGIDYHDILRERLDRLIAFIKEQAQTMEEQVKWRFAPQVDTGELVDVAAAQRAGLGFIGRNGLLITEEFGSFVYLGEIVTNISLEPDEEVPFGCGDCMRCVTACPTKALLGDGRMNAQRCLSYQTQTKGMMPEEYRKKMHNVIYGCDICQLVCPYNRGKDFHFHQEMEPEVDTVYPKLQPMLSLSNKAFKEQFGHLSGSWRGKKPLQRNAIIALANVGDRSALPAIWRCATEDVRPVIRGTAYWAIGQLGVKEPEMWLERLQRCAELEPEEEAQQELQPAIERLQAVITKKQEKEL

SEQ ID NO: 76545 - protein, 391 aa, Enterococcus casseliflavus
  REGION 1..391: note = tr|C9ABH3|C9ABH3_ENTCA Iron-sulfur cluster-binding protein OS=Enterococcus casseliflavus EC20 OX=565655; GN = ECBG_02501 PE=4 SV=1
MSLKEKIIAESKRLGIDKIGFASAEPFLALEPSLREQKAKGHTSGFEHPVIEERIYPERTFENPQTIIAIALAYPTKIKEKVPRDEKRGMFARASWGIDYHDILRERLDRLIAFIKEQAQTMEEQVEWRFAPQVDTGELVDVAAAQRAGLGFIGRNGLLITEEFGSFVYLGEIVTNISLEPDEEVPFGCGDCMRCVTACPTKALLGDGRMNAQRCLSYQTQTKGMMPEEYRKKMHNVIYGCDICQLVCPYNRGKDFHFHQEMEPEVDTVYPKLQPMLSLSNKAFKEQFGHLSGSWRGKKPLQRNAIIALANVGDRSALPAIWRCATEDVRPVIRGTAYWAIGQLGVKEPEMWVERLQRCAELEPEEEAQQELQPAIERLQAVITKKQEKEL

SEQ ID NO: 76546 - protein, 391 aa, Enterococcus durans
  REGION 1..391: note = tr|A0A367CI64|A0A367CI64_9ENTE Epoxyqueuosine reductase OS=Enterococcus durans OX=53345 GN=EA71_00512; PE = 4 SV=1
MTKTLKDEIIEESKRLGIDKIGFTTAEPFDHLKESLESQKAAGHTSGFEHPVIDERLYIEKTFESPQSIISIALAYPTKIHEEVPKDEKRGQFARASWGVDYHDILRDRLNKLIDFIKTRAAVWQQEDAWRFAPQVDTGELIDVAVAQRAGLGFIGRNGLLITEEYGSFVYLGEVVTNIQFEPDEPGVFGCGDCTRCITACPTKALLGDGRMNAQRCLSYQTQTKGLMPEEYRKKMRNVIYGCDICQLVCPYNRGKDFHFHDEMEPKVDEVYPKLKPMLQLSNKEFNAQFGHLAGSWRGKKPLQRNALIALANLGDTSALPEIEKCLTDIRPVIRATAAWAIGRLGRKEPKKWIETLEVVDQKEDNEEVSIEIAQAITMLQKKNKEKRPNS

SEQ ID NO: 76547 - protein, 391 aa, Enterococcus durans
  REGION 1..391: note = tr|A0A377KKL3|A0A377KKL3_9ENTE Iron-sulfur cluster-binding protein OS=Enterococcus durans OX=53345; GN = queG PE=4 SV=1
MTKTLKDEIIEESNRLGIDKIGFTTAEPFDHLKESLESQKAAGHTSGFEHPVIDERLYIEKTFESPQSIISIALAYPTKIHEEVPKDEKRGQFARASWGVDYHDILRDRLNKLIDFIKTRAAVWQQEDAWRFAPQVDTGELIDVAVAQRAGLGFIGRNGLLITEEYGSFVYLGEVVTNIQFEPDEPGVFGCSDCTRCITACPTKALLGDGRMNAQRCLSYQTQTKGLMPEEYRKKMRNVIYGCDICQLVCPYNRGKDFHFHDEMEPKVDEVYPKLKPMLQLSNKEFNAQFGHLAGSWRGKKPLQRNALIALANLGDTSALPEIEKCLTDVRPVIRATAAWAIGRLGRKEPKKWIETLEVVDQKEDNEEVSIEIAQAITMLQKKNKEKRPNS

SEQ ID NO: 76548 - protein, 389 aa, Enterococcus faecalis
  REGION 1..389: note = sp|Q834R1|QUEG_ENTFA Epoxyqueuosine reductase; OS = Enterococcus faecalis (strain ATCC 700802 / V583); OX = 226185 GN=queG PE=3 SV=1
MPTLKEKIIQESQRLGIDKIGFTHAEPFIELEDSLHEQRERGYNSGFEHQNVEERIYPEKTFEHPKSIISIALAYPTKAQEKMPRDEKRGQFARASWGIDYHHILQDRLQKLIAFIEEQAATEAEKEHWRFRPQVDTGEYVDTAVAQRAGLGFIGKNGLLITEEFGSFVYLGEVTTNIQFEPDEPVPNGCGDCTRCITGCPTGALLGDGRMNAQKCLSYQTQTKGMMPEDYRKKMRNVIYGCDICQLVCPYNKGKDFHFHEEMEPKIEEVYPKLAPLLTISNKEFKQQFGHLAGSWRGKKPLQRNALIALANLGGREAIPQIILCLNDQRPVIRGTAAWSLGQLAKREPEQSLEALNYLLSVETEEEVIEEAQKAIHLLTSKKGSRSTE

SEQ ID NO: 76549 - protein, 389 aa, Enterococcus faecalis
  REGION 1..389: note = tr|S4FCB8|S4FCB8_ENTFL Epoxyqueuosine reductase; OS = Enterococcus faecalis WKS-26-18-2 OX=1244144 GN=queG; PE = 3 SV=1
MPTLKEKIIQESQRLGIDKIGFTHAEPFIELEDSLHEQRERGYNSGFEHQNVEERIYPEKTFEHPKSIISIALAYPTKAQEKMPRDEKRGQFARASWGIDYHHILQDRLQKLIAFIEEQAATEAEKEHWRFRPQVDTGEYVDTAVAQRAGLGFIGKNGLLITEEFGSFVYLGEVTTNIQFEPDEPVPNGCGDCTRCITGCPTGALLGDGRMNAQKCLSYQTQTKGMMPEEYRKKMRNVIYGCDICQLVCPYNKGKDFHFHEEMEPKIEEVYPKLAPLLTISNKEFKQQFGHLAGSWRGKKPLQRNALIALANLGGREAIPQIILCLNDQRPVIRGTAAWSLGQLAKREPEQSLEALNYLLSVETEEEVIEEAQKAIHLLTSKKGSRSTE

SEQ ID NO: 76550 - protein, 383 aa, Enterococcus faecium
  REGION 1..383: note = tr|Q3Y2A2|Q3Y2A2_ENTFD 4Fe-4S cluster-binding protein OS=Enterococcus faecium (strain ATCC BAA-472 / TX0016 / DO) OX=333849 GN=HMPREF0351_10502 PE=4 SV=1
MTLKEEIIQESKRLGIDKIGFTTAEPFDSLKESLEEQKAAGHTSGFEHPNIDERLYPEMTFDQPKSIISIALAYPTRIHEEVPRDEKRGQFARASWGIDYHDILRDRLNRLIEFIQTRAEKWQKEEEWRLAPQVDTGELIDVAVAQRAGLGFIGRNGLLITEEFGSFVYLGEIVTNIVFEPDKPGEFGCGDCMRCVTACPTKALLGDGRMNAQRCLSYQTQTKGMMPEEYRKKMRNVIYGCDICQLVCPYNQGKDFHFHEEMEPKVDEIYPKLKPMLSMSNKDFKQQFGHLAGSWRGKKPLQRNALIALANLGDRTALPEISECLTDVRPVIRGTAAWAIGRLGTKEPEKWLDVLDEILAKETEEVVINELEHAQKLLRRKLK

SEQ ID NO: 76551 - protein, 383 aa, Enterococcus faecium
  REGION 1..383: note = tr|J9A935|J9A935_ENTFC Putative iron-sulfur cluster-binding protein OS=Enterococcus faecium TX1337RF; OX = 1134802 GN=HMPREF1345_00035 PE=4 SV=1
MTLKEEIIQESKRLGIDKIGFTTAEPFDSLKESLEEQKAAGHTSGFEHPNIDERLYPEMTFDQPKSIISIALAYPTRIHEEVPRDEKRGQFARASWGIDYHDILRDRLNRLIEFIQTRAEKWQKEEEWRLAPQVDTGELIDVAVAQRAGLGFIGRNGLLITEEFGSFVYLGEIVTNIVFEPDKPGEFGCGDCMRCVTACPTKALLGDGRMNAQRCLSYQTQTKGMMPEEYRKKMRNVIYGCDICQLVCPYNQGKDFHFHEEMEPKIDEVYPKLKPMLSMSNKNFKQQFGHLAGSWRGKKPLQRNALIALANLGDRTALPEISECLTDVRPVIRGTAAWAIGRLGTKEPEKWLDVLDETLAKESEEVVINELEHAQKLLRRKLK

SEQ ID NO: 76552 - protein, 380 aa, unidentified
  source 1..380: note = Enterococcus florum
  REGION 1..380: note = tr|A0A4P5PBY9|A0A4P5PBY9_9ENTE Epoxyqueuosine reductase OS=Enterococcus florum OX=2480627 GN=NRIC_31670; PE = 4 SV=1
MSLKERIIAESQRLGIDKIGFASAEPFTELEASLREQKARGYTSGFEHPVIEERIYPEKTFEQPKTIISIALAYPTKARETVPKDEKRGMFARASWGIDYHDILRDRLNRLIDFIQTEAKTRQESENWRFAPQVDTGELLDVSVAQRAGLGFIGRNGLLITEEFGSFVYLGEIITNIEFEVDDPIPFGCGDCMRCINGCPTKALLGDGRMNAQRCLSYQTQTKGMMPDEYRKKMRNVIYGCDICQLVCPYNQGKDVHFHEEMEPEIDTVYPKLKPMLQLSNKEFNKQFGHLAGSWRGKKPLQRNAIIALANLGDRSALSEIFQVAKDDVRPVLRGTAAWAIGRLGKKEAEKWLASLQELKEQEQDEAALLEIEKALEMLE

SEQ ID NO: 76553 - protein, 396 aa, Enterococcus gallinarum
  REGION 1..396: note = tr|A0A366U3Q2|A0A366U3Q2_ENTGA Epoxyqueuosine reductase OS=Enterococcus gallinarum OX=1353 GN=queG PE=4; SV = 1
MSLKEKIIAESKRLGIDKIGFASAEPFYELESSLREQRAKGHTSGFEHQVIEERIYPERTFENPQTIIAIALAYPTKIKEKVPRDEKRGMFARASWGIDYHDILRDRLEKLIQFIKAQAENLEEAESWRFAPQVDTGELVDVAVAQRAGLGFIGRNGLLITEEFGSFVYLGEIVTNISFETDEAVPFGCGDCMRCVTACPTKALLGDGRMNAQRCLSYQTQTKGMMPEEYRKKMHNVIYGCDICQLVCPYNRGKDFHFHQEMEPEVETVYPKLQPMLSLSNKAFKNQFGHLSGSWRGKKPLQRNAIIALANLGDRTALPAIWRCATEDVRPVIRGTAYWAIGQLGIKEPEQWLERLQQCEELEPEEEARVELQAAIERLKTIVASSGADRKNKSVD

SEQ ID NO: 76554 - protein, 396 aa, Enterococcus gallinarum; identical to SEQ ID NO: 76553
  REGION 1..396: note = tr|C9A361|C9A361_ENTGE Iron-sulfur cluster-binding protein OS=Enterococcus gallinarum (strain EG2) OX=565653; GN = EGBG_02630 PE=4 SV=1

SEQ ID NO: 76555 - protein, 380 aa, Enterococcus gilvus
  REGION 1..380: note = tr|A0A345FWV0|A0A345FWV0_9ENTE tRNA epoxyqueuosine(34) reductase QueG OS=Enterococcus gilvus; OX = 160453 GN=queG PE=4 SV=1
MQTLKERIIAESKQLGIDKIGFTTAEPFDYLEESLLEQRSLGHTSGFEHQNIKERLYPEETFEDPKSIIAIALAYPTKIHEKVPRDEKRGQFARASWGTDYHFILEERLTKLIAFIKEQAETEQLQAEWRFAPQVDTGELVDVAVSQRAGLGFIGRNGLLITEEYGSFVYLGEIITNIQFEPDQPVPNGCGDCTRCITGCPTGALLGDGRMNAKKCLSYQTQTKGMMPEQYRKKMRNVIYGCDICQLVCPYNRGKDFHFHEEMEPKVDEVYPKLTPLLTISNREFKEQFGHLAGSWRGKKPLQRNALIALANLGGREALPEIRDCLQDQRPVIRGTAVWALGQLTKKAPDETIRLLQELKETETDSEVLTEIADVLERLG

SEQ ID NO: 76556 - protein, 380 aa, Enterococcus gilvus
  REGION 1..380: note = tr|R2XU96|R2XU96_9ENTE Epoxyqueuosine reductase; OS = Enterococcus gilvus ATCC BAA-350 OX=1158614 GN=queG; PE = 3 SV=1
MQTLKERIIAESKQLGIDKIGFTTAEPFDYLEESLLEQRSLGHTSGFEHQNIKERLYPEETFEDPKSIIAIALAYPTKIHEKVPRDEKRGQFARASWGTDYHFILEERLTKLIAFIKEQAETEQLQAEWRFAPQVDTGELMDVAVAQRAGLGFIGRNGLLITEEYGSFVYLGEIITNIQFEPDQPVPNGCGDCTRCITGCPTGALLGDGRMNAKKCLSYQTQTKGMMPEQYRKKMRNVIYGCDICQLVCPYNRGKDFHFHEEMEPKVDEVYPKLTPLLTISNREFNEQFGHLAGSWRGKKPLQRNALIALANLGGREALPEIRDCLKDQRPVIRGTAVWALGQLTKKAPDETIRLLQELKETETDAEVLTEIADVLERLG

SEQ ID NO: 76557 - protein, 381 aa, Enterococcus haemoperoxidus
  REGION 1..381: note = tr|R2QDR8|R2QDR8_9ENTE Iron-sulfur cluster binding protein OS=Enterococcus haemoperoxidus ATCC BAA-382; OX = 1158608 GN=UAW_02293 PE=4 SV=1
MTLKQKIIEESKRLGIDKIGFASAEPFYELEDSLKEQKELGFNSGFEHQVIEERIYPEKTFENPKTIISIALAYPTKIEGKVPRDEKRGMFARASWGIDYHDVLRDRLGKLIEFIHSQAQNLEETESWRFAPQVDTGELVDVAVAQRAGLGFIGRNGLLITEEFGSFVYLGEIVTNIDFEVDKPVPFGCGDCTRCVTACPTQALLGNGSMNAKKCLSYQTQTKEMMPEEYRKKMHNVIYGCDICQLVCPYNRGKDFHFHKEMEPEVETVYPKLKPMLSMSNKEFKTQFGHLSGSWRGKKPLQRNALIALANLGDRSALPEILVCAKEDVRPVIRGTAAWAIGKLGNKEAEKWLNVLNELLEIEPEEEVLVEIKNAIKQLEK

SEQ ID NO: 76558 - protein, 387 aa, Enterococcus hermanniensis
  REGION 1..387: note = tr|A0A1L8T9M7|A0A1L8T9M7_9ENTE Iron-sulfur cluster-binding protein OS=Enterococcus hermanniensis; OX = 249189 GN=RV04_GL001228 PE=4 SV=1
MTLKEKIIAESQRLGIDKIGFASAEPFDHLENSLREQKERGYTSGFEHPVIEERIYPERTFEGPKTIISIALAYPTKIHEEIPKDEKRGMFARASWGVDYHDILRDRLNQLIAFIQSEAASEAGADEWRFRPQVDTGELVDVSVAQRAGLGFIGRNGLLITEEFGSFVYLGEIVTNIAFEVDEAVPFGCGECTRCIKACPTKALLGDGRMNAQRCLSYQTQTKTLMPEEYRKKMSNVIYGCDICQLVCPYNQGKDFHFHQEMEPQVDTVYPKLKPMLSLSNKEFKAQFGHLSGAWRGKKPLQRNAIIALANLGDRTALPDLYQIAQQDVRPVIRGTAFWAIGRLGNKEPELWIERLTELLEKESDPEALQELTHAVEQLEKKKKRKR

SEQ ID NO: 76559 - protein, 383 aa, Enterococcus hirae; identical to SEQ ID NO: 76550
  REGION 1..383: note = tr|A0A4U9QD30|A0A4U9QD30_ENTHR Iron-sulfur cluster-binding protein OS=Enterococcus hirae OX=1354; GN = queG PE=4 SV=1

SEQ ID NO: 76560 - protein, 390 aa, Enterococcus hirae
  REGION 1..390: note = tr|I6T6G8|I6T6G8_ENTHA Iron-sulfur cluster-binding protein OS=Enterococcus hirae (strain ATCC 9790 / DSM 20160 / JCM 8729 / LMG 6399 / NBRC 3181 / NCIMB 6459 / NCDO1258) OX=768486 GN=EHR_06925 PE=4 SV=1
MTKTLKEEIIEESKRLGIDKIGFTTAEPFDYLKESLEEQKAAGHTSGFEHPVIEERLYLEKTFDRPQSIIAIALAYPTKIHEEVPKDEKRGQFARASWGIDYHDILRDRLNQLITFIQSRASVWQQEEAWRFAPQVDTGELVDVAVAQRAGLGFIGRNGLLITEEYGSFVYLGEIVTNIVFEPDEPGVFGCGDCTRCVTACPTKALLGDGRMNAQRCLSYQTQTKGLMPNEYRKKMRNVIYGCDICQLVCPYNQGKDFHFHEEMEPKVEEVYPKLKPMLSLSNKEFKQQFGHLAGSWRGKKPLQRNALIALANLGDTSALPEIESCLSDVRPVIRATAAWSIGRLGRKEPEKWLETLEQMKQREEDQEVITEIIEAQEMLAKKTKRKKRT

SEQ ID NO: 76561 - protein, 382 aa, Enterococcus italicus
  REGION 1..382: note = tr|E6LG47|E6LG47_ENTI1 Putative iron-sulfur cluster-binding protein OS=Enterococcus italicus (strain DSM 15952 / LMG 22039 / TP 1.5) OX=888064; GN = HMPREF9088_1337 PE= 4 SV=1
MTDLLTLKEKIIAESKRIGIDKIGFTTADPFIELKDSLEEQKAAGHTSGFEHPNIDERIYPERTFDNPKSIIAIALAYPTRIHERMPRDQRRGQFARVSWGIDYHDVLNEKLQQLIAFIQAETAGVDSHFKPQVDTGEFVDVAVAQRAGLGFIGKNGLLITEEFGSFVYLGEIVTNLSLEPDEPVANGCGDCTRCITGCPTTALLGDGRMNAKRCLSYQTQTKGIMPNEFRKKMHTVIYGCDICQLVCPYNRGKDFHFHEEMEPKTDEVYPPLVPLLSISNKEFKKQYGHLSGSWRGKKPLQRNALIALVNLGARENLPEIMRCLKDPRPVIRATAVWATAELTKKEPAETIALFEELLLEESDEEVQAEIKKNLHYLAKIS

SEQ ID NO: 76562 - protein, 381 aa, Enterococcus moraviensis
  REGION 1..381: note = tr|R2TIQ4|R2TIQ4_9ENTE Iron-sulfur cluster binding protein OS=Enterococcus moraviensis ATCC BAA-383; OX = 1158609 GN=UAY_00360 PE=4 SV=1
MTLKQKIIAESKRLGIDKIGFASAAPFYELEESLIEQKERGFNSGFEHQVIEERIYPEKTFENPKTIISIALAYPTKIEGKVPRDEKRGMFARASWGIDYHDVLRDRLAKLIDFIQSQAKDLEETQEWRFAPQVDTGELVDVAVAQRAGLGFIGRNGLLITEEFGSFVYLGEIVTNIDFEVDKPVPFGCGDCTRCVTACPTQALLGNGSMNAKKCLSYQTQTKGMMPEEYRKKMHNVIYGCDICQLVCPYNKGKDFHFHKEMEPEVDTVYPKLKPMLSISNKEFKETFGHLSGSWRGKKPLQRNALIALANLGDRSALPEIHRCATEDVRPVIRGTAVWAIGKLGNKDSEKWLDVLNELLEVEPEEEVLEEVRKAIKQLEK

SEQ ID NO: 76563 - protein, 388 aa, Enterococcus mundtii
  REGION 1..388: note = tr|A0A2T5DFX1|A0A2T5DFX1_ENTMU tRNA epoxyqueuosine(34) reductase QueG OS=Enterococcus mundtii; OX = 53346 GN=queG PE=4 SV=1
MALTLKEEIIQESKRIGIDKIGFTTAEPFDHLKESLVEQKAAGHTSGFEHPNIDERLYPEMTFDRPKSIIAIALAYPTKIHEKMPRDEKRGQFARASWGIDYHDVLRDRLQQLISFIESRATHWQKEEEWRLAPQVDTGELIDVAVAQRAGLGFIGRNGLLITEEFGSFVYLGEIVTNIDLEPDAPGVFGCGECTRCVTACPTDALLGDGRMNAKRCLSYQTQTKGMMPEEYRKKMSNVIYGCDICQLVCPYNRGKDFHFHPEMEPKVDEVYPKLTPMLTISNKEFKQQYGHLAGSWRGRKPLQRNALIALANLGERAALPHIEECLSDVRPVIRGTAAWAIGKLGIKDPEKWQEVLSCALEKETDEEAIHEMDQAIQLLQKKKSPKK

SEQ ID NO: 76564 - protein, 388 aa, Enterococcus mundtii
  REGION 1..388: note = tr|V5XM37|V5XM37_ENTMU 4Fe-4S binding protein; OS = Enterococcus mundtii QU 25 OX=1300150 GN=EMQU_0561 PE=4; SV = 1
MALTLKEEIIQESKRIGIDKIGFTTAEPFDHLKESLVEQKAAGHTSGFEHPNIDERLYPEMTFDRPKSIIAIALAYPTKIHEKMPRDEKRGQFARASWGIDYHDVLRDRLQQLISFIESRATHWQKEEEWRLAPQVDTGELIDVAVAQRAGLGFIGRNGLLITEEFGSFVYLGEIVTNIDLEPDTPGVFGCGECTRCVTACPTDALLGDGRMNAKCCLSYQTQTKGMMPEEYRKKMSNVIYGCDICQLVCPYNRGKDFHFHPEMEPKVDEVYPKLTPMLTISNKEFKQQYGHLAGSWRGRKPLQRNALIALANLGERAALPHIEECLSDVRPVIRGTAAWAIGKLGIKDPEKWQEVLSCALEKETDEEAIHEMNQAIQLLQKKKTPKK

SEQ ID NO: 76565 - protein, 380 aa, Enterococcus phoeniculicola
  REGION 1..380: note = tr|R3TLV1|R3TLV1_9ENTE Iron-sulfur cluster-binding protein OS=Enterococcus phoeniculicola ATCC BAA-412; OX = 1158610 GN=UC3_02811 PE=4 SV=1
MNLKEKIIAQSKLLGIDKIGFASAEPFDYLEDSLREQKDKGHTSGFEHPVIEDRLYLERTFENPQTIISIALAYPTKARDKVPRDEKRGQFARASWGIDYHEILRDRLGKLIEFIKEEAKNDQEAEQWRFAPQVDTGELIDVAVAQRAGLGFIGRNGLLITEEFGSFVYLGEIITNITFTPDEPVPFGCGDCTRCITACPTSALLGDGRMNAKRCLSYQTQTKGMMPEEYRKKMHNVIYGCDICQLVCPYNKGKNIHFHEEMEPDIETVYPKLKPMLSMSNKEFNEKFGHLAGSWRGKKPLQRNAIIALANLGDRSALPEIWMAAHDIRPVIRGTAAWAIGKLGKKEVDLWQPRLSSWLEEEPEEEVIREIKKALEMFEG

SEQ ID NO: 76566 - protein, 382 aa, unidentified
  source 1..382: note = Enterococcus plantarum
  REGION 1..382: note = tr|A0A2W3ZLQ3|A0A2W3ZLQ3_9ENTE tRNA epoxyqueuosine(34) reductase QueG OS=Enterococcus plantarum OX=1077675 GN=queG PE=4 SV=1
MTLKEKIIEESKRLGIDKIGFASAEPFYELEDSLIEQRELGYNSGFEHQVIEERIYPEKTFENPKTIISIALAYPTKIEGKVPRDEKRGMFARASWGIDYHDVLRDRLSKLIAFIQSQTQGLEETGEWRFAPQVDTGELVDVAVAQRAGLGFIGRNGLLITEEFGSFVYLGEIVTNIDFEVDEPIPFGCGDCTRCVTACPTQALLGNGSMNAKKCLSYQTQTKDMMPEEYRRKMHNVIYGCDICQLVCPYNRGKDFHFHKEMEPEVDTVYPKLKPMLSLSNKEFKTQFGHLSGSWRGKKPLQRNALIALANLGDRSALPDIVVCAKEDVRPVIRGTAAWAIGKLGNKEAEKWIDFLTELLEVETEEEVLIEIKNAIKQLEKT

SEQ ID NO: 76567 - protein, 397 aa, Enterococcus pseudoavium
  REGION 1..397: note = tr|A0A3D8ZZP9|A0A3D8ZZP9_9ENTE tRNA epoxyqueuosine(34) reductase QueG OS=Enterococcus pseudoavium OX=44007 GN=queG PE=4 SV=1
MQSLKEKIIVESKRIGIDKIGFASAEPFYELESSLQEQRARGYNSGFEHQVVEERIYPEKTFENPQTIIAIALAYPTKMREEVPKDEKRGMFARASWGIDYHEILRDRLEKLIAFIKAQAANLQQENEWRFAPQVDTGELVDVAVAQRAGLGFIGRNGLLITEEYGSFVYLGEIITNIQFETDEAVPFGCGDCTRCVTACPTKTLLGDGRMNAQRCLSYQTQTKGMMPEEYRKKMRNVIYGCDICQLVCPYNKGKDFHFHAEMEPQVDEVYPKLKPMLSLSNKQFKAQFSHLAGSWRGKKPLQRNALIALANVGDRTALPDILVCAQEDVRPVIRGTAAWAIGRLGKSEPEQWLAHLAELKNKETDSEALAEIEQAITELQQRVAKVRKRKRSTEEK

SEQ ID NO: 76568 - protein, 381 aa, Enterococcus quebecensis
  REGION 1..381: note = tr|A0A1E5GSX0|A0A1E5GSX0_9ENTE tRNA epoxyqueuosine(34) reductase QueG OS=Enterococcus quebecensis OX=903983 GN=BCR23_10880 PE=4 SV=1
MTLKQRIIAESKRLGIDKIGFASAEPFYELEDSLRRQKELGFNSGFEHQVIEERIYPEKTFENPKTIISIALAYPTKIEEKVPRDEKRGMFSRASWGIDYHDILRDRLTKLIDFIQSQAKSLEETEKWRFAPQVDTGELVDVAVAQRAGLGFIGRNGLLITEEFGSFVYLGEIVTNIDFEVDEPVPFGCGDCTRCVTACPTQALLGDGSMNAQKCLAYQTQTKGMVPEEYRKKMSNVIYGCDICQLVCPYNKGKNFHFHKEMEPEVDTVYPKLKPMLSISNKEFKETFGHLSGSWRGKKPLQRNALIALANLGDRSALPEILVCAKEDVRPVIRGTAAWAIGKLGNREAEKWLGILTELLEKEQDEEVIVEITNAIERLEK

SEQ ID NO: 76569 - protein, 380 aa, Enterococcus raffinosus
  REGION 1..380: note = tr|A0A1L8WXF4|A0A1L8WXF4_9ENTE Epoxyqueuosine reductase OS=Enterococcus raffinosus OX=71452 GN=queG PE=3; SV = 1
MQTLKERIIAESKQLGIDKIGFTTAEPFDYLEESLIEQRSLGHTSGFEHQNIKERLYPEETFEDPKSIIAIALAYPTKIHEKVPRDEKRGQFARASWGTDYHFILEERLKKLIAFIKEQAETEQVQAEWRFAPQVDTGELVDVAVAQRAGLGFIGRNGLLITEEYGSFVYLGEIITNIQFEPDQPVSNGCGDCTRCIIGCPTGALLGDGRMNAKKCLSYQTQTKGMMPEQYRKKMRNVIYGCDICQLVCPYNRGKDFHFHEEMEPKVDEVHPKLAPLLSISNREFKEQFGHLAGSWRGKKPLQRNALIALANLGGKEALPEIKACLQDQRPVIRGTAVWALGQLTKKAPEETISLLQDLEKTETDSEVLTEIANVLERLS

SEQ ID NO: 76570 - protein, 380 aa, Enterococcus raffinosus
  REGION 1..380: note = tr|R2RPR2|R2RPR2_9ENTE Epoxyqueuosine reductase; OS = Enterococcus raffinosus ATCC 49464 OX=1158602 GN=queG; PE = 3 SV=1
MQTLKERIIAESKQLGIDKIGFTTAEPFDYLEESLIEQRSLGHTSGFEHQNIKERLYPEETFEDPKSIIAIALAYPTKIHEKVPRDEKRGQFARASWGTDYHFILEERLKKLIAFIKEQAETEQVQAEWCFAPQVDTGELVDVAVAQRAGLGFIGRNGLLITEEYGSFVYLGEIITNIQFEPDQPVPNGCGDCTRCITGCPTGALLGDGRMNAKKCLSYQTQTKGMMPEQYRKKMRNVIYGCDICQLVCPYNRGKDFHFHEEMEPKVDEVYPKMTPLLSISNREFKEQFGHLAGSWRGKKPLQRNALIALANLGGKEALPEIRACLQDQRPVIRGTAVWALGQLTKKSPEDTIRLLKELEKTETDPEVLTEIADVLERLS

SEQ ID NO: 76571 - protein, 399 aa, Enterococcus ratti
  REGION 1..399: note = tr|A0A1L8WHK5|A0A1L8WHK5_9ENTE Iron-sulfur cluster-binding protein OS=Enterococcus ratti OX=150033; GN = RV14_GL000565 PE=4 SV=1
MSRIGEKMAKTLKDEIIEESKRLGIDKIGFTTAEPFDYLKESLEEQKAAGHTSGFEHPIIEERLHLEKTFDHPQSIISIALAYPTKIQEEIPKDEKRGQFARASWGIDYHEILRERLNQLIVFIQSRACKWQQEEKWRFAPQVDTGELVDVAVAQRAGLGFVGRNGLLITKEYGSFVYLGEIVTNIVFEPDKPEIFGCGDCMRCITACPTKALLGDGKMNAQRCLSYQTQTKGLMPNEYRKKIRNVIYGCDICQLVCPYNRGKDFHFHKEMEPKIEEVCPKLKPMLSLSNKEFNAQFGHLAGSWRGKKPLQRNALIALANLGDTSALSEVKVCLSDVRPVIRATAAWTIGCLGRKEPEKWLKILEKRQNIEENSEVIIEIKQAQDMLRKKKHKSNQFLP

SEQ ID NO: 76572 - protein, 382 aa, unidentified
  source 1..382: note = Enterococcus rivorum
  REGION 1..382: note = tr|A0A1E5L0W3|A0A1E5L0W3_9ENTE tRNA epoxyqueuosine(34) reductase QueG OS=Enterococcus rivorum; OX = 762845 GN=BCR26_08065 PE=4 SV=1
MTLKEKIIAESKKLGIDKIGFASAEPFSDLEASLREQKDRGFTSGFEHPVIEERIYPEKTFENPKTIISIALAYPTRIKEKVPRDEKRGQFARASWGIDYHDILKERLEKLIAFIRQQAESLEEIAQWRFAPQVDTGELVDVAVAQRAGLGFVGRNGLLITEEFGSFVYLGEIITNIEFEVDQPVAFGCGDCTRCVKACPTEALLGDGRMNAKRCLSYQTQTKGFMPEEYRKKMHNVIYGCDICQLVCPYNKGKDNHFHKEMEPEVEIVYPKLKPMLAITNKEFKATFGHLSGAWRGKKPIQRNALIALANLGDRSALPDILECTKDVRPVIRGTAIWAIGKLGNREPEKWLSILSDLQKSETDVEVQNEIQLAEKHLANKK

SEQ ID NO: 76573 - protein, 381 aa, unidentified
  source 1..381: note = Enterococcus rotai
  REGION 1..381: note = tr|A0A0U2VUM9|A0A0U2VUM9_9ENTE Epoxyqueuosine reductase OS=Enterococcus rotai OX=118060 GN=ATZ35_07495; PE = 4 SV=1
MSLKQKIVAESKRLGIDKIGFASAQPFYELEESLKEQRELGFNSGFEHQVIEERIYPEKTFENPKTIISIALAYPTKIEGKVPRDEKRGMFARASWGIDYHDVLRDRLAKLIAFIQSQAESLEETEAWRFAPQVDTGELVDVAVAQRAGLGFIGRNGLLITEEFGSFVYLGEIVTNIDFEVDEPVAFGCGDCTRCVTACPTQALLGNGSMNAKKCLSYQTQTKEMMPEEYRKKMHNVIYGCDICQLVCPYNRGKDFHFHKEMEPEVDTVYPKLKPMLSISNKEFKETFGHLSGSWRGKKPLQRNALIALANLGDRSALPEIYRCATEDVRPVIRGTAIWAIGKLGNKEAEKWLGVLNELLEVEPEEEVLVEIRNAIKRLES

SEQ ID NO: 76574 - protein, 396 aa, Enterococcus saccharolyticus; identical to SEQ ID NO: 76553
  REGION 1..396: note = tr|A0A449ETY2|A0A449ETY2_9ENTE Iron-sulfur cluster-binding protein OS=Enterococcus saccharolyticus; OX = 41997 GN=queG PE=4 SV=1

SEQ ID NO: 76575 - protein, 387 aa, Enterococcus saccharolyticus
  REGION 1..387: note = tr|S0NWU2|S0NWU2_9ENTE Iron-sulfur cluster-binding protein OS=Enterococcus saccharolyticus subsp. saccharolyticus ATCC 43076 OX=1139996 GN=OMQ_01116 PE=4; SV = 1
MLTLKEKIIAESKKIGIDKIGFTTAEPFDYLKDSLIEQREAGHTSGFEHQVIDERIYPEKTFENPKSIIAIALAYPTRIHEEVPRDEKRGQFARASWGIDYHNILKDRLERLIDFIQTEATSEQEAEQWRFAPQVDTGELVDVAVAQRAGLGFIGKNGLLITEEYGSFVYLGEIITNIQFEPDKPVPNGCGDCTRCITGCPTGALLGDGRMNAKKCLSYQTQTKGMMPKEYRRKIRNTIYGCDICQLVCPYNKGKDFHFHQEMEPKPDEVFPKLVPMLSISNKEFKAQFGHLAGSWRGKKPLQRNALIALANLGGREALPDIAKCLDDQRPVIRGTAVWAIGQLTKRNPEQYLERLQAMQEKETDEDVLLELEETITFLTDPTKKKA

SEQ ID NO: 76576 - protein, 381 aa, Enterococcus silesiacus
  REGION 1..381: note = tr|A0A0S3KEU7|A0A0S3KEU7_9ENTE Epoxyqueuosine reductase OS=Enterococcus silesiacus OX=332949; GN = ATZ33_15800 PE=4 SV=1
MTLKEKIIAESKRLGIDKIGFASAEPFFELEDSLKEQRERGFNSGFEHQVIEERIYPEKTFENPKTIIAIALAYPTKIEGKVPRDEKRGMFARASWGIDYHDVLRDRLSKLIDFIQSQTQNLEETESWRFAPQVDTGELVDVAVAQRAGLGFIGRNGLLITEEFGSFVYLGEIVTNIDFEVDQPVPFGCGDCTRCVTACPTQALLGNGSMNAKKCLSYQTQTKGMMPEEYRKKMHNVIYGCDICQLVCPYNRGKDFHFHKEMEPEVDTVYPKLKPMLSISNKDFKETFGHLSGSWRGKKPLQRNALIALANLGDRSALPEIFVCATEDVRPVIRGTAVWAIGKLGNKEAEKWLDVLRELLEVEPEEEVLEEIRNAIKRLEK

SEQ ID NO: 76577 - protein, 388 aa, Enterococcus sp.
  REGION 1..388: note = tr|A0A3D1J947|A0A3D1J947_ENTSX tRNA epoxyqueuosine(34) reductase QueG OS=Enterococcus sp.; OX = 35783 GN=queG PE=4 SV=1
MSLKEKIIAESKRLGIDKIGFASAEPFTYLEESLREQKAKGHTSGFEHPVIEERIYPERTFENPQTIIAIALAYPTKIKEKVPRDEKRGMFARASWGIDYHDVLRDRLDKLIAFIQAQAASMEAAEDWRFAPQVDTGELVDVAAAQRAGLGFIGRNGLLITEEFGSFVYLGEIVTNITLAPDEEVPFGCGECTRCITACPTKALLGDGRMNAQRCLSYQTQTKGMMPEEYRKKMHNVIYGCDICQLVCPYNRGKDFHFHAEMEPEVETVYPKLKPMLSLSNKDFKAQFGHLSGSWRGKKPLQRNAIIALANVGDRSALPDIWRCATEDVRPVIRGTAYWAIGQLGVKEPALWLARLQECQSLDPEEEAQQELGPAIARLQAVLDKQAP

SEQ ID NO: 76578 - protein, 391 aa, Enterococcus sp.
  REGION 1..391: note = tr|A0A4U4EK04|A0A4U4EK04_9ENTE tRNA epoxyqueuosine(34) reductase QueG OS=Enterococcus sp. VV15; OX = 2233541 GN=queG PE=4 SV=1
MTKTLKDEIIEESKRLGIDKIGFTTAEPFDHLKESLESQKAAGHTSGFEHPVIDERLYIEKTFESPQSIISIALAYPTKIHEEVPKDEKRGQFARASWGVDYHDILRDRLNKLIDFIKTRAVVWQQEDAWRFAPQVDTGELIDVAVAQRAGLGFIGRNGLLITEEYGSFVYLGEVVTNIQFEPDEPGVFGCGDCTRCITACPTKALLGDGRMNAQRCLSYQTQTKGLMPEEYRKKMRNVIYGCDICQLVCPYNRGKDFHFHDEMEPKVDEVYPKLKPMLQLSNKEFNAQFGHLAGSWRGKKPLQRNALIALANLGDTSALPEIEKCLTDVRPVIRATAAWAIGRLGRKEPKKWIETLEVVDQKEDNEEVSIEIAQAITMLQKKNKEKRPNS

SEQ ID NO: 76579 - protein, 386 aa, Enterococcus sulfureus
  REGION 1..386: note = tr|S0L898|S0L898_9ENTE Iron-sulfur cluster-binding protein OS=Enterococcus sulfureus ATCC 49903 OX=1140003; GN = I573_01578 PE=4 SV=1
MTTLKERIITESKRIGIDKIGFTTAEPFTEYKESLYAQKEAGHTSGFEHPNIEERIDPALTFSQPKSIISIALAYPTRLHEEPDRKEKRGQFARASWGIDYHDVLKSRLNKLIDFIKQEASQEDPRFKAEVDTGEFIDVAVAQRAGLGFIGKNGLLITEEFGSFVYLGEIVTNLEFEADTPIANGCGECTRCITGCPTNALLGNGQMNAKKCLSYQTQTKDMMPLDYRKKIRNIIYGCDICQLVCPYNQGKDFHFHQEMEPKIDEAFPKLAPMLQLSNKEFKEQFGHLAGSWRGKKPLQRNAIMALANLGAKEHLPEIMSCLKDPRPVIRATAIWAIGELTKRYPEDTILLFEEFRERESEPLVLDELEQTIARLKQPKLKRRTST

SEQ ID NO: 76580 - protein, 381 aa, Enterococcus termitis
  REGION 1..381: note = tr|A0A242LH84|A0A242LH84_9ENTE Epoxyqueuosine reductase OS=Enterococcus termitis OX=332950; GN = A5881_001210 PE=4 SV=1
MSLKQKIIAESRRLGIDKIGFASAEPFYELEESLKEQRERGFNSGFEHQVIEERIYPERTFENPKTIISIALAYPTKIDGKVPRDEKRGMFARASWGIDYHDVLRDRLSKLIAFIQTQAQGLEETESWRFAPQVDTGELVDVAVAQRAGLGFIGRNGLLITEEFGSFVYLGEIVTNIAFEVDKPVPFGCGDCTRCVTACPTQALLGNGSMNAKKCLSYQTQTKDMMPEEYRKKMHNVIYGCDICQLVCPYNRGKDFHFHKEMEPEVDTVYPKLKPMLSISNKEFKETFGHLSGSWRGKKPLQRNALIALANLGDRSALPEIYKCAIEDVRPVIRGTAVWAIGKLGNKEAEKWLGILYDLLKVEPEEEVLEEIKNAIKQLEK

SEQ ID NO: 76581 - protein, 384 aa, Enterococcus termitis
  REGION 1..384: note = tr|A0A1E5H4F3|A0A1E5H4F3_9ENTE tRNA epoxyqueuosine(34) reductase QueG OS=Enterococcus termitis; OX = 332950 GN=BCR25_14810 PE=4 SV=1
MSLKQKIIAESKRLGIDKIGFASAEPFYELEASLNEQREKGFNSGFEHQVIEERIYPEKTFENPKTIISIALAYPTKISEKVPRDEKRGMFARASWGIDYHDVLKDRLAKLIDFIQSQAKSLEEAEAWRFAPQVDTGELVDVAVAQRAGLGFIGRNGLLITEEFGSFVYLGEIVTNIDFEVDEPVPFGCGDCTRCVTACPTQALLGNGSMNAKKCLSYQTQTKEMMPEEYRKKMHNVIYGCDICQLVCPYNRGKDFHFHEEMEPEVDTVYPKLKPMLHLSNKEFKEQFGHLSGSWRGKKPLQRNALIALANLGDRSALPEIFACAKEDVRPVIRATAAWAIGKLGNKEAEKWLSVLHELLEKEKDEEVINEIEKAIKRLETKIQ

SEQ ID NO: 76582 - protein, 387 aa, Enterococcus thailandicus
  REGION 1..387: note = tr|A0A510W9Y4|A0A510W9Y4_ENTTH Epoxyqueuosine reductase OS=Enterococcus thailandicus OX=417368; GN = ETH01_03150 PE=4 SV=1
MTLKEEIIRESKRLGIDKIGFTTAEPFDDLRESLEEQKAAGHTSGFEHPVIEERLYPEKTFDQPQSIISIALAYPTKIHEEIPKDEKRGQFARASWGIDYHDILRDRLNRLIEFITTRGKQWQAEEEWRFAPQVDTGELIDVAVAQRAGLGFIGRNGLLITEEFGSFVYLGEIVTNIVFEPDEPGVFGCGDCTRCIDGCPTKALLGDGRMNAQRCLSYQTQTKGLMPEEYRKKMRNVIYGCDICQLVCPYNKGKDFHFHEEMEPKVDEVYPKLKPMLSISNKEFKQQFGHLAGSWRGKKPLQRNALIALANLGDRDSLPEIAACLKDVRPVIRGTAAWAIGRLGAKAPEEWLTVLQDSLAKETDEEAKLEFEKAIEILQTKQRKKQK

SEQ ID NO: 76583 - protein, 387 aa, Enterococcus thailandicus
  REGION 1..387: note = tr|A0A179ENW7|A0A179ENW7_ENTTH tRNA epoxyqueuosine(34) reductase QueG OS=Enterococcus thailandicus OX=417368 GN=queG PE=4 SV=1
MTLKEEIIRESKRLGIDKIGFTTSEPFDHLRESLEEQKAAGHTSGFEHPVIEERLYPEKTFDQPQSIISIALAYPTKIHEEIPKDEKRGQFARASWGIDYHDILRDRLNRLIEFITTRGKQWQAEEEWRFAPQVDTGELIDVAVAQRAGLGFIGRNGLLITEEFGSFVYLGEIVTNIVFEPDEPGVFGCGDCTRCIDGCPTKALLGDGRMNAQRCLSYQTQTKGLMPEEYRKKMRNVIYGCDICQLVCPYNKGKDFHFHEEMEPKVDEVYPKLKPMLSISNKEFKQQFGHLAGSWRGKKPLQRNALIALANLGDRDSLPEIAACLKDVRPVIRGTAAWAIGRLGAKAPEEWLTVLQDSLAKETDEEAKLEFEKAIEILQTKQRKKQK

SEQ ID NO: 76584 - protein, 381 aa, Enterococcus ureasiticus
  REGION 1..381: note = tr|A0A1E5G7F2|A0A1E5G7F2_9ENTE tRNA epoxyqueuosine(34) reductase QueG OS=Enterococcus ureasiticus OX=903984 GN=BCR21_16055 PE=4 SV=1
MTLKQKIIEESKRLGIDKIGFASAEPFYELEDSLKEQRKLGYNSGFEHQVIEERIYPEKTFENPKTIISIALAYPTKIGGKVPRDEKRGMFARASWGIDYHDVLRDRLSKLIDFIHSQAQSLEESGEWRFAPQVDTGELVDVAVAQRAGLGFIGRNGLLITEEFGSFVYLGEIVTNIDFEVDEPVPFGCGDCTRCVTACPTQALLGNGSMNAKKCLSYQTQTKDMMPEEYRRKMHNVIYGCDICQLVCPYNRGKDFHFHKEMEPEVDTVYPKLKPMLSMSNKEFKTQFGHLSGSWRGKKPLQRNALIALANLGDRSALPEILVCAKEDVRPVIRGTAAWAIGKLGNKEAEKWIDVLTELLEVEPETEVLKEIQNAIKQLKK

SEQ ID NO: 76585 - protein, 381 aa, unidentified
  source 1..381: note = Enterococcus ureilyticus
  REGION 1..381: note = tr|A0A1E5H5I3|A0A1E5H5I3_9ENTE tRNA epoxyqueuosine(34) reductase QueG OS=Enterococcus ureilyticus OX=1131292 GN=BCR24_09875 PE=4 SV=1
MSLKQKIIAESKRLGIDKIGFASAEPFYELEDSLKEQKARGFNSGFEHQVIEERIYPEKTFENPKTIISIALAYPTKIEGKVPRDEKRGMFARASWGIDYHDVLRDRLSKLIEYIQSQAQSQKEAEAWRFAPQVDTGELVDVAAAQRAGLGFIGRNGLLITEEFGSFVYLGEIVTNIDFEADKPVPFGCGDCTRCVTACPTQALLGNGSMNAKKCLSYQTQTKEMMPEEYRKKMHNVIYGCDICQLVCPYNRGKNFHFHEEMEPEVDTVYPKLKPMLSLSNKEFKETFGHLSGSWRGKKPLQRNALIALANLGDRSALPEILVCATEDVRPVIRGTAAWAIGKLGNKEAEKWLGILNELLEVEPEEEVLVEIKNAIKRLEK

SEQ ID NO: 76586 - protein, 389 aa, Enterococcus villorum
  REGION 1..389: note = tr|A0A1V8YDJ3|A0A1V8YDJ3_9ENTE tRNA epoxyqueuosine(34) reductase QueG OS=Enterococcus villorum; OX = 112904 GN=BH747_04570 PE=4 SV=1
MVKTLKEEIIEESKRLGIDKIGFTTAEPFDYLKESLEEQKAAGHTSGFEHPVIEERIYIEKTFEEPQSIISIALAYPTKIQEEVPKDEKRGQFARASWGIDYHDILRDRLNQLITFIQSRADKWQQEEQWRFAPQVDTGELVDVAVAQRAGLGFIGRNGLLITEEFGSFVYLGEIVTNIVFEPDEPGVFGCGDCTRCISACPTKALLGDGRMNAQKCLSYQTQTKGIMPNEYRKKMRNVIYGCDICQLVCPYNRGKDFHFHKEMEPQVDEVYPKLKPMLSLTNKEFKEQFGHLAGSWRGKKPLQRNALIALANLGDTSALPEIEDCLNDVRPVIRATAAWAIGRLGRKEPDIWIETLEKRQKIEEDQEVIIEIQQAKKMLARKKKPKRE

SEQ ID NO: 76587 - protein, 389 aa, Enterococcus villorum
  REGION 1..389: note = tr|A0A511J1Y5|A0A511J1Y5_9ENTE Epoxyqueuosine reductase OS=Enterococcus villorum OX=112904; GN = EVI01_13490 PE=4 SV=1
MVKTLKEEIIEESKRLGIDKIGFTTAEPFDYLKESLEEQKAAGHTSGFEHPVIEERLYIEKTFEDPQSIISIALAYPTKIQEEVPKDEKRGQFARASWGIDYHDILRDRLNQLITFIQSRADKWQQEEQWRFAPQVDTGELVDVAVAQRAGLGFIGRNGLLITEEFGSFVYLGEIVTNIVFEPDEPGVFGCGDCTRCISACPTKALLGDGRMNAQKCLSYQTQTKGIMPNEYRKKMRNVIYGCDICQLVCPYNRGKDFHFHKEMEPQVDEVYPKLKPMLSLTNKEFKEQFGHLAGSWRGKKPLQRNALIALANLGDTSALPEIEDCLNDVRPVIRATAAWAIGRLGRKEPDIWIETLEKRQKIEEDQEVIIEIQQAKKMLVRKTQPKRE

SEQ ID NO: 76588 - protein, 384 aa, Enterovibrio coralii
  REGION 1..384: note = tr|A0A135I455|A0A135I455_9GAMM Epoxyqueuosine reductase OS=Enterovibrio coralii OX=294935 GN=queG PE=3; SV = 1
MSDSRSTSSFNLNHLVENIRQWGHELGFQHIGIADVDLRQHEALLQRWLDEGYHGDMDWMARHGMMRARPQELVEGTVRVISARMDYLPPHAGFAKTLGNPDIAYISRYALGRDYHKLVRNRLKKLGERIEEEVGKFGYRPFVDSAPVLERPLAEKAGLGWTGKHSLLLDKNAGSWFFLGELLIDLPLPVDQPVENQCGKCVACMTSCPTGAIVGETIVDARRCISYLTIELDGPIPEAFRKPMGNRIYGCDDCQLVCPFNRESDLTKESDFYARPSLAQQSLKTLFSWDEVTFLKETEGSAIRRIGHEKWRRNLSVAMGNAPYDPEIVALLQSAQGSSAMLDQHIDWAITQQLKSKEALAIDVLPASTKRLVRIVKKGLPRDA

SEQ ID NO: 76589 - protein, 384 aa, Enterovibrio nigricans
  REGION 1..384: note = tr|A0A1T4UT23|A0A1T4UT23_9GAMM Epoxyqueuosine reductase OS=Enterovibrio nigricans DSM 22720 OX=1121868; GN = queG PE=3 SV=1
MPDSRSTSSINLHHLVESIRQWGDELGFQHIGIADIDLRQHEALLQRWLDAGYHGDMDWMARHGMMRARPSELVEGTVRVISARMDYLPPHAGFAQTLDNPEIAYISRYALGRDYHKLVRNRLKKLGERIEQEVGKFGYRPFVDSAPVLERPLAEKAGLGWTGKHSLLLDKNAGSWFFLGELLIDLPLPVDQPVENQCGKCVACMTSCPTGAIVGETIVDARRCISYLTIELDGAIPEEYRKAMGNRIYGCDDCQLVCPFNRESEVTLESDFYARPSLTQQPLKTLFLWDEPTFLKETEGSAIRRIGHEKWQRNLSVAMGNAPYDPEIIELLQAAKGFSAMLDQHIDWALAQQLASKDALTTNVQPSSTRRLVRIVKKGLPRDA

SEQ ID NO: 76590 - protein, 391 aa, Enterovibrio norvegicus
  REGION 1..391: note = tr|A0A2N7LD10|A0A2N7LD10_9GAMM Epoxyqueuosine reductase OS=Enterovibrio norvegicus OX=188144 GN=queG; PE = 3 SV=1
MFCCSDLMSNSRSSSSINLNQLAENIRLWGRELGFQHIGIADIDLRQHEAQLQRWLDAGYHGDMDWMARHGMMRARPQELVEGTIRVISARMDYLPPNAGFAKTLDDPTLAYISRYALGRDYHKLIRNRLKKLGERIEQEVGQFGYRPFVDSAPVLERPLAEKAGLGWTGKHSLLLNEGTGSWFFLGELLIDLQLPVDEAKENQCGKCVACMTSCPTDAIVEEGVIDARRCISYLTIELDGAIPVAFRQAIGNRIYGCDDCQLVCPYNREAELTHESDFHGRASLVQQPLTTLFTWDEKTFLKETEGSAIRRIGHEKWRRNLSVAMGNAPYNEEIVDLLQAAKGSSAMLDEHLDWAIEQQLSRRQNASVDVLPASTKRLVRIVQKGLPRDA

SEQ ID NO: 76591 - protein, 384 aa, Enterovibrio norvegicus
  REGION 1..384: note = tr|A0A1E5C515|A0A1E5C515_9GAMM Epoxyqueuosine reductase OS=Enterovibrio norvegicus FF-454 OX=1185651; GN = queG PE=3 SV=1
MSDSRSLSSINFNQLAENIRQWGRELGFQHIGITDIDLRQHEAQLQRWLGAGYHGEMDWMARHGMMRARPQELVEGTIRVISARMDYLPPNAGFAKTLDDPSLAYISRYALGRDYHKLIRNRLKKLGDRISQEVGPFGYRPFVDSAPVLERPLAEKAGLGWTGKHSLLLSKEAGSWFFLGELLVDLPLPVDAPQDNLCGKCVACMTSCPTNAIVDNTVVDARRCISYLTIELDGPIPEEFRVAMGNRIYGCDDCQLVCPYNREAELTQEADFHGRPSLVQQSLKTLFSWDEYTFLKETEGSAIRRIGHEKWRRNLSVAMGNAPYDPEIIELLQAAKSFSAMLDEHLDWAIAQQVERKKEAAISVQPASTKRLVRIVQKGLPRDA

SEQ ID NO: 76592 - protein, 384 aa, unidentified
  source 1..384: note = Enterovibrio pacificus
  REGION 1..384: note = tr|A0A1C3ED34|A0A1C3ED34_9GAMM Epoxyqueuosine reductase OS=Enterovibrio pacificus OX=1080227 GN=queG; PE = 3 SV=1
MSLQHYQITPDFNQLAEKIRKWGAELGFQHVGITDIDLSDHEAQLQKWLDHGYHGDMDWMERHGMMRARPAELVPGTIRVISVRMNYLPPKAGFATSLNAPEQAYISRYALGRDYHKLIRNRLKQLGKRIEDEVGVYGYRPFVDSAPVLERPLAEKAGLGWTGKHSLLLDQEAGSWFFLGELLVDLPLPVDSPKENQCGKCVACMTSCPTGAIVAEGVIDARKCISYLTIELDGTIPTEFRSLIGNRIYGCDDCQLVCPWNRESEITDESDFHGRPQLVNQSLTTLFSWSEEEFLKKTEGSPIRRIGHEKWRRNIAVAMGNAPYDPTILDLLTDSKGSSAMLDEHISWAIEQQISKRNDAVVNVLPSSTKRLIRIVEKGLSRDA

SEQ ID NO: 76593 - protein, 347 aa, unidentified
  source 1..347: note = Epibacterium mobile
  REGION 1..347: note = tr|A0A1H2U4V0|A0A1H2U4V0_9RHOB Epoxyqueuosine reductase OS=Epibacterium mobile OX=379347 GN=queG PE=3; SV = 1
MKAAGDIKARLIAQARAEGFVSTRICRPWDVPEVPERLRAFLDAGYHGQMAWMAERVNWRENPAALWPEARSVIMLAESYTPDENPMAVVGLPDRAAISVYARGKDYHDLVKKRLKRLARWLISEAGDEAEVKVFVDTAPVPEKALGQAAGLGWQGKHTNLVSRDWGNWAFLGSIFTTLELPVDPVEPDHCGSCRACLTACPTDAFPAPYQLDARRCISYLTIEHKGPIEEELRAKLGNRIYGCDDCLAACPWNKFAVEASDMRYAAREGTVAPPLAELSQLNDAAFRERFSGSPIKRIGRDRFVRNVLYAIGNSREAKLRPYAMQLCDDPDPTVAEAARWAVMRLP

SEQ ID NO: 76594 - protein, 347 aa, unidentified
  source 1..347: note = Epibacterium mobile
  REGION 1..347: note = tr|A0A1B1A5K8|A0A1B1A5K8_9RHOB Epoxyqueuosine reductase OS=Epibacterium mobile F1926 OX=1265309 GN=queG; PE = 3 SV=1
MKAAGDIKARLIAQARAEGFVSTRICRPWDVPEVPDRLRAFLDAGYHGQMGWMAERVNWRENPAALWPEARSVIMLAESYTPEENPMAVVGLPDRAAISVYARGKDYHDLVKKRLKRLARWLISEAGDEAEVKVFVDTAPVPEKALGQAAGLGWQGKHTNLVSRDWGNWAFLGSIFTTLDLPVDPVEPDHCGSCRACLTACPTDAFPAPYQLDARRCISYLTIEHKGPIEEELRPKLGNRIYGCDDCLAACPWNKFAVEASDMRYAAREGTVAPPLAELSQLNDAAFRERFSGSPIKRIGRDRFVRNVLYAIGNSREVKLRPYAMQLCDDPDPTVADAARWAVMQLS

SEQ ID NO: 76595 - protein, 345 aa, unidentified
  source 1..345: note = Epibacterium multivorans
  REGION 1..345: note = tr|A0A0P1GVG7|A0A0P1GVG7_9RHOB Epoxyqueuosine reductase OS=Epibacterium multivorans OX=928856 GN=queG; PE = 3 SV=1
MLEPEDLKARLVKQALAEGFVSARICRPWDVPEVPDRLRAYLEAGYHGQMGWMEERVNWRENPAALWPEARSVLMLAESYTPDENPMDVVGLPDRAAISVYARGKDYHDLVKKRLKRLARWLIAEAEGEVKVFVDTAPVPEKALGQAAGLGWQGKHSNLVSRDWGNWAFLGSVFTTLELPADTAEPDRCGSCRSCLTACPTDAFPAPYQVDARRCISYLTIEHKGPIDLELRAKLGNRIYGCDDCLAACPWNKFAVASSDIRYAARDGLIAPPLAELAALDDAGFREKFSGSPIKRIGRDRFVRNVLYAIGNSAQADLRPVAQALCDDPDPTVAEAAQWAAQRLA

SEQ ID NO: 76596 - protein, 348 aa, unidentified
  source 1..348: note = Epibacterium scottomollicae
  REGION 1..348: note = tr|A0A2T1ADN9|A0A2T1ADN9_9RHOB Epoxyqueuosine reductase OS=Epibacterium scottomollicae OX=483013 GN=queG; PE = 3 SV=1
MNDVGDIKSRLVEQARAEGFVSARICRPWDVPQVPERLRAFLDAGYHGQMGWMADRVNWRENPAALWPEARSVIMLAESYMPDENPMSVVGLPDRAAISVYARGKDYHDLVKKRLKRLARWMIAEAGDETQVKVFVDTAPVPEKALGQASGLGWQGKHTNLLSRDWGNWAFLGSVFTTLELPIDPAEPDHCGSCKACLTACPTDAFPAPYQLDARRCISYLTIEYKGPIDEELRGKLGNRIYGCDDCLAACPWNKFAVEASDIRYAAREGTIAPPLSELAQLDDADFRARFSGSPIKRIGRDRFVRNVLYAIGNSGDPGLLSDAQRLCEDPDPTVADAARWAVMRLQE

SEQ ID NO: 76597 - protein, 351 aa, unidentified
  source 1..351: note = Epibacterium ulvae
  REGION 1..351: note = tr|A0A1G5QW56|A0A1G5QW56_9RHOB Epoxyqueuosine reductase OS=Epibacterium ulvae OX=1156985 GN=queG PE=3; SV = 1
MTDTADLKTRLIEQALAEGFVACRICRPWDVPEVPGRLQAFLDAGYHGQMGWMADRTAWRGDPAQLWPEARSVIMLAESYTPDADPMAVVGQSDLGAISVYARNKDYHDLVKKRLKRLARWLIAETGDDTAVKVFVDTAPVPEKPLAQAAGLGWQGKHTNLVSRDFGNWAFIGSVFTTLELPADTRERDHCGSCRSCLTACPTDAFPAPYQLDARRCISYLTIEHKGPVDMDLRSKLGNRIYGCDDCLAACPWNKFAVAASDLRYGAREELNAPKLVELAALDDAGFRAFFSGSPIKRIGRDRFVRNVMYAIGNSGDASLCPAAQDLVEDPDPTVAEAARWAVDRLQGDVT

SEQ ID NO: 76598 - protein, 266 aa, unidentified
  source 1..266: note = Epulopiscium sp.
  REGION 1..266: note = tr|A0A1S9C3A6|A0A1S9C3A6_9FIRM 4Fe-4S ferredoxin-type domain-containing protein OS=Epulopiscium sp. AS2M-Bin002 OX=1764959 GN=ATN32_02640 PE=4 SV=1
MCKLTEQLNENILTSTIDFCRKLNLDTLSWCEWDNQSILAIAFPYYDFKSNNNGFSIYAQRLDYHKVVRSYLDRIRYYLETKGYTSEAYVDNNTLPERDIATLAGIGFIGKNNLLITKKYGSFVFLGEIVLNKLTDFNLKNNHSENDNCKSCTKCIDSCPTNSLGEKNINICLSYLSQQKTLTPDDEALLKRYKNIFGCDICQLCCPHNKNVVPSSLEEFKTIDMDKDPLVFANMTNKYFKDNIKPTSAGWRGKNVVKRNAIFSLS

SEQ ID NO: 76599 - protein, 266 aa, unidentified
  source 1..266: note = Epulopiscium sp.
  REGION 1..266: note = tr|A0A1V2MCT7|A0A1V2MCT7_9FIRM 4Fe-4S ferredoxin-type domain-containing protein OS=Epulopiscium sp. SCG-D08WGA-EpuloA1 OX=1712377 GN=AN640_03710 PE=4 SV=1
MCKLTEQLNENILTSTIDFCRKLNLDTLGWCEWDNQSILAIAFPYYDFKSNNNGFSIYAQRLDYHKVVRSYLDRIRYYLETKGYTSEAYVDNNTLPERDIATLAGIGFIGKNNLLITKKYGSFVFLGEIVLNKLTDFNLKNNHSENDNCKSCTKCIDSCPTNSLGEKNINICLSYLSQQKTLTPDDEALLKRYKNIFGCDICQLCCPHNKNVVPSSLEEFKTIDMDKDPLVFANMTNKYFKDNIKPTSAGWRGKNVVKRNAIFSLS

SEQ ID NO: 76600 - protein, 380 aa, unidentified
  source 1..380: note = Ereboglobus luteus
  REGION 1..380: note = tr|A0A2U8E5U0|A0A2U8E5U0_9BACT tRNA epoxyqueuosine(34) reductase QueG OS=Ereboglobus luteus; OX = 1796921 GN=queG PE=4 SV=1
MIEPAELRKRLLALGFDVARFASIPARDDGGALPEVNALRKWLDAGYQADMHWIERGFAKRASPTLVLSEAGSVIMLGVNYFQGAAGASSDSQHPRWARYALYSDYHDTIKPALEKAGRVLEETLGITSADYRYYVDTGPVLERAWASRAGAGFAGKNAMLVSRDFGNWLFLAAIFVRAKIKADEPLPARSHCGKCTRCIDACPTGAIVSPGTVDSRLCISYQTIENKGAIPRGLRAKIGARIYGCDACAEACPWNRFAQASRGLLLEARPEIGQLSLGELLALTPESFAAHFRKTAIKRIKLAGLLRNACIVAGNTGARAAEHLPQLARLAAHESPLVRAHAVWAVQRIADGEQATRLLAEARNAEKDASVLDEHGAQP

SEQ ID NO: 76601 - protein, 392 aa, Eremococcus coleocola
  REGION 1..392: note = tr|E4KQ67|E4KQ67_9LACT Putative iron-sulfur cluster-binding protein OS=Eremococcus coleocola ACS-139-V-Col8 OX=908337 GN=HMPREF9257_1666 PE=4 SV=1
MAMNAALKTKIIAAAHEIGIDKIGFTTAEPFDYLEDSLKEQKAKGHTSGFEHPVIEERLYPDKIFHQPKSIISIALAYPSEIQNPLKSERDNRRGLFARASWGLDYHDILREKMDRLIAYIKTEATTATFKPMVDTGELIDVATAQRAGLGFIGKNGLLITEEFGSWVYLGEIITDIEFEADQPGVSACGDCTRCIDACPTNALLGDGRMNAQLCLSFQTQTKGYMAQEFRRPMTHVIYGCDICQYVCPFNQDKSVHLHPEMEPDPEVVQPALKPLLTISNKDFKEKYGPLAGSWRGKKPLQRNAIIALANMRDQTAIPLLLQLMEEDPRPVIRGTSAWALSVIQRFQNPAMVKAIAAQLAKETDPETVTEMTQAIEKLKDKRPPRSIKTQS

SEQ ID NO: 76602 - protein, 379 aa, Erwinia aphidicola
  REGION 1..379: note = tr|A0A4R6PI44|A0A4R6PI44_ERWAP Epoxyqueuosine reductase OS=Erwinia aphidicola OX=68334 GN=queG PE=3 SV=1
MSHPLDFNQLALDIKQWGLALGFQQVGICDTDLTLEEPRLQAWLDKQYHGEMDWMARHGMMRARPHELLPGTLRVISVRMNYLPAKAAFASTLKNPRLGYVSRYALGRDYHKVLRNRLKKLGDMIREHCEQAEFRPFVDSAPLLERPLAAKAGLGWTGKHSLILNREAGSWFFLGELLVNLPLPVDQPVEENCGRCVACITTCPTGAIVEPYTVDARRCISYLTIELEGAIPEEFRPLIGNRIYGCDDCQLICPWNRYGQLTDEDDFSPRAVLHAPPLTDLFAWDEAKFLRVTEGSAIRRIGHLRWLRNIAVALGNAPWDQAHLSALQARLGENSMLDEHIHWAIACQLARRDENTIEVQSSQQKRLVRVVEKGLPRDA

SEQ ID NO: 76603 - protein, 378 aa, Erwinia billingiae
  REGION 1..378: note = tr|A0A5J6M0N2|A0A5J6M0N2_9GAMM tRNA epoxyqueuosine(34) reductase QueG OS=Erwinia billingiae; OX = 182337 GN=queG PE=4 SV=1
MSLPLDLHQLALDIKRWGQELGFQQVGICDTDLSAEEPRLQAWLDKQYHGEMEWMARHGMMRARPHELLPGTLRVISVRMNYLPAKAAFASTLKNPQLGYVSRYTLGRDYHKVLRNRLKKLGDLIRARCEEVQFRPFVDSAPILERPIAVKAGLGWTGKHSLVLNREAGSWFFLGELLIDLPLPVDQPQEEQCGRCVACMTICPTGAIVEPYTVDARRCISYLTIELEGAIPEEFRPLIGNRIYGCDDCQLICPWNRYGQLTDEDDFSPRAVLHAPPLNELFAWDEAKFLRVTEGSAIRRIGHLRWLRNVAVALGNAPWSADNVAALEARQGENAMLDEHINWALARQLANRSEHAVEIQGQQKRLVRAVEKGLPRDA

SEQ ID NO: 76604 - protein, 378 aa, Erwinia billingiae
  REGION 1..378: note = tr|D8MM93|D8MM93_ERWBE Epoxyqueuosine reductase; OS = Erwinia billingiae (strain Eb661) OX=634500 GN=queG; PE = 3 SV=1
MSLPLDLHQLALDIKRWGQELGFQQVGICDTDLSAEEPRLQAWLDKQYHGEMEWMARHGMMRARPHELLPGTLRVISVRMNYLPAKAAFASTLKNPQLGYVSRYALGRDYHKVLRNRLKKLGDLIRARCEEVQFRPFVDSAPILERPIAVKAGLGWTGKHSLVLNREAGSWFFLGELLIDLPLPVDQPQEEQCGRCVACMTICPTGAIVEPYTVDARRCISYLTIELEGAIPEEFRPLIGNRIYGCDDCQLICPWNRYGQLTDEDDFSPRAVLHAPPLNELFAWDEAKFLRVTEGSAIRRIGHLRWLRNVAVALGNAPWSADNVAALEARQGENAMLDEHINWALARQLANRSEHAVEIQGQQKRLVRAVEKGLPRDA

SEQ ID NO: 76605 - protein, 379 aa, unidentified
  source 1..379: note = Erwinia citreus
  REGION 1..379: note = tr|A0A358L906|A0A358L906_ERWCI Epoxyqueuosine reductase OS=Erwinia citreus OX=558 GN=queG PE=3 SV=1
MSHPLDLSQFALEIKQWGLELGFQQVGICDTDLSPEEPRLQAWLDKQYHGEMEWMARHGMMRARPHELQPGTLRVISVRMNYLPAKAAFASTLKNPQLGYVSRYALGRDYHKVLRNRLKKLGDRIRERCEAAEFRPFVDSAPVMERPLAVKAGLGWTGKHSLVLNRESGSWFFLGELLINLPLPIDTPQQEQCGRCVACLTTCPTGAIVEPYVVDARRCISYLTIELEGAIPEAYRPLIGNRIYGCDDCQLICPWNRYGQLTDEDDFSPRAVLHAPPLTELFAWDEATFLRVTEGSAIRRIGHLRWLRNVAVALGNAPWSEENVVVLQSRQGENPMLDEHITWALTRQLARREENAIEVQSGQQKRLVRVIEKGLPRDA

SEQ ID NO: 76606 - protein, 379 aa, unidentified
  source 1..379: note = Erwinia gerundensis
  REGION 1..379: note = tr|A0A0U5L3G1|A0A0U5L3G1_9GAMM Epoxyqueuosine reductase OS=Erwinia gerundensis OX=1619313 GN=queG PE=3; SV = 1
MSHPLDLQQLALDIKQWGLSLGFQQVGICDTDLSAEEPKLQAWLDKQYHGEMAWMERHGMMRARPHELQPGTLRVISVRMNYLPAKAAFASTLKNPQLGYVSRYALGRDYHKVLRNRLKKLGEMIRERCESLNFRPFVDSAPLLERPLAEKAGLGWTGKHSLILNREAGSWFFLGELLIDLPLPTDEPQPENCGRCVACITTCPTGAIVEPYVVDARRCISYLTIELEGAIPEEYRPLIGNRIYGCDDCQLICPWNRFGQLTDEDDFSPRAVLHAPPLVELFAWDEARFLKVTEGSAIRRIGHLRWLRNVAVALGNAPWHDDHYAVLASRLGENAMLDEHIHWAMAQQREKRAKNAIDVQLPQQKRLVRAVEKGLPRDA

SEQ ID NO: 76607 - protein, 379 aa, unidentified
  source 1..379: note = Erwinia iniecta
  REGION 1..379: note = tr|A0A0L7TCK7|A0A0L7TCK7_9GAMM Epoxyqueuosine reductase OS=Erwinia iniecta OX=1560201 GN=queG PE=3 SV=1
MSHPLDLHQLAQDIKQWGLSLGFQQVGICDTDLTPEEPRLQAWLDKQYHGEMDWMARHGMMRARPHELLPGTLRVISVRMNYLPAKAAFASTLKNPRLGYVSRYALGRDYHKVLRNRLKKLGDMIRERCSDTQYRPFVDSAPLLERPLAVKAGLGWTGKHSLILNREAGSWFFLGELLIDIPLPVDQPQEENCGRCVACITTCPTGAIVEPYVVDARRCISYLTIELEGAIPEEFRPLIGNRIYGCDDCQLICPWNRYGRLTDEDDFSPRAVLHAPPLNELFAWDEAKFLRITEGSAIRRIGHLRWLRNIAVAMGNAPWDTEIVAALTAREGENAMLDEHIHWALAQQQSKRAEQVIEVQRPQQKRLVRAIEKGLPRDA

SEQ ID NO: 76608 - protein, 379 aa, Erwinia mallotivora
  REGION 1..379: note = tr|A0A014LXK9|A0A014LXK9_9GAMM Epoxyqueuosine reductase OS=Erwinia mallotivora OX=69222 GN=queG PE=3 SV=1
MSHPLDLHQLARNIKQWGQQLGFQQVGICDTDLSLEEPRLQAWLEKQYHGEMAWMARHGMMRARPHELQPGTLRVISVRMNYLPAKAAFARTLKNPQLGYVSRYALGRDYHKVLRNRLKKLGDLIREHCENAEFRPFVDSAPVMERPLAVKAGLGWTGKHSLVLNREAGSWFFLGELLINLPLPVDTPQQEQCGRCVACITTCPTGAIVEPYVIDARRCISYLTIELEGSIPQEFRPLIGNRIYGCDDCQLICPWNRYGQLTDEDDFSPRAVLHSPPLTELFAWDEATFLRVTEGSAIRRIGHLRWLRNVAVALGNAPWSVENIAVLNSRLGENAMLDEHILWALARQKAARAENAIEMQSGQQKRLVRAIEKGLTRDA

SEQ ID NO: 76609 - protein, 379 aa, Erwinia persicina
  REGION 1..379: note = tr|A0A3Q8H8L7|A0A3Q8H8L7_9GAMM Epoxyqueuosine reductase OS=Erwinia persicina OX=55211 GN=queG PE=3 SV=1
MSHPLDFHQLARDIKQWGLALGFQQVGICDTDLTLEEPRLQAWLDKQYHGEMDWMARHGMMRARPHELLPGTLRVISVRMNYLPAKAAFASTLKNPRLGYVSRYALGRDYHKVLRNRLKKLGDMIREHCSDAQFRPFVDSAPLLERPLAAKAGLGWTGKHSLILNREAGSWFFLGELLIDLPLPVDSPVEENCGRCVACITTCPTGAIVEPYTVDARRCISYLTIELEGAIPEAFRPLIGNRIYGCDDCQLICPWNRYGQLTDEDDFSPRAILHAPPLTELFAWDEAKFLRITEGSAIRRIGHLRWLRNIAVALGNAPWDENHLKALEARRGEHAMLDEHIDWAIARQLVRRDEHTIEVQSSQQKRLVRTIEKGLPRDA

SEQ ID NO: 76610 - protein, 379 aa, Erwinia persicina
  REGION 1..379: note = tr|A0A4U3FDH8|A0A4U3FDH8_9GAMM Epoxyqueuosine reductase OS=Erwinia persicina OX=55211 GN=queG PE=3 SV=1
MSHPLDFHQLARDIKQWGLALGFQQVGICDTDLTLEEPRLQAWLDKQYHGEMDWMARHGMMRARPHELLPGTLRVISVRMNYLPAKAAFASTLKNPRLGYVSRYALGRDYHKVLRNRLKKLGDMIREHCSDAQFRPFVDSAPLLERPLAAKAGLGWTGKHSLILNREAGSWFFLGELLIDLPLPVDSPVEENCGRCVACITTCPTGAIVEPYTVDARRCISYLTIELEGAIPEAFRPLIGNRIYGCDDCQLICPWNRYGQLTDEDDFSPRAILHAPPLTELFAWDEAKFLRITEGSAIRRIGHLRWLRNIAVALGNAPWDENHLKALEARRGEHAMLDEHIDWAIARQLARRDEHTIEVQSSQQKRLVRTIEKGLPRDA

SEQ ID NO: 76611 - protein, 379 aa, Erwinia rhapontici
  REGION 1..379: note = tr|A0A4R7GUH7|A0A4R7GUH7_ERWRD Epoxyqueuosine reductase OS=Erwinia rhapontici OX=55212 GN=queG PE=3 SV=1
MSHPLDFHQLALDIKQWGLDLGFQQVGICDTDLTLEEPRLQAWLDKQYHGEMDWMARHGMMRARPHELLPGTLRVISVRMNYLPAKAAFASTLKNPRLGYVSRYALGRDYHKVLRNRLKKLGDKIREHCSEAQFRPFVDSAPLLERPLAAKAGLGWTGKHSLILNREAGSWFFLGELLIDLPLPVDQTVEENCGRCVACITTCPTGAIVEPYTVDARRCISYLTIELEGAIPEEFRPLIGNRIYGCDDCQLICPWNRYGQLTDEDDFSPRAVLHAPPLIELFAWDEAKFLRITEGSAIRRIGHLRWLRNIAVALGNAPWDEKHLAALETRRGENNMLDEHIDWAIGCQLARREENRVDVQNNQQKRLVRVIEKGLPRDA

SEQ ID NO: 76612 - protein, 379 aa, Erwinia sp.
  REGION 1..379: note = tr|A0A427K3Y0|A0A427K3Y0_9GAMM Epoxyqueuosine reductase OS=Erwinia sp. 198 OX=2022746 GN=queG PE=3 SV=1
MSHPLDLSQFALQIKQWGLELGFQQVGICDTDLSLEEPRLQAWLDKQYHGEMDWMARHGMMRARPHELQPGTLRVISVRMNYLPAKAAFASTLKNPQLGYVSRYALGRDYHKVLRNRLKKLGDRIRERCEEAEFRPFVDSAPVLERPLAAKAGLGWTGKHSLILNREAGSWFFLGELLINLPLPVDSPQQEQCGRCVACLTTCPTGAIVEPYVVDARRCISYLTIELEGAIPEEFRPLIGNRIYGCDDCQLICPWNRYGQLTDEDDFSPRAVLHAPPLSELFAWDEAKFLRVTEGSAIRRIGHLRWLRNVAVALGNAPWSAENVAALQNRQGENSLLDEHITWALARQLARRAENAIEVQSGQQKRLVRVIEKGLPRDA

SEQ ID NO: 76613 - protein, 379 aa, Erwinia sp.; identical to SEQ ID NO: 74888
  REGION 1..379: note = tr|A0A2G8DBQ0|A0A2G8DBQ0_9GAMM Epoxyqueuosine reductase OS=Erwinia sp. OLMDLW33 OX=1928656 GN=queG PE=3; SV = 1

SEQ ID NO: 76614 - protein, 378 aa, Erwinia typographi
  REGION 1..378: note = tr|A0A0A3Z9S1|A0A0A3Z9S1_9GAMM Epoxyqueuosine reductase OS=Erwinia typographi OX=371042 GN=queG PE=3 SV=1
MSLPLDLHQLALDIKKWGQDLGFQQVGISDTDLSLEEPRLQAWLDNQYHGEMAWMARHGMMRARPHELLPGTLRVISVRMNYLPAKAAFASTLKNPQLGYVSRYALGRDYHKVLRNRLKKLGETIRERCSEAQFRPFVDSAPVLERPLAVKAGLGWTGKHSLVLNQQAGSWFFLGELLIDLPLPVDTPQDEQCGRCVACLTICPTNAIVEPYKVDARRCISYLTIELEGVIPEEFRPLIGNRIYGCDDCQLICPWNRYSQLTDEDDFSPRAVLHAPPLTELFAWDEAKFLRVTEGSAIRRIGHLRWLRNVAVAIGNAPWSAENVAVLEARRGENEMLDEHIVWALARQLARRSEHAIEMQGQQKRLVRAVEKGLPRDA

SEQ ID NO: 76615 - protein, 379 aa, unidentified
  source 1..379: note = Erwiniaceae bacterium
  REGION 1..379: note = tr|A0A3D5MA11|A0A3D5MA11_9GAMM Epoxyqueuosine reductase OS=Erwiniaceae bacterium OX=2053552 GN=queG PE=3; SV = 1
MSHPLDLQQLAQDIKQWGLSLGFQQVGICDTDLSVEEPRLQAWLDKQYHGEMEWMARHGMMRARPHELLPGTLRVISVRMNYLPAKAAFASTLKNPRLGYVSRYALGRDYHKVLRNRLKKLGDLIRERCEAANFRPFVDSAPLLERPLAAKAGLGWTGKHSLILNREAGSWFFLGELLINLPLPVDQPQEEQCGRCVACLTTCPTGAIVEPYVVDARRCISYLTIELEGAIPEAFRPLIGNRIYGCDDCQLICPWNRFGQLTDEDDFSPRAALHAPPLTELFMWDEAKFLRITEGSAIRRIGHLRWLRNVAVALGNAPWDEENIAVLNRRLGENAMLDEHIEWAIAQQKLRRAENAIEVQRPQQKRLVRAVEKGLPRDA

SEQ ID NO: 76616 - protein, 353 aa, unidentified
  source 1..353: note = Erythrobacter aquimixticola
  REGION 1..353: note = tr|A0A419RUM8|A0A419RUM8_9SPHN Epoxyqueuosine reductase OS=Erythrobacter aquimixticola OX=1958945; GN = queG PE=3 SV=1
MVNSPDSQSLEHALREKARELGFAAFGIAPAEDNPEQARRLQEWLAAGYHGTMGWMEDRADVRQGPNAMWPEAKSVIALGMSYAPDVDPLALEGDAERARISVYAQGRDYHDTLKKAAKALARWLVEREPGTQLKVFVDTAPVMEKPLGEAAGLGWQGKHTNLVSREYGSWLFLGAIYTTLALKPDAPHSDRCGSCRDCQDACPTDAFPAPYRLDARRCISYLTIEHKGPIPDEFREAIGNRIYGCDDCLAVCPWNKFAQSAARHRAFAPQEDLVAPRLDALLTLDDAAFRAKFSGSPIKRIGRNRFVRNCLTAAGNSGNRGLEPIVRTLTRDPDDVVAEAARWALSRLSEGP

SEQ ID NO: 76617 - protein, 357 aa, unidentified
  source 1..357: note = Erythrobacter atlanticus
  REGION 1..357: note = tr|A0A0H4V939|A0A0H4V939_9SPHN Epoxyqueuosine reductase OS=Erythrobacter atlanticus OX=1648404 GN=queG; PE = 3 SV=1
MVNMADTRLIEHRFETRLRNKARELGFASVGIAPAADDPLRAERLHAWLDSGFHGAMGWMEDRADVRQGPQSMWPAAKSVIALGMSYAPEIDPLALEGDAEKARISVYAQGRDYHDVLKKALKALARWLCEEVPETQLKVFVDTAPVMEKPLGEAAGLGWQGKHTNLVSREHGSWLFLGAIYTTIELTPDGDHADLCGSCRACQDACPTNAFPQPYQLDARRCISYLTIEHKGPIPEEFRSAIGNRIYGCDDCLAVCPWNKFADTAARHLAFVPRGELAAPELAQLLALDDVAFRAKFSGSPIKRIGRNRFVRNCLIAAGNSGNNALLDQVAELRSDPDPVVSEAADWALSRLSAAP

SEQ ID NO: 76618 - protein, 346 aa, Erythrobacter citreus
  REGION 1..346: note = tr|A0A0L1K9T6|A0A0L1K9T6_9SPHN Epoxyqueuosine reductase OS=Erythrobacter citreus LAMA 915 OX=1306953; GN = queG PE=3 SV=1
MVNGELQAELREEAERLGFVACGFASAAPDPQRAARLEQFLGEGRHGSMEWMEARKTQRASPQGLWPEANSVIALGMSYAPDIDPLALADAAEKARVSVYAQGRDYHDVVKKALKALARWLIAREPTSELKVFVDTAPVMEKPLGQAAGIGWQGKHTNLVSRSHGSWLFLGAIYSTLEFGPDLSHPDRCGNCRACQDACPTDAFPAPYQLDARRCISYLTIEHKGPIPEEFREALGNRIYGCDDCLAVCPWNKFADTAHRHLKLAPREELMAPDLASFLTFDDAGFRQFFSGSPIKRVGRDRFVRNCLYAAGNSGSAALAPLVEGLRGDPDPAVSEAADWAARRLG

SEQ ID NO: 76619 - protein, 348 aa, Erythrobacter flavus
  REGION 1..348: note = tr|A0A3T1CFA7|A0A3T1CFA7_9SPHN Epoxyqueuosine reductase OS=Erythrobacter flavus OX=192812 GN=queG PE=3; SV = 1
MVNAELQAELRAEATRLGFATCGFTAATPDAQRAERLERFLGEGRHGSMEWMEARKTQRASPQGLWPEASSVIALGMSYAPDIDPLALAEDPEKARISVYAQGRDYHDVVKKALKALARWLIEREPASELKVFVDTAPVMEKPLGEAAGIGWQGKHTNLVSRSHGSWLFLGAIYSALRFEPDAPHADRCGQCRACQDACPTDAFPAPYQLDARRCISYLTIEHKGPIPEQFRGALGNRIYGCDDCLAVCPWNKFADTAHRHIKLAPRAELEAPELAEFLQFDDAGFRQFFSGSPIKRIGRDRFVRNCLYAAGNSGAAQLLPLVSGLCSDPDSVVADAARWAAQRLTAA

SEQ ID NO: 76620 - protein, 348 aa, Erythrobacter flavus
  REGION 1..348: note = tr|A0A222EQQ9|A0A222EQQ9_9SPHN Epoxyqueuosine reductase OS=Erythrobacter flavus OX=192812 GN=queG PE=3; SV = 1
MVNAELQAELRAEATRLGFATCGFTAATPDAQRAERLERFLGEGRHGSMEWMEARKTQRASPQGLWPEASSVIALGMSYAPDIDPLALAEDPEKARISVYAQGRDYHDVVKKALKALARWLIEREPASELKVFVDTAPVMEKPLGEAAGIGWQGKHTNLVSRSHGSWLFLGAIYSTLRFEPDAPHADRCGQCRACQDACPTDAFPAPYQLDARRCISYLTIEHTGPIPEQFRGALGNRIYGCDDCLAVCPWNKFADTAHRHIKLAPRAELEAPELAQFLQFDDAGFRQFFSGSPIKRIGRDRFVRNCLYAAGNSGAAQLLPLVSGLCSDPDSVVADAARWAAHRLTAA

SEQ ID NO: 76621 - protein, 349 aa, Erythrobacter gangjinensis
  REGION 1..349: note = tr|A0A0G9ML84|A0A0G9ML84_9SPHN Epoxyqueuosine reductase OS=Erythrobacter gangjinensis OX=502682 GN=queG; PE = 3 SV=1
MVNAADTSSLEDALKAKARELGFAAIGIAPATDDPTRAARLHEWLDAGHHGEMAWMADRADVRQGPQSMWADARSVIALGMSYAPDVDPLAPADAKISVYAQGRDYHDVVKKALKVLARWLVEREPEMQLKVFVDTAPVMEKPLGEAAGIGWQGKHTNLVSREHGNWLFLGAIYTTLELSADEPHTDRCGSCRACQDACPTDAFPAPYQLDARRCISYLTIEHKGPIPLEFREAIGNRIYGCDDCLAVCPWNKFADVSARAQKLAPREELIDPPLADLLALDDARFRAKFSGSPIKRVGRDRFVRNCLIAAGNSADAGLLPQVHALRDDPDAIVAEAADWAHARLTSSP

SEQ ID NO: 76622 - protein, 357 aa, Erythrobacter litoralis
  REGION 1..357: note = tr|A0A074MNB0|A0A074MNB0_9SPHN Epoxyqueuosine reductase OS=Erythrobacter litoralis OX=39960 GN=queG PE=3; SV = 1
MVNAPVSTSGDAPLEERIAERAHELGFAACGFASAEEDPVRARRLEEWLGEGHHATMEWMETRFHHRRSPQGLWPQAKSVIALGMSYAPANDPFALEHVRDHARISVYAQGKDYHDVVKKRLKALARWLVAEEEGAEVKVFVDTAPVMEKPLGEAAGIGWQGKHTNLVSREHGSWLFLGAIYTTLDLAPADPHRDQCGSCRACLDVCPTDAFPAPYRLDARRCISYLTIEHKGPVPEDLREGLGNRIYGCDDCLAVCPWNKFASQARAMKEFLPRPELVAPRLAELLGLDDAGFRALFSGSPIKRIGRDRFVRNCLYAAGNSGEAALSGPCKALQDDPDPVVAEAARWALGKLRQAP

SEQ ID NO: 76623 - protein, 350 aa, Erythrobacter litoralis
  REGION 1..350: note = tr|Q2N6W3|Q2N6W3_ERYLH Epoxyqueuosine reductase; OS = Erythrobacter litoralis (strain HTCC2594) OX=314225; GN = queG PE=3 SV=1
MVNAAATADLQKRLIAEAKRLGFAQIGFAAATDDPKRAERLHDWIEAGYYGSMGWMQTHADVRQGPQSMWPAAKSVIALGMAYTPSTDPMALDKHPDRARISVYAQGRDYHDTVKKALKALARWLVAEAPETELKVFVDTAPVMEKPLGEAAGLGWQGKHTNLVSREHGSWLFLGCIYCTLDFAPDAPHSDRCGSCNACQTACPTDAFPQPYVLDARRCISYLTIEHSGPIPEEFRAPMGNRIYGCDDCLAVCPWNKFADSAARHKAFLPRAELVAPKLAHFLALDDAGFRQLFSGSPIKRIGRNRFVRNCLIAAGNSGDAALREPVDALLADPDPVVAEAAQWAKARLV

SEQ ID NO: 76624 - protein, 350 aa, Erythrobacter longus
  REGION 1..350: note = tr|A0A074M801|A0A074M801_ERYLO Epoxyqueuosine reductase OS=Erythrobacter longus OX=1044 GN=queG PE=3 SV=1
MVNGPATSGLEERIGAKAKELGFASVGFTTAAEDPLRAKRLEEWLGEGRHATMEWMENRLHHRRSPQGLWPEAKSVIALGMSYAPALDPLALEEAGTRARISVYAQGKDYHDVVKKRLKALARWLVDAVPGTELKVFVDTAPVMEKPLGEASGIGWQGKHTNLVSPDHGSWLFLGAIYTTLELQPSTPHRDQCGSCRACLDSCPTDAFPNAYTIDAGRCISYLTIEHKGPIAEEFRAPLGNRIYGCDDCLAVCPWNKFASEAYAASEFLPRAELTAPRLAELLALDDAGFRALFSGSPIKRIGRDRFVRNCLYAAGNSGEPSLLTQVEPLIKDADPVVAEAAAWARAQLT

SEQ ID NO: 76625 - protein, 349 aa, unidentified
  source 1..349: note = Erythrobacter luteus
  REGION 1..349: note = tr|A0A0G9MZX7|A0A0G9MZX7_9SPHN Epoxyqueuosine reductase OS=Erythrobacter luteus OX=1581420 GN=queG PE=3; SV = 1
MVNSPDTLPFEARLEAKARELGFVAFGIASAEDDAVRAGRLHDWLGEGHHGTMGWMEDRAEVRQGPQSMWPEARSVIALGMSYAPDVDPLRPQQAKVSVYAQGRDYHDVLKKAAKALARWMVEERPGTELKVFTDTAPVMEKPLGEAAGLGWQGKHTNLVSREHGSWLFLAAIYTTLELSLNASHPDRCGSCRACQHACPTDAFPAPYRLDARRCISYLTIEHKGPIPHEFREAMGARIYGCDDCLAVCPWNKFADTAARHQAFVPREDLLAPRLAELLALDDTAFRAKFSGSPIKRIGRDRFVRNCLIAAGNSGDAALAEQVDALRADPDPVVAEAADWALGRLTPSP

SEQ ID NO: 76626 - protein, 363 aa, unidentified
  source 1..363: note = Erythrobacter lutimaris
  REGION 1..363: note = tr|A0A395LIN9|A0A395LIN9_9SPHN Epoxyqueuosine reductase OS=Erythrobacter lutimaris OX=1538146 GN=queG; PE = 3 SV=1
MSEAGKIDRLQADLVEKARDLGFASVRFADAHDDPAMAERLRSWLEAGYHGSMGWMERDPSVRAGPQGMWPEARSVIALGANYAPAQDPLEAAEPKDQARISVYAQGQDYHVVLKKALKALARWLVAEAETRGLGEARMKLFVDTAPVMEKPLAQRAGVGWQGKHTNLVSMEHGSWLFLGAVYCTLPFVADGPHEDRCGSCRACQDACPTNAFPRAYTIDARRCISYLTIEHDGPIPHEFREAIGNRIYGCDDCLAVCPWNKFAESAAANRAFLPRAELVRPRLADLLQLDDVGFRKLFSGSPIKRIGRDRFVRNCLIAAGNSGEPGLLDQVEPLLADPDPVVAEAAQWAAERLNLPSPSPEA

SEQ ID NO: 76627 - protein, 351 aa, unidentified
  source 1..351: note = Erythrobacter marinus
  REGION 1..351: note = tr|A0A0H0XRN9|A0A0H0XRN9_9SPHN Epoxyqueuosine reductase OS=Erythrobacter marinus OX=874156 GN=queG PE=3; SV = 1
MVNNPETMSIEHRLKAKARELGFVAVGIAPAQDDPLRTRRLHEWLDEGFHGEMGWMEDRADVRQGPQSMWPETRSVIALGMSYAPDVDPLALEGDAEAARISVYAQGRDYHDVLKKALKALARWMCAEIPETQLKVFVDTAPVMEKPLGEVAGIGWQGKHTNLVSTDHGSWMFLGAIYTTLELTPDTPHTDRCGSCNACQDACPTDAFPEAYRLDARRCISYLTIEHKGPIPEEFREAIGNRIYGCDDCLAVCPWNKFAEVAARHLAFAPRAELIAPRLDELLALDDTGFRAKFSGSPIKRIGRDRFVRNCLIAAGNSGNAALLPQVEQLTGDPDEVVAEAARWARARLSA

SEQ ID NO: 76628 - protein, 353 aa, Erythrobacter nanhaisediminis
  REGION 1..353: note = tr|A0A1I5KQ58|A0A1I5KQ58_9SPHN Epoxyqueuosine reductase OS=Erythrobacter nanhaisediminis OX=604088; GN = queG PE=3 SV=1
MVKNPSLKALQEDLRKEARALGFAACGFTSAGEDRTRTERLEEWLGEGRHGSMEWMEARKEQRAFPQGLWSEARSVIALGMSYAPDVDPLALEGNPDKARISVYAQGRDYHDVVKKALKALARWLIEQEPDSELKVFVDTAPVMEKPLGEAAGIGWQGKHTNLVSREHGSWLFLGAIYSTLPFEPDAPGRDVCGSCRACQDACPTAAFPSPYRLDARRCISYLTIEHKGPIAEEFREALGNRIYGCDDCLAVCPWNKFADSAHRHLKLAPREELQAPDLARFLAFDDAGFRQFFSGSPIKRIGRDRFVRNCLYAAGNSGSAWLAPLVEALRGDPDPAVSDAADWAAARLRAFP

SEQ ID NO: 76629 - protein, 302 aa, Erythrobacter sp.
  REGION 1..302: note = tr|A0A3D2LL55|A0A3D2LL55_9SPHN tRNA epoxyqueuosine(34) reductase QueG (Fragment); OS = Erythrobacter sp. OX=1042 GN=queG PE=4 SV=1
MVNGELQAELREEAERLGFVACGFASAAPDPQRAARLEQFLGEGRHGSMEWMEARKTQRASPQGLWPEANSVIALGMSYAPDVDPLALADAAEKARVSVYAQGRDYHDVVKKALKALARWLIAREPTSELKVFVDTAPVMEKPLGQAAGIGWQGKHTNLVSRSHGSWLFLGAIYSTLEFAPDLSHPDRCGNCRACQDACPTDAFPAPYQLDARRCISYLTIEHKGPIPEEFREALGNRIYGCDDCLAVCPWNKFADTAHRHLKLAPREELMAPDLASFLTFDDAGFRQFFSGSPIKRVGRDR

SEQ ID NO: 76630 - protein, 357 aa, Erythrobacter sp.
  REGION 1..357: note = tr|A0A109LPP3|A0A109LPP3_9SPHN Epoxyqueuosine reductase OS=Erythrobacter sp. YT30 OX=1735012 GN=queG; PE = 3 SV=1
MVNSGLTNGVEETLETRISKAALDLGFVSCGITSAREDPVRAERLEQWLGDNHHGTMEWMETRAHHRRSPQALWPEARSVIALGMSYAPSADPMRLEDYPAHARISVYAQGKDYHDTVKKRLKALARWLVAEELGAEVKVFVDTAPVMEKPLGEAAGIGWQGKHTNLVSPDHGSWLFLGAIYTTLELEPSDPQRDQCGTCRACLDSCPTDAFPSAYRLDARRCISYLTIEHKGPIAEEFRTALGNRIYGCDDCLAVCPWNKFASTAHAMREFLPRAELASPRLGELLALDDAGFREVFSGSPIKRIGRGRFVRNCLYAAGNSGDAALLGACEKLKNDPDTVVADAAHWAAARLTSSL

SEQ ID NO: 76631 - protein, 352 aa, unidentified
  source 1..352: note = Erythrobacter xanthus
  REGION 1..352: note = tr|A0A3A1P4E9|A0A3A1P4E9_9SPHN Epoxyqueuosine reductase OS=Erythrobacter xanthus OX=1784712 GN=queG PE=3; SV = 1
MVNLAEATLQDRLREKARELGFAAIGFAPAEDDPVRSARLHEWIAAGYHGDMQWMADRADVRQGPQSMWPVARSVIALGMSYAPEVDPLALEGDAEKARISVYAHGRDYHDVVKKALKALARWLVEQAPETELKVFVDTAPVMEKPLGQVAGLGWQGKHTNLVSREHGSWLFLGAIYTTAEFVPDKPQADHCGSCRACQQACPTEAFVSPYKLDARRCISYLTIEYAGPIPEEFREAIGNRIYGCDDCLAVCPWNKFADTAARHKAFAAREELIEPIVAELLTLDDAAFRAKFSGSPIKRIGRNRFVRNCLIAAGNSGNAELIAPVRTLIDDPDPVVAEAARWALDKLTSVP

SEQ ID NO: 76632 - protein, 357 aa, unidentified
  source 1..357: note = Erythrobacter zhengii
  REGION 1..357: note = tr|A0A418NNM7|A0A418NNM7_9SPHN Epoxyqueuosine reductase OS=Erythrobacter zhengii OX=2307003 GN=queG PE=3; SV = 1
MVNCRDTISLEQALKAKARELGFAAVGITHAQDDPLRAERLHAWLGAGCHGDMAWMQDRADVRQGPKSMWPEAKSVIALGMSYAPEEDPLAEGEAKISVYARGRDYHDVVKKALKALARWLVEERPGTQLKVFVDTAPVMEKPLGEAAGIGWQGKHTNLVSREHGSWLFLGAIYTTLELSPDVPHDDRCGSCRACQDACPTNAFPQPYRLDARRCISYLTIEHKGPIPYEFREAIGNRIYGCDDCLAVCPWNKFADTAARHMKLAPREDLVDPPLADLLALDDAAFRARFSGSPIKRVGRDRFVRNCLIAAGNSADAALVPQVQALAKDPDPVVAEAAQWALSRLDRQFPIGSFDRV

SEQ ID NO: 76633 - protein, 319 aa, unidentified
  source 1..319: note = Erythrobacteraceae bacterium
  REGION 1..319: note = tr|A0A2D6NKJ8|A0A2D6NKJ8_9SPHN tRNA epoxyqueuosine(34) reductase QueG (Fragment); OS = Erythrobacteraceae bacterium OX=2026738 GN=queG PE=3; SV = 1
MVNAELQDDLRKEAQRLGFVACGFTSAAPDPQRAARLEEYLGEGRHGSMEWMEARKAQRASPQGLWPEARSVIALGMSYAPDIDPLALESHPEKARVSVYAQGRDYHDVVKKALKALARWLIERAPESELKVFVDTAPVMEKPLGEAAGIGWQGKHTNVVSRNHGSWLFLGAIYSTLDFATDTPGRDLCGSCRACQDACPTDAFPSPYKLDARRCISYLTIEHKGEVEEDLRPLLGNRIYGCDDCLAVCPWNKFADAAHRHLKLAPRQELAAPDLAAFLQFDDAGFRQFFSGSPIKRIGRNRFVRNCLYAAGNSGSASL

SEQ ID NO: 76634 - protein, 357 aa, unidentified
  source 1..357: note = Erythrobacteraceae bacterium
  REGION 1..357: note = tr|A0A0P7VNF2|A0A0P7VNF2_9SPHN Epoxyqueuosine reductase OS=Erythrobacteraceae bacterium HL-111; OX = 1666908 GN=queG PE=3 SV=1
MVKPPVSTIAPETLESRIAAKARELGFVACGFAGAEEDPVRAARLEQWLGEGLHGTMEWMETRLHHRRSPRALWPQARSVIALGMSYAPGHDPFALEDVGDRARVSVYAQGKDYHDIVKKRLKALARWLVAEEEGCEVKVFVDTAPVMEKPLGEAAGIGWQGKHTNLVSREHGSWLFLGAIYTTLDLAPAEPHRDSCGSCRACLDVCPTGAFPAPYRLDARRCISYLTIEHKGPVPEDLREGMGNRIYGCDDCLAVCPWNKFASQAAAMREFLPRPELVAPRLAELLALDDAGFRALFSGSPIKRIGRDRFVRNCLYAAGNSGDAALADPCEALTEDPDPVVAEAARWALRKLRAGP

SEQ ID NO: 76635 - protein, 379 aa, Escherichia albertii
  REGION 1..379: note = tr|A0A2S6P6Z3|A0A2S6P6Z3_9ESCH Epoxyqueuosine reductase OS=Escherichia albertii OX=208962 GN=queG PE=3; SV = 1
MSEPLDLNQLAQNIKQWGLELGFQQVGITDTDLSESEPKLQAWLDKQYHGEMDWMARHSMLRARPHELLPGTLRVISVRMNYLPANAAFASTLKNPKLGYVSRYALGRDYHKLLRNRLKKLGEMIQQHCVSLNFRPFVDSAPILERPLAEKAGLGWTGKHSLILNREAGSFFFLGELLVDIPLPVDQPLEEGCGKCVACMTICPTGAIVEPYTVDARRCISYLTIELEGAIPEELRPLMGNRIYGCDDCQLICPWNRYSQLTTEDDFSPRKPLHAPELIELFAWSEETFLKVTEGSAIRRIGHLRWLRNIAVALGNAPWDETILTALESRKGEHPLLDEHIAWAIAQQIERRNACVVEVQLPKKQRLVRVIEKGLPRDA

SEQ ID NO: 76636 - protein, 379 aa, Escherichia albertii
  REGION 1..379: note = tr|W0ATP7|W0ATP7_9ESCH Epoxyqueuosine reductase; OS = Escherichia albertii KF1 OX=1440052 GN=queG PE=3 SV=1
MSEPLDLNQLAQKIKQWGLELGFQQVGITDTDLSESEPKLQAWLDKQYHGEMDWMARHGMLRARPHELLPGTLRVISVRMNYLPANAAFASTLKNPKLGYVSRYALGRDYHKLLRNRLKKLGEMIQQHCVSLNFRPFVDSAPILERPLAEKAGLGWTGKHSLILNREAGSFFFLGELLVDIPLPVDQPVEEGCGKCVACMTICPTGAIVEPYTVDARRCISYLTIELEGAIPEELRPLMGNRIYGCDDCQLICPWNRYSQLTTEDDFSPRKPLHAPELIELFAWSEETFLKVTEGSAIRRIGHLRWLRNIAVALGNAPWDETILTALESRKGEHPLLDEHIAWAIAQQIERRNACVVEVQLPKKQRLVRVIEKGLPRDA

SEQ ID NO: 76637 - protein, 379 aa, Escherichia fergusonii
  REGION 1..379: note = tr|A0A564UZ15|A0A564UZ15_ESCFE Epoxyqueuosine reductase OS=Escherichia fergusonii OX=564 GN=queG PE=3; SV = 1
MSEPLDLNQLAQKIKQWGLELGFQQVGITDTDLSESEPKLQAWLDKQYHGEMDWMARHGMLRARPHELLPGTLRVISVRMNYLPANAAFASTLKNPKLGYVSRYALGRDYHKLLRNRLKKLGEMIQQHCVSLNFRPFVDSAPILERPLAEKAGLGWTGKHSLILNREAGSFFFLGELLVDIPLPVDQPVEEGCGKCVACMTICPTGAIVEPYTVDARRCISYLTIELEGAIPEELRPLMGNRIYGCDDCQLICPWNRYSQLTTEEDFSPRKPLHAPELIELFAWSEEKFLKVTEGSAIRRIGHLRWLRNIAVALGNAPWDETILAALESRKGEHPLLDEHIAWAMAQQIERRNACIVEVQLPKKQRLVRVIEKGLPRDA

SEQ ID NO: 76638 - protein, 379 aa, Escherichia fergusonii
  REGION 1..379: note = tr|F0JNX7|F0JNX7_ESCFE Epoxyqueuosine reductase; OS = Escherichia fergusonii ECD227 OX=981367 GN=yjeS PE=3; SV = 1
MSEPLDLNQLAQKIKQWGLELGFQQVGITDTDLSASEPKLQAWLDKQYHGEMDWMARHGMLRARPHELLPGTLRVISVRMNYLPANAAFASTLKNPKLGYVSRYALGRDYHKLLRNRLKKLGEMIQQHCVSLNFRPFVDSAPILERPLAEKAGLGWTGKHSLILNREAGSFFFLGELLVDIPLPVDQPVEEGCGKCVACMTICPTGAIVEPYTVDARRCISYLTIELEGAIPEELRPLMGNRIYGCDDCQLICPWNRYSQLTKEDDFSPRKPLHAPELIELFAWSEEKFLKVTEGSAIRRIGHLRWLRNIAVALGNAPWDKTILTALESRKGEHPLLDEHIAWAIAQQIERRNACVVEVQLPKKQRLVRVIEKGLPRDA

SEQ ID NO: 76639 - protein, 379 aa, unidentified
  source 1..379: note = Escherichia marmotae
  REGION 1..379: note = tr|A0A2B7LJL7|A0A2B7LJL7_9ESCH Epoxyqueuosine reductase OS=Escherichia marmotae OX=1499973 GN=queG PE=3; SV = 1
MSEPLDLNQLAQKIKQWGLELGFQQVGITDTDLSESEPKLQAWLDKQYHGEMDWMARHGMLRARPHELLPGTLRVISVRMNYLPANAAFASTLKNPKLGYVSRYALGRDYHKLLRNRLKKLGEMIQQHCVSLNFRPFVDSAPILERPLAEKAGLGWTGKHSLILNREAGSFFFLGELLVDIPLPVDQPVEEGCGKCVACMTICPTGAIVEPYTVDARRCISYLTIELEGAIPEELRPLMGNRIYGCDDCQLICPWNRYSQLTTEDDFSPRKPLHAPELIELFAWSEEKFLKVTEGSAIRRIGHLRWLRNIAVALGNAPWDEAILAALNSRKGEHPLLDEHIEWAIAQQIERRNACVVEVQLPKKQRLVRVIEKGLPRDA

SEQ ID NO: 76640 - protein, 379 aa, Escherichia sp.
  REGION 1..379: note = tr|A0A352MQ03|A0A352MQ03_9ESCH Epoxyqueuosine reductase OS=Escherichia sp. OX=1884818 GN=queG PE=3 SV=1
MSQPLDLNQLAQNIKQWGTELGFQQVGITDTDLSASEPKLQAWLDKQYHGEMAWMARHGMMRARPHELLPGTLRVISVRMNYLPANAAFASTLKNPALGYVSRYALGRDYHKLLRNRLKKLGETIQQHCVSLNFRPFVDSAPLLERPLAEKAGLGWTGKHSLILNQEAGSFFFLGELLIDLPLPIDQPVEEKCGKCVACMTICPTGAIVEPYTVDARRCISYLTIELEGSIPPEFRPLIGNRIYGCDDCQLICPWNRFSQLTDEEDFSPRKALHAPELIALFGWSEAHFLKVTEGSAIRRIGHLRWLRNVAVALGNAPWDEANIQALEQRRGEHPLLDEHIEWAIAQQIEKRNACVVEVQLPQKLRLVRVVEKGLPRDA

SEQ ID NO: 76641 - protein, 379 aa, Escherichia sp.
  REGION 1..379: note = tr|A0A4U6CRE6|A0A4U6CRE6_9ESCH Epoxyqueuosine reductase OS=Escherichia sp. MR OX=2575922 GN=queG PE=3; SV = 1
MSEPLDLNQLAQKIKQWGLELGFQQVGITDTDLSESEPKLQAWLDKQYHGEMDWMARHGMLRARPHELLPGTLRVISVRMNYLPANAAFASTLKNPKLGYVSRYALGRDYHKLLRNRLKKLGEMIQQHCVSLNFRPFVDSAPVLERPLAEKAGLGWTGKHSLILNREAGSFFFLGELLVDIPLPVDQPVEEGCGKCVACMTICPTGAIVEPYTVDARRCISYLTIELEGAIPKELRPLMGNRIYGCDDCQLICPWNRYSQLTTEDDFNPRKPLHAPELIELFAWSEEKFLKITEGSAIRRIGHLRWLRNIAVALGNAPWDEAILTALESRKGEHPLLDEHIAWAITQQIERRNACVVEVQLPKKQRLVRVIEKGLPRDA

SEQ ID NO: 76642 - protein, 320 aa, unidentified
  source 1..320: note = Estrella lausannensis
  REGION 1..320: note = tr|A0A0H5DSJ3|A0A0H5DSJ3_9BACT Uncharacterized protein OS=Estrella lausannensis OX=483423 GN=ELAC_1949; PE = 4 SV=1
MDEISFAEIHEAALRSGFHDCGICDPEIPKEDADAYDTWLKDGLNAHLAYMENRIRIDPKSLFADLKSVIMFVTHYKQEKLPFEEGKGLIASYARGRDYHRIHKKQLKEFICWLEKRSGKEGIARGFSDSFPLLEKALAAKAGLGFVGKNTLLIHPKFGTFVLISGILTSLDLPRTASKARMPRCGSCTKCLDACPTSAIIAPYRVDAAKCLSSLLIESKGPLENPEKVRNPGYIFGCDICQDVCPHNVRKPLSLHTEFSQEKGQGAYITRDRLEALLTMPEELYGSPTFGSPLNRRGALGLKANAETLPWALEAAHELK

SEQ ID NO: 76643 - protein, 309 aa, Ethanoligenens harbinense
  REGION 1..309: note = tr|A0A386XT22|A0A386XT22_9FIRM 4Fe-4S ferredoxin-type domain-containing protein; OS = Ethanoligenens harbinense OX=253239 GN=CN246_09210 PE=4; SV = 1
MHVLRQAAEVFEQAGCKTKWLTLAHIDETVWETYDLFHSGKLGPAFSARYQHKFRLDWQPSGPTIRSAILLAVPVHMLLLRFHYHGAQREIAVPPGYACSDTESRIWKLAETAFGEAGHDFQWLRGVPLKLLAVRSGLCLYGRNNITYCEELGSFIELYGFVTDMDAPKQIPWYPSAQMPECAACTVCAQACPSACIDLHSPIIHAERCLTYLNENGGDFPAWLKPSAHHTAVGCMICQRACPKNRGHLSVQTVESAFDKDEIDAICAGGEFHDLPEKTQKTLKSFDLDDYWPKQALSRNIRALLAKNE

SEQ ID NO: 76644 - protein, 313 aa, unidentified
  source 1..313: note = Eubacteriaceae bacterium
  REGION 1..313: note = tr|A0A425W803|A0A425W803_9FIRM tRNA epoxyqueuosine(34) reductase QueG OS=Eubacteriaceae bacterium OX=2049045 GN=queG PE=4 SV=1
MIQNNEPLTEDAIRRLAEKIDIPILGITDAEPITEMLPYEKQRRQENNGLIPFVRTKPERRIDFKSVMPEVKSVIVIGIPYPLFPQKIEDFTTYGYFSSVTCGKDYHKVVMEKMDALCARIQSELSAEIQVKKFVDNSRLMDKASAWKAGLGFFGKNNLLIHPQFGSAWNIGQILIDKAIVHKAITPMANQCGKCQRCIEACPGHALGDQGYQLFYERCISYLTQKRKLTEAEEKRIRYFLYGCDICQWVCPFNNREGKKPELDSAVKLDEILNLSESEIKSKFADRALSWLPPSVLVRNAGILKNRSKTSFK

SEQ ID NO: 76645 - protein, 275 aa, unidentified
  source 1..275: note = Eubacteriaceae bacterium
  REGION 1..275: note = tr|A0A143ZSU0|A0A143ZSU0_9FIRM Epoxyqueuosine reductase OS=Eubacteriaceae bacterium CHKCI005 OX=1780381; GN = queG PE=4 SV=1
MIQFDAIVPLLQEAGTDIWGCCAFEKIADRLIPCRARKRLMDGAQSILVGLFPYLVRQEEGNLCRYARVPDYHCVVGDVLEGLQKRLKEAYPSFSFESFVDNSPIPEVQAAALAGLGTVGDSGLLLHPEYGSWCFIGEIVTDLPVKPTGKELVRCIHCGACRRACPGRTLGKENFVRTNCVSDITQKKKDLTEEEEEKIAQNGLCWGCDTCQLVCPYNREVTIRPLQAFAEHYVPSYPPEQGDDLPRAWEWRGEAVIQRNLRIILGKKGHTKPAK

SEQ ID NO: 76646 - protein, 317 aa, Eubacterium aggregans
  REGION 1..317: note = tr|A0A1H4A4Z4|A0A1H4A4Z4_9FIRM Epoxyqueuosine reductase OS=Eubacterium aggregans OX=81409; GN = SAMN04515656_10795 PE=4 SV=1
MLRLKMARAMLEEAEIRRVAASLGIPIIGFTEATPLLEIKPHLEARHTTNGPTPFVGVSPDKRVDYRQAYGDVAAVIVIGLPYTLKMSPPKSTQGKGRLSAFCRGEDYHLRLSRTMEALMVALKANHPQLDYRLFVDNGKLVDRGSAWRAGLGFYGKNNTLIHPQYGSGVFIGQILVNTPIAFVPVTPLKSQCGSCRRCLDACPQGALKSGFSLDASRCISYLTQKKKLSEEEEQRVQYFVYGCDLCQLACPYNAHLPEVRWEDGPLNAAWPELQALSEMDEATFDAAFAGSALHWRGCQTLVRNSKLLLKFQEKEC

SEQ ID NO: 76647 - protein, 317 aa, Eubacterium barkeri
  REGION 1..317: note = tr|A0A1H3D9R2|A0A1H3D9R2_EUBBA Epoxyqueuosine reductase OS=Eubacterium barkeri OX=1528; GN = SAMN04488579_104121 PE=4 SV=1
MPRLKMARAMLEEAEVRRVAASLGIPIIGFTEATPLLEIKPHLEARQTTNGPTPFVGVPPDKRVDYRQAYGDAAAVIVIGLPYTLKMSPPKNTQGKGRLSAFCRGEDYHLRLSRKMEALMAALKVKHPQLDYRLFVDNGKLVDRGSAWRAGLGFYGKNNTLIHPQYGSGFFIGQILVSTPIAFVPAIPLKSLCGSCRRCLDACPHGALESGFSLDASRCISYLTQKKKLSEVEAQRVQYFVYGCDLCQLACPYNAHLPEECWEDGPMDAAWPELKALSKMDEATFDAVFTGSALHWRGCQTLVRNSKLLLKFLEKEC

SEQ ID NO: 76648 - protein, 236 aa, Eubacterium barkeri
  REGION 1..236: note = tr|A0A1H3DZG3|A0A1H3DZG3_EUBBA Epoxyqueuosine reductase QueG (Queuosine biosynthesis) OS=Eubacterium barkeri OX=1528 GN=SAMN04488579_10633 PE=4 SV=1
MNGIKEKIRQKALEMGAVDVGWADLEAASVSAPDDFKQALCIVVPLNRGVISHIQETPTHAYYAHYVSVNRLIDDITLQLALLLEAQGYPAQAIPAGPPMLSDDTVLHGLFQHKTTAVLSGMGWIGKSALFLHQEYGSGVRLGSVLTTTELPIENKPMESQCGGCRICTRVCPSGAIKGEKWALGMERDTLFDALKCDAYINTHHEEIAHQMVCGLCMAHCPFTKGTRKIDESLRN

SEQ ID NO: 76649 - protein, 315 aa, Eubacterium callanderi; identical to SEQ ID NO: 75327
  REGION 1..315: note = tr|E3GFZ7|E3GFZ7_9FIRM 4Fe-4S ferredoxin-type domain-containing protein OS=Eubacterium callanderi; OX = 53442 GN=ELI_3522 PE=4 SV=1

SEQ ID NO: 76650 - protein, 315 aa, Eubacterium callanderi
  REGION 1..315: note = tr|A0A1I5KS50|A0A1I5KS50_9FIRM Epoxyqueuosine reductase OS=Eubacterium callanderi OX=53442; GN = SAMN04487888_105302 PE=4 SV=1
MLKEEKIREAARAAGIEMIGFAEPHPLTEWLEILEKRREQGRITSFERTPPSRRVDYSQAFPKVKGIIVIGVPYCTELPEPEDNTAHGSMASVAWGQDYHEVVTEKMNGLMALLKETAPSLEYRSYVDNSRLLDRATAWRAGLGFFGKNNTLINPEYGSFFFIGQILVSSFIDFKHAVPLKSQCGTCQRCLMACPNQALGEGYTLEPERCVSYLTQKKKLTPEEERLLGVTYLYGCDDCQRACPWNIKSSDGGQAWPDIVPESIYPGLDETEAISEADFEEKFGKTAAAWRGKDVLARNARIIKNNLKNHAKDKN

SEQ ID NO: 76651 - protein, 230 aa, Eubacterium limosum
  REGION 1..230: note = tr|A0A317RQ45|A0A317RQ45_EUBLI Epoxyqueuosine reductase QueG OS=Eubacterium limosum OX=1736; GN = C7955_104213 PE=4 SV=1
MNPLNEKIEALGKGLGAAQVGFADLSGLPDGLNMGYPGAVSVVVRLSKGILAQIEDAPTATYFSHYRIVNRLIDEITLRVALALEEEGAMAVAVPASQSLPSVKGENPYRGLFAHKTAAVIAGMGWIGKSALFIHRDYGPAVRLGTVLTDAPLDTVAALAESECGSCQACVQACPSMSIEGTLWEPGMERSYLLDAHSCSEYMKEAYQHIGRGSVCGLCMVSCPHFRKNL

SEQ ID NO: 76652 - protein, 315 aa, Eubacterium limosum
  REGION 1..315: note = tr|A0A317RX92|A0A317RX92_EUBLI Epoxyqueuosine reductase OS=Eubacterium limosum OX=1736 GN=C7955_102339; PE = 4 SV=1
MLKEEKIREAARAAGIKMIGFGEPHPLTEWLEPLEKRREQGRVTSFERTPPARRVDYSQAFPEVKGIIVIGVPYCSELPKPEDNTPRGKIASVAWGQDYHEVVTGKMDALMALLKETDPSLDYRGYVDNSRLLDRATAWRAGLGFFGKNNTLINPEYGSFFFIGQILVNSSIDFEPAETLKSRCGTCRRCLVACPNHALGEGYTLEPERCISYLTQKKKLTAEEERLLGITYLYGCDDCQRVCPWNIRRSDSRPDWPGIGPESVYPGLDETEAISGLDFEEKFGKTAAAWRGRDVIARNARIIKNNLKNHAKDKN

SEQ ID NO: 76653 - protein, 315 aa, unidentified
  source 1..315: note = Eubacterium maltosivorans
  REGION 1..315: note = tr|A0A4P9CC92|A0A4P9CC92_9FIRM tRNA epoxyqueuosine(34) reductase QueG OS=Eubacterium maltosivorans OX=2041044 GN=queG PE=4 SV=1
MLKEKNIREAARAAGIKMIGFAEPHPLTEWLEPLEKRRKQGRVTSFERTPPARRIDYAQAFPEVKGIIVIGVPYSAELPEPEDDADRGKIASVAWGQDYHEVVTEKMDSLMALLKEAEPSLACRTYVDNSRLLDRATAWRAGLGFFGKNNTLIHPEYGSFFFIGQILINRSINFDPVKPLKSRCGACQRCLMACPNQALGEGYTLEPEKCVSYLTQKKKLTAEEERLLGDVYLYGCDDCQRACPWNKRSLECRVDWPGVEPESVYPGLDETEAISEPDFEKKFGKTAAAWRGKDVLSRNARIIKNNLKNHAKDKN

SEQ ID NO: 76654 - protein, 312 aa, Eubacterium pyruvativorans
  REGION 1..312: note = tr|A0A1I7HMS1|A0A1I7HMS1_9FIRM Epoxyqueuosine reductase QueG (Queuosine biosynthesis) OS=Eubacterium pyruvativorans OX=155865 GN=SAMN05216508_12018 PE=4 SV=1
MGLAGEIYSAALQCGYDNCGIILPEDVKGASDFLQKRMEDVPSSISFYKGIFSNYISIKERYPWAKAIIVLTSEHGKYRYPAELRKRYAKAFFLSPEEGNTDAYDHVRFENWLQEQDIRWEHGRIPLRYAAMKAGLGIIRKNNFFYTEHGSFVGLTAYIIDQECSLHQDVSPRPCSDACTLCQKACRSRSLLAPYTMDPMKCISFWTTFGKGNVPPFLEESMFEEWICGCDNCQDACPYNRKHDWDKGEAFSNLEEIAKDMVPEKLIYQTDDFLKREVIAKTDQHLDPEDTNVLRTNAKRAIRNAQSNTGEH

SEQ ID NO: 76655 - protein, 315 aa, Eubacterium sp.; identical to SEQ ID NO: 76653
  REGION 1..315: note = tr|A0A415Z8T8|A0A415Z8T8_9FIRM tRNA epoxyqueuosine(34) reductase QueG OS=Eubacterium sp. AM05-23 OX=2292043 GN=queG PE=4 SV=1

SEQ ID NO: 76656 - protein, 280 aa, Eubacterium sp.
  REGION 1..280: note = tr|R7FZM5|R7FZM5_9FIRM Uncharacterized protein; OS = Eubacterium sp. CAG:841 OX=1262894 GN=BN797_01069 PE=4; SV = 1
MNSSLYDVFSAENIECFAPVPIEKCRLRRPDLLERAGLPANEAKTVIMFLIPYYDDDGDGNISLYARPMDYHLYCDGLFPRLCGKLCEKFGGKFVGFADKSPIEEADAACRAGLGVIGDSYVIINEKYGSFVFIAEVFTDIESERFGCDKNGEYPLSYCVHCGACKRACPMILEGMDCLSAVTQKKGELSEKEKEYIIKYKSAWGCDICQLACPMVQKAIKNGARTPISFFRENRIKNLTTEELCGMSDEEFRKRAFSWRGKATIKRNIDLLCGKGGAHE

SEQ ID NO: 76657 - protein, 305 aa, unidentified
  source 1..305: note = [Eubacterium] yurii
  REGION 1..305: note = tr|A0A1T5JTT7|A0A1T5JTT7_9FIRM Epoxyqueuosine reductase QueG (Queuosine biosynthesis) OS=[Eubacterium] yurii OX=39498 GN=SAMN02745115_01408 PE=4 SV=1
MGIIDEAIKSLGLGYEIEYSVVNLMDENFTCLQEDFLKFLEKRKNEGKISPLESSDIEKRVFPQKTLEGAKSVVTFLFPYMTPYHKDGNLSYYCMGLDYHIGVKDYLSKIKEYIAQCHKDASFYIQSDIGDLAEKFFAYNSGLGILGLNSLIISPLYGSYVNIGVIVSNLEIESKTSEKKTCDMCMKCQKACPGNAINGDFTIDSQNCASYISQKKGELSKDEVNILKKSAKIFGCDICQKVCHFNNNVKKISSTYDIINIIEKEDLQISNKEFKSKYGDRAFSFRGKNVLSRNLDLINIGEEIE

SEQ ID NO: 76658 - protein, 305 aa, unidentified
  source 1..305: note = [Eubacterium] yurii
  REGION 1..305: note = tr|E0QHZ5|E0QHZ5_9FIRM Putative iron-sulfur cluster-binding protein OS=[Eubacterium] yurii subsp. margaretiae ATCC 43715 OX=864565 GN=HMPREF0379_0678 PE=4; SV = 1
MSIIDEAIKSLDLEYEIEYSTVSLIDENFICLQEDFLKFLEKRKRDGKISQLESSDIEKRAFPQKILQGAKTVITFLFPYMTSFHKDGNLSYYCMGLDYHIGVKNSLNKIAEYIGQYHKDAKFYIQSDIGELDEKFFAYNSGLGILGLNSLIISPLYGTYVNIGVIVTDLEIKPKIAEKKICDMCMKCQNSCPGKAINGDFTIESQKCASYITQKKGELSKDEIEILKKSGKIFGCDICQKVCHFNKNVKKISSTYDIINSIEKDDLQISNKEFKLKYGDRAFSFRGKSVLSRNIDLINIGEEIE

SEQ ID NO: 76659 - protein, 315 aa, unidentified
  source 1..315: note = Euhalothece natronophila
  REGION 1..315: note = tr|A0A5B8NQF1|A0A5B8NQF1_9CHRO Epoxyqueuosine reductase OS=Euhalothece natronophila Z-M001 OX=522448; GN = queG PE=3 SV=1
MVLTSTEIKEKAKSLGFHLVGIAEAKNDEQTVAQTRLKNWLASGYHADMDWINNPKRFDLEACLSGVKSVIAVALNYYTPYEQPDDAETGKVSRYAWGRDYHKVMKKKLKALSQWLEDQDETIKTRYYCDTGPLQDKFWAQQAGLGWIAKNSNVITRDYGSWVFLGEVLTTLELTPDTPHTEHCGTCTRCLEACPTNAFPQPFVVDANKCIAYHTIENRSENLPENITLDGWVAGCDICQEVCPWNQQFAKETDCDDFQPRPDNFAPNLIELSQLKEQDWDEKTRGSALRRIKPAMWRRNARVNLEEDGDRNPND

SEQ ID NO: 76660 - protein, 310 aa, unidentified
  source 1..310: note = Euhalothece sp.
  REGION 1..310: note = tr|A0A2K3A8X2|A0A2K3A8X2_9CHRO Epoxyqueuosine reductase OS=Euhalothece sp. KZN 001 OX=1884791 GN=queG; PE = 3 SV=1
MVLTSQEIKAKAKRLGFHLVGVAVAENDEQVLAQQRLQNWLNSGYHADMEWMNNPKRFDLQKCLPNVKSVIAVALNYYTPEQQSEDPEKGKISRYAWGRDYHKVMTKKLKALACWLEEQEETIQARFYCDTGPIQDKFWAQQAGLGWIAKNGNLITREYGSWVFLGEVLTTLELTPDTPHTEHCGTCTRCLDACPTDAFPQPFVVNAKRCIAYQTIENRAAELPKEINLNNWVAGCDICQEVCPWNQRFAKETDCDDFQPRPENIAPNLIELAQLRDESWDQKTRGSALRRIKPAMWRRNARANLEKDRD

SEQ ID NO: 76661 - protein, 307 aa, unidentified
  source 1..307: note = Euzebyella marina
  REGION 1..307: note = tr|A0A3G2L2V4|A0A3G2L2V4_9FLAO Epoxyqueuosine reductase OS=Euzebyella marina OX=1761453 GN=queG PE=3 SV=1
MYNKSRYSELIKQEAARLGFLSCGISKAEFLEAEAPRLEKWLNNQMHGEMGYMANHFDKRLDPRLLVDGAKSVISLLLNYYPEEEQKSSTYKISKYAYGQDYHHVIKSKLRELHNFIVEEIGEVNGRAFVDSAPVLDKAWAAKSGLGWIGKNSNLLTQQVGSFYFIAELIVDLELDYDTPVTDHCGTCTACIDACPTNAIVEPYVVDGSKCISYFTIELKNEIPDEFQGKFDDWAFGCDLCQDVCPWNRFSKPHRELLFDPHPDLLNMSKKDWEEMTEDVFKKVFKKSAVKRTKFSGLKRNIDFLKK

SEQ ID NO: 76662 - protein, 286 aa, unidentified
  source 1..286: note = Evtepia gabavorous
  REGION 1..286: note = tr|A0A3E2B2B6|A0A3E2B2B6_9FIRM Epoxyqueuosine reductase OS=Evtepia gabavorous OX=2211183 GN=DV520_09140; PE = 4 SV=1
MNQLWKAAGAAAWGAAALGGLQPFLGPEAAEQLHTLCPGAQTVLVGAFPYYAGQAPGNLSLYCRGEDYHLVLGRRLEQVCAGLRARHPSHTFVAGADNSPVPELAAAELAGVGCRGRHGLRIVPPYGSYVFLGTILTDLVLPSTGPSAETLCPPHCRACQAACPTGALTEQGCEVTRCLSDLTQRKGPLPPEAAEQVRRSPTVWGCDLCQKACPHNQAAALTPLPEFREDLLCSLTLAELEPLSNKAFRRQYARRAFSWRGIGPLRRNLALKEETAPAEEEDRPSS

SEQ ID NO: 76663 - protein, 236 aa, Ewingella americana
  REGION 1..236: note = tr|A0A377NGU6|A0A377NGU6_9GAMM Epoxyqueuosine reductase OS=Ewingella americana OX=41202 GN=queG_2 PE=4; SV = 1
MERPLAEKAGLGWVGKHSLILNREAGSWFFLGELLIDLSLPVDKPQEEQCGRCVACMTICPTQAIVAPYTVDARRCISYLTIELEGAIPEEFRPLMGNRIYGCDDCQLICPWNRYSQLTDEDDFSPRAALHAPELVALFAWNEEKFLRITEGSPIRRIGHLRWLRNISVALGNAPYAENVLLALQSRQGENSLLDEHIEWAIAQQLQKRSENQVEVQSSQKKRLIRAVEKGLPRDA

SEQ ID NO: 76664 - protein, 395 aa, Ewingella americana
  REGION 1..395: note = tr|A0A085G2K9|A0A085G2K9_9GAMM Epoxyqueuosine reductase OS=Ewingella americana ATCC 33852 OX=910964; GN = queG PE=3 SV=1
MTLPLDLIQLAQLIKQWGQSLGFQQVGICDTDLSAEEPKLQAWLDKQYHGEMDWMARHGMLRARPHELLPGTLRVISVRMNYLPAKAAFAKTLNNPELGYVSRYALGRDYHKVLRQRLKKLGEKIQDYCTEHADSAAVDGSDQHGTQISFRPFVDSAPIMERPLAEKAGLGWVGKHSLILNREAGSWFFLGELLIDLSLPVDKPQEEQCGRCVACMTICPTQAIVAPYTVDARRCISYLTIELEGAIPEEFRPLMGNRIYGCDDCQLICPWNRYSQLTDEDDFSPRAALHAPELVALFAWNEEKFLRITEGSPIRRIGHLRWLRNISVALGNAPYAENVLLALQSRQGENSLLDEHIEWAIAQQLQKRSENQVEVQSSQKKRLIRAVEKGLPRDA

SEQ ID NO: 76665 - protein, 386 aa, Exiguobacterium antarcticum
  REGION 1..386: note = tr|K0AAT0|K0AAT0_EXIAB Iron-sulfur cluster binding protein OS=Exiguobacterium antarcticum (strain B7); OX = 1087448 GN=Eab7_0637 PE=4 SV=1
MDGAALKAQLQAYATEIGIDEFRVTTADPFLVMKQRLIQQQEKGYASGFEEPDLDRRTTPTLLLDDAVSIIAIAVAYPSKLKDAPRGKEGERRGIFGRSSWGLDYHQALKNRLMLLEEKIHTLSPGSQTRSMVDTGELVDRAVAERAGIGFSGKNCSIISETHGSYLYLGELITDCYLPPDEAVEELCGSCTKCMDACPTDALVEPGVIDAKRCISFITQTKTLIPEDFRYALGNRLYGCDTCQQVCPYNRKKHATQHAELQPDPEQVKPLLIPLLSLSNREFKTRFGSLSGAWRGKKPIQRNAVCALVHYQDRTALDALRTMAETDQREDMRALAIWAIGRISGQEAEGYVQDRLSVDAANDVQVEGARLLDEWRAERAVSSTEV

SEQ ID NO: 76666 - protein, 385 aa, Exiguobacterium aurantiacum
  REGION 1..385: note = tr|A0A377FVU6|A0A377FVU6_9BACL Epoxyqueuosine reductase OS=Exiguobacterium aurantiacum OX=33987 GN=queG; PE = 4 SV=1
MNGLSPETLKQKIIEYAQTIGIDELKVTTADPFIVMKQRLVKQQEKGFASGFEEPDLDKRTKPELLLEDAQSIIAIAIAYPSKLKEAPRSVSGSRRGLFARASWGLDYHRAVGSRLEKLQAYIETLVPEVRTRSMVDTGELVDRAVAERAGIGFSGKNCSIISPEKGSYIYLGEMILDTYLPPDEAIEDGCGDCDKCMTACPTSALVEPGVLDAKRCIAYLTQMKTLMPREFRSKLGGRLYGCDTCQQVCPYNRKKDWRHHEELLPEAEIVKPLLEPLLTLSNREFKTKFGHLSGAWRGKKPIQRNAILALAHYREPSAVPVLQAFVQEDAREDMRATAVWAIGAILGEEAETIYREIEQKEQSEVVLEEIRIFREEWERENRVI

SEQ ID NO: 76667 - protein, 385 aa, unidentified
  source 1..385: note = Exiguobacterium chiriqhucha
  REGION 1..385: note = tr|U1MZI0|U1MZI0_9BACL Iron-sulfur cluster-binding protein OS=Exiguobacterium chiriqhucha RW-2 OX=1345023; GN = M467_08000 PE=4 SV=1
MNGMSPERLKQKIVAYATTIGIDELKVTTADPFIVMKQRLVKQQEKGFASGFEEPDLDKRTTPTLLLEEAQSIIAIAILYPSKLKDAPRSVADERRGLFARASWGLDYHRAVGSRLEQLQAYIEQLVPGVRTRSMVDTGELVDRAVAERAGIGFSGKNCSIISPEKGSYLYLGEMILDTYLPPDEMIEDGCGECTKCMTSCPTTALIEPGVLDAKRCIAYLTQMKTLMPREFRSKLGGRLYGCDTCQQVCPYNRKKDWRHHEELIPEAEIVKPLLVPLLNMSNREFKAKFGHLSGAWRGKKPIQRNAILALAHYREPSAVPVLEDFIQQDEREDMRATAVWAIGAILGAEAETIYQQIESTETSELVHEEIRLFREEWSHEDRVI

SEQ ID NO: 76668 - protein, 386 aa, unidentified
  source 1..386: note = Exiguobacterium enclense
  REGION 1..386: note = tr|A0A0V8GFQ9|A0A0V8GFQ9_9BACL Epoxyqueuosine reductase OS=Exiguobacterium enclense OX=1017277; GN = AS033_06425 PE=4 SV=1
MDGVQLKLALQEYAAEIGIDELKVTTADPFLVLKRRLQAQQEKGFASGFEEPDLDLRTTPSLLVEDAASIIAIAVAYPSTLKNAPRGKEGERRGIFCRSSWGLDYHQALRQRLTLLEEKIQELSPGARTRSMVDTGELVDRAVAERAGIGFSGKNCSIISEEHGSYLYLGELITDIVLPPDQPVEELCGTCNKCIDACPTDALVEPGVIDAKRCISFLTQTKTLLPEPFRMALGNRLYGCDTCQQVCPYNRKKNATHHAELQPDPEQVKPLLVPLLSMSNREFKSRFGTLSGAWRGKKPIQRNAICALVHYRDKSAIEALRLMTETDAREDMRALALWAVGRIGGIDEKSYIESRLLADIAVDVQTEGQRLLEEWGEADAISTAHL

SEQ ID NO: 76669 - protein, 382 aa, Exiguobacterium mexicanum
  REGION 1..382: note = tr|A0A099DF09|A0A099DF09_9BACL Iron-sulfur cluster-binding protein OS=Exiguobacterium mexicanum; OX = 340146 GN=JY98_00020 PE=4 SV=1
MDPETLKQKIVAYATTIGIDELKVTTADPFIVMKQRLVKQQEKGFASGFEEPDLDKRTTPTLLLDEAQSIIAIAIAYPSKLKDAPRSVADERRGLFARASWGLDYHRAVGSRLEQLQAYIEQLVPGVRTRSMVDTGELVDRAVAERAGIGFSGKNCSIISPEKGSYLYLGEMILDTYLPPDEMIEDGCGECTKCMTACPTTALIEPGVLDAKRCIAYLTQMKTLMPREFRSKLGGRLYGCDTCQQVCPYNRKKDWRHHEELLPEAEIVKPLLVPLLNMSNREFKAKFGHLSGAWRGKKPIQRNAILALAHYREPSAVPVLEDFIQQDEREDMRATAVWAIGAILGAEAETIYRQIESTETSELVHEEIRLFREEWDREDRVI

SEQ ID NO: 76670 - protein, 177 aa, Exiguobacterium mexicanum
  REGION 1..177: note = tr|A0A099DC75|A0A099DC75_9BACL [Fe-S]-binding protein (Fragment) OS=Exiguobacterium mexicanum OX=340146; GN = JY98_16590 PE=4 SV=1
KLQAWLDKQYHGEMEWMNRHGMMRARPHELHPGTLRVISVRMNYLPAKAAFASTLNNPELGYISRYALGRDYHKLLKKRLKVLSDRILAYCREFDGMMLANGIHVDDLNFRPFVDSAPILERPLAVKAGLGWTGKHSLVLNREAGSWFFLGELLINLPVPIDQPIEEGCGRCVACMT

SEQ ID NO: 76671 - protein, 381 aa, Exiguobacterium sibiricum
  REGION 1..381: note = tr|B1YK62|B1YK62_EXIS2 Iron-sulfur cluster binding protein OS=Exiguobacterium sibiricum (strain DSM 17290 / JCM 13490 / 255-15) OX=262543 GN=Exig_0662 PE=4 SV=1
MRGDMLKRELQAYAKEIGIDEFRVTTADPFLVMKQRLMEQQEKGYASGFEEPDLERRTTPALLLEDAVSIIAIAVAYPSKLKDAPRGKEGERRGIFGRSSWGLDYHQALKQRLTLLEEKIQELSPGARSRSMVDTGELVDRAVAERAGIGFSGKNCSIISEEHGSYLYLGELITDQYLPPDESVEELCGSCNKCLDACPTDALIEPGVIDAKRCISFITQTKTLIPEHFRYALGNRLYGCDTCQQVCPYNRKKNATQHSELQPDPEQVKPLLIPLLSLSNREFKSRFGSLSGAWRGKKPIQRNAVCALVHYQDRTALDALRLMAETDQREDMRALAIWAVGRIAGQEAEDYIQKRLLTDSAEDVQVEGNRLLEEWGNGHAI

SEQ ID NO: 76672 - protein, 382 aa, Exiguobacterium sp.
  REGION 1..382: note = tr|C4L373|C4L373_EXISA Iron-sulfur cluster binding protein OS=Exiguobacterium sp. (strain ATCC BAA-1283 / AT1b) OX=360911 GN=EAT1b_2426 PE=4 SV=1
MDPYTLKQQILAYAETIGIDELKVTTADPFIVMKQRLIRQQEKGFASGFEEPDLEKRTNPELLLEEAQSIIAIAIAYPSKLKDAPRSVAGERRGLFARASWGLDYHRAVGNRLEKLQAYIEELVPNVRTRSMVDTGELVDRAVAERAGIGFSGKNCSIISPEKGSYLYLGEMILDVYLPPDEAIEDGCGDCDKCMTACPTTALVEPGVLDAKRCIAYLTQMKTLMPREFRSKLGGRLYGCDTCQQVCPYNRKKDWRHHEELLPEAEIVKPLLEPLLTLSNREFKQKFGHLSGAWRGKKPIQRNAILALAHYREPSAIPILREFIKQDEREDMRATAVWAIGAILGPEADSIFEEIERNETSDMVHEEIRIYREEWAHEDRVV

SEQ ID NO: 76673 - protein, 382 aa, Exiguobacterium sp.
  REGION 1..382: note = tr|A0A4R0ZAS6|A0A4R0ZAS6_9BACL tRNA epoxyqueuosine(34) reductase QueG OS=Exiguobacterium sp. SL-9 OX=2510963 GN=queG PE=4 SV=1
MDPETLKQKIVAYATTIGIDELKVTTADPFIVMKQRLVKQQEKGFASGFEEPDLDKRTTPTLLLEEAQSIIAIAILYPSKLKDAPRSVADERRGLFARASWGLDYHRAVGSRLEQLQVYIEQLVPGVRTRSMVDTGELVDRAVAERAGIGFSGKNCSIISPEKGSYLYLGEMILDTYLPPDEMIEDGCGECTKCMTACPTTALIEPGVLDAKRCIAYLTQMKTLMPREFRSKLGGRLYGCDTCQQVCPYNRKKDWRHHEELLPEAEIVKPLLVPLLNLSNREFKAKFGHLSGAWRGKKPIQRNAILALAHYQEPSAVPVLEDFIRQDEREDMRATAVWAIGAILGPEAEPIYQRIEATETSELVHEEIRLFREEWDREDRVI

SEQ ID NO: 76674 - protein, 323 aa, unidentified
  source 1..323: note = Extensimonas vulgaris
  REGION 1..323: note = tr|A0A369AL25|A0A369AL25_9BURK Epoxyqueuosine reductase OS=Extensimonas vulgaris OX=1031594; GN = DFR45_104152 PE=4 SV=1
MDYMAAHGLKRARPAELVPGTVSVITARMDYLPRMDAAGWSAQGDQDWRTVEWARLERPHEGVVSLYARGRDYHKVLRARLQKLCDRIAAAVGPFGHRVFTDSAPVLEAALAERSGLGWRGKHTLVIDRAAGSMFFLGEIYTDLVLEPTQPVPEHCGSCSACLSACPTGAIVAPYRLDARRCISYLTIEHPGAIPPELRPLLGNRIYGCDDCQLVCPWNKFAQRSSLPDFDARAELTGQRLVSLFAWDEATFLRRTEGSPIRRIGHERWLRNIAVALGNALHSRNDAVQGEEQAAMRAALQARSGHASPLVREHVAWALAQGG

SEQ ID NO: 76675 - protein, 311 aa, unidentified
  source 1..311: note = Fabibacter misakiensis
  REGION 1..311: note = tr|A0A1E5T363|A0A1E5T363_9BACT Epoxyqueuosine reductase OS=Fabibacter misakiensis OX=1563681 GN=queG; PE = 3 SV=1
MNNQISNNTRLVKATAQKLGFDFCGISKAEFLAEEAPRLENWLKRGAHGKMSYMENHFDKRLDPTKLVPGAKSVVSLLYNYYPESDLSAEEPSNYKIAKYAYGTDYHFVIKDKLKTFLQELNSEIGAIDGRVFVDSAPVMERQWAEKSGLGWIGKNTLLINKNQGSFFFLAELIIDLELEVDGPIKDYCGTCTKCIDSCPTDAITPYELDASKCISYLTIELKDNIPQEFENKMEGWAFGCDICQDVCPWNRFSKKHSEPAFSPKKELIELFNNNWQDLTDEVFRVVFKGSAVKRTKMSGLKRNLDFLKKS

SEQ ID NO: 76676 - protein, 313 aa, unidentified
  source 1..313: note = Fabibacter pacificus
  REGION 1..313: note = tr|A0A4D7JF28|A0A4D7JF28_9BACT Epoxyqueuosine reductase OS=Fabibacter pacificus OX=1267423 GN=queG PE=3; SV = 1
MSSNKTVKNTEILKKLASDHGFSFCGVSKAEFLESEAGRLEEWLKRGYQGKMSYLENHFDKRLDPTLLVPGAKSVVSLIYNYFPPEDNHQRTDSYKIARYAYGKDYHYVVKDKLRELVHDLKKEVGDVDGRVFVDSAPVMERSWAEKSGIGWVGKNSLLLNRSMGSYFFLAELIIDLELIPDAPTKDYCGTCTACMDACPTDAIPESGVVDGSKCISYLTIELKDDIPAEFSNKMNDWIFGCDICQEVCPWNRFSTPHNEKDFLPNDFIQNATRQEWQEMTKEIFNEVFRKSPVKRTKYSGLKRNIEFIKKDQ

SEQ ID NO: 76677 - protein, 311 aa, unidentified
  source 1..311: note = Fabibacter pacificus
  REGION 1..311: note = tr|A0A1I0NL90|A0A1I0NL90_9BACT Epoxyqueuosine reductase OS=Fabibacter pacificus OX=1267423 GN=queG PE=3; SV = 1
MKTLAHHNTQLIKQKAQALGFQFCGISKAEFLEEEAPRLEAWLKSGAHGKMSYMENHFDKRLDPTKLVPGAKSVVSLLYNYYPEKDFAQENPEAPKLAKYAYGKDYHHVIKEKLKEFMSILTEEIGEIDGRVFVDSAPVMERQWAAKSGLGWLGKNTLLINKGHGSFFFLAELIIDLELEPDGPIKDYCGTCTRCIDACPTDAITPYHLEANKCISYLTIELKDELPQEFKGKMEGWAFGCDICQDVCPWNRFSKPHNEAHFEPKDGLKELFNNNWQDLTEAVFREAFRHSAVKRTKFSGLKRNLEFVGKN

SEQ ID NO: 76678 - protein, 311 aa, Fabibacter sp.
  REGION 1..311: note = tr|A0A1E5SVT7|A0A1E5SVT7_9BACT Epoxyqueuosine reductase OS=Fabibacter sp. 4D4 OX=1889784 GN=queG PE=3; SV = 1
MNHQISHNTSIVKAMAQDLGFDFCGISKAEFLSEEAPRLEKWLKNKAHGEMSYMENHFDKRLDPTQLVPGAKSVVSLLYNYYPEKDLASHQTDNPKIAKYAYGKDYHFVIKDKLKEFMHLLEEQVGQVEGRVFVDSAPVMERQWAAKSGLGWIGKNTLLINKDRGSFYFLAELIIDLELEVDGPIKDYCGTCTKCIDACPTDAITPYELDASKCISYLTIELKDQLPSEFKGKMEGWAFGCDICQDVCPWNRFSKPHTEPEFHPKDELIELFNNNWQDLTEEVFRSVFKGSAVKRTKFEGLKRNLDFLKKI

SEQ ID NO: 76679 - protein, 385 aa, Facklamia hominis
  REGION 1..385: note = tr|K1LTK8|K1LTK8_9LACT 4Fe-4S ferredoxin-type domain-containing protein OS=Facklamia hominis CCUG 36813; OX = 883111 GN=HMPREF9706_01651 PE=4 SV=1
MESKQLKQAIKAKAQAIGIDKIGFTDAAPFLSIEAKYQEQIDRGYSTGFEHPILEERIYPDRIFDKPRSIIAICLAYPSAVPVIEEDRKGPRRGLFARASWGIDYHTILRDKMSQLIAYLEELVPDARFKAMVDTGELSDVAVAERAGIGFVGRNTLLITPEFGSYVYLGEIVTDLVIEPDDPIPNGCGDCYRCIKACPTQALLGEGQINGRRCLSYQTQTKDLMPLEFRRKMTHVIYGCDICQMACPYNRGVDSHLHPEMEPDAEVVRPVLQDLLFLTNKEFKAKYGHLSGAWRGKKPIQRNAIIALANYRDRTSMPLLMRVLEEDPRPVIRATAAYALSLIEGQQNPALLQLIEDQRAKEDQPAIIDEMTQAIQRLQDKRPAR

SEQ ID NO: 76680 - protein, 391 aa, Facklamia ignava
  REGION 1..391: note = tr|A0A2I1K213|A0A2I1K213_9LACT tRNA epoxyqueuosine(34) reductase QueG OS=Facklamia ignava; OX = 137730 GN=queG PE=4 SV=1
MQEAGNQTFKEAIRAYAHSIGIDKIGFTHAEPFLALEPKLRKQQALGHQSGFEHPVIEERIYPELTLPKAQSFISIALAYPSRPKQRVETRKGEPRGSFARASWGIDYHHILREKLALLVSYIEQSAEDYGIEAGQMVSMVDTGEFSDVSVAARAGLGFIGRNGLLISREFGSYMYLGEILTSITFEPDPLVDYDCGDCDRCIRGCPTQALLGDGSMNAKRCLSYQTQTKTLMPREFRKPMGRVIYGCDICQIICPYNRGIDVHHHPEMEPEGEVVFPELKPMLKMSNREFKAKFGHLAGSWRGKKPLQRNAIIALANYQEMTAVPILLELIEEDPRPEIRATAAWALGEMPDLKGNQEVIRLLKRTREQESDSLIQAEYDDAIYQLEMHR

SEQ ID NO: 76681 - protein, 391 aa, Facklamia ignava
  REGION 1..391: note = tr|K1LVG8|K1LVG8_9LACT Uncharacterized protein; OS = Facklamia ignava CCUG 37419 OX=883112; GN = HMPREF9707_00014 PE=4 SV=1
MQEAGNQTFKEAIRAYAHSIGIDKIGFTHAEPFLALEPKLRKQQALGHQSGFEHPVIEERIYPELTLPKAQSFISIALAYPSRPKQRVETRKGEPRGSFARASWGIDYHHILREKLALLVSYIEQSAEDYGIEAGQMVSMVDTGEFSDVSVAARAGLGFIGRNGLLISREFGSYMYLGEILTSITFEPDPRVDYDCGDCDRCIRGCPTQALLGDGSMNAKRCLSYQTQTKTLMPREFRKPMGRVIYGCDICQVICPYNRGIDVHHHPEMEPEGEVVFPELKPMLKMSNREFKAKFGHLAGSWRGKKPLQRNAIIALANYQEMTAVPILLELIEEDPRPEIRATAAWAIGEMPDLKGNQEVIQLLKRTREQESDSLIQAEYDDAIHQLDIYK

SEQ ID NO: 76682 - protein, 391 aa, Facklamia languida
  REGION 1..391: note = tr|H3NK31|H3NK31_9LACT Putative iron-sulfur cluster-binding protein OS=Facklamia languida CCUG 37842; OX = 883113 GN=HMPREF9708_01220 PE=4 SV=1
MTNQNLAALQAQVCRKALEIGIDKIGFASAEPFDHLEESLMQQKARHYTSGFEHPNLKERIYPDLIFDQPQSIISICLAYPSQLPNPLPSDPGNRRGSFARASWGLDYHEILRQRMKALMDYLQDLFPDNHFKAMVDTGELIDVAVAERAGIGFIGKNGLIITPEFGSFVYLGEIITDIPFTPSQRIPNGCGDCDRCIRSCPTQALLGDGRMNAQRCLSYQTQTKGHLPEKFRRKITHVIYGCDICQLTCPYNKGHDHHRHPEMEPQPDQVQPALKPMLTLNNKEFKRQFGSLAGSWRGKKPLQRNAIVSLANYGDQTALPLLLELIERDPRPVIRATSAYAVSRIQKFQNEQMVDLIKGQLDRESDPETVTEMQKAIETLEKKRKKPVNR

SEQ ID NO: 76683 - protein, 376 aa, Facklamia miroungae
  REGION 1..376: note = tr|A0A1G7QVE1|A0A1G7QVE1_9LACT Epoxyqueuosine reductase OS=Facklamia miroungae OX=120956; GN = SAMN05421791_102235 PE=4 SV=1
MEEFAIDKIGFASAEPFVHFEDSLREQKAKGFTTGFEHPIIEERIYPEKIFEGAQSIISIALAYPSRMDNNLPYNKEERRGSFARASWGEDYHHILSDRMQRIINFIKNEIPDARFKPMVDTGELMDVVVAERAGLGFIGRNGLLVTKEFGSYVYLGEIITNIPFAPDSKVDYGCGDCNRCITACPTQALLGDGRMNAQRCLSYQTQTKGHLAEEFRRKITHVIYGCDICQMTCPYNKGIDFHNHLEMEPNPEHVTPVLKDMLNLSNKEFKKQFGHLAGSWRGKKPLQRNAIIALANYRDQTALTYLLDLIENDPRPVIRASAAYAVSVIQREKNPSMVDLIQQQLQRESDPETIEEMQDAIDRLQSKKNRKSKRS

SEQ ID NO: 76684 - protein, 160 aa, Faecalibacterium prausnitzii
  REGION 1..160: note = tr|A0A2A6ZFC3|A0A2A6ZFC3_9FIRM Epoxyqueuosine reductase (Fragment) OS=Faecalibacterium prausnitzii; OX = 853 GN=CGS49_13365 PE=4 SV=1
MNIKLEIQKMAKEIGISKIGFTTADDFDYLEKSLRLGIEEGRTTGFEHKNIEERIYPKLSLESAKTIISIAVAYPHKLPQQPQKTEFKRGKITPNSWGLDYHYVLQDKLKRLAKGIEKLTENFEYKGMVDTGALVDTAVAKRAGIGFIGKNGLVISKEYG

SEQ ID NO: 76685 - protein, 289 aa, Faecalibacterium sp.
  REGION 1..289: note = tr|R7IDM6|R7IDM6_9FIRM Uncharacterized protein; OS = Faecalibacterium sp. CAG:74 OX=1262897 GN=BN770_02005; PE = 4 SV=1
MEALLDSGFHRVVVLDGAECGLDAEQSLILAPWCYAAEKQPASDGAWIHPYYFASQKAYTAASSLVKSGAFPGLALRDEIRVKPIFARLPDFSQGTNTISYIRGIGSRFHVQILTYTPRLPATEHLLAENKPLHCGECRKCVEACPTNALEGGVFHRERCIRNWMMVGGEVPEEIRAKMGNRLIGCDVCQRVCPHNPPPQGEAHPAVPLADLLRQPKETALVLRPLIGVNLTLPNRVLSQSCLLAGCSGDTSLIPLLMPLLHHPSPAVSTHAAWALSRLQEGISFLSEL

SEQ ID NO: 76686 - protein, 293 aa, Faecalibacterium sp.
  REGION 1..293: note = tr|A0A1Q6PWY5|A0A1Q6PWY5_9FIRM Uncharacterized protein OS=Faecalibacterium sp. CAG:74_58_120 OX=1897005; GN = BHW29_09545 PE=4 SV=1
MLDPVEALLDSGFHRAVVLDGTECGLDAEQSLILALWCYEAEKQPASDGAWIHPYYFASQKAYTAASSLVKSGAFPGLALRDEIRVKPIFARLPDFSQGTNTISYIRGIGSRFHVQILTYTPRLPATEHLLSENKPLHCRECRKCVEACPTNALEGGVFHRERCIRNWMMVGGEVPEEIRAKMGNRLIGCDVCQRVCPHNPPPQGEAHLAVPLANLLRQPKETALALRPLIGVNLTLPNRVLSQSCLLAGCSGDTSLTPLLMPLLHHPSPAVSTHAGWALSRLQEGISFLSEL

SEQ ID NO: 76687 - protein, 376 aa, Falsibacillus pallidus
  REGION 1..376: note = tr|A0A370GWW0|A0A370GWW0_9BACI Epoxyqueuosine reductase OS=Falsibacillus pallidus OX=493781 GN=queG PE=3; SV = 1
MDFQQLKEDIISYSKNIGIDKIGFTTASAFDEMKNRLRRQEALGYQSGFEEPDIEKRVHPDLIFDGPQSIISIALAYPSKMKDAPQSKRGERRGIFCRASWGTDYHVLLREKLSMLEEYILSRVPEARFKSMVDTGELVDRAVAERAGIGWSGKNCAIITPEFGSYVYLGEMISNLPFEPDEPMEDRCGTCNKCIDVCPTGALVEGGQLDAQKCIAFLTQTKGFLPDQFRTKIGNRLYGCDTCQTVCPENKGKDFHLHAEMEPDPEIAKPLLKPLLSISNKEFKERYGHVSGSWRGKKPIQRNALLALAHFKDETAVPDIINVLEHDVRPVMRGTAAWALGKIGGEEAKAVLTKAREREKDEEVIEEIEKGLAFFN

SEQ ID NO: 76688 - protein, 380 aa, Falsibacillus sp.
  REGION 1..380: note = tr|A0A3L7K3W1|A0A3L7K3W1_9BACI Epoxyqueuosine reductase OS=Falsibacillus sp. GY 10110 OX=2478915 GN=queG; PE = 3 SV=1
MDFKKLKEEIIQYSRRIGIDKIGFTTASTFDEMKNRLVRQESLGYQSGFEEKDIEKRVDPSLIFDEPRSIISIALAYPSKMKDAPQSKKGERRGIFCRASWGTDYHDLLKEKLSLLEDYIKEKVPEAMFKSMVDTGELVDRAVAERAGIGWSGKNCAIITPEFGSYVYLGEMITNLPFEPDKPMEDQCGTCNKCVDVCPTGALVEGGQLDAQRCIAFLTQTKGFLPDQFRTKIGNRLYGCDTCQTVCPENKGKDFHLHERMEPDPEIAKPLLKPLLSISNKEFKQNYGHVSGSWRGKKPIQRNALLALAHFKDETAIPDIISVMERDVRPVIRGTAAWALGRIGGEDAIEALKKARNKEEDQEVIEEIEKGLSFFTEGRS

SEQ ID NO: 76689 - protein, 380 aa, unidentified
  source 1..380: note = Falsochrobactrum ovis
  REGION 1..380: note = tr|A0A364JUH3|A0A364JUH3_9RHIZ Epoxyqueuosine reductase OS=Falsochrobactrum ovis OX=1293442 GN=queG PE=3; SV = 1
MATSISNPKELRLKRFLIEEAKAVGFDAVAFTTPDRIPHAPQHLRQYIAAGHHADMEWMEETELRRSNPRELWPEVRSIMMLAMNYGPQHDPSAILEQKDRAAISVYAQNRDYHDIIKGKLKHIASRFAARAGENVKVFVDTAPVMEKPLAQSAGLGWQGKHTNLVSRELGSWFFLGSIFTTAKIPPDDEERDHCGSCRACLNACPTDAFPAPYQIDARRCISYLTIENKGPIPSHFRKAMGNRIYGCDDCLAACPWNKFAQAASEMKLIARDDLKSPRIAELLQLDDAAFRRFFSASPVKRIGRDRFIRNTLIAAGNSNDPSLLPLIEQLLEDPAPVVRGAAIWALQQLGTRQRILELRKFYQPLEDDPAVRAEWDMEA

SEQ ID NO: 76690 - protein, 381 aa, unidentified
  source 1..381: note = Falsochrobactrum sp.
  REGION 1..381: note = tr|A0A316J5U1|A0A316J5U1_9RHIZ Epoxyqueuosine reductase OS=Falsochrobactrum sp. HN4 OX=2201899 GN=queG; PE = 3 SV=1
MAISTSETRQARLKRFLTEEAKAVGFDAVAFTTPDKIPQAPQRLRQYIAEGCHADMAWMEETEERRANPSVLWPEVRSIMMLAMNYGPETDPLALLERKDRGAISVYARNRDYHDIVKGKLKHVASRFAARAGQDVKVFVDTAPVMEKPLAQAAGLGWQGKHTNLVSREHGSWLFLGSIFTTAEIPPDEADRDHCGSCRACLDACPTKAFPAPYRIDARRCISYLTIENKGPIPLEFRKPIGNRIYGCDDCLAVCPWNKFAQATHEMKLKARDDLNAPRLADFLQLDDSAFRTFFSGSPVKRIGRDRFLRNVLIAAGNSQDLSLLPQVEALLRDEAPQVRGAAIWAFRQLAAPDHIAALQKELAPSEQDATVQAEWTMEEI

SEQ ID NO: 76691 - protein, 306 aa, unidentified
  source 1..306: note = Fermentimonas caenicola
  REGION 1..306: note = tr|A0A521J2H1|A0A521J2H1_9PORP tRNA epoxyqueuosine(34) reductase QueG OS=Fermentimonas caenicola OX=1562970 GN=queG PE=4 SV=1
MTFSEEIKKEALRLGFDACGICRATDTGEEERYMKWLAGNHHATMSYMERNIEKRLDPRLLVDGAKSIISVALNYYPHQKQPTYAPQFAYYAYGKDYHDVVKDKLKLLFEFIKQTYTDVTGRYFSDSAPVLERFWAAQAGIGFVGKNTLLIIPGKGSFFFLGELIIDIELDYDSPIPENCGSCTRCIDACPTGAIEKPFLVNANKCISYQTIENRGEISAEVAPKLKNYVFGCDICQKVCPWNRMSTPHNTDEFMPSEEFMELDLTKLIGMNEKEYQHLFRGSAVKRTKFAGLKRNVNAISKNRNK

SEQ ID NO: 76692 - protein, 306 aa, unidentified
  source 1..306: note = Fermentimonas caenicola
  REGION 1..306: note = tr|A0A098C173|A0A098C173_9PORP Epoxyqueuosine reductase OS=Fermentimonas caenicola OX=1562970 GN=queG; PE = 4 SV=1
MTFSEEIKKEALRLGFDACGICRATDTGEEERYMKWLAGNHHATMSYMERNIEKRLDPRLLVDGAKSIISVVLNYYPHQKQPTYAPQFAYYAYGKDYHDVVKDKLKLLFEFIKQTYTDVTGRYFSDSAPVLERFWAAQAGIGFVGKNTLLIIPGKGSFFFLGELIIDIELDYDSPIPENCGSCTRCIDACPTGAIEKPFLVNANKCISYQTIENRGEISAEVAPKLKNYVFGCDICQKVCPWNRMSTPHNTDEFMPSEEFMELDLTKLIGMNEKEYQHLFRGSAVKRTKFAGLKRNVNAISKNRNK

SEQ ID NO: 76693 - protein, 328 aa, Ferrimicrobium acidiphilum
  REGION 1..328: note = tr|A0A0D8FXH0|A0A0D8FXH0_9ACTN Epoxyqueuosine reductase OS=Ferrimicrobium acidiphilum DSM 19497; OX = 1121877 GN=queG PE=4 SV=1
MSELERKFERLLIDKGVVAAGSGAVVPLHFDAQQSRLRIAAGFVDPAHFTYRNPERAAVVARAFPWSHGYVSVAVSYATTRDAETQVAGYAYNRSYEDLREVLAVAVAYLRESGLRAASLFDSNQAFDKGLARRAGIGLVGRHTMVMVPKAGSRVVLGSIFTERLLSVSVGRRFRSDPCRNCRRCVDACPTGAIRLPGTLVAEHCIASILQQDSWSPVDRQLVGARVYGCDSCIDSCPIGWPSREESAPAPLVRWLTAGDQELLEEVGHWYIPRRDPFYVRRNVANALGNRGSLTRDERRALALLCVRSQTRERIEGLRSLLRVRWGR

SEQ ID NO: 76694 - protein, 379 aa, Ferrimonas balearica
  REGION 1..379: note = tr|E1SRU7|E1SRU7_FERBD Epoxyqueuosine reductase; OS = Ferrimonas balearica (strain DSM 9799 / CCM 4581 / PAT); OX = 550540 GN=queG PE=3 SV=1
MSVTNPDWAAIAAHIKSLALEMGFCAVGIADVDLQAEWPHLQRWLDNHYHGEMDYMARHGQMRVRPDELHPGTLRVISVALDYLPPDAGFAQTLKAPEKGYISRYAGGRDYHKLMRNRLKQLGQRIHAELPELAFRPFVDSAPLLERPLARNAGLGWVGKHSLLLNRKAGSWFFLGELLINLPLPVDQPHQGDCGHCTACITSCPTGAIVEPYVVDGRRCISYLTIELDGPIPEPLRAPMGNRIYGCDDCQLVCPWNRVAPLTREADFHTRPDLQQPDLLTLWQWDEAHFLKATEGSPIRRIGYRRWQRNLAVALGNAPHSDATVAALKAGLGRVDEMVDEHIHWALAQQADKASQDPVANRQQQRLIRVVEKGLPRDA

SEQ ID NO: 76695 - protein, 376 aa, Ferrimonas marina
  REGION 1..376: note = tr|A0A1M5ZG48|A0A1M5ZG48_9GAMM Epoxyqueuosine reductase OS=Ferrimonas marina OX=299255 GN=queG PE=3 SV=1
MTAPTPDWDAIATRIKAKALDLGFSAVGIADIDLSEEAPRLEAWLAQNYHGEMDYMARNVAMRSAPDQLLPGTLRVVCVALDYLPPDAGFARNLKAEEQAYISRYAGGRDYHKLMRNRLKKLGDAIKAEAAECQFRPFVDSAPLLERPLARNAGLGWVGKHSLLLNRQAGSWFFLGELLVDLPLPVDTPHSGDCGSCTACLTACPTGAIVAPYVVDSRRCISYLTIEADGPIPEALRPALGNRIYGCDDCQLICPWNRVAPLTQESDFHTRAPLKGANLLTLWQWDEATFLKQTEGSPIRRIGFARWQRNLAVALGNAPASDAVLSALTQGLGRVNAMVDEHIQWAIARQQSQAQPADRRQQRLIRSIEKGLPRDA

SEQ ID NO: 76696 - protein, 384 aa, unidentified
  source 1..384: note = Ferrimonas sediminum
  REGION 1..384: note = tr|A0A1G8Q7Q7|A0A1G8Q7Q7_9GAMM Epoxyqueuosine reductase OS=Ferrimonas sediminum OX=718193 GN=queG PE=3; SV = 1
MNLSPPDSTDNQQPDWAALASEIKSWARELGFADVGITRLDLADQQPALSTWLNNHYHGDMEYMARNVAMRTQPGLLHPGSVTAIVVRLDYLPPHAGFADALREGERAYISRYAGGRDYHKLMRNRLKQLGNRIRLQVQDYDGRPFVDSAPILERPLANQAGLGWVGKHSLLLSQEAGSWFFIGELLTNLPLPEDVPHQGDCGNCKACMTLCPTAAIVEPYVVDAKRCISYLTIESDAAIPEPLRPALGNRIYGCDDCQLACPYNRDAPLTREPDFHTRGPLTQPELLTLWHWSESEFLSATEGSPIRRIGYRRWQRNLAVALGNAPTSTAIIEALTQGLGQVDAMVDEHIRWAIARQQQRLGQLSKQQQRLIRVVEKGLPRDA

SEQ ID NO: 76697 - protein, 381 aa, Ferrimonas sp.
  REGION 1..381: note = tr|A0A4U1BF50|A0A4U1BF50_9GAMM Epoxyqueuosine reductase OS=Ferrimonas sp. IMCC35001 OX=2569538 GN=queG; PE = 3 SV=1
MNDHTHSQGKPDWAALATEIKSWAQELGFADCGIARLDLKDQHAALERWLSNHYHGDMDYMARNREMRTQPSLLHPGSLTAIVVRMDYLPPQAGFADTLSQPHLAYISRYAGGRDYHKLMRNRLKQLGNRLRERVRDYDGRPFVDSAPILERPLAREAGLGWVGKHSLLLERSAGSWFFIGELLTNLPLPVDPPYQGECGNCSACLTLCPTQAIVAPYVVDARRCISYLTIESDGAIPEALRPQLGNRIYGCDDCQLACPHNRTAPLTAEGDFHTRPQLHQVPLLTLWQWSEAQFLAATEGSPIRRIGFRRWQRNLAVALGNAAASAELLKALEQGVGRVDPMVDEHILWAIERQRSGLGQLSKQQQRLVRVVQKGLPRDA

SEQ ID NO: 76698 - protein, 381 aa, Ferrimonas sp.
  REGION 1..381: note = tr|A0A4V6WMT3|A0A4V6WMT3_9GAMM Epoxyqueuosine reductase OS=Ferrimonas sp. IMCC35002 OX=2569539 GN=queG; PE = 3 SV=1
MTDSTQFGAAHDWAALGNDIKTWGQQLGFSAVGITRLDLKQEQPALNAWLEKRYHGEMDYMARNVEMRTQPDLLHPGSVTAIVVRLDYLPPNARFAKDLNDDQCGFISRYAGGRDYHKLMRNRLKQLGNRIREQIADYDGRPFVDSAPILERPLAQQAGLGWVGKHSLLLNRDSGSWFFIGELLTNLPLPVDEPYQGDCGSCKACLTLCPTAAIVEPYVVDAKRCISYLTIESDGPIPEALRPALGNRIYGCDDCQLACPNNRDAPLTQESDFHTRSPLTQPKLLDLWRWSEAEFLKATEGSPIRRIGFIRWRRNLAVALGNASADPQIIDALQQGFGEAGEMVDEHIRWALARQQQGLGTKTKQQQRLIRIVEKGLSRDA

SEQ ID NO: 76699 - protein, 352 aa, unidentified
  source 1..352: note = Ferriphaselus amnicola
  REGION 1..352: note = tr|A0A2Z6GBH3|A0A2Z6GBH3_9PROT Epoxyqueuosine reductase OS=Ferriphaselus amnicola OX=1188319 GN=queG; PE = 3 SV=1
MATLAERIKAWGKELRFQAVGISGTDLSSAEAGLTDWLAQGFHGGMDYMAKHGLKRARPDELLPGTLSVISVRLDYRSAHARDGWEVLADGSRAYISRYALGRDYHKVLRNRLERLAQRIRAEVGEFGYRVFTDSAPVLEVELAKRARLGWRGKHTLLLNREHGSWFFLGEIFTDLPLPADTPEADHCGSCRRCLEICPTQAIVAPYRLDARRCISYLTIEHKGSIPLELRPLIGNRIYGCDDCQLVCPWNRFAQISQESDFAVRHGLDDVRLIELFAWDETTFQSRMAGSPIYRIGYEQWLRNIAVALGNAQTDAKVIESLSARAQHSSELVREHIHWALEQQRKHEKGLE

SEQ ID NO: 76700 - protein, 351 aa, Ferrithrix thermotolerans
  REGION 1..351: note = tr|A0A1M4UN46|A0A1M4UN46_9ACTN Epoxyqueuosine reductase OS=Ferrithrix thermotolerans DSM 19514; OX = 1121881 GN=SAMN02745225_01041 PE=4 SV=1
MDLSGPIGLANSLDALSERLLGNLRSAGAVAAGITSAEGFEGDLTFLQRQRASGENDTMAFTYRNPYRSTHIRVTYPYAKSIVVAAHRYEKPLEPEVDYVAAYSLSDYYAELRSMLYDASRLLKDNGYRAQVVMDSNALVDKAAARRAGLGWVGKNSLVLIPKVGSNVVLGSIVTDAELCFTDSPVRSLCGSCTRCQDNCPTGALQQAGVVDVSRCLAWLLQREGSFPLTYRETVGTQIYGCDRCQTVCPVGGRARRDSKSQLEPAESSFEPKTLLVLTDEELLRRCERFYVPSRSANHIRRNALLALGNKRPITDQEVELLRRYSRSPDPVLAEQALWSLARHGLALSYT

SEQ ID NO: 76701 - protein, 381 aa, unidentified
  source 1..381: note = Ferrovibrio sp.
  REGION 1..381: note = tr|A0A2M8UGY4|A0A2M8UGY4_9PROT Epoxyqueuosine reductase OS=Ferrovibrio sp. OX=1917215 GN=queG PE=3 SV=1
MPGCPRATRRRAPPWNRNWRRRTTRSRSPALPRSVDTTDLKELIRQQALAEGFDAVGFTSADRIGPELAQRLDEFMALKRHGAMQWLEEKAERRRHPNALWPEARGIIALGLNYGPERNPLDVLAQTDRAAISVYAQGRDYHLVVKKKLKSLAGWLHRQAGNEVKVFVDTAPLMEKPLSVAAGIGWQGKHTNLVSRDFGSWLFLGLILTTAEIAADEAETDHCGSCSNCLDICPTQAFPAPYQLDARRCISYLTIEYDGVIADDFASAMGNRIYGCDDCLAVCPWNKFASSAREIALHSRPELDAPLLRDLATLDDAGFRERFATTAVKRVGRDRFIRNVCIALGNSGDPALRPVLEKLTQDSAEVVRLQAAQALKRLKAA

SEQ ID NO: 76702 - protein, 382 aa, unidentified
  source 1..382: note = Ferrovibrio sp.
  REGION 1..382: note = tr|A0A516GZ85|A0A516GZ85_9PROT Epoxyqueuosine reductase OS=Ferrovibrio sp. K5 OX=2594003 GN=queG PE=3; SV = 1
MPGCPRATRRRAPPWNPGWRPRTTRSRSPALPRSANPTDLKELIRQHALAEGFDAVGFTTAGRIGPELAERLDEFMALKRHGTMQWLEDKAERRRHPNALWPEARGIIALGLNYGPDHNPLDVLLEKDRAAISVYAQGRDYHLVVKKKLKSLASWLHHHAGNDVKVFVDTAPLMEKPLSAAAGIGWQGKHTNLVSRDFGSWLFLGLILTTAELAPDEAETDHCGTCSNCLDICPTKAFPAPYQLDARRCISYLTIEYDGVIAEDFAAAMGNRIYGCDDCLAVCPWNKFASTAREITLHSRPELDAPTLLDLAGLDDASFRERFATTAVKRIGRDRFVRNVCVALGNSGDAAMRPVLEKLSHDEAEVVRLQAAQALTRLSRAA

SEQ ID NO: 76703 - protein, 354 aa, unidentified
  source 1..354: note = Ferrovum sp.
  REGION 1..354: note = tr|A0A257UCH1|A0A257UCH1_9PROT Epoxyqueuosine reductase OS=Ferrovum sp. 37-45-19 OX=1970377 GN=queG PE=3; SV = 1
MNVKNLPIEPQLIKQQLIILAQQLGFEGVSIGQPNLDIASERLKTWLEKGYQGEMQYLERHLPLRASPAQLHPGTIRVISLYHPYLTAPLQDIQGELNNATQGYISYYARGRDYHKTLRHKLQTLAQTLTKWCGPFNYRVFTDSAPVMEVEIAQQAGLGWRGKNTLLLNREAGSWFFLGEIFTDLPLEIDQKTTEHCGRCDACIEICPTRAIVAPYVLDARRCISYLTIEHSGSIPEGLRAYFGNRIYGCDDCQIICPWNRFAKLTDEKHFASRFNGNHDLADFILFDEQEFEQRFEGSAIRRIGIIRWLRNVAVALGNGIGREKEITALKKQLHHPSTIVREHVNWALKRLSE

SEQ ID NO: 76704 - protein, 361 aa, unidentified
  source 1..361: note = Ferrovum sp.
  REGION 1..361: note = tr|A0A149VY65|A0A149VY65_9PROT Epoxyqueuosine reductase OS=Ferrovum sp. Z-31 OX=1789004 GN=queG PE=4 SV=1
MPPLSVFDLRTLLEREAHHLGFSAVRVSRPTLRTARKHLDTWLTAGYQGAMTWLERDPDLRTDPSRLWPGTTCILTVSLPYLSEDLTSCQDALNDPTEGVIAQYALGQDYHRLMRRRLHLLAEGLAAQWGPFAWRPFSDSAPLLEVEIAAQGGLGWRGKHTLLLQRQGSYFFLGELLCNLPLPADPPEKDHCGTCQTCLTVCPTRAIVAPYQLDARLCIAYLTIEHPGPIPESLRPLFGNRIYGCDDCQLHCPWNRFANTSRGARAFLRRKELENLSLPALFAWSAEDFQTHLTGSPIRRIGHERWLRNVAVALGNGPATPGALTALAQRRNHPAEQVREHVEWAWQRLQNGNSPYPPQSE

SEQ ID NO: 76705 - protein, 309 aa, Ferruginibacter sp.
  REGION 1..309: note = tr|A0A3M9NPL6|A0A3M9NPL6_9BACT Epoxyqueuosine reductase OS=Ferruginibacter sp. BO-59 OX=2294116 GN=queG; PE = 3 SV=1
MIPKSAYKYFVKQTAARLGFDYCGIAKAEKLNDEARRLESWLNKGFNGSMSYMNNYFDLRVDPTRLVPGAKSVITLLLNYFPAEQQKTEAPRVSKYAYGKDYHEVIKEKLKNFLTTVQQNIGEINGRGFTDSAPVLERSWAVKSGLGWVGRNGNLITKNQGSFFFIATLITDLELEPDDPFAKDYCGTCTKCIDSCPTEAILPNKVIDGSKCISYFTIELKDMLIPTDVKGKFENNMFGCDICQDVCPWNRFSKPTREAEFTPLNEVLNFSKNDWEELTEESFKIIFRKSPLKRSKFEGIKRNLKFLDS

SEQ ID NO: 76706 - protein, 334 aa, Fervidicella metallireducens
  REGION 1..334: note = tr|A0A017RXG1|A0A017RXG1_9CLOT (Fe-S)-binding protein OS=Fervidicella metallireducens AeB OX=1403537; GN = Q428_04485 PE=4 SV=1
MDIKSEIVQFANEIGVYYIGFSDTNFNSKFIEELLFRKEKGFLSGFEESDYVKRINVKGLMKEAKTIISIAVPYKTIDIDKSKPYFSKSSLGIDYHKVVINKLSQISDFIKEKYNGSCLYFCDIGPLADREIAKKCGVGFYGKNTCIITEKFGSYVFLGEIITDIYIDRDKEKDLNCNNCDLCIKACPVQAIEMPYRLNAKKCLSYISQKKERLSLHEIDHLGTRIYGCDTCQDVCPYNRNAEKSNIEEFMPEKWNYDVDINYILSLSNKEFKNSIGLTSAGWRGKKIIMRNAIIAAGNSGREEYLTLLKKIDADDEMKYYVDIAIRKINDKLK

SEQ ID NO: 76707 - protein, 340 aa, Fervidicola ferrireducens
  REGION 1..340: note = tr|A0A140L3D1|A0A140L3D1_9THEO Epoxyqueuosine reductase OS=Fervidicola ferrireducens OX=520764 GN=queG; PE = 4 SV=1
MVIIMLNKKEKIKDYARKIGFDKIGFASAEPFWEEKEILMERKRAGLFSSFEESDIELRCHPEKHLPGAKTIICFAVSYFFEKEDVPGENSSEPLGIISKYALLRDYHDVLFQKLKLMADFIYSMWGAKSKIFVDSGGLLERAAARRAGIGWIGQNTCLFTEEFGSWVFLGELITNLEIEPDMPCRNLCDNCGKCVKACPTGALEEPYRLNPFRCLSYITQMRGAIPEEFRGNLGLRLFGCDTCQEACPKNKKIILVNHEEFMLDYQIERRLTKLIFMNNVEFEKNFKLTPIAWRGRNVLRRNATVALANTGVGYKKYFEKLLSDPSPVIREHAMWALKR

SEQ ID NO: 76708 - protein, 313 aa, Fibrella aestuarina
  REGION 1..313: note = tr|I0K9E9|I0K9E9_9BACT Epoxyqueuosine reductase; OS = Fibrella aestuarina BUZ 2 OX=1166018 GN=queG PE=3 SV=1
MNNAATNARLIKAKALDLGFDFCGIAKAEFLEAEAPRLENWLNQNRHGQMGYMANHFDKRLDPRLLVDGAQSVVSVLLNYFPDPAKRLPEGDDDLKLSKYAYGTDYHFVLKDKLKDLLQFIQDEIGEVGGRAFVDSAPVMDKAWAAKSGLGWVGKHSNLLNRQMGSFFFIGELILDLPLQPDGPTTDHCGTCTRCIDACPTDAIVAPYVVDGSRCISYFTIELKEAIPEDVRGKFQNWVFGCDICQDVCPWNRFAKPHQTPAFDPSPELTAVSRNDWQEITEEVFKEVFRRSPVKRTKWEGWQRNVTFLNQQG

SEQ ID NO: 76709 - protein, 310 aa, Fibrella sp.
  REGION 1..310: note = tr|A0A1W6ECT0|A0A1W6ECT0_9BACT Epoxyqueuosine reductase OS=Fibrella sp. ES10-3-2-2 OX=1834519 GN=queG; PE = 3 SV=1
MLTNAQKIKAKALELGFDFCGIAKADFLVEEAPRLEAWLTRNMHGQMGYMANHFDKRLDPRLLVDDAKSVVSVLLNYYPGDEPENRLPDDDEHLKVSKYAYGTDYHFVLKDKLKDLLTFIHTEIGEVGGRAFVDSAPVMDKAWAAKSGLGWVGKHSNLLNRKMGSFFFIGELILDLELDPDGPTTDHCGTCTRCIDACPTDAIVAPYVVDGSRCISYYTIELKEAIPQEVKGKFDNWVFGCDICQDVCPWNRFAKPHKTPDFKLSPELATIKKNDWEEITEELFRELFRRSPLKRTKRDGLVRNARFINK

SEQ ID NO: 76710 - protein, 314 aa, Fibrisoma limi
  REGION 1..314: note = tr|I2GM01|I2GM01_9BACT Epoxyqueuosine reductase; OS = Fibrisoma limi BUZ 3 OX=1185876 GN=queG PE=3 SV=1
MNTAAVQYTQLIKHKALALGFDFCGIARAEFLEDEAPRLETWLKNGMHGQMNYMANHFDKRLDPRLLVDDAKSVVTLLLNYYPEQQLPEDDDAYKLSKYAYGTDYHFVIKDKLKDLLAFIQTEIGEVGGRAFVDSAPVMDKAWAKRAGLGWVGKHTNLINREIGSYFFIGELILDLDLEPDGPIADYCGTCTRCIDACPTDAIVAPYVVDGSKCISYFTIELKEALPDDVRGKFNNWVFGCDICQDVCPWNRFARPHQTPEFTPHPDLTTFSRKDWEEITDEVFREVFRRSAVKRTKLEGLKRNVRFVGESPEL

SEQ ID NO: 76711 - protein, 314 aa, Fibrisoma sp.
  REGION 1..314: note = tr|A0A418ME57|A0A418ME57_9BACT Epoxyqueuosine reductase OS=Fibrisoma sp. HYT19 OX=2305895 GN=queG PE=3; SV = 1
MNTATIRHTQLIKHKALELGFDFCGIARADFLEDEAPRLETWLKNGMHGQMDYMANHFDKRLDPRLLVDDAKSVLTLLLNYYPEQRLPEGDDDYKLSKYAYGTDYHFVIKDKLKDLMAFIRTEIGEVGGRAFVDSAPVMDKAWAKRAGLGWVGKHTNLINREIGSYFFIGELILDLDLEPDSPMADYCGTCTRCIDACPTEAIVAPYVVDGSKCISYFTIELKEALPDDVRGKFNNWVFGCDICQDVCPWNRFARPHQTPEFAPHPDLTTFSRNDWEDITEEVFREVFRRSAVKRTKLEGLKRNIRFVGDSSTT

SEQ ID NO: 76712 - protein, 340 aa, unidentified
  source 1..340: note = Fibrobacteres bacterium
  REGION 1..340: note = tr|A0A3C1WH80|A0A3C1WH80_9BACT tRNA epoxyqueuosine(34) reductase QueG OS=Fibrobacteres bacterium OX=2052160 GN=queG PE=4 SV=1
MTSPSGVTLQNTLADFFAGQPEVLEWGIVPLNRALPNADNLESWVGQGMHAGLRYMEENLDKRTVPRQLFPWACSAVLFSLRQSVPFGTPTGDFRVAAYALGEDYHRRARRILNEAHHSLSLSTGAAPLRFESFCDTWPVFERDLAAEAGLGWRGKNSCLIHRKHGSGFMLAGFFLDVDFEAYSTPQEDFCGGCTACLEACPTNAFVAPGRLDASKCLSYWTIEAKGDVPSDIAEKSGSWIFGCDVCQEVCPWNHKHIKKSTTSTPKNLPQTGLDRKSVVRKGGGFQSRFKDSPLTRAGRRSLLRNVLIALRNNPQTNIRELVETIGKEESNQSVESGSD

SEQ ID NO: 76713 - protein, 381 aa, unidentified
  source 1..381: note = Fictibacillus aquaticus
  REGION 1..381: note = tr|A0A235F6M4|A0A235F6M4_9BACI Epoxyqueuosine reductase OS=Fictibacillus aquaticus OX=2021314 GN=queG; PE = 3 SV=1
MTGAQLKEELIAYSKSIGIDKIGFAAADVFQQLKQRLIDQQELGYQSGFEEPDIDKRTNPELLLSGASSIISIALAYPSKMKDAPKSVKGERRGIFCRASWGRDYHHVLREKLQLLEAFILEKCPDAAVKSMVDTGELSDRAVAERAGIGWTGKNCAIITPEFGSYVYLGELITDLAIPPDTPMEEQCGSCNICVDACPTGALVQGGQLDSNKCVAYLTQSKDFIPDQYRTKIGNRLYGCDTCQTVCPENKKKDFHLHPDMEPDPEIAKPLLRPLLNMSNRDFKEKFGHVSGSWRGKKPIQRNAILALAHFKDETAVEDLLHVMKVDPRPVMRGTAAWALGKIGGEMIENHLIMAKEQEKDENVLSEIEKGLQMLKNEQIS

SEQ ID NO: 76714 - protein, 387 aa, unidentified
  source 1..387: note = Fictibacillus arsenicus
  REGION 1..387: note = tr|A0A1B1Z0G0|A0A1B1Z0G0_9BACI Epoxyqueuosine reductase OS=Fictibacillus arsenicus OX=255247 GN=queG; PE = 3 SV=1
MKGGICVTGAQLKEEIVAYSKEIGIDKIGFADADVFAELKERLRIQQDLQYQSGFEEKDIDKRTEPERLLTGASSIISIALAYPSKMKNAPKSIKGERRGIFCRASWGKDYHHILREKLALLEAFIIERVPDANIKSMVDTGELSDRAVAQRAGIGWSAKNCAIMSPEFGSYMYLGEMITNIAFPADTPMEDQCGSCNKCVEACPTGALVQGGQLDSSKCIAFLTQTKDFLPDQYREKLGNRLYGCDTCQTVCPENKGKDFHHHAEMEPDPEIAKPLLQPLLTMSNRDFKEKFGHVSGSWRGKKPIQRNAIIALAHFREEAAIPDLVYLLKNDPRPVIRGTAAWAIGKIGGHEAELELSSAKEREKDDLVALEIDKGLKMLRNQEIS

SEQ ID NO: 76715 - protein, 381 aa, unidentified
  source 1..381: note = Fictibacillus arsenicus
  REGION 1..381: note = tr|A0A1V3G9N0|A0A1V3G9N0_9BACI Epoxyqueuosine reductase OS=Fictibacillus arsenicus OX=255247 GN=queG; PE = 3 SV=1
MTGAQLKEEIVAYSKEIGIDKIGFADADVFAELKERLRIQQDLQYQSGFEEKDIDKRTEPDRLLSGASSIISIALAYPSKMKNAPRSMKGERRGIFCRASWGKDYHHILREKLALLEAFIIERVPDANIKSMVDTGELSDRAVAERAGIGWSAKNCAIMSPEFGSYMYLGEMITNIAFPADTPMEDQCGSCNKCVEACPTGALVQGGQLDSSKCIAFLTQTKDFLPDQYREKLGNRLYGCDTCQTVCPENKGKDFHHHAEMEPDPEIAKPLLQPLLTMSNRDFKEKFGHVSGSWRGKKPIQRNAIIALAHFKEEAALPDLIYLLKNDPRPVIRGTAAWAIGKIGGNEAELELSSAKEREKDDLVALEIDKGLKMLRNQEIS

SEQ ID NO: 76716 - protein, 381 aa, unidentified
  source 1..381: note = Fictibacillus enclensis
  REGION 1..381: note = tr|A0A0V8JAS9|A0A0V8JAS9_9BACI Epoxyqueuosine reductase OS=Fictibacillus enclensis OX=1017270 GN=queG; PE = 3 SV=1
MTGAQLKEELIAYSKSIGIDKIGFAAADVFAELKERLKEQQNHGYQSGFEEKDIEKRTNPQLLLEGANTIISIALAYPSRMKDAPQSTREARRGIFCRASWGVDYHHILREKLRLLEAFIAEKAPHARSVSMVDTGELSDRAVAERAGIGWSGKNCATITPEFGSYVYLGEMLTTVYLPPDTPITDQCGDCNICVEACPTGALVQGGQLDSNKCIAFLTQTKDFLPDQYREKIGNRLYGCDTCQTVCPKNKGKDFHLHPEMEPDPEIAKPLLKPLLKMSNREFKEKFGHVSGSWRGKKPIQRNAIIALAHFKDTSAVGDLAQLMKEDQRPVIRGTAAWALGKIGSEAAENELISAKEQENDGNVSAEINKGLQMIQNQGIH

SEQ ID NO: 76717 - protein, 381 aa, unidentified
  source 1..381: note = Fictibacillus macauensis
  REGION 1..381: note = tr|I8AJQ4|I8AJQ4_9BACI 4Fe-4S ferredoxin-type domain-containing protein OS=Fictibacillus macauensis ZFHKF-1 OX=1196324 GN=A374_09229 PE=4 SV=1
MTGAQLKEELIAYSKSIGIDKIGIASADVFTSLKTRLYEQQRLGYQSGFEEPDIEKRTTPALLVSEAASIISIALAYPSKMKNPPRSVKGQRRGIFCRASWGKDYHHILREKLQLLEQFLKEKVPGISIKSMVDTGELSDRAVAERAGIGWSGKNCSIITPEFGSYVYLGELVTSVSMPPDQPITDQCGTCNKCVEVCPTGALVQGGQLDSGKCIAFLTQTKDFLPDRYREKLGNRLYGCDTCQTVCPKNKGIDFHLHDEMEPDPELAKPLLEPMLFMSNREFKDSFGHVSGSWRGKKPIQRNAIIALAHYKEESAVPKLIRLMNEDPRPVIRGTAAWAIGKIGGPLSLQSLNIAKEQEKDGNVLVEIDKGLQMLENHGIS

SEQ ID NO: 76718 - protein, 381 aa, unidentified
  source 1..381: note = Fictibacillus phosphorivorans
  REGION 1..381: note = tr|A0A160IJC3|A0A160IJC3_9BACI Epoxyqueuosine reductase OS=Fictibacillus phosphorivorans OX=1221500; GN = queG PE=3 SV=1
MTSAQLKEEIVAYSKEIGIDKIGFAHADVFAELKKRLRLQQDLNYQSGFEESDIEKRTEPERLLSGASSIISIALAYPSKMKDAPKSVRGERRGIFCRASWGKDYHHILREKLSLLEAFIIEKVPGAAVKSMVDTGELSDRAVAERAGIGWSAKNCAIMSPEFGSYMYLGEMITNIAFPADTPMEDQCGSCNKCVDACPTNALVQGGQLDSSKCIAFLTQTKGFLPDQYRDKLGNRLYGCDTCQTVCPENKGKDFHHHLEMEPDPEIVKPLLKPLLSISNREFKEKFGYISGSWRGKKPIQRNAIIALAHFKDETAIPDLLMLLHHDPRPVIRGTAAWAIGKIGGENAELELLSAKENEKDDLVTLEIEKGLKMVRNQEIS

SEQ ID NO: 76719 - protein, 381 aa, unidentified
  source 1..381: note = Fictibacillus phosphorivorans
  REGION 1..381: note = tr|A0A163RLB8|A0A163RLB8_9BACI Epoxyqueuosine reductase OS=Fictibacillus phosphorivorans OX=1221500; GN = queG PE=3 SV=1
MTSAQLKEEIVAYSKEIGIDKIGFAQADVFGELKERLRLQQDLGYQSGFEESDIEKRTEPERLLSGASSIISIALAYPSKMKNAPRSVKGERRGIFCRASWGKDYHHILREKLSLLENFIIKKVPEANVRSMVDTGELSDRAVAERAGIGWSAKNCAIMSPEFGSYMYLGEMITNLALPPDTPMEDQCGSCNKCVEACPTGALVQGGQLDSSKCIAFLTQTKGFLPDQYRDKLGNRLYGCDTCQTVCPENKGKDFHHHVEMEPDPEIAKPLLKPLLSMSNREFKEKFGYVSGSWRGKKPIQRNAIIALAHFKDKTAVSDLVNVLNHDPRPVIRGTAAWAIGKIGGDGAELELLSAKEREKDDLVQLEIEKGLKMVRNQEIS

SEQ ID NO: 76720 - protein, 381 aa, unidentified
  source 1..381: note = Fictibacillus solisalsi
  REGION 1..381: note = tr|A0A1H0API1|A0A1H0API1_9BACI Epoxyqueuosine reductase OS=Fictibacillus solisalsi OX=459525; GN = SAMN04488137_4137 PE=4 SV=1
MTGAQLKEELIAYSKSIGIDKIGFAAADVFVELKERLKEQQNHGYQSGFEEKDIEKRTNPELLLEGANTIISIALAYPSRMNDAPRSTREARRGIFCRASWGVDYHHILREKLRLLEAFIAEKAPHARSVSMVDTGELSDRAVAERAGIGWSGKNCATITPEFGSYVYLGEMLTTVYLPPDTPITDQCGDCNICVEACPTGALVQGGQLDSNKCIAFLTQTKDFIPDQYREKIGNRLYGCDTCQTVCPKNKGKNFHLHPEMEPDPEIAKPLLKPLLRMSNREFKEKFGQVSGSWRGKKPIQRNAIIALAHFKDTSAVGDLVQLMKEDQRPLIRGTAAWALGKIGSEAAKNELISAKEQEKDGNVAAEINKGLQMIQNQGIH

SEQ ID NO: 76721 - protein, 381 aa, unidentified
  source 1..381: note = Fictibacillus sp.
  REGION 1..381: note = tr|A0A4Q7R0A5|A0A4Q7R0A5_9BACI Epoxyqueuosine reductase OS=Fictibacillus sp. BK138 OX=2512121 GN=queG; PE = 3 SV=1
MTGAQLKEEIVAYSKEIGIDKIGFADADVFAELKERLRIQQDLQYQSGFEEKDIDKRTEPERLLTGASSIISIALAYPSKMKNAPRSTKGERRGIFCRASWGKDYHHILREKLALLEAFIIERVPDANIKSMVDTGELSDRAVAERAGIGWSAKNCAIMSPEFGSYMYLGEMITNIAFPADTPMEDQCGSCNKCVEACPTGALVQGGQLDSSKCIAFLTQTKGFLPDQYREKLGNRIYGCDTCQTVCPENKGKDFHHHAEMEPDPEIAKPLLQPLLTMSNRDFKEKFGHVSGSWRGKKPIQRNAIIALAHFREEAAIPDLVYLLKNDPRPVIRGTAAWAIGKIGGNEAELELSSAKEREKDDLVALEIDKGLKMLQNQEIS

SEQ ID NO: 76722 - protein, 381 aa, unidentified
  source 1..381: note = Fictibacillus sp.
  REGION 1..381: note = tr|A0A4Q2HW13|A0A4Q2HW13_9BACI Epoxyqueuosine reductase OS=Fictibacillus sp. S7 OX=2212476 GN=queG PE=3; SV = 1
MTGAQLKEELIAYSKSIGIDKIGFAAADVFAELKERLKEQQNHGYQSGFEEKDIEKRTNPQLLLEGANTIISIALAYPSRMKDAPQSTREARRGIFCRASWGVDYHHILREKLRLLEAFIAEKAPHARSVSMVDTGELSDRAVAERAGIGWSGKNCATITPEFGSFVYLGEMLTTVYLPPDTPITDQCGDCNICVEACPTGALVQGGQLDSNKCIAFLTQTKDFLPDQYREKIGNRLYGCDTCQTVCPKNKGKDFHLHPEMEPDPEIAKPLLKPLLKMSNREFKEKFGHVSGSWRGKKPIQRNAIIALAHFKDTSAVGDLAQLMKEDQRPVIRGTAAWALGKIGSEAAENELISAKEQENDGNVAAEINKGLQMIQNQGIH

SEQ ID NO: 76723 - protein, 318 aa, unidentified
  source 1..318: note = Unknown
  REGION 1..318: note = tr|A0A2T1CDD0|A0A2T1CDD0_9CYAN Epoxyqueuosine reductase OS=filamentous cyanobacterium CCP2 OX=2107700; GN = queG PE=3 SV=1
METLDCNRIKQKALELGFHKVGIASVPTPHSPLPASHSPLPASHSLQTWLHQGYHADMNWMENPKRQDIHSVMPSVRSVICVALNYYTPHDRPEGNEYAKISRYGWGRDYHRILHKRLKAYANWLQAQGEGVEARYYADTGPVQDKVWAERSGIGWIAKNSNVITREYGSWVFLGEVLTNLELTPDRPHTQHCGTCTRCIEACPTQAITQPFVVDANRCIAYHTIENRSEIPPDIAAKMQGWVAGCDICQEVCPWNQRFAQETNVAEFQPYSWNIAPTLKELATLSDDEWSDRFPASALRRIKPDMLRRNAQVNLKNP

SEQ ID NO: 76724 - protein, 312 aa, unidentified
  source 1..312: note = Unknown
  REGION 1..312: note = tr|A0A2T1G275|A0A2T1G275_9CYAN Epoxyqueuosine reductase OS=filamentous cyanobacterium Phorm 6 OX=2107706; GN = queG PE=3 SV=1
MKISINSDLIKQKSRELGFHKVGIASADADFDREKPRLQAWLDKGYQANMAWMANPKRLDIHAAMPEVKSLICVAINYYTPHQRPGGAEYAKISRYGWGRDYHKILHKKLKVLADWVRSQGEGIEARYYADTGPIQDKVWAEKAGIGWIAKNGNVISTEYGSWVFLGEILTNLELAPDAPHTQHCGTCTRCIDACPTGAIVEPFVVDADRCIAYHTIENRAEKLPDQIASNLQGWVAGCDICQDVCPWNQRFAKPTDVAEFEPYPENIAPTLAELAEISDEEWNRRFTASALRRIKPQMLRRNAKANQINSQ

SEQ ID NO: 76725 - protein, 379 aa, Filibacter sp.
  REGION 1..379: note = tr|A0A3P5WWJ1|A0A3P5WWJ1_9BACL Epoxyqueuosine reductase OS=Filibacter sp. TB-66 OX=2483811 GN=queG PE=4; SV = 1
MNAVQLQQSIREFADSIGIDKIGFTTAAPFRELKNRLKRQQELGYQSGFEEKDLEKRTEPALLLDQAESIIAIAIAYPSKMENAPKGKKGERRGMFCRASWGTDYHTVLREKLSLLERFIFQHAPDAKVKSMVDTGELSDRAVAQRAGIGWSAKNCSIITPEFGSYVYLGEMITNIPFAPDEPMEDECGTCTLCLDVCPTGALIQGGQLNAQRCIAFLTQTKTPMPEEFRMEMGNRVYGCDTCQTVCPKNKRKHNLHQSAFQPEVELAKPLLQPILKLSNREFKEKFGHVSGSWRGKNPIQRNVIIALAHFKEESAVPELIAMLAKDPRPVIRGTIAWALGQIGTEEGYTALQAALLNETDKDVLAELQGALNNRKERL

SEQ ID NO: 76726 - protein, 318 aa, unidentified
  source 1..318: note = Filimonas endophytica
  REGION 1..318: note = tr|A0A561I3S2|A0A561I3S2_9BACT Epoxyqueuosine reductase OS=Filimonas endophytica OX=1500311 GN=queG PE=3; SV = 1
MLQTHHTRLIKEWTQQLGFSYCGVARARMLDEDARRLESWLNKGMHGNMHYMEKNFELRVDPTKLVPGAKSVITLLMNYYPAEQQQADAPRISKYAWGEDYHEVIRPKLNELLFRMREHIGAVEGRGFVDSAPVLERSWATLSGAGWIGKNGNLISKQSGSFFFIATLITDLELDYDDPFARDFCGTCTKCIDACPTDAILPDKTIDGSRCISYFTIELKDLLIPDEMKGKFADWMFGCDTCQDVCPWNRFSKAGSEPAFSPLPEILNLKTQEWEALTEERFRTLFKKSPLKRSKFAGIQRNLRFLQYPSETITQPDI

SEQ ID NO: 76727 - protein, 351 aa, Filimonas lacunae
  REGION 1..351: note = tr|A0A1N7R1C4|A0A1N7R1C4_9BACT Epoxyqueuosine reductase OS=Filimonas lacunae OX=477680 GN=queG PE=3 SV=1
MRLNLFIYLFLRLQRCNYSFSGLRVIFARYYMLQVTHHTHLIKEWAQQLGFSYCGIARARMLDEDARRLESWLNKGMHGSMHYMEKNFELRVDPTRLVPGAKSVITLLMNYYPPEQQVTDAPRIAKYAYGEDYHEVIRPKLNDLLARIRLNIGAVEGRGFVDSAPVLERSWAQLTGAGWIGKNGNLISKQNGSFFFIATLIIDLELEYDDPFAKDFCGTCTKCIDACPTDAILPNKQVDGSKCISYFTIELKDMLIPDEMQGRFDDWMFGCDTCQDVCPWNRFSKAGSEPAFAPIPEVLNLKTQDWEALTEESFRTIFKNSPLKRSKFKGIQRNLQFLQYNGTPLPTKEEQ

SEQ ID NO: 76728 - protein, 307 aa, Filimonas sp.
  REGION 1..307: note = tr|A0A388Q416|A0A388Q416_9BACT Epoxyqueuosine reductase OS=Filimonas sp. OX=1954253 GN=EMGBS15_09680; PE = 4 SV=1
MTKGNYTQLIKDEADKLGFQYCGIAKAEKLEEDAARLEKWLHKGFHGQMAYMENHFEKRIDPRRLVDDAKSVITLLLNYYPAEKQAMDAPLISKYAYGKDYHLVIKEKINALLEVIKEKIGEVHGRGFVDSAPVLERSWAIKSGAGWIGKNGNMITKKQGSFFFIATLIIDLTLEYDLPFLKDYCGTCTQCIDACPTDAILPDKEINGSHCISYYTIELKEALISSEKKWDDWMFGCDICQDVCPWNRFSKPTTENNFNPLNEIMDYTKADWEEITEETFKKVFKDSPLKRTKYAGIKRNLSFLKSS

SEQ ID NO: 76729 - protein, 318 aa, Filimonas sp.
  REGION 1..318: note = tr|A0A2U0ZP37|A0A2U0ZP37_9BACT Epoxyqueuosine reductase OS=Filimonas sp. YR581 OX=2135469 GN=queG PE=3; SV = 1
MQQTNRKRLVKEWAQQLGFSYCGVARARMLDDDARRLENWLSKGMHGNMHYMEKNFDLRIDPTKLVPGAKSVITLLMNYYPPQQQAADAPRIAKYAYGEDYHEVIRPKLNELLARIRENIGAVEGRGFVDSAPVLERSWATLTGAGWIGKNGNLISKQNGSFFFIATLIVDLELDYDDPYARDFCGTCTKCIDACPTEAILPDKQVDGSKCISYFTIELKDMLIPDEMQGRFTNWMFGCDTCQDVCPWNRFSKPGNEPAFTPIPEILNLKTNEWEALTEESFRTIFKKSPLKRSKFAGIQRNINFLQYPSKPVSEADI

SEQ ID NO: 76730 - protein, 379 aa, Filobacillus milosensis
  REGION 1..379: note = tr|A0A4Y8IE17|A0A4Y8IE17_9BACI Epoxyqueuosine reductase OS=Filobacillus milosensis OX=94137 GN=queG PE=3; SV = 1
MDFQQLKKELIEYSEEIGIQKIGFASTDTFDTLKQRLMVQQSLKFQSGFEKGSIEERTTPTQLMPKAQSIISIALAYPSRMKGAPKSRKGDRRGIFARASWGKDYHDVLREKLNLLGEFLQEKLDGVAYKAMVDTGELSDRAVAERAGVGFVGKNCALITEEYGSWVYLGELITNIPFEPDKPIEEGCGDCNICVDACPTGALVQGGQLNAQRCVAYQTITKSFLPDEFREKLGNRIYGCDTCQIVCPKNKGKDFHIHPEMEPDPELAKPKLIPLLKISNREFKNKFGYMSGSWRGKKPIQRNAIVALAHYKDETAVDTLADLMVNDPRPVIRGTAAWAIGKIGREDARDMIEQAKEREEDEDVLFEMEKGLDFLVQKV

SEQ ID NO: 76731 - protein, 380 aa, Filomicrobium sp.
  REGION 1..380: note = tr|A0A2D7FFA9|A0A2D7FFA9_9RHIZ Epoxyqueuosine reductase OS=Filomicrobium sp. OX=2024831 GN=queG PE=3 SV=1
MSVAADPHALAALLRAEASTYGFAAFGICRPDDIAGVEERLAAFIAAGRHGDMSWMPDTAERRSSPRKLWSDCRSVIVLGANYGPAVDPLSRVGERLRGVVSAYAKGRDYHDVLKGRLKQIVGKFVARSGSEVKVFVDTAPLMEKPLAAAAGLGWQGRHTNLVSREYGSWLFLGAILSDIELPTTEAEIDHCGSCRACLDVCPTDAFPEPYQLDARRCIAYLTIEYRGHIAREFRQPMGNRVFGCDDCLAVCPWNKFAQVAQETRFHPRVETDDPPLEELLELDDAAFRKRFAGTPVKRTGRDRLVRNVLIAAGNSDDRGLGAKVIRLLDDPSPLVRAMAVWAAARLLEAREFAALAESYQARERDIAVLEEWRTEMEEA

SEQ ID NO: 76732 - protein, 371 aa, unidentified
  source 1..371: note = Fimbriiglobus ruber
  REGION 1..371: note = tr|A0A225DA77|A0A225DA77_9BACT Epoxyqueuosine (OQ) reductase QueG OS=Fimbriiglobus ruber OX=1908690; GN = FRUB_06983 PE=4 SV=1
METAARSLPLVAPDPPDPLLKDRLKAEARARGFTLAGVAPAADADGFGRFAAWLDAGYAGELQYLHDLRDERQHPRAVFAPVRSVLMLGLEYGPPVLPLPSTDTPRGRVAAYARGPDYHRLIWDKLNDLRDWLRAEVPGAAAHGVTDSAPLLERDFARRAGLGWVGKNTMLINTARGSFFFLAALLTNLDLAPDPPQANSHCGTCTACLDACPTAAFPAPGVLDARRCISYLTIELRGAVPEELRPGLGDWVFGCDVCQDVCPWNRRAARGTAGPPAFPADPALATLDPIELLSLNTAQFRKRFEGTSLSRARRVGLLRSAALVLGNVGDERAIPALERAAGGADEVIREAAAWALGQIRARAAGRVDTTA

SEQ ID NO: 76733 - protein, 307 aa, unidentified
  source 1..307: note = Fimbriimonas ginsengisoli
  REGION 1..307: note = tr|A0A068NTV0|A0A068NTV0_9BACT Iron-sulfur cluster binding protein OS=Fimbriimonas ginsengisoli Gsoil 348; OX = 661478 GN=OP10G_3498 PE=4 SV=1
MLLKIEARRLGFELCGVAEAVEAPHLREYAAWLDKGYHGEMGYLREHLPIKAHPRALLPGVRSVIAVGLNYNQPNPPRPGRPRIARYALGRDYHRVLRGKLKKLAAWIEANHPGSECRACVDSAPVFERDYARLAGLGWFGKNTMLINSQRGSWFFIGLLLTTVEFHPDEAAVGACGTCRRCIDACPTGAIVFEEGRWQVDARHCISYLTIEHPGELPRPTGEWTFGCDVCQEVCPFNHPRPRAPLRAQVTEEPDFLAQREWPSLVELAELSYERWDHLTRGSAVRRTGIEGLRRNAGANLKNSDAS

SEQ ID NO: 76734 - protein, 298 aa, unidentified
  source 1..298: note = Firmicutes bacterium
  REGION 1..298: note = tr|A0A354HTU2|A0A354HTU2_9FIRM 4Fe-4S ferredoxin-type domain-containing protein OS=Firmicutes bacterium OX=1879010 GN=DDY38_07630 PE=4 SV=1
MLRRLSSSHRPPYVPWEPEYRCSPQSWLQGARSVLAGAVPYYSRYSRSCSSPAKGQGYVSPFAGEPDYHQFVTDKLVRLGEYILRLHPGTKYTVQVDSGPGCERLYALRAGVGWQGKNNFIIVPGVGSFVWLGLLVTNLELSPDLPLASQCGDCDLCLRACPTKAYRGANDYNHTRCMAYWLTDKNLSPEQCAILSRHRLIYGCDFCQLACPHNIPGDVEAAWPDLHNLLTMSAAELKAFFKNTAALWRGSNVLRRNLVLAAAGSRECRDVLEKLAQGQGMVAETAQAVLNAFAEGDS

SEQ ID NO: 76735 - protein, 408 aa, unidentified
  source 1..408: note = Firmicutes bacterium
  REGION 1..408: note = tr|A0A1Y3QLR4|A0A1Y3QLR4_9FIRM tRNA epoxyqueuosine(34) reductase QueG OS=Firmicutes bacterium ZCTH02-B6 OX=1861639 GN=BAA04_04030 PE=4 SV=1
MCNSAKGGRHLVSLETEIKTFAREVGFDVAAIGRADPYLRARRVLESRRTKGHYPAFTEPDIALRCDPKRLLPSARSVIALGVSYRTAHRPRATRAGRDPKGQLSRYAWGQDYHPIVRSRMQSVIEFLERRVPDLEAQAFVDTGPPVDREVAAEAGLGWYGKNACLYVPGYGSWVFLGEIFTNVELRPDPPVSLDCGDCNRCIRACPTGAIIEPFHVDPNRCVSHLTQMGGSIPKELRPAMGLKVFGCDVCQEVCPWNRDAIVADRPEFQPLPEVGTAPSLIGMLTMSKGEFQRRFGPTAAAWRGKKTLQRNAAIALGNSRNPAAVPALAKAVCTDPKPVVRGSAAWALGRIGGNEAYAALLQARERETDPGVLQEIEDALQQIRHATNTPAPPPPPEAPSPLPRAGG

SEQ ID NO: 76736 - protein, 317 aa, Fischerella major
  REGION 1..317: note = tr|A0A1U7H5M5|A0A1U7H5M5_9CYAN Epoxyqueuosine reductase OS=Fischerella major NIES-592 OX=210994 GN=queG; PE = 3 SV=1
MNQLPGTSSAEVKQKALELGFHKVGIAAVDGDDTEIKRLQAWIKLGYHADMEWMTSPKRQDIRLVMSDVRSLICVALNYYTPHQRPEGKEYGKISRYAWGRDYHKVMHKKLKALSLWLQGLGENIQARYYADTGPVQDKVWAQKAGIGWIAKNGNVITREYGSWVFLGQVLTNLELTPDKPHTQHCGNCTRCLEACPTDAITSPFVVDANRCIAYHTIENRQEKLPETIASNLQGWIAGCDICQDVCPWNQRFANPTDVEEFQPYPGNIDPKLIELAQISDQDWDQQFPASALRRIKPEMLRRNARANLDAFQQAQE

SEQ ID NO: 76737 - protein, 317 aa, unidentified
  source 1..317: note = Fischerella muscicola
  REGION 1..317: note = tr|A0A2N6K9B2|A0A2N6K9B2_FISMU Epoxyqueuosine reductase OS=Fischerella muscicola CCMEE 5323 OX=2019572; GN = queG PE=3 SV=1
MNQLPGTSSAEVKQKALELGFHKVGIAAVDGDDTEIKRLQAWIKLGYHADMEWMTSPKRQDIRLVMSDVRSLICVALNYYTPHQRPEGEEYGKISRYAWGRDYHKVMHKKLKALSIWLQGLGENIQARYYADTGPVQDKVWAQKAGIGWIAKNGNVITREYGSWVFLGEVLTNLELTPDKPHTQHCGNCTRCLEACPTDAITSPFVVDANRCIAYHTIENRQEKLPHTIASNLHGWIAGCDICQDVCPWNQRFANPTDVEEFQPYPGNIDPKLIELAQISDQDWDQQFPASALRRIKPEMLRRNARANLDAFQQAQE

SEQ ID NO: 76738 - protein, 317 aa, Fischerella sp.
  REGION 1..317: note = tr|A0A0S3TSI2|A0A0S3TSI2_9CYAN Epoxyqueuosine reductase OS=Fischerella sp. NIES-3754 OX=1752063 GN=queG; PE = 3 SV=1
MNQLSGTSSAEVKQKALELGFHKVGVAAVDGDDTEVQRLQAWLKLGYHADMEWMTSPKRQDIRLVMSDVRSLICVALNYYTPHQRPEGEEYGKISRYAWGRDYHKVMHKKLKALSVWLQGLGENIQARYYADTGPVQDKVWAQKAGIGWIAKNGNVITREYGSWVFLGEVLTNLELTPDKPHTQHCGNCTRCLEACPTDAITSPFVVDANRCIAYHTIENRQEKLPHTIASNLHGWIAGCDICQDVCPWNQRFANPTDVEEFQPYPGNIDPKLIELAQISDQDWDQQFPASALRRIKPEMLRRNARANLDAFQQAQE

SEQ ID NO: 76739 - protein, 318 aa, Fischerella sp.
  REGION 1..318: note = tr|A0A1Z4TK55|A0A1Z4TK55_9CYAN Epoxyqueuosine reductase OS=Fischerella sp. NIES-4106 OX=2005456 GN=queG; PE = 3 SV=1
MNQLLGTNSAEVKQKAVELGFHKVGIAAIYGTDDIQMQQLRAWIELGYHADMEWMTSPKRQDIRLVMSEVRSLICVALNYYTPHQRPGGEEYAKISRYAWGRDYHKVMHKKLKALSNWLQGQGENIQARYYADTGPVQDKVWAQKAGIGWIAKNGNVITREYGSWVFLGEVLTNLELDPDKPHTQHCGNCTRCLEACPTDAITSPFVVDANRCIAYHTIENRQEKLPEAIASNLQGWVAGCDICQDVCPWNQRFASPTDVEEFQPYPGNIAPKLVELAQISDYEWDERFPASALRRIKPEMLRRNARANLNAFQQAQE

SEQ ID NO: 76740 - protein, 317 aa, Fischerella thermalis
  REGION 1..317: note = tr|G6FX26|G6FX26_9CYAN Epoxyqueuosine reductase; OS = Fischerella thermalis OX=372787 GN=queG PE=3 SV=1
MNQLPGTSSAEVKQKALELGFHKVGIAAVDGDDTEIKRLQAWIKLGYHADMEWMTSPKRQDIRLVMSDVRSLICVALNYYTPHQRPEGKEYGKISRYAWGRDYHKVMHKKLKALSLWLQGLGENIQARYYADTGPVQDKVWAQKAGIGWIAKNGNVITREYGSWVFLGEVLTNLELTPDKPHTQHCGNCTRCLEACPTDAITSPFVVDANRCIAYHTIENRQEKLPETIASNLQGWIAGCDICQDVCPWNQRFASPTDVDDFQPYPGNIAPKLIELAQISDQDWDQQFPASALRRIKPEMLRRNARANLDAFQQAQE

SEQ ID NO: 76741 - protein, 317 aa, Fischerella thermalis
  REGION 1..317: note = tr|A0A2N6MBJ3|A0A2N6MBJ3_9CYAN Epoxyqueuosine reductase OS=Fischerella thermalis CCMEE 5330 OX=2019670; GN = queG PE=3 SV=1
MNQLPGTSSAEVKQKALELGFHKVGIAAVDGDDTEIKRLQAWIKLGYHADMEWMTSPKRQDIRLVMSDVRSLICVALNYYTPHQRPEGKEYGKISRYAWGRDYHKVMHKKLKALSLWLQGLGENIQARYYADTGPVQDKVWAQKAGIGWIAKNGNVITREYGSWVFLGEVLTNLELTPDKPHTQHCGNCTRCLEACPTDAITSPFVVDANRCIAYHTIENRQEKLPETIASNLQGWIAGCDICQDVCPWNQRFANPTDVEEFQPYPGNIDPKLIELAQISDQDWDQQFPASALRRIKPEMLRRNARANLDAFQQAQE

SEQ ID NO: 76742 - protein, 307 aa, unidentified
  source 1..307: note = Flagellimonas aquimarina
  REGION 1..307: note = tr|A0A316L084|A0A316L084_9FLAO Epoxyqueuosine reductase OS=Flagellimonas aquimarina OX=2201895 GN=queG; PE = 3 SV=1
MNSKTVHTELIKTEAKRLGFLSCGVSKAEFLEEEAPRLEKWLNQNMHGEMQYMENHFDKRLDPTKLVEGSKSVISLLLNYYPSNEQNIDSYKISKYAYGTDYHFVIKDKLKDLLQFIQEEIGAVHGRAFVDSAPVLDKAWAAKSGLGWIGKHSNLLTQQVGSFYFIAELIIDLELDYDAPVTDHCGTCTACIDACPTDAIVEPYVVDGSKCISYFTIELKNEIPNEFHGKFDDWMFGCDVCQDVCPWNRFSKKHSEPLFNPTPELLSMTKKDWEEITEDVFKKIFKKSAVKRTKFSGLQRNINFLKP

SEQ ID NO: 76743 - protein, 308 aa, Flagellimonas eckloniae
  REGION 1..308: note = tr|A0A0Q1DM14|A0A0Q1DM14_9FLAO Epoxyqueuosine reductase OS=Flagellimonas eckloniae OX=346185 GN=queG; PE = 3 SV=1
MSLKTTYTKLIKTEAKRLGFLSCGVSKAEFLEEEAPRLEKWLNQNRHGEMRYMENHFDKRLDPTKLVEGSKSVISLLLNYHPSEEQNPNAYKISKYAYGTDYHFVIKGKLKSLLNFIQQDIGEVHGRAFVDSAPVLDKAWAAKSGLGWIGKHSNLLTQQVGSFYFIAELIVDLELDYDTPVTDHCGTCTACIDACPTEAIVEPYVVDGSKCISYFTIELKNEIPNEFQGKFDDWMFGCDVCQDVCPWNRFSKSHNEPLFNPNPELLSMTKKDWEEITEDVFKKVFKKSAVKRTKFSGLQRNINFLKST

SEQ ID NO: 76744 - protein, 298 aa, unidentified
  source 1..298: note = Flagellimonas flava
  REGION 1..298: note = tr|A0A1M5LME0|A0A1M5LME0_9FLAO Epoxyqueuosine reductase OS=Flagellimonas flava OX=570519 GN=queG PE=3; SV = 1
MIKTEAKRLGFLSCGISKAEFLEDEAPRLEKWLNQNMHGEMHYMENHFDKRLDPTKLVEDSKSVVSLLLNYFPSEEQNKDAFKISKYAYGMDYHFVIKDKLKSLLHFIKDEIGEVQGRAFVDSAPVLDKAWAAKSGLGWIGKHSNLLTQQVGSFYFIAELILDLELEYDHPVTDHCGTCTACIDACPTQAIVEPYVVDGSKCISYFTIELKNEIPSTFQGQFDDWMFGCDVCQDVCPWNRFSKSHQEPLFHPQPELLSMTKKDWEEITEDVFKKIFKKSAVKRTKYSGLQRNIKFLSR

SEQ ID NO: 76745 - protein, 306 aa, unidentified
  source 1..306: note = Flagellimonas maritima
  REGION 1..306: note = tr|A0A2Z4LTR6|A0A2Z4LTR6_9FLAO Epoxyqueuosine reductase OS=Flagellimonas maritima OX=1383885 GN=queG; PE = 3 SV=1
MNIQSNTALIKNEARRLGFLSCGISKAEFLEEEAPRLEKWLNQNMHGEMHYMENHFDKRLDPTKLVEGSKSVISLLLNYYPSETQNNESYKISKYAYGTDYHFVIKDKLKSLLNFIQEEIGEVHGRAFVDSAPVLDKAWAAKSGLGWMGKHSNLLTQQIGSFYFIAELIVDLQLEYDTPVSDHCGTCTACIDACPTEAIVEPYVVDGSKCISYFTIELKNEIPNEFKGKFDDWMFGCDICQDVCPWNRFSKTHNEPLFDPNPELLSMTKKDWEEITEDVFKRIFKKSPVKRTKYTGLKRNIKFLKS

SEQ ID NO: 76746 - protein, 314 aa, unidentified
  source 1..314: note = Flagellimonas pacifica
  REGION 1..314: note = tr|A0A285MV33|A0A285MV33_9FLAO Epoxyqueuosine reductase OS=Flagellimonas pacifica OX=1247520 GN=queG; PE = 3 SV=1
MLALIQDKSVSIHSNTKLIKAEAKRLGFLSCGISKAGFLEEEAPRLEKWLNQNMHGEMQYMENHFDKRLDPTKLVEGSKSVVSLLLNYYPAKEQNPEAYKISKYAYGTDYHFVIKDKLKSLLNFIQEEIGEVHGRAFVDSAPVLDKAWAARSGLGWIGKHSNLLTQQVGSFFFIAELIIDLELEYDAPVTDHCGTCTACIDACPTEAIVEPYVVDGSKCISYFTIELKNEIPTEFQGKFDDWMFGCDVCQDVCPWNRFSKPHSQPLFNPHPELLSMDKKDWEEITEDVFRQIFKKSAVKRTKFAGLQRNIKFLK

SEQ ID NO: 76747 - protein, 306 aa, Flagellimonas sp.
  REGION 1..306: note = tr|A0A5C8V6Y3|A0A5C8V6Y3_9FLAO Epoxyqueuosine reductase OS=Flagellimonas sp. 176CP5-101 OX=2603628; GN = queG PE=3 SV=1
MNSRTNHTDLIKTEAKRLGFLSCGISKAEFLEEEAPRLEKWLSQNRHGEMQYMENHFDKRLDPTKLVEGSKSVISLLLNYFPEQNQIKNTYKVSKYAYGIDYHFVIKDKLKSLLHFIQEEIGEVHGRAFVDSAPVLDKAWAAKSGLGWIGKHSNLLTQPVGSFYFIAELIVDLELDYDTPVTDHCGTCTACIDACPTEAIVEPYVVDGSKCISYFTIELKNEIPNEFQGKFDDWMFGCDVCQDVCPWNRFSKSHSEPLFNPHPELLSMTKKDWEEITEDVFRKIFKKSAVKRTKFSGLQRNIKFLK

SEQ ID NO: 76748 - protein, 312 aa, Flammeovirga kamogawensis
  REGION 1..312: note = tr|A0A553GEY2|A0A553GEY2_9BACT Epoxyqueuosine reductase OS=Flammeovirga kamogawensis OX=373891 GN=queG; PE = 3 SV=1
MNKQLQKERNANLIKAEAKRLGFSECGIAKAGFLEEEADPLEKWLKNNMHGEMGYMANHFDKRLDPTKLVEGAKSVVMLSYNYYPEKDLAKDGNYKIAKYAYGEDYHYVIKHKLKDLVKFINSEIGEVDGRVFVDSAPVMERAWAKKAGLGWVGKHSLLLNRQMGSFFFLAELIIDLDLEADPPVKDFCGTCTRCIDACPTDAIPEKGVVDGSKCISYLTIELKDQIPTQFEGKMNDWIFGCDICQDVCPWNRFSSSHSTDTFNPHQNLGNVDKKEWEELTEDVFKELFKKSAIKRTKYAGLMRNISFAKKK

SEQ ID NO: 76749 - protein, 312 aa, Flammeovirga pacifica
  REGION 1..312: note = tr|A0A1S1Z2D6|A0A1S1Z2D6_9BACT Epoxyqueuosine reductase OS=Flammeovirga pacifica OX=915059 GN=queG PE=3; SV = 1
MNTTSQKEKNAALIKAEAKRLGFSECGIAKARFLEEEADFLEDWLKKGMHGKMGYMANHFDKRLDPTKLVEGAKSVVMLSYNYFPETDFASNETYKVAKYAYGEDYHYVIKRKLKDLVKFIQSHIGEVDGRVFVDSAPVMERAWAKQAGLGWVGKHSLLLNRKMGSFFFLAELIIDLELQEDPPIKDYCGTCTRCIDACPTEAIPQKGVVDGSKCISYLTIELKDQIPEEFSGKMQDWIFGCDICQDVCPWNRFSTPHQEDNFLPHENLGDLKKKDWEELTEDVFKEIFKKSAVKRTKFEGLNRNILFAKKR

SEQ ID NO: 76750 - protein, 312 aa, Flammeovirga sp.
  REGION 1..312: note = tr|A0A3S9P7D6|A0A3S9P7D6_9BACT Epoxyqueuosine reductase OS=Flammeovirga sp. L12M1 OX=2494373 GN=queG; PE = 3 SV=1
MNKQLQKERNAALIKAEAKRLGFSECGIAKAGFLEEEADPLEKWLKNNMHGEMGYMANHFDKRLDPTKLVEGAKSVVMLSYNYYPEKDLGQEGNYKIAKYAYGEDYHYVIKHKLKDLVKFINAEIGEVDGRVFVDSAPVMERAWAKKAGLGWVGKHSLLLNRQMGSFFFLAELIIDLDLEADPPVKDFCGTCTRCIDACPTEAIPEKGVVDGSKCISYLTIELKDQIPTQFEGKMNDWIFGCDICQDVCPWNRFSSSHSTNAFNPHEELGNVNKKEWEELTEDVFKELFRKSAIKRTKYAGLMRNISFAKKK

SEQ ID NO: 76751 - protein, 312 aa, Flammeovirga sp.
  REGION 1..312: note = tr|A0A150ADQ2|A0A150ADQ2_9BACT Epoxyqueuosine reductase OS=Flammeovirga sp. SJP92 OX=1775430 GN=queG; PE = 3 SV=1
MDKVNQKEKYSKLIKEEAQRLGFSECGIAKAGFLEEEADPLEKWLKAGMHGEMGYMANHFDKRLDPTKLVEGAKSVVMLSYNYFPEKDLAQEGNFKVAKYAYGEDYHYVIKRKLKDLVKFINAEIGEVEGRVFVDSAPVMERAWAKKAGLGWVGKHSLLLNRKMGSFFFLAELIIDLELQEDAPIKDYCGTCTRCIDACPTDAIPEKGIVDGSKCISYLTIELKEQIPTEFQGKMEDWIFGCDICQDVCPWNRFSKPHSTPEFSPHDHLGEMSKNDWNEITDEVFKEIFRKSAVKRTKLEGLKRNIMYAQKK

SEQ ID NO: 76752 - protein, 305 aa, unidentified
  source 1..305: note = Flammeovirgaceae bacterium
  REGION 1..305: note = tr|A0A2E0FAH2|A0A2E0FAH2_9BACT Epoxyqueuosine reductase OS=Flammeovirgaceae bacterium OX=2026740 GN=queG; PE = 3 SV=1
MTKNNTELIKIKAKELGFTSCGISKSRHLHEEEDNFEKWLSRGNQGSMSYLEKNFDKRLDPRKLVPGSKSVISLSYNYYPQKKIDQKNNFIISKYAYGKDYHNVIRKKLKKLFQFIKEKIGDVEGRVFVDSAPVHERAWAKLSGLGWIGKNSLLINEKRGSYFFLAEIICDLKLDYDSPALDRCGKCTQCIDACPTDAITSAQVINANKCISYLTIENKDQIPDELKDNLNGAIFGCDICQDVCPWNKFSKPHDEKKFIPNDELSSFKKSDWVELTEETFNKIFEGSAVKRSKYKGIIRNIKASN

SEQ ID NO: 76753 - protein, 311 aa, unidentified
  source 1..311: note = Flammeovirgaceae bacterium
  REGION 1..311: note = tr|A0A1Z8QHB8|A0A1Z8QHB8_9BACT Epoxyqueuosine reductase OS=Flammeovirgaceae bacterium TMED32 OX=1986681; GN = queG PE=3 SV=1
MMKSNRDIVKEIALDLGFSYCGISKADFLAEEADHLETWLKRGYQGKMSYMERHFDKRLDPRKLVPGAQSVISLLYNYAPQKDETDQTPYKIARYAYGKDYHFVIKDKLAEFMNRMKVGIGKIEGRAFVDSAPVHERAWASKSGLGWVGKNTLLINKDSGSYFFLAELIIDLKLEADGPIKDYCGTCTRCIDACPTDAISEPYVVDGSRCISYLTIELKDEIPTEFSDKMKGWAFGCDICQQVCPWNRFSTPHNEPQFAPQGWEELSKTAWEEMTEVVFGNVFKKSPINRTKFKGLQRNISFIQTRKDDTY

SEQ ID NO: 76754 - protein, 311 aa, unidentified
  source 1..311: note = Flaviaesturariibacter sp.
  REGION 1..311: note = tr|A0A4R1B8N3|A0A4R1B8N3_9BACT Epoxyqueuosine reductase OS=Flaviaesturariibacter sp. 17J68-12 OX=2502780; GN = queG PE=3 SV=1
MSAAAHTRWIKDAARRFGFDHCGIARAEALDDDARRLEQWLSKGYHGSMQYMANHFDLRVDPRRLVPGARSVITFLKNYYPAEESRSDIKVARYAWGADYHEVIRAQLNAFLAEARAAIGNIEGRGFVDSAPVLERSWAGRSGLGWVGKNGNLINKGAGSFFFIATLITDLELEYDAPYARDYCGSCTRCIDACPTDAILPGKTVDGSRCISYFTIELKDLLIPQEHQGKFGNWMFGCDICQEVCPWNRFSTPNREPAFTPVPEVLNLSSSEWEALSEEAFRTIFRRSPLSRAKHRGIQRNLRFLKGDQGA

SEQ ID NO: 76755 - protein, 312 aa, unidentified
  source 1..312: note = Flaviaesturariibacter sp.
  REGION 1..312: note = tr|A0A4R4DY08|A0A4R4DY08_9BACT Epoxyqueuosine reductase OS=Flaviaesturariibacter sp. 17J68-15 OX=2545761; GN = queG PE=3 SV=1
MPTTAENTRWIKEAALRHGFEHCGVARAVPLDDDARRLERWLGQGYQGDMRYMENHFDLRVDPGKLVPGARSVITFLKNYYPEETPTSDLRVARYAWGQDYHDVIRARLNTLLAEARSAIGAIDGRGFVDSAPVLERSWAQRSGLGWVGKNGNLINKGAGSFFFIATLITDLELEYDDPFARDFCGSCTRCIDACPTDAILPDKTIDGSRCISYFTIELKEALIPSEMEGKFGNWFFGCDTCQEVCPWNRFSKPHREAAFTPFREVLHLSSGEWEALSEEAFRKIFRGSPLSRAKHKGIQRNLRFLKGTSGD

SEQ ID NO: 76756 - protein, 308 aa, Flavihumibacter petaseus
  REGION 1..308: note = tr|A0A0E9N1Y6|A0A0E9N1Y6_9BACT Epoxyqueuosine reductase OS=Flavihumibacter petaseus NBRC 106054; OX = 1220578 GN=queG PE=3 SV=1
MPTLSNHIKKMAYELGFMYCGISASKRLEEDERHLEAWLNKGYHGMMSYMANHFDMRVDPGKLVPGAKSVITVLMNYFPVEKQPEGLPKISKYAYGNDYHELIREKLNQLLFRIRELAGDVQGRGFVDSAPVLERAWARESGLGWMGKNGNLINKTSGSFFFIATLITDLELDYDAPFARDYCGTCTRCIDACPTGAILPDGTVAGDKCISYFTIELKSQLIPEEQQGKFDNWMFGCDTCQDVCPWNRFSQPATEPGFSAIPGLFSMAAEDWEQLGEDAFRKMFRHSPLKRAKYAGVLRNLHFIAPRD

SEQ ID NO: 76757 - protein, 312 aa, unidentified
  source 1..312: note = Flavihumibacter solisilvae
  REGION 1..312: note = tr|A0A0C1IRL3|A0A0C1IRL3_9BACT Epoxyqueuosine reductase OS=Flavihumibacter solisilvae OX=1349421 GN=queG; PE = 3 SV=1
MKELTHISNRIRQMAAELGFMHCGISQSKRLDEDARRLEQWLNKNYHGSMAYMANHFDLRVDPSRLVPGAKSVITLLINYYPDTEQSQKAPHISKYAYGNDYHEVIREKLRQLLFRIREIAGDVNGRGFVDSAPVLERAWARESGLGWIGKNGNLINKQAGSFFFIATLITDLELQYDDAFAGDYCGTCTRCIDACPTDAIMDNKTINGSKCISYFTIELKEMLIPGEMKGRFNDWMFGCDICQDVCPWNRFSRPHNEPAFTPIPEILELNPEDWEAMGEDRFREIFRHSPLKRAKYQGILRNLRFLRPEST

SEQ ID NO: 76758 - protein, 177 aa, Flavihumibacter sp.
  REGION 1..177: note = tr|A0A162NJJ1|A0A162NJJ1_9BACT 4Fe-4S ferredoxin-type domain-containing protein; OS = Flavihumibacter sp. CACIAM 22H1 OX=1812911; GN = A1D16_19795 PE=4 SV=1
MERAWARETGLGWIGKNGNLITRQNGSFFFIATLITDLEADQYDDPYAKDYCGTCTKCIDACPTEAIEPDRVINGSKCISYFTIELKEELIPAAEKGRFENWLFGCDICQDVCPWNRFSTPSKEEQFTPIPELFQLKPADWEAMGEEKFRKLFRNSPLKRTKYKGIIRNLRFLELPG

SEQ ID NO: 76759 - protein, 314 aa, Flavihumibacter sp.
  REGION 1..314: note = tr|A0A0C1L7N2|A0A0C1L7N2_9BACT Epoxyqueuosine reductase OS=Flavihumibacter sp. ZG627 OX=1463156 GN=queG; PE = 3 SV=1
MNFEIKISEKIKSYAAELGFLHCGIARSRRLDDDARRLENWLNNNYHGSMSYMANHFDLRVDPSKLVPGAKSVITLLMNYYPEEVQEKNLPGISKYAYGHDYHEVIREKLHHLLFRIRELAGDVNGRGFVDSAPVLERSWARESGLGWIGKNGNLINKEAGSFFFLATLITDLELEYDDLYTKDYCGTCTRCIEACPTDAILPDKTINGSQCISYFTIELKDLLIPSEMQGKFNNWMFGCDICQDVCPWNRFSQPTKEPAFSPIPGILNMTSGDWELLGEERFRSLFRHSPLKRSKYKGILRNLRFLKQDDPIE

SEQ ID NO: 76760 - protein, 345 aa, unidentified
  source 1..345: note = Flavimaricola marinus
  REGION 1..345: note = tr|A0A238LK94|A0A238LK94_9RHOB Epoxyqueuosine reductase OS=Flavimaricola marinus OX=1819565 GN=queG PE=4; SV = 1
MGLKQELFSFALDAGFSKAGVCRPDAAPELAGRLAAFVDAGRHGQMGWMAERMAWRGDPTALWPEARSVIMLAEAYSPEHDPLAVLEQTDLAAVSVYAHGRDYHDLVKKRLKRVARWLIEQSPGAEVKVFVDTAPVMEKPLAQAAGLGWQGKHTNLLGRDIGNWVFLGAIFTTVELEPDPPERSHCGSCTACLDICSTNAFPAPYQLDARRCISYLTIEHKGPVPHELRALMGNRIYGCDDCLAVCPWNKFAVAAKEMRYLRDGPAPELADLVSLDDAAFRAMFSGSPIKRIGRNRFVRNVLYAIGNSGRGALADAARPLSKDPDPVVAEAANWAISTLETNSGA

SEQ ID NO: 76761 - protein, 309 aa, unidentified
  source 1..309: note = Flavipsychrobacter stenotrophus
  REGION 1..309: note = tr|A0A2S7SVL7|A0A2S7SVL7_9BACT Epoxyqueuosine reductase OS=Flavipsychrobacter stenotrophus OX=2077091; GN = queG PE=3 SV=1
MYSSPDKNTKLIKDEASRLGFNSCGIAKAVQLEDDAVRLEQWLSKGYNAGMEYMERNFDLRIDPRKLVPGAKSVITLQLNYYPAEQQQALAPKIAKYAWGTDYHYVIREKLNQLLDFINTNIGAVDGRGFVDSAPVLERSWAVRSGLGWIGKNGNVLTRNSGSFFFIATLITDLELSTDAPFTTDHCGTCTRCIDACPTDAIVSPTKIDATKCISYLTIELKDALIPSEFHNKMENWMFGCDICQDVCPWNRFSKPNTEANFTPIPEILNLSMRQWEELSEDAFNKIFKNSPLKRSKWKGMQRNISSIG

SEQ ID NO: 76762 - protein, 307 aa, Flaviramulus basaltis
  REGION 1..307: note = tr|A0A1K2IEQ4|A0A1K2IEQ4_9FLAO Epoxyqueuosine reductase OS=Flaviramulus basaltis OX=369401 GN=queG PE=3; SV = 1
MNQKVSYTNLIKTEAKRLGFLSCGISKAQFLEEEAPRLEKWLNKNMHGEMRYMENHFDKRLDPTKLVEDSKSVISLLLNYYPEEKQNENSFKLSKYAFGNDYHFVIKDKLKSLLNFIQEEIGEVHGRAFVDSAPVLDKAWAAKSGLGWIGKHSNLLTQQVGSFYFIAELIIDLDLEYDTPVTDHCGTCTACIDACPTQAITEPYVVDGSKCISYFTIELKENIPSEFKGKMDDWMFGCDVCQDVCPWNRFSKSHSEPLFNPHPELLSMTKKDWEEITEDTFKKVFKNSAVKRTKFSGLKRNINFLKE

SEQ ID NO: 76763 - protein, 308 aa, Flavisolibacter ginsengisoli
  REGION 1..308: note = tr|A0A1M5FXX6|A0A1M5FXX6_9BACT Epoxyqueuosine reductase OS=Flavisolibacter ginsengisoli DSM 18119; OX = 1121884 GN=queG PE=3 SV=1
MSVTAEHSGLVKQMAVQYGFDYCGIAKAVPLDEDARRLENWLNQGMNGNMHYMENYFDLRIDPSRLVPGARSVITLLKNYYPSEIPEQELKISKYAYGKDYHEVLRPRLQSMISALQDKIGQFNGRGFVDSAPVLERTWARKTGLGWIGKNGNLINKQSGSFYFIATLITDLDLDYDDPMAKDYCGSCTKCIDACPTEAILPGKVINGSKCISYFTIELKDEIIPSEMKGKFANWMFGCDICQDVCPWNRFSQPHHEEAFTPLPEILNLTTKEWEELSEEVFRKLFKFSPLSRSKHKGIQRNIRFLKS

SEQ ID NO: 76764 - protein, 307 aa, unidentified
  source 1..307: note = Flavisolibacter ginsenosidimutans
  REGION 1..307: note = tr|A0A5B8UQH4|A0A5B8UQH4_9BACT Epoxyqueuosine reductase OS=Flavisolibacter ginsenosidimutans OX=661481; GN = queG PE=3 SV=1
MVTATHTRLLKTLAKQFGFDYCGIAKAQVLDEDARRLEAWLNKGLHGKMRYMENYFDLRTDPSKLVPGAKSVITLLKNYYPSERLNGDLKISKYAYGQDYHDVIRASLKAMMHEAQEKIGAFSGRGFVDSAPVLERSWAQRSGLGWIGRNGNLITKESGSFYFIATLITDLELEYDDPLAKDFCGSCRRCIEACPTEAIGEDKVINGSQCISYFTIELKDEIIPEEMKGKFQNWMFGCDACQDVCPWNRFSKPHSEAAFSPLPEILNLSTKEWEELSEETFRKIFKHSPLSRSKHKGIQRNVKFLKA

SEQ ID NO: 76765 - protein, 308 aa, unidentified
  source 1..308: note = Flavisolibacter tropicus
  REGION 1..308: note = tr|A0A172U168|A0A172U168_9BACT Epoxyqueuosine reductase OS=Flavisolibacter tropicus OX=1492898 GN=queG; PE = 3 SV=1
MLSIEKNTALVKAKAQAFGFDYCGIAQAKRLDEDARRLEAWLNKGLHGKMQYMENYFDLRIDPTKLVPGAKSVITLLKNYYPHEQTPSGHGISKYAWGQDYHTVIKQHLRSMIQELQVDLGQFGGRGFVDSAPVLERTWAQRSGLGWIGKNGNLITKGSGSFFFIATLIVDVDLVYDDPFAKDFCGSCQRCIEACPTQAILPDKTINGSQCISYFTIELKDELIPTEMKGKFNNWMFGCDTCQDVCPWNRFSKPNSEQGFTPIPEILDFTTKDWEELSEEAFRKIFKHSPLSRSKYKGIQRNIKFLKS

SEQ ID NO: 76766 - protein, 308 aa, unidentified
  source 1..308: note = Flavivirga eckloniae
  REGION 1..308: note = tr|A0A2K9PPC5|A0A2K9PPC5_9FLAO Epoxyqueuosine reductase OS=Flavivirga eckloniae OX=1803846 GN=queG PE=3; SV = 1
MNSKAKHTNLIKTEAKRLGFLSCGISKAQFLEEEAPRLESWLNKNMHGEMRYMENHFDKRLDPTKLVEGSKSVVSLLLNYYPSEIQQDKTAPKISKYAYGRDYHFVIKDKLKSLLNVIQEEIGEVNGRAFVDSAPVLDKAWAAKSGLGWIGKHSNLITQQVGSFYFIAELIIDLELDYDTPVTDHCGTCTACIDACPTQAITEPYVVDGSKCISYFTIELKENIPTEFKGQFDDWMFGCDVCQDVCPWNRFSKPHNEPLFNPHPELLFMTKKDWEEITEDTFKKVFQKSAVKRTKFAGLQRNIKFLKD

SEQ ID NO: 76767 - protein, 308 aa, Flavivirga sp.
  REGION 1..308: note = tr|A0A4S1DT32|A0A4S1DT32_9FLAO Epoxyqueuosine reductase OS=Flavivirga sp. RZ03 OX=2559571 GN=queG PE=3; SV = 1
MNSKSKHTTLIKTEAKRLGFLSCGISKAQFLEEEAPRLENWLNKNMHGQMHYMENHFDKRLDPTKLVEGSKSVVTLLLNYYPSEFQQDKTAPKISKYAYGRDYHFIIKDKLKSLLNFIEEEIGEVEGRAFVDSAPVLDKAWAAKSGLGWIGKHSNLITQQVGSFYFIAELIIDLDLEYDLPTTDHCGTCTACIDACPTQAIAEPYVVDGSKCISYFTIELKENIPTEFKGQFEDWMFGCDVCQDVCPWNRFSKPHSEPLFNPHPELLSMTKKDWEEITEDTFKKVFQKSAVKRAKFSGLKRNIEFLKR

SEQ ID NO: 76768 - protein, 309 aa, unidentified
  source 1..309: note = Flavobacteria bacterium
  REGION 1..309: note = tr|C0BHX7|C0BHX7_FLABM Epoxyqueuosine reductase; OS = Flavobacteria bacterium (strain MS024-2A) OX=487796; GN = queG PE=3 SV=1
MLNRKAHYSEIIKSKAKDLGFLSCGIAKAGFLEKEAPKLEQWLQEGRHGNMVYMENHFDKRLDPTVLVPGAKSVVSLLLNYYSDEKQIDPKAPKIASYAYGQDYHNVIKDKLTQLMIYLKEEIGEVDGRVFVDSAPVMDKAWASRAGLGWVGKNTNLISKQVGSFFFIAELIIDLELEYDLPVADHCGSCTACIDACPTEALTAPYQIDGSKCISYATIELKEAIPETFKGKMEGWAFGCDICQTVCPWNRFATPHQEIDFIPKKELLELSSRDWRELTEETFKRVFQKSAVKRAKFAGLQRNIKFLSS

SEQ ID NO: 76769 - protein, 313 aa, unidentified
  source 1..313: note = Flavobacteria bacterium
  REGION 1..313: note = tr|C0BP15|C0BP15_9BACT Epoxyqueuosine reductase; OS = Flavobacteria bacterium MS024-3C OX=487797 GN=queG PE=3; SV = 1
MTTSDHVQQDRAQLFKREAALLGFISCGISKAGLLEEEAPRLEKWLKEAKQGKMGYMENHFDKRLDPTKLVPGAKSVVSLLYNYFPEQKQSSDSYQIAKYAYGQDYHEVIKNKLKTLLERVSAQLGQIEGRAFVDSAPILEKAWAAKSGLGWIGKNSNLLTQQVGSFYFIAELVLDIDLPQDPITSDHCGTCTACIDACPTQAITPYEVDGSKCISYFTIELKEAIPKEVSGQFQDWAFGCDICQDVCPWNRFSKSHSEPLFNPDPRLLENTKKDWEEITQEVFSQIFKKSAVKRTKYEGFKRNIDFLQNQKF

SEQ ID NO: 76770 - protein, 273 aa, unidentified
  source 1..273: note = Flavobacteriaceae bacterium
  REGION 1..273: note = tr|A0A359DSF2|A0A359DSF2_9FLAO tRNA epoxyqueuosine(34) reductase QueG (Fragment); OS = Flavobacteriaceae bacterium OX=1871037 GN=queG PE=4 SV=1
MLLQTEEHIKIKWSQCIKEKAEALGFISCGIAKADFLVEEVPRLEAWLKNDYHGEMQYMENHFDMRLDPRILVEGAKSVISLAYNYYQNLNRNPNSYKVAMYAQGEDYHFVVKEKVRELLDFIQDEIGEVNGRAFADSAPILEHAWARKAGIGWVGKNSLTLSKQKGSFFFLSELIVDLDLAYDSPIETDHCGKCTRCIDACPTEAILPNKTVNGSQCISYFTIELKEQIPAEMKGKFDDWIFGCDVCQEVCPWNRFSLPTQENRFTGHEKIN

SEQ ID NO: 76771 - protein, 315 aa, unidentified
  source 1..315: note = Flavobacteriaceae bacterium
  REGION 1..315: note = tr|A0A3L9MHE2|A0A3L9MHE2_9FLAO Epoxyqueuosine reductase OS=Flavobacteriaceae bacterium YIM 102668; OX = 2479857 GN=queG PE=3 SV=1
MHLPTEEHIKIERTQRIKAKAEALGFISCGIAKADFLEEEAPRLESWLKNNYQGEMNYMANHFDMRLDPRLLVEGAKSVISLAYNYYQDLNRNLDSYKVAMYAQGEDYHFVVKEKVRELLDFIQDEIGEVVGRAFTDSAPIMEHAWATKAGIGWVGKNSLTLSKQKGSFFFLAELILDLDLMYDNPMETDHCGKCTKCIDACPTEAILPNLVVNGSKCISYFTIELKDQIPSEMKGKFDDWIFGCDICQEVCPWNRFSLPTKQERFIGHESINQFSKNDWEEITEDVFREIFKKSPVKRTKYVGLLRNIDFVKQN

SEQ ID NO: 76772 - protein, 306 aa, unidentified
  source 1..306: note = Flavobacteriales bacterium
  REGION 1..306: note = tr|A0A520UJF9|A0A520UJF9_9FLAO Epoxyqueuosine reductase OS=Flavobacteriales bacterium OX=2021391 GN=queG; PE = 3 SV=1
MKNKIRYTELIKNEAKRLGFISCGISKAEFLENEAPRLEKWLKSNMHGEMKYMENYFDKRLDPTKLVEGAKSIVSLAYNYYPNNFQKEGVPKVSKYAYGKDYHYVIKEKLKQLLSYIKEEVGEVYGRVFVDSAPILEKAWASKSGIGWVGKNSNLITKQVGSYYFLAEIIIDLDLDYDTIETDHCGECRACIDSCPTEAIVEPYVVDGSKCISYFTIELKENIPNEFKGKFNDWIFGCDICQDVCPWNKFSKPHKEPLFNPSSKTMDMSEKQWQEITEETFNRVFKNSPLKRAGYNGLKRNLNYIK

SEQ ID NO: 76773 - protein, 311 aa, unidentified
  source 1..311: note = Flavobacteriales bacterium
  REGION 1..311: note = tr|A0A424NLG0|A0A424NLG0_9FLAO Epoxyqueuosine reductase OS=Flavobacteriales bacterium TMED96 OX=1986730; GN = queG PE=3 SV=1
MLNKNKLSEIIKSEALSLNFLSCGISKAEFLSEEAPKLESWLKSGFNGEMSYMERNFDKRLDPRLLVPGCKSVISLLFNYHTEKKPKKDHEPKISSYAYGKDYHFVVKEKLRELLSRIKNLVGDVNGRVFVDSAPVMDRAWAKKSGLGWIGKNTNLINKKTGSFFFIAELILDIELEYDHPTTDHCGSCTACIDSCPTNALATPYKMDATKCISYATIELKNNIPDSFKDNMRGWIFGCDICQDVCPWNKFSKNHNEPSFEDKKNISNMSKKQWKDLTEEVFDKVFKDSPIKRTGYSGIKRNLNFAFSEEK

SEQ ID NO: 76774 - protein, 308 aa, unidentified
  source 1..308: note = Flavobacteriia bacterium
  REGION 1..308: note = tr|A0A2G6F0I2|A0A2G6F0I2_9BACT Epoxyqueuosine reductase OS=Flavobacteriia bacterium OX=2044941 GN=queG; PE = 3 SV=1
MRSREHLSLKIKKKARELGFASVGIAKADALESETQRLAQWLDNGYHGEMYYMGNHFEKRLDPRKLVPGAQSIIVLSHNYYPEQSITDGQYKIARYAYGEDYHKVLKDKMKVLLAYIQEEVGEVSARIFSDSAPVMERQWAVRAGLGWQGKNTLLIQKGLGSYFFLAEIIIDLPLIYDSPFKTDHCGTCTRCIDSCPTQAILPGKTLDANKCIAYLTIELKDNIPDAFKNKWKDWIFGCDICQEVCPWNRRSKPHNEPRFSPKQELVDMSKSNWETLNDKQFDSMFSKSAVKRATLPSLKETITFVKK

SEQ ID NO: 76775 - protein, 313 aa, unidentified
  source 1..313: note = Flavobacteriia bacterium
  REGION 1..313: note = tr|A0A1Q3ZI52|A0A1Q3ZI52_9BACT Epoxyqueuosine reductase OS=Flavobacteriia bacterium 40-80 OX=1895763; GN = queG PE=3 SV=1
MSLAEKHTKIVKEIAYELGFSFCGISKAGFLEEEAPRLEKWLNNGRHGKMAYMENHFDKRLDPTKLVEGSKSVVSLLLNYFPSHNQNAESYKISKYAYGQDYHDVIKNKLRLFLQEIRNRIGEVDGRVFVDSAPVMDKVWAQKSGLGWVGKNGNLIRPQNGSFFFIAELIIDLELQPDGPIKDYCGTCSKCMDSCPTGALDIPYVVDGSKCISYLTIELKDELFSAEFNGKMQNWMFGCDICQDVCPWNRFSKPHSIVEFEPKADLLDMKYKDWEEMTQELFSKLFTGSAVKRTKFSGLKRNIEFLKNHETKK

SEQ ID NO: 76776 - protein, 308 aa, unidentified
  source 1..308: note = Flavobacterium aciduliphilum
  REGION 1..308: note = tr|A0A328YMD4|A0A328YMD4_9FLAO Epoxyqueuosine reductase OS=Flavobacterium aciduliphilum OX=1101402; GN = queG PE=3 SV=1
MREEKHTALIKAEAKRLGFISCGISKAGFLEEEAPRLENFLKQEMQGQMSYLERNFDKRLDPTLLVDDAKSVISLLYNYYPSEVASKESFKISKYAYGEDYHHVIKDKLKEFLDTLQNTIGAINGRAFVDSAPVLEKAWAAKSGLGWVGKNSNLITKKVGSFYFIAEIILDVALQYDSPASDHCGSCTACIDSCPTQAIVSPYVVDGSKCISYFTIELKDNLPKEMKGKFDDWIFGCDVCQDVCPWNSFSLPHQEPRFLPNQDWFSYSKKDWLDITEEVFSKTFKDSAIKRTKFEGLKRNIEFVSGRK

SEQ ID NO: 76777 - protein, 309 aa, unidentified
  source 1..309: note = Flavobacterium akiainvivens
  REGION 1..309: note = tr|A0A0M9VJE5|A0A0M9VJE5_9FLAO Epoxyqueuosine reductase OS=Flavobacterium akiainvivens OX=1202724; GN = queG PE=3 SV=1
MIDNKQKYSALIKAEAKRLGFISCGISRAGFLEEEAPRLEKWLNENRHGKMQYMENHFDKRLDPTLLVDGAKSVISLLLNYYPEEKQVSDTFKISKYAYGQDYHFVIKERLKGLLYSINEHIGEVGGRAFVDSAPVLDKAWAAKSGLGWIGKNSNLLSKQVGSFFFIAELIVDIELEYDHAVTDHCGSCTACIDACPTQAIIQPYVVDGSKCISYFTIELKENIPQEMKGSFADWAFGCDVCQDVCPWNRFSKPHREPLFNPHPDLLGFSKKDWEEITEDTFRAVFKNSAVKRTKFEGLKRNIDFLKAP

SEQ ID NO: 76778 - protein, 306 aa, unidentified
  source 1..306: note = Flavobacterium album
  REGION 1..306: note = tr|A0A2S1QUC5|A0A2S1QUC5_9FLAO Epoxyqueuosine reductase OS=Flavobacterium album OX=2175091 GN=queG PE=3; SV = 1
MNNKKPYSDFIKQEAKRLGFLSCGISKAVFLEEEAPRLEKWLNEGRHGQMQYMENYFDKRLDPTLLVDGAKSVISLLLNYYPSETQTEGTYKISKYAYGQDYHFVIKEKLKELLHSIQSTIGEVGGRAFVDSAPVLDKAWAAKSGLGWIGKNSNLLSKQVGSFFFIAELIVDIELEYDHAVTDHCGSCTACLDACPTQAIIQPYVVDGSKCISYFTIELKDNLPAEMKGKFDEWAFGCDICQDVCPWNRFSKPHSEPLFNPHPDLLSMTKKDWEEITEDTFRAVFKNSAVKRTKYEGLKRNIDFLK

SEQ ID NO: 76779 - protein, 308 aa, unidentified
  source 1..308: note = Flavobacterium alvei
  REGION 1..308: note = tr|A0A2S5ACF9|A0A2S5ACF9_9FLAO Epoxyqueuosine reductase OS=Flavobacterium alvei OX=2080416 GN=queG PE=3; SV = 1
MFNNKEKHTQFIKSEAKRLGFLSCGISKAGFLEKDAPRLEKWLNKQMNGQMSYMENNFDKRLNPTLLVDDAKSVVSLLLNYYPSEFQNEESYKISKYAYGQDYHFVIKDKLKELLFSIQSNIGEVSGRAFVDSAPVLDKAWAAKSGLGWIGKNGNLLTQKVGSFYFIAELIIDLDLEYDHATTDHCGSCTACIDACPTNAIVAPYVVDGSKCISYFTIELKENIPQEMKGKFDNWAFGCDVCQDVCPWNRFSKAHNEPLFTPNKEMLSMSKKDWTEITENTFNLVFKNSPVKRTKYSGIRRNIDFLKE

SEQ ID NO: 76780 - protein, 307 aa, Flavobacterium anhuiense
  REGION 1..307: note = tr|A0A444VU87|A0A444VU87_9FLAO Epoxyqueuosine reductase OS=Flavobacterium anhuiense OX=459526 GN=queG; PE = 3 SV=1
MINSKEKYSKFIKEEAKRLGFLSCGISKAGFLEEEAPRLENWLKNNRNGQMAYMENHFDKRLDPTLLVDDGKSVVSLLLNYYPDSFQNDESFKISKYAYGQDYHFVIKDKLKEFLHSIQENIGEVSGRAFVDSAPVLDKVWAAKSGLGWIGKNSNLITQKVGSFYFIAELIIDLELEYDHAVTDHCGTCTACVDACPTQAIVAPYIVDGSKCISYYTIELKENLPEEMKGKFDEWMFGCDTCQDVCPWNRFSKPHSEPLFNPNPDLLSFTKKDWLEITEETFRTVFKNSPIKRTKFEGLKRNINFLK

SEQ ID NO: 76781 - protein, 307 aa, Flavobacterium anhuiense
  REGION 1..307: note = tr|A0A1G5AK41|A0A1G5AK41_9FLAO Epoxyqueuosine reductase OS=Flavobacterium anhuiense OX=459526 GN=queG; PE = 3 SV=1
MINAKEKYSKFIKEEAKRLGFLSCGISKAGFLEQEAPRLENWLKNNRNGQMAYMENHFDKRLDPTLLVDDGRSVVSLLLNYYPDSFQNDESFKISKYAYGQDYHFVIKDKLKELLHSIQENIGEVSGRAFVDSAPVLDKAWAAKSGLGWIGKNSNLITQKVGSFYFIAELIIDLELEYDHVVTDHCGSCTACIDACPTQAIVAPYIVDGSKCISYYTIELKENLPEEMKGKFDEWMFGCDTCQDVCPWNRFSKPHSEPLFNPNPDLLSFTKKDWLEITEETFRTVFKNSPIKRTKFDGLKRNINFLK

SEQ ID NO: 76782 - protein, 258 aa, unidentified
  source 1..258: note = Flavobacterium aquaticum
  REGION 1..258: note = tr|A0A327YUZ3|A0A327YUZ3_9FLAO Epoxyqueuosine reductase OS=Flavobacterium aquaticum OX=1236486; GN = B0I03_102238 PE=4 SV=1
MSYMENHFDKRLNPTLLVDDAKSVISLLLNYYPSELQNQDSYKISKYAYGQDYHHVIKEKLKELLHFIQTEIGEVSGRAFVDSAPVLDKAWAAKSGLGWVGKNSNLITQKVGSFYFIAELIIDLELEYDKPTTDHCGSCTACLDACPTEAIVAPYVVDGSKCISYFTIELKDNLPQEMKGKFDDWMFGCDVCQDVCPWNRFSKPNNEPLFQTNKEILNFSKSDWEEITVDTFQKVFKNSAVKRTKYEGLLRNINFLKK

SEQ ID NO: 76783 - protein, 307 aa, Flavobacterium aquatile
  REGION 1..307: note = tr|A0A095V2X5|A0A095V2X5_9FLAO Epoxyqueuosine reductase OS=Flavobacterium aquatile LMG 4008 = ATCC 11947; OX = 1453498 GN=queG PE=3 SV=1
MINNKEKYTNLIKTEAKRLGFLSCGISKSGFLEEEAPRLENWLNNQMQGQMSYMENNFDKRLNPNLLVDDAKSVVSLLLNYYPSEIQNEESYKISKYAYGQDYHFVIKEKLKELLHTIQIEIGEVSGRAFVDSAPVLDKAWAAKSGLGWIGKNSNLLTQKVGSFYFIAELIIDIELDYDHATTDHCGTCTACIDACPTEAIVAPYIVDGSKCISYFTIELKENLPIEMKGKFDDWAFGCDICQDVCPWNKFSKPHNEPLFNPNAELLSFSKKDWQEITEDTFKKVFKNSAVKRTKLEGFTRNITFLK

SEQ ID NO: 76784 - protein, 307 aa, unidentified
  source 1..307: note = Flavobacterium aquicola
  REGION 1..307: note = tr|A0A3E0ES39|A0A3E0ES39_9FLAO Epoxyqueuosine reductase OS=Flavobacterium aquicola OX=1682742 GN=queG; PE = 3 SV=1
MINSKESYSKFIKSEAKRLGFLSCGISKAGFLEKEAPRLENWLNNNYNGQMAYMANHFDKRLDPTLLVDDAKSVVSLLLNYYPSETQNPDSYKISKYAYGQDYHFVIREKLNEFLFSIQQNIGEVSGRAFVDSAPVLDKAWAAKSGLGWIGKNSNLLTQKTGSFYFIAELIIDLDLEYDHAVTDHCGSCTACLDACPTQAIVAPYVVDGSKCISYFTIELKDNIPMEMKGKFDDWAFGCDVCQDVCPWNRFSKPHDEPLLNANSELLSMSKKDWIEITEETFKKVFKDSPLKRSKFNGLQRNILFLE

SEQ ID NO: 76785 - protein, 308 aa, Flavobacterium aquidurense
  REGION 1..308: note = tr|A0A1H3SYD8|A0A1H3SYD8_9FLAO Epoxyqueuosine reductase OS=Flavobacterium aquidurense OX=362413 GN=queG; PE = 3 SV=1
MTINSKETYSKFIKAEAKRLGFLSCGISKAGFLEQEAPRLENWLKNNQNGQMAYMENHFDKRLNPTLLVDDAKSVVSFLLNYYPEQSQNHESFKISKYAYGQDYHFVIKEKLKEFLYSIQENIGDVSGRAFVDSAPVLDKAWAAKSGLGWIGKNSNLLTQKVGSFYFIAELILDLDLEYDHATTDHCGSCTACIDACPTQAIVAPYVVDGSKCISYYTIELKENIPYEMKGKFDEWMFGCDTCQDVCPWNRFSKPHSEPLFNPNPELLSFSKKDWIEITDETFKKVFKNSPIKRTKFDGLKRNINFLK

SEQ ID NO: 76786 - protein, 308 aa, Flavobacterium aquidurense
  REGION 1..308: note = tr|A0A0Q0VWU5|A0A0Q0VWU5_9FLAO Epoxyqueuosine reductase OS=Flavobacterium aquidurense OX=362413 GN=queG; PE = 3 SV=1
MSINAKETYSEFIKSEAKRLGFLSCGISKAGFLEEEAPRLEKWLNNNHHGQMAYMENYFDKRLDPTLLVDDAKSVVSLLLNYYPEETQTQESFKISKYAYGQDYHFVIKEKLKEFLHSIQENIGDVSGRAFVDSAPVLDRAWAAKSGLGWIGKSGNLLTQKVGSFYFIAELILDLDLEYDHATTDHCGSCTACIDACPTQAIVAPHIVDGSKCISYYTIELKENIPYEMKGKFDEWMFGCDTCQDVCPWNRFSKPHSEPLFNPNPELLSFTKKDWIEITEETFRAVFKNSPIKRTKFDGLKRNVKFLE

SEQ ID NO: 76787 - protein, 308 aa, Flavobacterium araucananum
  REGION 1..308: note = tr|A0A227NIU9|A0A227NIU9_9FLAO Epoxyqueuosine reductase OS=Flavobacterium araucananum OX=946678 GN=queG; PE = 3 SV=1
MTINSKETYSQFIKAEAKRLGFLSCGISKAGFLEEEAPRLEKWLNNNHHGQMAYMENYFDKRLDPTLLVDDAKSVISLLLNYYPTEAQSQESFKISKYAYGQDYHFVIKEKLKEFLHSIQENIGDVSGRAFVDSAPVLDRAWAAKSGLGWIGKSGNLLTQKVGSFYFIAELIVDLELEYDHATTDHCGSCTACIDACPTQAIVAPHVVDGSKCISYYTIELKENIPYEMKGKFDEWMFGCDTCQDVCPWNRFSKPHSEPLFNPNPELLSFSKKDWIEITEETFRTVFKNSPIKRTKFDGLKRNITFLK

SEQ ID NO: 76788 - protein, 307 aa, unidentified
  source 1..307: note = Flavobacterium arcticum
  REGION 1..307: note = tr|A0A345H9Y6|A0A345H9Y6_9FLAO Epoxyqueuosine reductase OS=Flavobacterium arcticum OX=1784713 GN=queG; PE = 3 SV=1
MNSKKKYTDFIKSEAKRLGFLSCGISKAGFLEKEAPRLEKWLNENKNGQMQYMENHFDKRLDPTLLVDGAKSVISLLLNYYPDATQVDDSYKISKYAYGQDYHFVIKHRLKELLYSMQETIGGVGGRAFVDSAPVLDKAWAAKSGLGWMGKHSNLLSKQVGSFFFIAELIVDIELEYDTATTDHCGTCTACIDACPTQAIVEPYVVDGSKCISYFTIELKDNLPDSMKGKFDDWAFGCDVCQDVCPWNRFSKSHNEPLFNPHPDLLSMTKKDWEEITEDTFRAVFKNSAVKRTKFQGLNRNINFLKE

SEQ ID NO: 76789 - protein, 302 aa, unidentified
  source 1..302: note = Flavobacterium aurantiibacter
  REGION 1..302: note = tr|A0A255ZS86|A0A255ZS86_9FLAO Epoxyqueuosine reductase OS=Flavobacterium aurantiibacter OX=2023067; GN = queG PE=3 SV=1
MDYSALIKTKAAELGFLSCGFSRAEFLEAEAPRLESWLKNNYQGEMSYMNNHFDLRLDPRLLVAGAKTVISLLLNYFPEKTQVSDSFKVSKYAYGTDYHFVIKDKLKELLRFMRAEIGDVNGRAFVDSAPVLDKAWAAKSGLGWIGKNSNLITKSVGSFYFIAELIVDLELPPDTPVTDHCGSCTACLDACPTQAIVAPYVVDGSKCISYFTIELKAHLPISEEVNLDQWAFGCDVCQDVCPWNKFSKPHNEPLFTPNAKLLEMSKKEWLELTEETFNEIFRKSPLERPGYAGLKRNLEKLI

SEQ ID NO: 76790 - protein, 307 aa, Flavobacterium beibuense
  REGION 1..307: note = tr|A0A444WC65|A0A444WC65_9FLAO Epoxyqueuosine reductase OS=Flavobacterium beibuense OX=657326 GN=queG; PE = 3 SV=1
MDNRKRYSDFIKAEAKRLGFLSCGISKAGFLEEEAPRLEKWLKEGRHGQMQYMENYFDKRLDPTLLVDDAKSVVSLLLNYYPEEKQTEGSYKISKYAYGQDYHFVIKERLKELLHSIQQEIGEVGGRAFVDSAPVLDKAWAAKSGLGWIGKNSNLLSKQVGSFFFIAELIIDLDLEYDGVTTNHCGSCTACIDACPTQAIIEPYVVDGSKCISYFTIELKDNIPSEMRGKFDDWAFGCDVCQDVCPWNRFSKPHREPLFNPHPDLLSLTKKDWDEITEDTFRAVFKNSAVKRTKFEGLKRNINFLKP

SEQ ID NO: 76791 - protein, 308 aa, Flavobacterium beibuense
  REGION 1..308: note = tr|A0A0A2LMI6|A0A0A2LMI6_9FLAO Epoxyqueuosine reductase OS=Flavobacterium beibuense F44-8 OX=1406840; GN = queG PE=3 SV=1
MDNRKRYSDFIKAEAKRLGFLSCGISKAGFLEEEAPRLEKWLNDNRHGKMQYMENHFDKRLDPTLLVDGAKSVISLLLNYYPEQTQTEGSYKISKYAYGQDYHFVIKSKLKELLQSIQEIIGEVEGRAFVDSAPVLDKAWAAKSGLGWIGKNSNLLSKQVGSFFFIAELIVDIDLEYDGVTTDHCGSCTACIDACPTQAIIEPYVVDGSKCISYFTIELKENIPADMRGKFDDWAFGCDVCQDVCPWNRFSKPHREPLFNPHPDLLSMTKKDWDEITEETFRAVFKNSAVKRTKFEGLTRNINFLKPL

SEQ ID NO: 76792 - protein, 302 aa, Flavobacterium branchiophilum
  REGION 1..302: note = tr|A0A543G419|A0A543G419_9FLAO Epoxyqueuosine reductase OS=Flavobacterium branchiophilum OX=55197; GN = queG PE=3 SV=1
MKSTYTAFIKSEALKLGFFSVGISKAAFLEEEAPRLELWLEKNHQGQMSYMERHFDKRLDPTILVPDAKSVISLLFNYYPSEKQIENTYKISKYAYGQDYHDVIRDKLKILMQAIQDQIGQVSGRVFVDSAPVLDKAWAKKSGLGWIGKNSNLITKKAGSFYFIAEIILDLELDYDTITTDHCGTCTACIDACPTQAIVAPYQVDGSKCISYFTIELKEQLPNELKQTFDDWVFGCDVCQDVCPWNRFSQPHQEPLFSAKTEIINNTKADWEFLSEENFNEIFKKSPIKRINYHKFFNNLLK

SEQ ID NO: 76793 - protein, 302 aa, Flavobacterium branchiophilum
  REGION 1..302: note = tr|G2Z4J9|G2Z4J9_FLABF Epoxyqueuosine reductase; OS = Flavobacterium branchiophilum (strain FL-15) OX=1034807; GN = queG PE=3 SV=1
MKSTYTAFIKSEALKLGFFSVGISKAAFLEEEAPRLELWLEKNHQGQMSYMERHFDKRLDPTILVPDAKSVISLLFNYYPSEKQIENTYKISKYAYGQDYHDVIRDKLKILMQAIQDQIGQVSGRVFVDSAPVLDKAWAKKSGLGWIGKNSNLITKKAGSFFFIAEIILDLELDYDTITTDHCGTCTACIDACPTQAIVAPYQVDGSKCISYFTIELKEQLPNELKQTFDDWVFGCDVCQDVCPWNRFSKPHQEPLFSAKTEIINNTKADWEFLSDESFNEIFKNSPIKRINYHKFFNNLLK

SEQ ID NO: 76794 - protein, 306 aa, Flavobacterium caeni
  REGION 1..306: note = tr|A0A1G5IBL1|A0A1G5IBL1_9FLAO Epoxyqueuosine reductase OS=Flavobacterium caeni OX=490189 GN=queG PE=3; SV = 1
MTRKENTELIKSHAQRLGFISCGISPAGFLEQEAPRLEAWLNNNHHGQMAYMANHFDKRLDPTKLVDGAKSVISLLLNYYPSQTQNPDAPKISKYAYGQDYHFVIKEKLKELLYVIEQEIGQVHGRAFVDSAPVLDKAWAAKSGLGWIGKNANLLSKQVGSFFFIAELIVDLELEYDHATTDHCGSCTACIDACPTEAIVAPYVVDGSKCISYFTIELKDNLPESMKGQFADWAFGCDVCQDVCPWNRFSKPHNEPLFNPNPELLTMSRKDWEEITEETFRAVFKDSAVKRTKFSGLKRNIDFLKG

SEQ ID NO: 76795 - protein, 307 aa, Flavobacterium cauense
  REGION 1..307: note = tr|A0A562M4M0|A0A562M4M0_9FLAO Epoxyqueuosine reductase OS=Flavobacterium cauense R2A-7 OX=1341154; GN = queG PE=3 SV=1
MNGSKSKYTTIIKSEAQRLGFLSCGISKAGFLEEEAPRLEAWLKNNYQGEMSFMESYFDKRLDPTLLVDDSKSVISLLLNYYPPELQTEESYKISKYAYGKDYHNVIKKKLKKLLNHIKAEIGDVSGRAFVDFAPVMDKAWAAKSGLGWIGKHSNLLTQKVGSFYFIAELIVDLELEYDHATTDHCGSCTACIDACPTEAIVAPYVVDGSKCISYYTIELQDNLPTEMKGKFNDWIFGCDVCQDVCPWNRFSKPHNEPSFQPYPELLSYTKKDWEEITQETFEKVFPNSPLKRAKLSGLQRNIDFLK

SEQ ID NO: 76796 - protein, 298 aa, Flavobacterium cheniae
  REGION 1..298: note = tr|A0A562KM59|A0A562KM59_9FLAO Epoxyqueuosine reductase OS=Flavobacterium cheniae OX=295428 GN=queG PE=3; SV = 1
MIKAEAHRLGFLSCGISKAGFLEEEAPRLENWLNNQMNGQMSYMENHFDKRLNPTLLVDDAKSVISLLLNYYPSELQNQDSYKISKYAYGQDYHHVIKEKLKELLHFIQTEIGEVSGRAFVDSAPVLDKAWAAKSGLGWIGKNSNLITQKVGSFYFIAELIIDLELDYDTPTTDHCGSCTACLDACPTEAIVAPYVVDGSKCISYFTIELKDNLPQEMKGKFDDWMFGCDVCQDVCPWNRFSKPHNEPLFQANSDILNFSKSDWEEITVDTFQKVFKNSAVKRTKYEGLLRNINFLKK

SEQ ID NO: 76797 - protein, 308 aa, Flavobacterium chilense
  REGION 1..308: note = tr|A0A1M7LZ60|A0A1M7LZ60_9FLAO Epoxyqueuosine reductase OS=Flavobacterium chilense OX=946677 GN=queG; PE = 3 SV=1
MTINAKETYSKFIKSEAKRLGFLSCGISKAGFLEEEAPRLEKWLNNNHHGQMAYMENYFDKRLDPTLLVDDAKSVVSLLLNYYPTEVQTEESFKISKYAYGQDYHFVIKEKLKEFLHAIQENIGDVSGRAFVDSAPVLDRAWAAKSGLGWIGKSGNLITQKVGSFYFIAELILDLELEYDHAVTDHCGSCTACIDACPTQAIVSPHVVDGSKCISYYTIELKENIPYEMKGKFDEWMFGCDTCQDVCPWNRFSKPHSEPLFNPNSELLSFSKKDWIEITEETFRAVFKNSPIKRTKFEGLKRNIKFLK

SEQ ID NO: 76798 - protein, 307 aa, unidentified
  source 1..307: note = Flavobacterium circumlabens
  REGION 1..307: note = tr|A0A4Y7UGT3|A0A4Y7UGT3_9FLAO Epoxyqueuosine reductase OS=Flavobacterium circumlabens OX=2133765; GN = queG PE=3 SV=1
MINSKETYSKFIKAEAKRLGFLSCGISKAGFLEQEAPRLENWLKNNRNGQMAYMENHFDKRLDPTLLVDDAKSVVSLLLNYFPGETQNQESFKISKYAYGQDYHTVIKDKLKEFLFSIQENIGEVSGRAFVDSAPVLDKAWAAKSGLGWIGKNSNLLTQKVGSFYFIAELILDLDLEYDFATTDHCGSCTACIDACPTQAIVAPYVVDGSKCISYYTIELKENIPTEMKGKFDEWAFGCDTCQDVCPWNRFSKPHAEPLFNPNPELLSFSKKDWIEITEETFRAVFKNSPIKRTKFDGLKRNIKFLQ

SEQ ID NO: 76799 - protein, 308 aa, Flavobacterium columnare
  REGION 1..308: note = tr|A0A2T4HF88|A0A2T4HF88_9FLAO Epoxyqueuosine reductase OS=Flavobacterium columnare OX=996 GN=queG PE=3; SV = 1
MITNKEKYTQLIKSESLRLGFLSCGISKADFLETEAPRLENWLKKGMNGQMGYMNNHFDKRLDPRLLVEGAKSVISLILNYYPSQTQTQDSYKISKYAYGQDYHFIIKDKLKDLLHFIRTEIGEVDGRVFVDSAPVLDKAWAAKSGLGWIGKNSNLITKQVGSFYFIAEIILDLDLEYDLPTTDHCGKCTACIDACPTQAIIQPYVVDGSKCISYFTIELKDQIPQEMKGKFNDWMFGCDVCQDVCPWNRFAKPNTIDSFNPHPDLIKFTKEDWKEITEDVFKKIFKNSAVKRTKLEGLKRNILFLED

SEQ ID NO: 76800 - protein, 308 aa, Flavobacterium columnare; identical to SEQ ID NO: 76799
  REGION 1..308: note = tr|G8X5M6|G8X5M6_FLACA Epoxyqueuosine reductase; OS = Flavobacterium columnare (strain ATCC 49512 / CIP 103533 / TG 44/87) OX=1041826 GN=queG PE=3 SV=1

SEQ ID NO: 76801 - protein, 313 aa, unidentified
  source 1..313: note = Flavobacterium commune
  REGION 1..313: note = tr|A0A1D9PAB9|A0A1D9PAB9_9FLAO Epoxyqueuosine reductase OS=Flavobacterium commune OX=1306519 GN=queG; PE = 3 SV=1
MASSNSQLQASRYTSFIKSEAKRLGFLSCGISKAGFLEEEAPRLENWLNKNLNGKMSYMENNFDKRLNPTLLVDDAKSVVSLLLNYYPEKEQVQDSYKISKYAYGKDYHFVIKEKLKELLFSIQENIGEVSGRVFVDSAPVLDKAWAAKSGLGWIGKNSNLLTQKVGSFYFIAELIIDLDLEYDHPTTDHCGSCTACIDACPTQAIIAPYVVDGSKCISYFTIELKENIPLEMKGYFDDWVFGCDTCQDVCPWNRFSKSHNEPLFNPNPALLSMTKKDWEEMTEETFKIVFKESAVKRTKFQGLSRNVNFLKK

SEQ ID NO: 76802 - protein, 307 aa, unidentified
  source 1..307: note = Flavobacterium crassostreae
  REGION 1..307: note = tr|A0A1B9DXD2|A0A1B9DXD2_9FLAO Epoxyqueuosine reductase OS=Flavobacterium crassostreae OX=1763534; GN = queG PE=3 SV=1
MIATKQTYTQHIKSEAKRLGFLSCGISKAGFLEQEAPRLEQWLQKNQNGQMAYMENHFDKRLDPTLLVEGAKSVVSLLLNYYPSEIQNSDTYKISKYAYGQDYHQVIKDKLKELLFSIQENIGNVSGRAFVDSAPVLDKAWAAKSGLGWIGKNSNLITQKVGSFYFIAELILDLELVYDTPTTDHCGSCTACIDACPTEAIVSAHVVDGSKCISYYTIELKENIPPEMKGKLNDWAFGCDICQDVCPWNRFSKPHQEPLFNAKPEILSLSKKDWEEITEETFRVVFKDSPIKRTKFKGLQRNIDFLK

SEQ ID NO: 76803 - protein, 310 aa, Flavobacterium croceum
  REGION 1..310: note = tr|A0A2S4N5S7|A0A2S4N5S7_9FLAO Epoxyqueuosine reductase OS=Flavobacterium croceum DSM 17960 OX=1121886; GN = queG PE=3 SV=1
MYNLAEKHTRLIKSEAKRLGFLACGISKAEFLEEEAPRLEHWLNQNYHGEMAYMENHFDKRLNPKLLVDGAQSVISLLLNYYPENKQRDSSYKISKYAYGEDYHFVLKDKLKSLLAYIQEQIGEVHGRAFVDSAPVLDKAWAAKSGLGWVGKNSNLITRKTGSFYFIAELIVDLKLEYDNPTTNHCGSCTACIDACPTEAIVSPYVVNGSQCISYYTIELKNNLPEDMQVRFQDWIFGCDICQDVCPWNKFSKPHQEEKFLPHENLLHFTKKDWEEITQETFNEVFKNSAVKRTKFQGFVRNVKFLKDKF

SEQ ID NO: 76804 - protein, 307 aa, unidentified
  source 1..307: note = Flavobacterium crocinum
  REGION 1..307: note = tr|A0A2S1YJP9|A0A2S1YJP9_9FLAO Epoxyqueuosine reductase OS=Flavobacterium crocinum OX=2183896 GN=queG; PE = 3 SV=1
MINSKEKYSKFIKAEAKRLGFLSCGISKAGFLEQEAPRLEKWLNNNHNGQMAYMANHFDKRLDPTLLVEDGKSVVSLLLNYYPHSVQNDESFKISKYAYGQDYHFIIKDKLKEFLHSIQENIGEVSGRAFVDSAPVLDKAWAAKSGLGWIGKNSNLITQKVGSFYFIAELIIDLDLEYDYAVTDHCGTCTACIDACPTQAIVAPYVVDGSKCISYYTIELKENIPQEMKGKFDDWMFGCDTCQDVCPWNRFSKSHSEPLFNPNPDLLSFTKKDWIEITEETFKLVFKNSPIKRTKFEGLKRNIKFLG

SEQ ID NO: 76805 - protein, 312 aa, Flavobacterium cucumis
  REGION 1..312: note = tr|A0A1M7ZT71|A0A1M7ZT71_9FLAO Epoxyqueuosine reductase OS=Flavobacterium cucumis OX=416016 GN=queG PE=3; SV = 1
MSSNFQLPTSNYSKIIKAESKRLGFLSCGISKAAFLEEEAPRLENWLNNNMNGQMSYMENHFDKRLNPTLLVDDAKSVISLLLNYYPSELQNDDSYKISKYAYGQDYHHVIKEKLKELLHFIQNEIGEVSGRAFVDSAPVLDKAWAAKSGLGWVGKNSNLITQKVGSFYFIAELIIDLELEYDSPTTDHCGSCTACLDACPTEAIVAPYVVDGSKCISYFTIELKDNLPQEMKGKFDDWMFGCDVCQDVCPWNRFSKPHNEPLFQTNSEILNFSKSDWEEITVDTFQKVFKNSAVKRTKYEGLLRNINFLKK

SEQ ID NO: 76806 - protein, 309 aa, unidentified
  source 1..309: note = Flavobacterium cupreum
  REGION 1..309: note = tr|A0A434A969|A0A434A969_9FLAO Epoxyqueuosine reductase OS=Flavobacterium cupreum OX=2133766 GN=queG; PE = 3 SV=1
MINSKETYSKFIKEEAKRLGFLSCGISKAGFLETEAPRLENWLKNNQNGQMAYMENHFDKRLDPTLLVDDAKSVVSLLLNYYPAETQNQESFKISKYAYGQDYHTVIKEKLKEFLFSIQENIGEVSGRAFVDSAPVLDKAWAAKSGLGWIGKNSNLLTQRVGSFYFIAELILDLDLEYDHATTDHCGSCTACIDACPTQAIVAPYVVDGSKCISYYTIELKENIPTEMKGKFDEWAFGCDTCQDVCPWNRFSKPHAEPLFNPNPELLSFSKKDWIEITEETFRVVFKNSPIKRTKFDGLKRNIKFLQLD

SEQ ID NO: 76807 - protein, 308 aa, unidentified
  source 1..308: note = Flavobacterium cutihirudinis
  REGION 1..308: note = tr|A0A3D9FXM0|A0A3D9FXM0_9FLAO Epoxyqueuosine reductase OS=Flavobacterium cutihirudinis OX=1265740; GN = queG PE=3 SV=1
MSINAKETYSKFIKEEAKRLGFLSCGISKAGFLEDEAPRLEKWLNNNHNGQMAYMENHFDKRLNPTLLVDDAKSVVSLLLNYFPSEFQNDNSFKISKYAYGQDYHFVIKEKLKELLHSIEENIGAVSGRAFVDSAPILDKAWAAKSGLGWIGKNSNLITQKVGSFYFIAELILDLELEYDHAVTDHCGSCTACIDACPTQAILAPYIVDGSKCISYYTIELKENIPHEMKGKFDEWMFGCDTCQDVCPWNRFSKPHAEPLFNPNPDLLSFSKQDWMDITEETFRKVFKNSPIKRTKFEGLKRNINFLE

SEQ ID NO: 76808 - protein, 308 aa, unidentified
  source 1..308: note = Flavobacterium cyanobacteriorum
  REGION 1..308: note = tr|A0A255YXJ7|A0A255YXJ7_9FLAO Epoxyqueuosine reductase OS=Flavobacterium cyanobacteriorum OX=2022802; GN = queG PE=3 SV=1
MLNDRQEYTGYIKSEAKRLGFLSCGIARAGFLEEEAPRLEKWLNENRHGQMQYMENHFDKRLDPTKLVDGAKSVISLLLNYYPEQTQQEGTYKISKYAYGQDYHFVIKDKLKELLHSIRSTIGEVGGRAFVDSAPVLDKAWAARSGLGWIGKNSNLLSKQAGSFFFIAELIVDLELEYDSPTTDHCGSCTACIDACPTQAIIAPYEVDGSKCISYFTIELKDNIPAEMKGRFDDWAFGCDVCQDVCPWNRFSKPHREPLFNPHPDLLSLTKKDWEEITEETFRAVFKNSAVKRAKFDGLKRNIAFLKQ

SEQ ID NO: 76809 - protein, 255 aa, Flavobacterium daejeonense
  REGION 1..255: note = tr|A0A0N8VM13|A0A0N8VM13_9FLAO Epoxyqueuosine reductase OS=Flavobacterium daejeonense OX=350893; GN = RCH33_2389 PE=4 SV=1
MENHFDKRLNPTLLVDDAKSVVSLLLNYYPEKEQNPDSYKISKYAYGKDYHFVIKDKLKELLFSIQENIGEVSGRVFVDSAPVMDKAWAAKSGLGWIGKNSNLLTQKVGSFYFIAELIIDLDLEYDHAVTNHCGSCTACIDACPTQAIVAPYVVDGSKCISYFTIELKENIPQEMKGQFDDWAFGCDTCQDVCPWNRFSKSHNEPLFNPNPEILSMTKKDWEEMTEETFRVVFKDSAVKRTKFQGLQRNISFLKK

SEQ ID NO: 76810 - protein, 308 aa, Flavobacterium defluvii
  REGION 1..308: note = tr|A0A1M5EWV0|A0A1M5EWV0_9FLAO Epoxyqueuosine reductase OS=Flavobacterium defluvii OX=370979 GN=queG; PE = 3 SV=1
MSINSKEIYSKFIKEEAKRLGFISCGISKAGFLEQEAPRLEKWLNNNYNGQMAYMENHFDKRLDPTLLVDDAKSVVSLLLNYYPSESQNSESFKISKYAYGQDYHFVIKEKLKELLHSIQENIGDVSGRAFVDSAPVLDKAWAAKSGLGWIGKNSNLITQKVGSFYFIAELILDLDLEYDHAVTDHCGSCTACIDACPTQAIVAPYIVDGSKCISYYTIELKENIPNEMKGKFDEWMFGCDTCQDVCPWNRFSKPHSEPLFDPNPDLISFSKKDWTEITEETFQKVFKNSPIKRTKFEGLKRNIKFLK

SEQ ID NO: 76811 - protein, 286 aa, Flavobacterium degerlachei
  REGION 1..286: note = tr|A0A1H3EN81|A0A1H3EN81_9FLAO Epoxyqueuosine reductase OS=Flavobacterium degerlachei OX=229203; GN = SAMN05444338_11577 PE=4 SV=1
MACGISKAGFLEQDAPRLEDWLKNNSHGQMSYMENNFDKRLNPTLLVDDAKSVVSLLLNYYPEQCQNLDSYKISKYAYGQDYHSVIKDKLKEFLFSIQSTIGEVSGRAFVDSAPVLDKAWAAKSGLGWIGKNSNLLTQKVGSFYFIAELIIDLELDYDHATTDHCGSCTACLDACPTEAIVAPYVVDGSKCISYFTIELKENIPQEMKGKFDDWAFGCDICQDVCPWNKFSKPNNEPLFNPNPDLLAMSKKDWEEITEETFKAVFKNSPLKRSKFLGIKRNIDFLK

SEQ ID NO: 76812 - protein, 307 aa, unidentified
  source 1..307: note = Flavobacterium enshiense
  REGION 1..307: note = tr|A0A0A2MY76|A0A0A2MY76_9FLAO Epoxyqueuosine reductase OS=Flavobacterium enshiense DK69 OX=1107311; GN = queG PE=3 SV=1
MINQQSKYTQMIKSEAARLGFLSCGISKAGFLEEEAPRLERWLKNGMQGEMHYMENHFDKRLDPTLLVDDAKSVISLLLNYYPSENQNPESYKISKYAYGEDYHFVIKDKLKDLLQFIQTEIGEVSGRAFVDSAPVLDKAWAAKSGLGWIGKNANLLSKQVGSFFFIAELIVDLDLDYDTITTDHCGKCTACIDACPTEAIVAPYVVDGSKCISYFTIELKDNLPESMKGKFDEWMFGCDVCQDVCPWNRFSKPHNEPLFNPNPELLSFSKRDWEEITEETFRRVFKNSAVKRTKLSGLKRNIDFLK

SEQ ID NO: 76813 - protein, 306 aa, unidentified
  source 1..306: note = Flavobacterium faecale
  REGION 1..306: note = tr|A0A2S1L9F0|A0A2S1L9F0_9FLAO Epoxyqueuosine reductase OS=Flavobacterium faecale OX=1355330 GN=queG; PE = 3 SV=1
MISKTENTQFIKFEAKRLGFLSCGISKAGFLETEAPRLENWLNKNHNGQMAYMENHFDKRLDPTLLVEGSKTVVSLLLNYFPEKKQVEDSYKISKYAYGTDYHAVVKDKLNELLFSIKTAVGDVSGRAFVDSAPVLDKAWAAKSGLGWIGKNSNLITQKVGSFYFIAELIIDLELDYDHAVTDHCGSCTACLDACPTQAIIAPYVVDGSKCISYFTIELKENIPDSMKGQFDDWAFGCDICQDVCPWNRFSKPHKEPLFDPNSHLLSMSKKDWEEITEDTFKHVFKDSPLKRSKYSGITRNIKFLQ

SEQ ID NO: 76814 - protein, 286 aa, Flavobacterium flevense
  REGION 1..286: note = tr|A0A4Y4AXQ2|A0A4Y4AXQ2_9FLAO Epoxyqueuosine reductase OS=Flavobacterium flevense OX=983 GN=queG PE=4; SV = 1
MSCGISKAGFLEEEAPRLENWLNKNLNGKMSYMENHFDKRLDPTLLVDDAKSVVSLLLNYYPEQEQIQDSYKISKYAYGQDYHFVIKEKLKELLFSIQESIGEVSGRVFVDSAPVLDKAWAAKSGLGWIGKNSNLLTQKVGSFYFIAELIIDLELEYDYATTDHCGNCTACIDACPTQAIIEPYVVDGSKCISYFTIELKENIPAEMKGYFDDWVFGCDTCQDVCPWNRFSKSHNEPLFNPNPDLLSMTKKDLEEMTEETFKIVFKDSAVKRTKFQGLKRNIDFLK

SEQ ID NO: 76815 - protein, 307 aa, Flavobacterium fluvii
  REGION 1..307: note = tr|A0A1M5DXI1|A0A1M5DXI1_9FLAO Epoxyqueuosine reductase OS=Flavobacterium fluvii OX=468056 GN=queG PE=3; SV = 1
MFNNKEKYSQFIKSEAKRLGFLSCGISKAGFLEEEAPRLEHWLNNQMNGQMSYMENNFDKRLNPTLLVDDAKSVVSLLLNYYPSEFQNEDSYKISKYAYGQDYHFVIKEKLKELLFSIQSTIGEVSGRAFVDSAPVLDKAWAAKSGLGWIGKNSNLLTQKVGSFYFIAELIIDLELEYDHAVTDHCGSCTACIDSCPTQAIVAPHVVDGSKCISYFTIELKENIPPEMKGKFDDWAFGCDVCQDVCPWNRFSKAHNEPFFNPNPELLSMSKKDWKELTEETFKTVFKNSPLKRAKFDGLKRNVTFLK

SEQ ID NO: 76816 - protein, 307 aa, unidentified
  source 1..307: note = Flavobacterium fontis
  REGION 1..307: note = tr|A0A1M5BS57|A0A1M5BS57_9FLAO Epoxyqueuosine reductase OS=Flavobacterium fontis OX=1124188 GN=queG PE=3; SV = 1
MNNQKQHYSQFIKAEAKRLGFLSCGIAKAGFLEAEAPRLERWLHQGFHGEMQYMENHFDKRLDPRLLVDDAKSVISVLLNYFPAETQQEDTYKISKYAYGKDYHYVIKDKLKALLHSIQTEIGAVNGRAFVDSAPVLDKAWAAKSGLGWIGKNANLITQKTGSYYFVAELIVDLELDYDPPTTDHCGTCTACIDACPTQAIVAPYVVDGSKCISYFTIELKNQLPETMKGAWNDWVFGCDVCQEVCPWNRFATPHQEPQFNPHPDLLSFSKKDWEEITEDIFKEVFRDSAVKRTQYQGLKRNIDFLK

SEQ ID NO: 76817 - protein, 308 aa, Flavobacterium frigidimaris
  REGION 1..308: note = tr|A0A1M5GRN9|A0A1M5GRN9_FLAFR Epoxyqueuosine reductase OS=Flavobacterium frigidimaris OX=262320 GN=queG; PE = 3 SV=1
MSINAKETYSKFIKSEAKRLGFLSCGISKAGFLEEEAPRLEKWLNNNHHGQMAYMENYFDKRLDPTLLVDDAKSVVSLLLNYYPEETQSQDSFKISKYAYGQDYHFVIKERLKEFLHAIQENIGDVSGRAFVDSAPVLDRAWAAKSGLGWIGKSGNLLTQKVGSFYFIAELILDLELEYDHATTDHCGSCTACIDACPTQAIVAPHIVDGSKCISYYTIELKENIPYEMKGKFDEWMFGCDTCQDVCPWNRFSKPHSEPLFNPNPELLSFSKKDWIEITEETFRAIFKNSPIKRTKFDGLKRNVKFLE

SEQ ID NO: 76818 - protein, 254 aa, Flavobacterium frigoris
  REGION 1..254: note = tr|A0A1H9G6I3|A0A1H9G6I3_FLAFI Epoxyqueuosine reductase OS=Flavobacterium frigoris OX=229204; GN = SAMN05444355_102402 PE=4 SV=1
MENHFDKRLDPTLLVEDSKSVISLLLNYYPENTQLEDSYKISKYAYGTDYHLVIKDKLKELLLSIQETIGEVSGRAFVDSAPVLDKAWAAKSGLGWIGKNSNLLTQKVGSFYFIAELIIDLDLDYDNATTDHCGTCTACIDSCPTEAIVAPYIVDGSKCISYFTIELKEHIPQEMKGKFDDWAFGCDICQDVCPWNKFSKPHNEPLFNANPELLSMSKKDWEEITEDTFKVVFKDSPLKRTKFSGLKRNIDFLK

SEQ ID NO: 76819 - protein, 255 aa, Flavobacterium frigoris
  REGION 1..255: note = tr|H7FQ37|H7FQ37_FLAFP Iron-sulfur cluster-binding protein OS=Flavobacterium frigoris (strain PS1) OX=1086011; GN = HJ01_01297 PE=4 SV=1
MENNFDKRLNPTLLVDDAKSVVSLLLNYYPEQFQNPDSYKVSKYAYGQDYHSVIKDKLKELLFSIQSTIGEVSGRAFVDSAPILDKAWAAKSGLGWIGKNSNLLTQKVGSFYFIAELIIDLELDYDHATTDHCGSCTACLDACPTEAIVAPYVVDGSKCISYFTIELKENVPLEMKGKFDEWAFGCDICQDVCPWNKFSKAHNEPLFSPNADFLSMSKKDWEEITEETFKAVFKNSPLKRTKFQGLTRNIEFLKQ

SEQ ID NO: 76820 - protein, 307 aa, Flavobacterium fryxellicola
  REGION 1..307: note = tr|A0A167X971|A0A167X971_9FLAO Epoxyqueuosine reductase OS=Flavobacterium fryxellicola OX=249352 GN=queG; PE = 3 SV=1
MINSKTTHTQFIKSEAKRLGFLSCGIAKAGFLEEEAPRLEDWLNRNRNGQMSYMENNFDKRLNPTLLVDDAKSVVSLLLNYYPEQLQNPDSYKISKYAYGEDYHFVIKEKLKEFLFSIQSTIGEVAGRAFVDSAPVLDKAWAAKSGLGWIGKNSNLLTQKVGSFYFIAELIIDLDLDYDTPTTDHCGTCTACIDACPTEAIVAPYVVDGSKCISYFTIELKENIPQDMKGKFEEWAFGCDICQDVCPWNKFSKAHNEPLFSPNPELLSMSKKDWIEITEETFKAVFKNSPLKRAKFQGIKRNIDFLK

SEQ ID NO: 76821 - protein, 257 aa, Flavobacterium gillisiae
  REGION 1..257: note = tr|A0A1H3WN02|A0A1H3WN02_9FLAO Epoxyqueuosine reductase OS=Flavobacterium gillisiae OX=150146; GN = SAMN05443667_101126 PE=4 SV=1
MSYMENNFDKRLNPTLLVDGAKSVISLLLNYYPESTQVVDSYKISKYAYGTDYHFVIKDKLKELLFSIQDKIGEVYGRAFVDSAPVLDKAWAAKSGLGWIGKNSNLLTQKVGSFYFIAELIIDLDLEYDNATTDHCGTCTACIDSCPTQAIVAPYIVDGSKCISYFTIELKENIPQEMKGKFDDWAFGCDICQDVCPWNKFSKPHSEPLFNANPELLSMSKKDWEEITEDTFRAVFKDSSLKRTKFSGLNRNIAFLK

SEQ ID NO: 76822 - protein, 315 aa, unidentified
  source 1..315: note = Flavobacterium gilvum
  REGION 1..315: note = tr|A0A085ENT7|A0A085ENT7_9FLAO Epoxyqueuosine reductase OS=Flavobacterium gilvum OX=1492737 GN=queG PE=3; SV = 1
MFSLKKEVINNKSKYTQFIKSEAKRLGFLSCGISKAGFLEQEAPRLENWLNKNYNGQMSYMENHFDKRLDPTLLVDDAKSVVSLLLNYYPSEFQDSDSYKISKYAYGQDYHFVIKDKLKELLFSIESSIGTVSGRAFVDSAPVLDKAWAAKSGLGWIGKNSNLLTQKVGSFYFIAELIIDLDLEYDHAVTDHCGTCTACIDACPTEAIVAPYVVDGSKCISYFTIELKDNIPAEMKGKFDNWAFGCDTCQDVCPWNRFSKPHSEPLFNPNPELISMSKKDWLEITEETFKSVFKNSPLKRSKFQGLKRNITFLDK

SEQ ID NO: 76823 - protein, 257 aa, Flavobacterium glaciei
  REGION 1..257: note = tr|A0A562PM86|A0A562PM86_9FLAO Epoxyqueuosine reductase OS=Flavobacterium glaciei OX=386300; GN = IQ02_02256 PE=4 SV=1
MSYMENHFDKRLNPTLLVDDAKSVVSLLLNYFPEELQNQDTYKISKYAYGQDYHFIIKEKLKEFLFSIQSTIGDVSGRAFVDSAPVLDKAWAAKSGLGWIGKNSNLLTQKVGSFYFIAELIIDLELDYDNPTTDHCGTCTACLDACPTEAIVAPYVVDGSKCISYFTIELKENIPHEMKGKFDDWAFGCDVCQDVCPWNKFSKPHNEPLFDANPQLMSMSKKDWIEITEETFKSVFKNSPLKRAKFHGIKRNLDFLK

SEQ ID NO: 76824 - protein, 308 aa, Flavobacterium glycines
  REGION 1..308: note = tr|A0A511CHZ5|A0A511CHZ5_9FLAO Epoxyqueuosine reductase OS=Flavobacterium glycines OX=551990 GN=queG; PE = 3 SV=1
MIIDLREKYSQFIKSEARRLGFLSCGISKAGFLEEEAPRLENWLNNNRNGQMSYMENHFDKRLNPTLLVDDAKSVVSLLLNYYPEKEQIQDSYKISKYAYGQDYHFVIKEKLKELLFAIQENIGEVSGRVFVDSAPVLDKAWAAKSGLGWIGKNSNLLTQKVGSFYFIAELIIDLDLEYDSRTTDHCGSCTACIDACPTQAIVAPYIVDGSKCISYFTIELKENIPTEMKGHFDDWVFGCDTCQDVCPWNRFSKSHNEPLFNPNPALLSMTKKDWEEMTEETFKIVFKDSAVKRTKFKGLQRNIGFLK

SEQ ID NO: 76825 - protein, 307 aa, Flavobacterium glycines
  REGION 1..307: note = tr|A0A1B9DSN7|A0A1B9DSN7_9FLAO Epoxyqueuosine reductase OS=Flavobacterium glycines OX=551990 GN=queG; PE = 3 SV=1
MIDLREKYSQFIKSEARRLGFLSCGISKAGFLEEEAPRLENWLNNNRNGQMSYMENHFDKRLNPTLLVDDAKSVVSLLLNYYPEKEQIQDSYKISKYAYGQDYHFVIKEKLKELLFAIQENIGEVSGRVFVDSAPVLDKAWAAKSGLGWIGKNSNLLTQKVGSFYFIAELIIDLDLEYDSRTTDHCGSCTACIDACPTQAIVAPYIVDGSKCISYFTIELKENIPTEMKGHFDDWVFGCDTCQDVCPWNRFSKSHNEPLFNPNPALLSMTKKDWEEMTEETFKIVFKDSAVKRTKFKGLQRNIGFLK

SEQ ID NO: 76826 - protein, 257 aa, Flavobacterium granuli
  REGION 1..257: note = tr|A0A1M5MP05|A0A1M5MP05_9FLAO Epoxyqueuosine reductase OS=Flavobacterium granuli OX=280093; GN = SAMN05443373_10495 PE=4 SV=1
MTYMESHFDKRLDPTKLVDGARSVISLLLNYYPQEIQNPESYKISKYAYGQDYHFVIKDKLKELLFSIQESIGEVSGRAFVDSAPVLDKAWAAKSGLGWIGKNSNLLTQKVGSFYFIAELIVDLDLEYDNATTDHCGTCTACIDACPTQAIVAPYVVDGSKCISYFTIELKENIPLEMKGKFDDWAFGCDVCQDVCPWNRFSKAHKEPLFDPKPELLSMSKKDWEEITEETFKTVFKNSPLKRTKFQGIKRNIDFLK

SEQ ID NO: 76827 - protein, 308 aa, Flavobacterium haoranii
  REGION 1..308: note = tr|A0A1M6FSK8|A0A1M6FSK8_9FLAO Epoxyqueuosine reductase OS=Flavobacterium haoranii OX=683124 GN=queG; PE = 3 SV=1
MINNKEKYAHLIKAESKRLGFLSCGISKADFLEVEAPRLENWLNNNFNGQMSYMENHFDKRLDPRLLVDGAKSVVSLLLNYYPNEIQNVDSYKISKYAYGQDYHHVIKDKLKDLLQFIQNEIGEVNGRVFVDSAPVLDKAWAAKSGLGWIGKNSNLLTQKVGSFYFIAELILDIELDYDLPTTDHCGTCTACIDACPTQAIVSPYVVDGSKCISYFTIELKDNIPNEFKNKFDDWMFGCDVCQDVCPWNRFSKPNSEPFFTPNPELLNFNKKDWEEITHDVFQKIFQKSAVKRTKFEGLKRNILFLKE

SEQ ID NO: 76828 - protein, 308 aa, Flavobacterium hercynium
  REGION 1..308: note = tr|A0A226HQ81|A0A226HQ81_9FLAO Epoxyqueuosine reductase OS=Flavobacterium hercynium OX=387094 GN=queG; PE = 3 SV=1
MSINSKETYSKFIKEEAKRLGFLSCGISKAGFLEEEAPRLEKWLNKNHHGQMAYMENYFDKRLDPTLLVDDAKSVVSLLLNYYPEETQSQESFKISKYAYGQDYHFVIKERLKEFLHSIQENIGDVSGRAFVDSAPVLDRAWAAKSGLGWIGKSGNLITQKVGSFYFIAELILDLDLEYDHATTDHCGSCTACIDECPTQAIVAPHVVDGSKCISYYTIELKENIPYEMKGKFDEWMFGCDTCQDVCPWNRFSKSHSEPLFNPNPELLSFTKKDWMEITEETFRVVFKNSPIKRTKFEGLKRNLKFLE

SEQ ID NO: 76829 - protein, 308 aa, Flavobacterium hibernum
  REGION 1..308: note = tr|A0A0D0EX79|A0A0D0EX79_9FLAO Epoxyqueuosine reductase OS=Flavobacterium hibernum OX=37752 GN=queG PE=3; SV = 1
MSINAKETYSEFIKSEAKRLGFLSCGISKAGFLEEEAPRLEKWLNNNHHGQMAYMENYFDKRLDPTLLVDDAKSVVSLLLNYYPEETQSQDSFKISKYAYGQDYHFVIKEKLKEFLHSIQENIGDVSGRAFVDSAPVLDRAWAAKSGLGWIGKSGNLLTQKVGSFYFIAELILDLELEYDHATTDHCGSCTACIDACPTQAIVAPHVVDGSKCISYYTIELKENIPQEMKGKFDEWMFGCDTCQDVCPWNRFSKPHSEPLFNPNPDLLSFSKKDWIEITEETFRAVFKNSPIKRTKFDGLKRNITFLE

SEQ ID NO: 76830 - protein, 307 aa, Flavobacterium hydatis
  REGION 1..307: note = tr|A0A086AET7|A0A086AET7_FLAHY Epoxyqueuosine reductase OS=Flavobacterium hydatis OX=991 GN=queG PE=3; SV = 1
MINSKSTYSQFIKTEAKRLGFLSCGISKAGFLEQEAPRLENWLNKNHNGQMAYMENHFDKRLDPTLLVDDAKSVVSLLLNYYPSETQESDSFKISKYAYGQDYHFVIKEKLKELLFSIQEQIGDVTGRVFVDSAPVLDKAWAAKSGLGWIGKNSNLITQKVGSFYFIAELILDLDLEYDYATTDHCGSCTACIDACPTQAIVAPYVVDGSKCISYFTIELKENIPQEMKGKFDDWAFGCDTCQDVCPWNRFSKAHSEPLFNPNPDVMAMSKKEWLEITEETFRVVFKNSPLKRTKFDGLKRNINFLK

SEQ ID NO: 76831 - protein, 311 aa, Flavobacterium indicum
  REGION 1..311: note = tr|H8XQ44|H8XQ44_FLAIG Epoxyqueuosine reductase; OS = Flavobacterium indicum (strain DSM 17447 / CIP 109464 / GPTSA100-9) OX=1094466 GN=queG PE=3 SV=1
MASIFHLPSSIYSKLIKQKAIALGFLSCGISKADFLEQEAPRLENWLNKNYHGQMAYMENHFDKRLDPRLLVDGAKSVISLLLNYYPSEQQNQESYKISKYAYGEDYHFVIKDKLKSLLQFIQEEIGEVNGRVFVDSAPVLDKAWAAKSGLGWIGKNANLITQKVGSFYFIAELIIDLELEYDLPTTDHCGTCTACIDACPTQAIIQPYVVDGSKCISYFTIELKDNLPQEMKGQFEDWVFGCDVCQDVCPWNRFAKPHHEPLFQPKPELLNFSKRDWQELTKETFNKVFKNSAVKRTKFEGLLRNIEFVK

SEQ ID NO: 76832 - protein, 308 aa, Flavobacterium johnsoniae
  REGION 1..308: note = tr|A0A1M6RCY6|A0A1M6RCY6_FLAJO Epoxyqueuosine reductase OS=Flavobacterium johnsoniae OX=986 GN=queG PE=3; SV = 1
MSINSKETYSKFIKEEAKRLGFISCGISKAGFLEQEAPRLEKWLNNNHNGQMAYMENHFDKRLDPTLLVDDAKSVVSLLLNYFPSESQNEESFKISKYAYGQDYHFVIKEKLKEFLHSIQENIGDVSGRAFVDSAPVLDKAWAAKSGLGWIGKNSNLITQRVGSFYFIAELILDLDLEYDHAVTDHCGSCTACIDACPTQAILAPYIVDGSKCISYYTIELKENLPNDMKGKFDEWMFGCDTCQDVCPWNRFSKPHSEPLFNPNPDLLSFSKKDWTEITEETFRVVFKNSPIKRTKFDGLKRNIKFLE

SEQ ID NO: 76833 - protein, 308 aa, Flavobacterium johnsoniae; identical to SEQ ID NO: 76832
  REGION 1..308: note = tr|A5FJE7|A5FJE7_FLAJ1 Epoxyqueuosine reductase; OS = Flavobacterium johnsoniae (strain ATCC 17061 / DSM 2064 / UW101) OX=376686 GN=queG PE=3 SV=1

SEQ ID NO: 76834 - protein, 308 aa, unidentified
  source 1..308: note = Flavobacterium kingsejongi
  REGION 1..308: note = tr|A0A2S1LJT6|A0A2S1LJT6_9FLAO Epoxyqueuosine reductase OS=Flavobacterium kingsejongi OX=1678728 GN=queG; PE = 3 SV=1
MISNKEKHTAFIKSEALRLGFMSCGISKAGFLETEAPRLENWLKENRNGQMAYMENHFDKRLDPTLLVEGSKSVISLLLNYYPTETQQDDSFKISKYAYGQDYHFVIKEKLKELVFSIESTIGAVEGRAFVDSAPVLDKAWAAKSGLGWIGKNSNLLSKKAGSFFFIAELIVDLDLEYDHAVTDHCGSCTKCIDACPTQAIIAPYQVDGSKCISYFTIELKENIPQEMKGRFDDWVFGCDVCQDVCPWNRFSKPHSEPLFDPNPELLSLTKSDWAEITRDVFQDIFKKSPVKRAKFEGLQRNIEFLKE

SEQ ID NO: 76835 - protein, 306 aa, unidentified
  source 1..306: note = Flavobacterium lacus
  REGION 1..306: note = tr|A0A328WSM6|A0A328WSM6_9FLAO Epoxyqueuosine reductase OS=Flavobacterium lacus OX=1353778 GN=queG PE=3; SV = 1
MNAKEKHSVGIKSEAKRLGFLSCGISKAGFLEEEAPRLENWLNNNMNGQMSYMENHFDKRLNPTLLVDGAKSVISLLLNYYPSEFQNEESYKISKYAYGQDYHFVIKEKLKELLHFIQTEIGEVSGRAFVDSAPVLDKAWAAKSGLGWMGKNTNLITQKVGSFYFIAELIVDLELEYDAPTTDHCGSCTACIDACPTEAIVAPYVVDGSKCISYFTIELKENIPAEMKGKLDDWVFGCDVCQDVCPWNRFSKPHSEPLFQANPELLSFTKKDWEEITEDVFKKVFKNSAVKRTKLEGVKRNAEFLK

SEQ ID NO: 76836 - protein, 299 aa, unidentified
  source 1..299: note = Flavobacterium limnosediminis
  REGION 1..299: note = tr|V6SSB7|V6SSB7_9FLAO Epoxyqueuosine reductase; OS = Flavobacterium limnosediminis JC2902 OX=1341181 GN=queG; PE = 3 SV=1
MIKSEAKRLGFLSCGISKAGFLEEEAPRLERWLKQNYHGEMSFMENYFDKRLDPTLLVDDSKSVISLLLNYYPPELQNEESYKISKYAYGKDYHNVIKKKVKKLLNYIKAEIGDVSGRAFVDFAPVMDKAWAAKSGLGWIGKNSNLLTQKVGSFYFIAELIVDLDLEYDHATTDHCGSCTACLDACPTEAIVAPYVVDGSKCISYYTIELQDNLPAEMKGKLDDWMFGCDVCQDVCPWNKFSKAHSEPLFKPYPELLSYSKKDWEEITQETFEKVFTNSPLKRAKISGLKRNIDFLKQS

SEQ ID NO: 76837 - protein, 311 aa, unidentified
  source 1..311: note = Flavobacterium macacae
  REGION 1..311: note = tr|A0A3P3WDU1|A0A3P3WDU1_9FLAO Epoxyqueuosine reductase OS=Flavobacterium macacae OX=2488993 GN=queG; PE = 3 SV=1
MISNKEKYTKFIKSEAVRLGFLSCGISQAGFLEQEAPRLEAWLKNNAHGQMAYMENHFDKRLDPTLLVEDSKSVISLLLNYYPEETQAGLLGDDTFKISKYAYGQDYHFVIKEKLKEFLFSIQENIGEVSGRAFVDSAPVLDKAWASKGGLGWIGKNSNLLSKQVGSFFFIAELIVDLDLEYDNAVTDHCGSCTKCIDACPTEAIVAPYVVDGSKCISYFTIELKDNIPSEMKGKFDDWAFGCDVCQDVCPWNRFSKSHSEPLFNPHPDLLSMTKKDWEEITEDTFKAVFKNSAVKRTKFGGLQRNIDFLK

SEQ ID NO: 76838 - protein, 309 aa, unidentified
  source 1..309: note = Flavobacterium magnum
  REGION 1..309: note = tr|A0A2S0RCR1|A0A2S0RCR1_9FLAO Epoxyqueuosine reductase OS=Flavobacterium magnum OX=2162713 GN=queG PE=3; SV = 1
MIENKSRYAEFIKSEARRLGFLSCGISKAGFLEQEAPRLETWLNNQHHGRMAYMENHFDKRLDPTRLVEGSKSVVSLLLNYYPSESQAADSYKISKYAYGQDYHFVIKEKLKELLHAIQTEIGEVGGRAFVDSAPVLDKAWAAKSGLGWIGKNANLLTRQTGSFYFIAELILDLELEYDHAVTDHCGSCTACIDACPTDAIVAPYVVDGSKCISYFTIELKDNLPAEMKGRFDDWAFGCDVCQDVCPWNRFSKAHQEPLFNPHPDLLSMSKKDWQEITEDTFRKVFKDSAVNRTKFEGLKRNIDFLQPE

SEQ ID NO: 76839 - protein, 308 aa, unidentified
  source 1..308: note = Flavobacterium marinum
  REGION 1..308: note = tr|A0A1H6LT89|A0A1H6LT89_9FLAO Epoxyqueuosine reductase OS=Flavobacterium marinum OX=1159016 GN=queG; PE = 3 SV=1
MNKKEIYTKLIKDKALDLGFSYCGISEAAFLETEAPRLENWLKQNMHGEMKYMENHFDKRLDPRLLVPGAKSVVSLLLNYYPSEKQNPDSYKISKYAYGEDYHFVIKDKLKDLLRFINDEIGAVDGRVFVDSAPVLDKAWAAKSGLGWIGKNNNLIRKSEGSFFFIAELIIDLELLYDTATTNHCGSCTACIDACPTQAIESPYVVNGSKCISYLTIELKDEIPNEFAGKLDDWIYGCDVCQDVCPWNRFSKPHQQPLFNPKPSLIDYDKQQWNDLTQELFNEVFRKSPVKRTKYSGLMRNIAFLKET

SEQ ID NO: 76840 - protein, 289 aa, Flavobacterium micromati
  REGION 1..289: note = tr|A0A1M5FGT7|A0A1M5FGT7_9FLAO Epoxyqueuosine reductase OS=Flavobacterium micromati OX=229205; GN = SAMN05444372_101129 PE=4 SV=1
MGFLSCGISKAGYLEKEAPRLEDWLNKNQNGQMSYMDNHFDTRLDPTLLVDDAKSVVSLLFNYYPKDFQGSESYKIAKYAYGEDYHHVVKDKLKELLFSIQSEIGEVAGRAFVDSAPILEKAWAAKSGLGWVGKNSNLLTQKVGSFYFIAELIIDLDLEYDYATTDHCGTCTACIDACPTEAIVAPYVVDGSKCISYFTIELKENIPDEMKGKFDDWAFGCDICQDVCPWNKFSKSHNEPLFSPNPNLLTMSKKEWTEITEETFRVVFKNSPLKRAKYKGIKRNIDFLQ

SEQ ID NO: 76841 - protein, 307 aa, unidentified
  source 1..307: note = Flavobacterium nitrogenifigens
  REGION 1..307: note = tr|A0A521C6A2|A0A521C6A2_9FLAO Epoxyqueuosine reductase OS=Flavobacterium nitrogenifigens OX=1617283; GN = queG PE=3 SV=1
MINSKEKYSKFIKEEAKRLGFLSCGISKAGFLEEEAPRLENWLKNNRNGQMAYMENHFDKRLDPTLLVDDGKSVVSLLLNYYPDSFQNDESFKISKYAYGQDYHFVIKDKLKELLHSIQENIGEVSGRAFVDSAPVLDKAWAAKSGLGWIGKNSNLITQKVGSFYFIAELIIDLELEYDHAVTDHCGSCTACIDACPTQAIVAPYIVDGSKCISYYTIELKENLPEEMKGKFDEWMFGCDTCQDVCPWNRFSKPHSEPLFNPNPDLLSFTKKDWLEITEETFRTVFKNSPIKRTKFDGLKRNIKFLQ

SEQ ID NO: 76842 - protein, 318 aa, unidentified
  source 1..318: note = Flavobacterium noncentrifugens
  REGION 1..318: note = tr|A0A1G8RXE8|A0A1G8RXE8_9FLAO Epoxyqueuosine reductase OS=Flavobacterium noncentrifugens OX=1128970; GN = queG PE=3 SV=1
MRTKLYLCGSMIENKQKYTQFIKSEAQRLGFLSCGISKAGFLEADAPRLEAWLKKNSHGQMAYMENHFDKRLDPTLLVEDSKSVISLLLNYYPSETQNPDSYKISKYAYGQDYHFVIKEKLKELLFSIQNEIGEVSGRAFVDSAPVLDKAWAAKSGLGWIGKNSNLLTKSTGSFYFIAELIVDLELEYDYAVTDHCGSCTACIDACPTEAIVAPYVVDGSKCISYFTIELKENIPTEMKGKFDEWAFGCDICQDVCPWNRFSKPHSEPLFNPNPELLSMSKKDWEEITAETFQAVFKNSAVKRTKLSGLQRNIDFLKP

SEQ ID NO: 76843 - protein, 286 aa, Flavobacterium omnivorum
  REGION 1..286: note = tr|A0A1G7W170|A0A1G7W170_9FLAO Epoxyqueuosine reductase OS=Flavobacterium omnivorum OX=178355; GN = SAMN04488062_101268 PE=4 SV=1
MSCGIAKAGFLEEEAPRLEDWLNRNRNGQMSYMENHFDKRLNPKLLVDDAKSVVSLLLNYYPEQFQNPDSFKISKYAYGEDYHFVIKEKLKEFLFSIQSAIGEVSGRAFVDSAPVLDKAWAAKSGLGWIGKNSNLLTQKVGSFYFIAELLIDLELDYDNPTTDHCGTCTACIDACPTEAIVAPYVVDGSKCISYFTIELKENIPHEMKGKFDDWAFGCDVCQDVCPWNKFSKQHNEPLFNPNPELLAMSKKDWLEITEETFKAVFKNSPLKRAKFQGIKRNINFLE

SEQ ID NO: 76844 - protein, 308 aa, Flavobacterium oncorhynchi
  REGION 1..308: note = tr|A0A226I9Q3|A0A226I9Q3_9FLAO Epoxyqueuosine reductase OS=Flavobacterium oncorhynchi OX=728056 GN=queG; PE = 3 SV=1
MLINSKETYSKFIKSEAKRLGFISCGISKAGFLEQEAPRLEKYLKNNYNGQMTYMENHFDKRLDPTLLVDDAKSVVSLLLNYYPSEVQNEESFKISKYAYGQDYHFVIKEKLKEFLHSIQENIGEVSGRAFVDSAPVLDKAWAAKSGLGWIGKNSNLITQKVGSFYFIAELILDLELEYDHAVTDHCGSCTACIDACPTQAIVAPYVVDGSKCISYYTIELKENLPHEMKGKFDEWMFGCDTCQDVCPWNRFSKPHSEPLFNPNPELLSFSKKDWLEITEETFRLVFKNSPIKRTKFDGLRRNINFLE

SEQ ID NO: 76845 - protein, 310 aa, unidentified
  source 1..310: note = Flavobacterium pallidum
  REGION 1..310: note = tr|A0A2S1SGA1|A0A2S1SGA1_9FLAO Epoxyqueuosine reductase OS=Flavobacterium pallidum OX=2172098 GN=queG; PE = 3 SV=1
MLPKSEYTSFIKSEAKRLGFLSCGISKAGFLEEEAPRLENWLNHRHHGQMSYMENHFDKRLDPTKLVEGSKSVISLLLNYFPSETQTADSYKISKYAYGKDYHFVIKDKLKELLYSIRHEIGDVDGRAFVDSAPVLDKAWAAKSGLGWIGKHSNLLTKQTGSFYFIAELILDLDLEYDHKVTDHCGSCTACIDACPTEAIVAPYVVDGSKCISYFTIELKDNLPMEMKGKFDDWAFGCDVCQDVCPWNRFSKAHNEPLFNPQPELLSMSKKDWEEITEDTFRKVFKDSAVKRTKLEGLKRNIKFLGDASL

SEQ ID NO: 76846 - protein, 308 aa, Flavobacterium pectinovorum
  REGION 1..308: note = tr|A0A1M7GXH0|A0A1M7GXH0_9FLAO Epoxyqueuosine reductase OS=Flavobacterium pectinovorum OX=29533 GN=queG; PE = 3 SV=1
MTINAKETYSKFIKTEAKRLGFLSCGISKAGFLEQEAPRLESWLKNNSHGQMAYMENHFDKRLDPTLLVDDAKSVVSLLLNYYPEESQTQESFKISKYAYGQDYHFVIKEKLKEFLFSIQENIGDVSGRAFVDSAPVLDKAWAAKSGLGWIGKNSNLITQKVGSFYFIAELILDLDLEYDYATTDHCGSCTACIDACPTQAIVAPHVVDGSKCISYYTIELKENIPNDMKGKFDEWMFGCDTCQDVCPWNRFSKSHSEPLFNPNPDLLSFTKKDWIEITEETFRTVFKNSPIKRTKFDGLKRNIKFLE

SEQ ID NO: 76847 - protein, 308 aa, Flavobacterium pectinovorum
  REGION 1..308: note = tr|A0A502EN71|A0A502EN71_9FLAO Epoxyqueuosine reductase OS=Flavobacterium pectinovorum OX=29533 GN=queG; PE = 3 SV=1
MTINAKETYSKLIKSEAKRLGFLSCGISKAGFLEEEAPRLEKWLNNNHHGQMAYMENYFDKRLDPTLLVDDAKSVVSLLLNYYPEETQSQESFKISKYAYGQDYHFVIKEKLKEFLHSIQENIGDVSGRAFVDSAPVLDRAWAAKSGLGWIGKSGNLLTQKVGSFYFIAELILDLELEYDNATTDHCGSCTACIDACPTQAIVAPYVVDGSKCISYYTIELKENIPYDMKGKFDEWMFGCDTCQDVCPWNRFSKPHSEPLFNPNPELLSFSKKDWIEITEETFRAVFKNSPVKRTKFDGLKRNISFLE

SEQ ID NO: 76848 - protein, 307 aa, Flavobacterium phragmitis
  REGION 1..307: note = tr|A0A1I1QQS6|A0A1I1QQS6_9FLAO Epoxyqueuosine reductase OS=Flavobacterium phragmitis OX=739143 GN=queG; PE = 3 SV=1
MIDSKEKYTKFIKAEAKRLGFLSCGISKAGFLEQEAPRLEKWLNNNYNGQMAYMANHFDKRLDPTLLVDDGKSVVSLLLNYYPDSVQNEESFKISKYAYGQDYHFVIKDKLKEFLHSIQENIGEVSGRAFVDSAPVLDKAWAAKSGLGWIGKNSNLITQKVGSFYFIAELIIDLDLEYDHAVTDHCGSCTACIDACPTQAIVAPYVVDGSKCISYYTIELKENIPHEMKGKFDDWMFGCDTCQDVCPWNRFSKSHSEPLFNPNPDLLSFTKKDWIEITEETFKLVFKNSPIKRTKFEGLKRNIKFLD

SEQ ID NO: 76849 - protein, 307 aa, Flavobacterium psychrolimnae
  REGION 1..307: note = tr|A0A366B2E5|A0A366B2E5_9FLAO Epoxyqueuosine reductase OS=Flavobacterium psychrolimnae OX=249351; GN = queG PE=3 SV=1
MINLKATYTEFIKTEAKRLGFMSCGISKAGFLEEEAPRLENWLKNNRNGQMSYMENHFDKRLNPTLLVDDAKSVVSLLLNYYPAELQNPDSYKISKYAYGQDYHFVIKEKLKEFLFSIQSTIGEVSGRAFVDSAPVLDKAWASKSGLGWIGKNSNLLTQKVGSFYFITELIIDLDLDYDNPTTDHCGTCTACINACPTEAIVAPYVVDGSKCISYFTIELKENIPHEMKGKFDDWAFGCDVCQDVCPWNKFSKPHSEPLFNPNPELLAMSKKDWIEITEETFKAVFKNSPLKRAKFQGIKRNINFLE

SEQ ID NO: 76850 - protein, 290 aa, Flavobacterium psychrophilum
  REGION 1..290: note = tr|A0A1Z5HHK2|A0A1Z5HHK2_FLAPS tRNA epoxyqueuosine(34) reductase QueG OS=Flavobacterium psychrophilum OX=96345 GN=FPS14_contig00013-0044 PE=4 SV=1
MINNKSKYTNLIKSEAKRLGFLSCGISKAGFLEAEAPRLENWLNKQMNGQMSYMENHFDKRLNPTLLVDDAKSVISLLLNYYPSEIQNTNSYKISKYAYGQDYHFVIKEKLAALLHFIQTEIGEVSGRAFVDSAPVLDKAWAAKSGLGWIGKNSNLLTKQVGSFYFIAELIIDLDLEYDNPTTDHCGSCTACIDACPTDAIVAPYIVDGSKCISYFTIELKENIPTEMKGKFNDWAFGCDVCQDVCPWNKFSKPHNEPLFNPNPEVLSFTKKTGKKLPKKFSRKHLKIRQ

SEQ ID NO: 76851 - protein, 308 aa, Flavobacterium psychrophilum
  REGION 1..308: note = sp|A6H1G2|QUEG_FLAPJ Epoxyqueuosine reductase; OS = Flavobacterium psychrophilum (strain JIP02/86 / ATCC 49511) OX=402612 GN=queG PE=3 SV=1
MINNKSKYTNLIKSEAKRLGFLSCGISKAGFLEAEAPRLENWLNKQMNGQMSYMENHFDKRLNPTLLVDDAKSVISLLLNYYPSEIQNTNSYKISKYAYGQDYHFVIKEKLTALLHFIQTEIGEVSGRAFVDSAPVLDKAWAAKSGLGWIGKNSNLLTKQVGSFYFIAELIIDLDLEYDNPTTDHCGSCTACIDACPTDAIVAPYIVDGSKCISYFTIELKENIPTEMKGKFNDWAFGCDVCQDVCPWNKFSKPHNEPLFNPNPEVLSFTKKDWEEITEEIFKKTFKDSAVKRTKIGGLKRNINFLKD

SEQ ID NO: 76852 - protein, 307 aa, Flavobacterium reichenbachii
  REGION 1..307: note = tr|A0A085ZQX2|A0A085ZQX2_9FLAO Epoxyqueuosine reductase OS=Flavobacterium reichenbachii OX=362418; GN = queG PE=3 SV=1
MINAKETYSKFIKEEAKRLGFLSCGISKAGFLEQEAPRLENWLKNNRNGQMAYMENHFDKRLDPTLLVDDAKSVVSILLNYYPDIAQNDESFKISKYAYGQDYHYVIKEKLKEFLHSIQENIGEVSGRAFVDSAPVLDKAWAAKSGLGWIGKNSNLLTQKVGSFYFIAELILDLELEYDHATTDHCGSCTACIDACPTQAIVAPYVVDGSKCISYYTIELKENIPYEMKGKFDEWMFGCDTCQDVCPWNRFSKPHSEPLFNANPEILSFTKKDWVEVTEETFRIVFKNSPIKRTKFEGLKRNINFLK

SEQ ID NO: 76853 - protein, 308 aa, Flavobacterium resistens
  REGION 1..308: note = tr|A0A521CMG1|A0A521CMG1_9FLAO Epoxyqueuosine reductase OS=Flavobacterium resistens OX=443612 GN=queG; PE = 3 SV=1
MSINAKETYSKFIKDEAKRLGFLSCGISKAGFLEEEAPRLEKWLNNNHNGQMAYMENHFDKRLDPTLLVDDAKSVVSLLLNYFPSESQNEDSFKISKYAYGQDYHFVIKEKLKELLHSIEENIGEVSGRAFVDSAPVLDKAWAAKSGLGWIGKNSNLITQKVGSFYFIAELILDLDLEYDYKTTDHCGSCTACIDACPTQAILAPYIVDGSKCISYYTIELKENLPYEMKGKFDEWMFGCDTCQDVCPWNRFSKPHSEPLFNPNPDLLSFSKKDWTEITEETFRTVFKNSPIKRTKFEGLKRNISFLK

SEQ ID NO: 76854 - protein, 307 aa, Flavobacterium rivuli
  REGION 1..307: note = tr|A0A0A2M5T4|A0A0A2M5T4_9FLAO Epoxyqueuosine reductase OS=Flavobacterium rivuli WB 3.3-2 = DSM 21788; OX = 1121895 GN=queG PE=3 SV=1
MINNKQKYSQFIKAEAKRLGFMSCGISKAGFLEEEAPRLEKWLNENRHGQMQYMENHFDKRLDPTLLVDGAKSVVSLLLNYYPKEKQPEDTYKISKYAYGQDYHFVIKEKLKELLHSIQESVGEVGGRAFVDSAPMLDKAWAAKSGLGWIGKNSNLLSKQVGSFFFIAELVIDLDLEYDHAVTDHCGSCTACLDACPTEAIIAPYVVDGSKCISYFTIELKENIPESMKGSFNDWAFGCDVCQDVCPWNRFSKPHREPLFNPHPDLLSLTKKDWEEITEDTFRAVFKNSAVKRTKFAGLTRNIDFLK

SEQ ID NO: 76855 - protein, 308 aa, Flavobacterium saccharophilum
  REGION 1..308: note = tr|A0A1M7BJF6|A0A1M7BJF6_9FLAO Epoxyqueuosine reductase OS=Flavobacterium saccharophilum OX=29534; GN = queG PE=3 SV=1
MTINSKETYSKFIKAEAKRLGFLSCGISKAGFLEQEAPRLEKWLKNNQNGKMAYMENHFDKRLDPTLLVDDAKSVVSLLLNYYPSEAQNQESFKISKYAFGQDYHFVIKEKLKEFLHSIQENIGEVSGRAFVDSAPVLDKAWAAKSGLGWIGKNSNLLTQKVGSFYFIAELILDLDLEYDHATTDHCGSCTACIDACPTQAIVAPYVVDGSKCISYYTIELKENIPYEMKGKFDEWMFGCDACQDVCPWNRFSKPHSEPLFNPNPELLSFSKKDWIEITEETFKKVFKNSPIKRTKFDGLKRNINFLD

SEQ ID NO: 76856 - protein, 307 aa, Flavobacterium saliperosum
  REGION 1..307: note = tr|A0A1G4V7C7|A0A1G4V7C7_9FLAO Epoxyqueuosine reductase OS=Flavobacterium saliperosum OX=329186 GN=queG; PE = 3 SV=1
MVNQQSKYTQMIKSEAQRLGFLSCGISKAGFLEEEAPRLEHWLKQNYHGEMSFMESYFDKRLDPTLLVEDSKSVISLLLNYYPPELQTEGTYKISKYAYGKDYHNVIKKKVKKLLNYIKAEIGEVSGRAFVDFAPVMDKAWAAKSGLGWIGKNSNLLTQKVGSFYFIAELIVDLELDYDHATTDHCGSCTACLDACPTEAIVAPYVVDGSKCISYYTIELQDNLPTEMKGKFDDWMFGCDVCQDVCPWNKFSKAHSEPLFTPYPELLSYTKKDWEEITQETFEKVFTNSPLKRAKITGLKRNIDFLK

SEQ ID NO: 76857 - protein, 308 aa, unidentified
  source 1..308: note = Flavobacterium sediminis
  REGION 1..308: note = tr|A0A2U8QUT4|A0A2U8QUT4_9FLAO Epoxyqueuosine reductase OS=Flavobacterium sediminis OX=2201181 GN=queG; PE = 3 SV=1
MINNKEKYSQLIKAESKRLGFLSCGIAKADFLEEEAPRLEKWLKEQRNGEMGYMENHFDKRLDPRLLVEGSKSVISLVLNYYPEEKQRNDSYKISKYAYGEDYHFVIKDKLRQLLDFVQSEVGEVNGRYFVDSAPVLDKAWAAKAGLGWIGKNANLITKGIGSFYFVAELIIDLELDYDSPTTDHCGTCTACIDACPTEAIIAPYVVDGSKCISYFTIELKGALPEDVKGTFDDWFFGCDTCQDVCPWNRFAKPHNETAFEPNFNLLHFTKNDWENLSKEAFNQIFKNSAVKRTKFEGFKRNVDFLKG

SEQ ID NO: 76858 - protein, 257 aa, Flavobacterium segetis
  REGION 1..257: note = tr|A0A1M5F0F4|A0A1M5F0F4_9FLAO Epoxyqueuosine reductase OS=Flavobacterium segetis OX=271157; GN = SAMN05444396_10254 PE=4 SV=1
MSYMENHFDKRLDPTLLVEDAKSVVSLLLNYYPHQLQNVDSYKISKYAFGEDYHLVIRDKLKEFLFSIQSSIGEVSGRAFVDSAPVLDKAWAAKSGLGWIGKNSNLLTQKVGSFYFIAELIIDLELEYDHAVTDHCGSCTACIDSCPTQAIVAPYVVDGSKCISYFTIELKENIPVEMKGLFNDWAFGCDVCQDVCPWNRFAKPHSEPLFNANSEILSMSKKDWIEITEETFKAVFKNSPIKRAKFQGIKRNIDFLT

SEQ ID NO: 76859 - protein, 286 aa, unidentified
  source 1..286: note = Flavobacterium seoulense
  REGION 1..286: note = tr|A0A066WW98|A0A066WW98_9FLAO Epoxyqueuosine reductase OS=Flavobacterium seoulense OX=1492738; GN = FEM21_03310 PE=4 SV=1
MSCGISKAGFLEEEAPRLENWLNKNLNGKMSYMENHFDKRLNPTLLVDDAKSVVSLLLNYYPEKEQIQDSYKISKYAYGQDYHFVIKEKLKELLYSIQENIGEVSGRVFVDSAPVLDKAWAAKSGLGWIGKNSNLLTQKVGSFYFIAELIIDLDLEYDHAVSDHCGSCTACIDACPTQAIIAPYIVDGSKCISYFTIELKENIPNEMKGHFDDWVFGCDTCQDVCPWNRFSKSHNEPLFNPNPALLSMTKKDWEEMTQETFKIVFKDSPVKRTKFQGLTRNVDFLK

SEQ ID NO: 76860 - protein, 310 aa, Flavobacterium sinopsychrotolerans
  REGION 1..310: note = tr|A0A1H8IS34|A0A1H8IS34_9FLAO Epoxyqueuosine reductase (Fragment) OS=Flavobacterium sinopsychrotolerans; OX = 604089 GN=SAMN04487942_0682 PE=3 SV=1
IFWVIIQKSKYTEFIKSEAKRLGFLSGGISKAEFLEQEAPRLENWLNENRNGQMAYMENHFDKRLNPTLLVDDAKSVVSLLMNYYPEQRQNSDAYKISKYAYGEDYHFVIKEKLKEFLFSIQSTIGEVSGRAFVDSAPVLDKAWAAKSGLGWIGKNSNLLTQKVGSFYFIAELIIDLDLDYDNATTDHCGTCTACMDACPTEAIVAPYIIDGSKCISYFTIELKENIPQEMKGKFDDWAFGCDVCQDVCPWNKFSKPHNEPLFNPNPEVLSMSKKDWREITEETFKVVFKNSSLKRAKFQGIKRNIDFLQ

SEQ ID NO: 76861 - protein, 309 aa, Flavobacterium sp.
  REGION 1..309: note = tr|A0A519K8Z1|A0A519K8Z1_FLASP Epoxyqueuosine reductase OS=Flavobacterium sp. OX=239 GN=queG PE=3 SV=1
MSTKSKHTAFIKAEAKRLGFLSCGISKAGFLEAEASRLEAWLNRNMHGQMSYMENHFDKRLDPTKLVDGAKSVISLLLNYYPEKTQNPDSYKISKYAFGQDYHFVIKEKLKGLLFSIQNEIGEVGGRAFVDSAPVLDKAWAAKSGLGWIGKNSNLLTQKVGSFYFIAELIVDLALEYDTAVTDHCGTCTACIDSCPTEAIVAPYVVDGNKCISYFTIELKDNLPQEMKGKFDDWAFGCDVCQDVCPWNRFSKPHSEPLFSPNPDLLAFSKSDWDEITEDTFRAVFGNSAVKRTKFEGLKRNIGFLKQPE

SEQ ID NO: 76862 - protein, 309 aa, Flavobacterium sp.
  REGION 1..309: note = tr|A0A552V7R3|A0A552V7R3_9FLAO Epoxyqueuosine reductase OS=Flavobacterium sp. ZT4R6 OX=2593302 GN=queG; PE = 3 SV=1
MKNNKQKYTDFIKSEALRLGFMSCGISKAGFLEEEAPRLEAWLNQNRHGKMQYMENHFDKRLDPTLLVDGAKSVISLLLNYYPEETQTTDTYKISKYAYGQDYHFVIKEKLKELLHSIQSTIGEVGGRAFVDSAPVLDKAWAAKSGLGWIGKNSNLLSKKTGSFFFIAELIVDIDLEYDYAVTDHCGSCTACLDACPTQAIIAPYVVDGSKCISYFTIELKENIPAEMRGSFNDWAFGCDVCQDVCPWNRFSKPHREPLFNPHPDLLSLTKKDWEEITEDTFRAVFKNSAVKRAKYDGLKRNINFLKEL

SEQ ID NO: 76863 - protein, 308 aa, unidentified
  source 1..308: note = Flavobacterium spartansii
  REGION 1..308: note = tr|A0A1S1J908|A0A1S1J908_9FLAO Epoxyqueuosine reductase OS=Flavobacterium spartansii OX=1278819 GN=queG; PE = 3 SV=1
MTINSKETYSKFIKAEAKRLGFLSCGISKAGFLEEEAPRLEKWLNNNHHGQMGYMENYFDKRLDPTLLVDDAKSVVSLLLNYYPTETQTDESFKISKYAYGQDYHFVIKEKLKEFLHSIQENIGEVSGRAFVDSAPVLDRAWAAKSGLGWIGKSGNLLTQKVGSFYFIAELILDLDLEYDHATTDHCGSCTACIDACPTQAIVAPHVVDGSKCISYYTIELKENIPHEMKGKFDEWMFGCDTCQDVCPWNRFSKPHSEPLFNPNPELLSFSKKDWIEITEETFRLVFKNSPIKRTKFDGLKRNILFLE

SEQ ID NO: 76864 - protein, 309 aa, Flavobacterium subsaxonicum
  REGION 1..309: note = tr|A0A0A2N0T5|A0A0A2N0T5_9FLAO Epoxyqueuosine reductase OS=Flavobacterium subsaxonicum WB 4.1-42 = DSM 21790 OX=1121898 GN=queG PE=3 SV=1
MIDNKQKYSDFIKSEAKRLGFMSCGISKAGFLEEEAPRLEAWLNQNRHGKMQYMENHFDKRLDPTLLVDGAKSVISLLLNYYPEETQTEGSYKISKYAYGQDYHFVIKEKLKELLHFIQENIGEVGGRAFVDSAPVLDKAWAAKSGLGWIGKNSNLLSKKTGSFFFIAELVVDIDLEYDYAVTDHCGSCTACLDACPTQAIIAPYVVDGSKCISYFTIELKENIPAEMRGSFNDWAFGCDVCQDVCPWNRFSKPHREPLFNPHPDLLSLTKKDWEEITEDTFRAVFKNSAVKRTKYDGLKRNINFLKEL

SEQ ID NO: 76865 - protein, 307 aa, Flavobacterium succinicans
  REGION 1..307: note = tr|A0A1I4RV24|A0A1I4RV24_9FLAO Epoxyqueuosine reductase OS=Flavobacterium succinicans OX=29536 GN=queG; PE = 3 SV=1
MINNKEKYTQFIKAESKRLGFLSCGISKVGFLESEAPRLEKWLNHQMNGQMSYMENHFDKRLDPTLLVDGAKSVISLLLNYYPSEVQNPDSYKISKYAFGQDYHFVIKDKLKELLFSIQNEIGEVSGRAFVDSAPVLDKAWAAKSGLGWIGKNSNLIAQKVGSFYFIAELIVDLDLVYDHATTDHCGTCTACLDSCPTQAIVSPYVVDGSKCISYFTIELKDNIPTEFKGKFDDWIFGCDVCQDVCPWNRFSKPHQEPLFNPNPEMLGWSKKDWEEITSETFNAVFKNSPLKRTKWNGLIRNVDHSK

SEQ ID NO: 76866 - protein, 286 aa, Flavobacterium succinicans
  REGION 1..286: note = tr|A0A199XN83|A0A199XN83_9FLAO Epoxyqueuosine reductase OS=Flavobacterium succinicans OX=29536 GN=queG; PE = 4 SV=1
MSCGISKAGFLDKEAPRLENWLNQQMNGQMSYMENHFDKRLDPTLLVDGAKSVISLLLNYYPSDIQNPDSYKISKYAFGQDYHFVIKDKLKELLFSIQTEIGDVSGRAFVDSAPVLDKAWAAKSGLGWIGKNSNLITQKVGSFYFIAELIVDLDLECDDATTDHCGTCTACLDACPTQAIVAPYVVDGSKCISYFTIELKDNIPIEFKGKFDDWIFGCDVCQDVCPWNRFSKSHEEPLFNPNPELLQWSKKDWEEITSETFNAVFKNSPLKRTKWSGLLRNIDNSL

SEQ ID NO: 76867 - protein, 311 aa, Flavobacterium suncheonense
  REGION 1..311: note = tr|A0A0A2MNF8|A0A0A2MNF8_9FLAO Epoxyqueuosine reductase OS=Flavobacterium suncheonense GH29-5 = DSM 17707 OX=1121899 GN=queG PE=3 SV=1
MNTTTSKYTQMIKSEAQRLGFLSCGISKAGFLEAEAPRLEAWLQKGMQGEMHYMENHFDKRLDPTLLVDGAKSVISLLLNYYPSEVQNPESYKLSKYAYGQDYHFVIKDKLKDLLRFIQTEIGEVSGRAFVDSAPVLDKAWAAKSGLGWVGKNGNLLSKQVGSFFFIAELIVDLDLEYDTITTDHCGNCTACLDACPTEAIVAPYVVDGSKCISYFTIELKDNLPMEMKGKFEDWMFGCDVCQDVCPWNRFSKPHSEPLFDPNPELLSFTKKDWEEITEETFRKVFKNSAVKRTKYDGLLRNINFLSEKKD

SEQ ID NO: 76868 - protein, 308 aa, Flavobacterium swingsii
  REGION 1..308: note = tr|A0A1I0VRU9|A0A1I0VRU9_9FLAO Epoxyqueuosine reductase OS=Flavobacterium swingsii OX=498292 GN=queG; PE = 3 SV=1
MINNKSKYTQLIKTEAQRLGFLSCGISKAGFLEEEAPRLENWLNKQMHGEMSYMENNFDKRLNPTLLVDDAKSVISLLLNYYPSEIQNSDSYNISKYAYGQDYHFVIKEKLKELLHFIQTEIGEVSGRAFVDSAPVLDKAWAAKSGLGWIGKNSNLLTKQVGSFYFIAELIVDLDLEYDYATTDHCGSCTACIDACPTEAIVAPYVVDGSKCISYFTIELKENLPIEMKGKFDDWAFGCDVCQDVCPWNKFSKPHNEPLFNPNPEILLFTNKDWEEITDETFKKVFKNSAVKRTKLEGLKRNINFLKE

SEQ ID NO: 76869 - protein, 307 aa, Flavobacterium terrae
  REGION 1..307: note = tr|A0A1M6A8D7|A0A1M6A8D7_9FLAO Epoxyqueuosine reductase OS=Flavobacterium terrae OX=415425 GN=queG PE=3; SV = 1
MNTKEKYSQLIKSEALRLGFLSCGISKAGFLEEEAPRLENWLNKNMHGQMSYMENHFDKRLDPTLLVDGAKSVISLLLSYYPSEIQNEDSYKISKYAYGQDYHFVIKDKLKDLLRFIQTEIGEVQGRVFVDSAPVLDKAWAAKSGLGWIGKNSNLITKQVGSFYFIAELIIDLELEYDYATTDHCGSCTACLDACPTQAIVSPYVVDGSKCISYFTIELKEQIPYEMKGKFDDWMFGCDVCQDVCPWNRFSKPHQEPLFNPNSEILSYSKKDWEEITEEVFKAVFKNSAVKRTKLEGLKRNISFLKD

SEQ ID NO: 76870 - protein, 380 aa, unidentified
  source 1..380: note = [Flavobacterium] thermophilum
  REGION 1..380: note = tr|A0A377H2Z2|A0A377H2Z2_9BACL Epoxyqueuosine reductase OS=[Flavobacterium] thermophilum OX=1414643; GN = queG PE=3 SV=1
MDVMALKQEVIEYSRSIGIDKIGFASADPFVELKERLRRQQELGYQSGFEEPDIEKRTNPSLLLPEAKSIIAIALAYPSKMKDAPRGTKTERRGVFCRASWGKDYHVVLRERLQQLEEFLLAKVPHARVRSMVDTGELADRAVAERAGIGWSGKNCSIITPEFGSYVYLGEMITNIPFPPDEPVENRCGTCTKCIDACPTGALVQGGQLNAQRCISFLTQTKGFLADEFREKIGNRLYGCDTCQLVCPENKGKDFHLHPEFEPDPEAAKPKLVPLLDMTNREFQEKFGAMAGSWRGKKPIQRNAIIALAHYKDRTAVPHLLRLLKEDSRPVIRGTAAWALGKIGDATAKPHLEEARQTETDMDVIAEIDKGLKLLSETKE

SEQ ID NO: 76871 - protein, 286 aa, Flavobacterium tiangeerense
  REGION 1..286: note = tr|A0A562L3S7|A0A562L3S7_9FLAO Epoxyqueuosine reductase OS=Flavobacterium tiangeerense OX=459471; GN = IQ05_00561 PE=4 SV=1
MSCGISKAEFLETEAPRLEKWLNLNHHGKMAYMENNFDKRLDPTLLVEDSKSVVSLLLNYYPSEFQNQESFKISKYAYGIDYHDVIKGKLRELIHSIQTNIGAVSGRAFVDSAPVLDKAWAAKSGLGWIGKNSNLLTKKVGSFYFIAELIIDLELEYDSPTTDHCGACTACIDSCPTNAIVAPYVVDGSKCISYFTIELKENIPTEFKGMFNDWAFGCDVCQDVCPWNKFSKPHSEPLFNPNPDVLAMSKKDWIEITEETFKVVFKNSPIKRTKFEGIKRNIDFLY

SEQ ID NO: 76872 - protein, 310 aa, unidentified
  source 1..310: note = Flavobacterium tibetense
  REGION 1..310: note = tr|A0A365NZV3|A0A365NZV3_9FLAO Epoxyqueuosine reductase OS=Flavobacterium tibetense OX=2233533 GN=queG; PE = 3 SV=1
MINNKEKYAQLIKAESQRIGFLSCGISKAGFLEEEAPRLESWLNNNMNGQMSYMENHFDKRLDPTLLVDGAKSVISLLLNYYPSEFQNEDSYKISKYAYGEDYHFVIKDKLKELLHFIQTEIGEVNGRAFVDSAPVLDKAWAAKSGLGWIGKNSNLITQKVGSFYFIAELIVDLELEYDTPTTDHCGTCTACIDACPTEAIVAPYVVDGSKCISYFTIELKDNLPNVMKDKFDDWMFGCDVCQDVCPWNRFSKPHNEPRFQPNNEILQFTKSDWEEITQDTFQKVFKNSAFNRTKLSGLQRNINFFKDYP

SEQ ID NO: 76873 - protein, 310 aa, unidentified
  source 1..310: note = Flavobacterium ummariense
  REGION 1..310: note = tr|A0A1I5GBM7|A0A1I5GBM7_9FLAO Epoxyqueuosine reductase OS=Flavobacterium ummariense OX=913024 GN=queG; PE = 3 SV=1
MTNKEKYTQFIKQKAQDLGFSYCGISQATFLEEEAPRLESWLKNNMHGEMKYMENHFDKRLDPRLLVPGAKSVVSLLLNYFPSEQQNPDSYKISKYAYGEDYHFVIKDKLKDLLHYINDEIGEVDGRVFVDSAPVLDKAWAAKSGLGWVGKNNNLIRKTEGSFFFVAELIIDLDLMYDTATTNHCGSCTACIDACPTQAIESPYIVNGSKCISYLTIELKDAIPDEFSGKLDDWMYGCDVCQDVCPWNRFAKPNAEPLFKPKPTLIDYDKQQWNDLTNELFNEIFKKSAVKRTKFSGLMRNIAFLNKDDL

SEQ ID NO: 76874 - protein, 307 aa, unidentified
  source 1..307: note = Flavobacterium urocaniciphilum
  REGION 1..307: note = tr|A0A1H9DJ10|A0A1H9DJ10_9FLAO Epoxyqueuosine reductase OS=Flavobacterium urocaniciphilum OX=1299341; GN = queG PE=3 SV=1
MINNKEKYSKLITEESKKLGFLSCGISRAEFLEQEAPRLESWLNKNLHGQMSYMENHFDKRLNPTLLVDGAKSVISLLLNYYPSEIQNQESFKISKYAYGEDYHFVIKDKLKTLLQFIQDEIGEVNGRVFVDSAPVLDKAWAAKSGLGWIGKNANLITQKVGSFYFIAELIVDLELEYDTPTTDHCGSCTACLDACPTEAIIAPYVVDGSKCISYFTIELKDNLPQEMKGKFDDWMFGCDVCQDVCPWNRFSKPHQEPLFEPKSELLNFSKRDWQELTKETFNKVFKNSAVKRTKFEGLMRNIEFLK

SEQ ID NO: 76875 - protein, 285 aa, Flavobacterium urumqiense
  REGION 1..285: note = tr|A0A1H5UDQ5|A0A1H5UDQ5_9FLAO Epoxyqueuosine reductase OS=Flavobacterium urumqiense OX=935224; GN = SAMN04488130_102211 PE=4 SV=1
MSCGISKAGFLEEEAPRLENWLNKNRNGEMSYMENHFDIRLNPTLLVDDGKSVISLLLNYYPDQFQSDSYKISKYAYGQDYHFVIKEKLKELLFSIQSAIGDVSGRAFVDSAPVLDKAWAAKSGLGWIGKNSNLLTQKVGSFYFISELIVDLNLEYDHATTDHCGTCTACIDACPTEAIVAPYIVDGSKCISYFTIELKGNIPQEMKGKFDDWAFGCDVCQDVCPWNKFSKANNEPLFNPKPALLSMTRKDWKEITEETFRVVFKDSPLKRTKFEGLKRNIDFLK

SEQ ID NO: 76876 - protein, 286 aa, Flavobacterium weaverense
  REGION 1..286: note = tr|A0A3L9ZY62|A0A3L9ZY62_9FLAO Epoxyqueuosine reductase OS=Flavobacterium weaverense OX=271156; GN = BC961_0170 PE=4 SV=1
MSCGISKAGFLEEEAPRLENWLNQNRNGQMSYMENHFDIRLNPTLLVESSKSVISLLLNYYPEDLQNSDSFKISKYAYGEDYHFIIKDKLKEFLHSIQFEIGEVGGRAFVDSAPVLDRAWAAKSGLGWIGKNSNLITQKVGSFYFIAELIIDLDLDYDHAVTDHCGSCTACIDSCPTEAIVSPYIVDGSKCISYFTIELKESIPAAMKGKFDDWAFGCDVCQDVCPWNKFSKPHSEPLLTPHPDLLSMTKRDWIEITEETFRAVFKKSPIKRAKYLGLKRNIDFLK

SEQ ID NO: 76877 - protein, 254 aa, Flavobacterium xanthum
  REGION 1..254: note = tr|A0A1M7A584|A0A1M7A584_9FLAO Epoxyqueuosine reductase OS=Flavobacterium xanthum OX=69322; GN = SAMN05443669_100683 PE=4 SV=1
MENHFDKRLNPTLLVDDAKSVVSLLLNYYPEQFQNPDSYKISKYAYGEDYHFVIKEKLKEFLFSIQSAIGEVSGRAFVDSAPVLDKAWAAKSGLGWIGKNSNLLTQKVGSFYFIAELIIDLDLDYDNPTTDHCGTCTACIDSCPTESIVSPYVVDGSKCISYFTIELKENIPQEMKGKFDDWAFGCDVCQDVCPWNKFSKPHNEPLFTVNPEIMSMSKKDWIEITEETFKTIFKNSPLKRAKFEGVKRNINFLK

SEQ ID NO: 76878 - protein, 261 aa, Flavobacterium xinjiangense
  REGION 1..261: note = tr|A0A1M7E7X0|A0A1M7E7X0_9FLAO Epoxyqueuosine reductase OS=Flavobacterium xinjiangense OX=178356; GN = SAMN05216269_101377 PE=4 SV=1
MSYMENHFDKRLDPTLLVDDAKSVISLLLNYYPDQLQSQIVTSETYKISKYAYGYDYHFVIKEKLKELLFAIQSSIGDVSGRAFVDSAPVLDKAWAAKSGLGWIGKNSNLLTQKVGSFYFIAELIVDLNLEYDNATTDHCGTCTACIDACPTEAIVAPYIVDGSKCISYFTIELKENIPQEMKGKFDDWAFGCDVCQDVCPWNKFSKANNEPLFNPNPELLSMTKKDWKEITEETFRVVFKDSPLKRAKFKGIKRNIDFLQ

SEQ ID NO: 76879 - protein, 261 aa, Flavobacterium xueshanense
  REGION 1..261: note = tr|A0A1I1ZFP4|A0A1I1ZFP4_9FLAO Epoxyqueuosine reductase OS=Flavobacterium xueshanense OX=935223; GN = SAMN04488131_101334 PE=4 SV=1
MSFMENHFDKRLNPTLLVDDAKSIVSLLLNYYPEELQSRSVGTDSYKISKYAYGQDYHFVIKEKLKEFLTSIQSTIGEVSGRAFVDSAPVLDKAWAAKSGLGWIGKNSNLLTQKVGSFYFIAELIIDLDLDYDNPITDHCGTCTACIDACPTEAIVAPYVVDGSKCISYFTIELKENIPQEMKGKFDDWAFGCDVCQDVCPWNKFSKPHNEPLFNPNPELLSMSKKDWMELTEETFKVVFKNSPLKRAKFQGIKRNIDFLK

SEQ ID NO: 76880 - protein, 274 aa, Flavonifractor plautii
  REGION 1..274: note = tr|A0A1C7FIJ9|A0A1C7FIJ9_FLAPL (Fe-S)-binding protein OS=Flavonifractor plautii OX=292800 GN=A4U99_01415; PE = 4 SV=1
MLDKWFAAAGAAAWGGVAFRRLLPFLSTGAREKVETLCPAPETVLVAAFPYYAGERPGNLSLYARGEDYHRVLTRRLNTVCDALRRKYPGESFVPAADNSPLPEREAAWLAGIGLRGKNGLLILPPYGTYVFLGTILTGAALDVPERPAAPDCPDCGACRAACPAGALGEGGPDVSRCLSELTQKKGALTEEEAARLKVHPLIWGCDFCQRACPYNAAPARSPLPEFSTSLVDALENSDLDGLTNRMFQDKYGARAFAWRGPGPLRRNLGLKEE

SEQ ID NO: 76881 - protein, 274 aa, Flavonifractor plautii
  REGION 1..274: note = tr|A0A4R2M3I7|A0A4R2M3I7_FLAPL 4Fe-4S dicluster protein OS=Flavonifractor plautii DSM 6740 OX=649753; GN = EV206_110118 PE=4 SV=1
MLDKWFAAAGAAAWGGVAFRRLLPFLSTGAREKVETLCPAPETVLVAAFPYYAGERPGNLSLYARGEDYHRVLTRRLNTVCDALRRKYPGESFVPAADNSPLPEREAAWLAGIGLRGKNGLLILPPYGTYVFLGTILTGAALDVPERPAAPDCPDCGACRAACPAGALGEGGADVSRCLSELTQKKGALTEEETARLRVHPLIWGCDFCQRACPYNAAPARSPLPEFSTSLVDALENSDLEGLTNRTFRDKYGGRAFAWRGPGPLRRNLGLKEE

SEQ ID NO: 76882 - protein, 176 aa, Flavonifractor sp.
  REGION 1..176: note = tr|A0A1Y4WGH9|A0A1Y4WGH9_9FIRM (Fe-S)-binding protein (Fragment) OS=Flavonifractor sp. An10 OX=1965537; GN = B5E42_12820 PE=4 SV=1
MLDELFAAAGAAAWGGAAFRRLLPFLSTGALEKVENLCPRPRTVLAAAFPYFAGERPGNLSLYARGEDYHAVVVRRLNTVCEALAEQYPGESFFPSADNSPLPEREAAWLAGIGLRGASGLLILPPYGTYVFLGTILTGAALELPERPPAPDCPRCGACRAACPAGAMGADSYTHL

SEQ ID NO: 76883 - protein, 275 aa, Flavonifractor sp.
  REGION 1..275: note = tr|A0A1Y3RQE7|A0A1Y3RQE7_9FIRM (Fe-S)-binding protein OS=Flavonifractor sp. An91 OX=1965665; GN = B5G42_04590 PE=4 SV=1
MLNKAFAAAGAAAWGGLPFSELAEDMTPEAIAKAEQLCPNPRTVLVAAFPYYAGDRPGNLSLYARGRDYHQVVTGKLNTICDILREKYPNGVCLPAADNSPLPERQAAWRCGIGLRGKNGLVILPPYGSYVFLGTILTDVELDLPPRTPSAHCVGCGKCLAACPGGALGEDGVNLSRCLSGLTQKKGELTGEEEALVKAHPLIWGCDCCQRACPYNASPELSPLPEFREDLVDALDRADLEGLTNRTFREQYGGRAFAWRGPAPLRRNLELKKSV

SEQ ID NO: 76884 - protein, 314 aa, Flectobacillus sp.
  REGION 1..314: note = tr|A0A267TDZ4|A0A267TDZ4_9BACT Epoxyqueuosine reductase OS=Flectobacillus sp. BAB-3569 OX=1509483; GN = queG PE=3 SV=1
MNQLRQHHTQLIKEQAKLLGFDFCGVSKATFLEEEAPRLEKWLNNNYHGAMNYMENHFDKRLDPRLLVDDAKSVVSLLYNYYPEEKLSEKEEDYKISKYAYGMDYHFVIKDKLKQLLDFIQENIGEVGGRAFVDSAPVMDKAWAKKSGLGWVGKNANLINKGHGSFFFIAELIIDLELEPDGPVKDFCGTCKRCIEACPTEAIVEPYVVNGSKCISYFTIELKDAIPIEMKGKFDNWMFGCDVCQDVCPWNRFSKPHKEPLFNLHPDLKDFTNKDWDEITTEVFNQVFKKSPVKRTKLEGLKRNIDFIGWNDKK

SEQ ID NO: 76885 - protein, 313 aa, Flexibacter flexilis
  REGION 1..313: note = tr|A0A1I1DUI3|A0A1I1DUI3_9BACT Epoxyqueuosine reductase OS=Flexibacter flexilis DSM 6793 OX=927664; GN = queG PE=3 SV=1
MLAASTPARYAQLIKQKAAELGFDFCGISKAEFLEEEAPRLENWLNAQMHGQMHYMAGHFDKRLDPRLLVDGAKSVVSLMLNYFPAKDLAQPDNYKISKYAYGTDYHFVIKDKLNLLLQHLQTEIGEVNGRAFVDSAPVMDKAWAARSGLGWVGKNSNLIHKKAGSFFFIAELILDLELETDGPVKDYCGTCTRCLDACPTQAIVAPYQVDGSRCISYFTIELKEQIPASMKGQFEDWAFGCDVCQDVCPWNRFSRPHRTPAFGPSPELEHFTRRDWEEITQETFSKIFSKSAVKRTKLAGLQRNIQFLKNDE

SEQ ID NO: 76886 - protein, 308 aa, unidentified
  source 1..308: note = [Flexibacter] sp.
  REGION 1..308: note = tr|A0A1V2CB20|A0A1V2CB20_9FLAO Epoxyqueuosine reductase OS=[Flexibacter] sp. ATCC 35103 OX=1937528; GN = queG PE=3 SV=1
MSINAKETYSKFIKSEAKRLGFLSCGISKAGFLEEEAPRLEKWLNNNHHGQMAYMENYFDKRLDPTLLVDDAKSVVSLLLNYYPEETQTQESFKISKYAYGQDYHFVIKEKLKEFLHSIQENIGDVSGRAFVDSAPVLDRAWAAKSGLGWIGKSGNLLTQKVGSFYFIAELILDLDLEYDHATTDHCGSCTACIDACPTQAIVAPHVVDGSKCISYYTIELKENIPYEMKGKFDEWMFGCDTCQDVCPWNRFSKPHSEPLFNPNPELLSFSKKDWIEITEETFRAVFKNSPIKRTKFDGLKRNVKFLE

SEQ ID NO: 76887 - protein, 308 aa, unidentified
  source 1..308: note = [Flexibacter] sp.
  REGION 1..308: note = tr|A0A1V2B604|A0A1V2B604_9BACT Epoxyqueuosine reductase OS=[Flexibacter] sp. ATCC 35208 OX=1936242; GN = queG PE=3 SV=1
MQLAETHTAFIKAQAADLGFDHCGIARAVQLDDDARRLETWLNKGMHGNMKYMENHFDKRIDPRKLVDNARSVITLLLNYYPSEQQVPDAPRISKYAYGKDYHEVIKAKLNTLLARMQETMGEVSGRGFVDSAPVLERAWAQKSGLGWLGKNGNLIHKQAGSFFFIATLITDVELVYDNPVGDYCGSCTKCLDACPTGALVAPGVVDGSRCISYYTIELKELLIPEKMQGQFDNWMFGCDTCQDVCPWNRFSKPNQTAEFTPIPEILNFSTKDWEELTEEEFRRIFKHSPMKRSKYAGIRRNLNFLEF

SEQ ID NO: 76888 - protein, 320 aa, Flexibacter sp.
  REGION 1..320: note = tr|A0A2M7NFP1|A0A2M7NFP1_9BACT tRNA epoxyqueuosine(34) reductase QueG OS=Flexibacter sp. CG_4_10_14_3_um_filter_32_15 OX=1975530 GN=queG PE=4 SV=1
MNPISLHQKTECFKNLAFEAGFLHCGISKATFLEKEARDLEKWLTQGKNGQMQWIENYFDIRLDPRLLVDNAKSVLTFAYNYYPPILLNKNKERESNYKISKYAYGRDYHKVIKKKLKHLINHLKEEFGDFNGRAFVDSAPIMEKVWAKKSGITWQGKHTNAINPKTGSFFFLATLVVDIELEYDSPTKDRCGNCTLCLDACPTDALSVENPYQIDGSKCISYFTIELKDKIPSEMQGKFEDWIFGCDICQDVCPWNKRKSAQIPHTENDFLPSELLQQMTKKDWQELTSELFDELFVGSAVKRTKFEGLKRNIDFLKPK

SEQ ID NO: 76889 - protein, 311 aa, unidentified
  source 1..311: note = Flexilinea flocculi
  REGION 1..311: note = tr|A0A0S7BRX7|A0A0S7BRX7_9CHLR Epoxyqueuosine reductase OS=Flexilinea flocculi OX=1678840 GN=ATC1_131142; PE = 4 SV=1
MNQTSEKEIIKAEAEKLGFCFSGFTDPRKPDHFPRYLDWIEAGKYAGMNYLARHDHIEKRKNPAIIYPDCRSILVLGISICYEFEPSFFSVASFARYWDYHHQITELCGKLIDRISSRLCKDVHAKICTDSSPILERSLAVQAGLGWIGRNSMLIHPKYGSTTLLAECLLDIEIEPDPPYNDDRCGKCRLCVDTCPTKCIDPNTRTIDAGRCIAYQTVENHGEIEPEIAALCGNQIFGCDVCVKICPWNQKNLVNQTPLSLHHIVIGEMKDLDLSDAEFKEKYQETPILRTKNSGLKRNIRNALHNLAEGG

SEQ ID NO: 76890 - protein, 375 aa, unidentified
  source 1..375: note = Floricoccus penangensis
  REGION 1..375: note = tr|A0A1E8GG50|A0A1E8GG50_9LACT tRNA epoxyqueuosine(34) reductase QueG OS=Floricoccus penangensis OX=1859475 GN=BG262_02405 PE=4 SV=1
MDIKSQIIKLAEELNIQKIGFTKADDFEYMRKSLVYQKEKGHTSGFEHKNLDERLDPKLTLPSAKTIISVALAYPNKLQGRPDKTEFRRGSFARASWGIDYHHIMQKKLDALIQGINEIIDGLEYEGFVDTGPLIDVAVAARAGLGFIGKNGLLVTKEFGSYVYLGEIITSLEIEADKPVDYGCGDCNRCIDFCPTDALIGDGKMNAKKCLSFQTQNKGILQEEYRQKMKTIIYGCDICQMVCPYNKGIDSHFHPEMEGDPELVQPELIPFLDLTNRQFKDKYGHLAGSWRGRNVLQRNAIYALANANDKSAIPKLLEIVDSTQNQVLLGSAFWALGRLVKEPNREMINLVEHRITEDEQAMQEREKLLLLWYSR

SEQ ID NO: 76891 - protein, 375 aa, unidentified
  source 1..375: note = Floricoccus tropicus
  REGION 1..375: note = tr|A0A1E8GSE7|A0A1E8GSE7_9LACT tRNA epoxyqueuosine(34) reductase QueG OS=Floricoccus tropicus; OX = 1859473 GN=BG261_01210 PE=4 SV=1
MDIKSQIIKLAEELNIQKIGFTKADDFEYMRKSLVDQKEKGHNSGFEHKNIDERLDPKLTLPSAKTIISVALAYPNKLQGRPDKTEFRRGSFARASWGIDYHHIMQKKLDALIEGINEIINGLDYEAFVDTGPLIDVVVAARAGLGFIGKNGLLVTKEFGSYVYLGEIITSLEIEADKPVEYGCGDCNRCIDFCPTDALIGDGKMNAKKCLSFQTQNKGILQEEYRQKMKTIIYGCDICQMVCPYNKGIDSHFHPEMEGDPELVQPELIPFLDLTNRQFKEKYGHLAGSWRGRNVLQRNAIYALANANDKSAIPKLLEIVDSTQNQVLLGSAFWALGRLVKEPNQDMINLVEDRDTDDEQAKQERENLLYLWYSR

SEQ ID NO: 76892 - protein, 348 aa, unidentified
  source 1..348: note = Fluviibacterium aquatile
  REGION 1..348: note = tr|A0A4R6AX40|A0A4R6AX40_9RHOB tRNA epoxyqueuosine(34) reductase QueG OS=Fluviibacterium aquatile OX=2552766 GN=queG PE=4 SV=1
MKAALEAQAQAEGFAKMGICRPDAVPELPARLDAFVEHGRHGQMAWMAERMTWRSDPAVLWPEARSVVMLAEPYTPDHDPLEVLTRRDRAAISVYAQNRDYHDLVKKRLKRVGRWLLEQPEATGHAIKVFVDTAPVMEKPLAAASGLGWQGKHTNLLGRDLGNWFFLGAIFTTIDLPADAPETERCGSCTACLDICPTAAFPAPFQLDARRCISYLTIEHRGAVDEELRGKMGNRIYGCDDCLAACPWNKFAAEARELRYAGRDDLRAPALADLVGLDDAAFRAKFSGSPIKRIGRDRFVRNVLYAIGNSGDPTLADAARTLICDPDPAVADAAAWAVQVLSHGEGFS

SEQ ID NO: 76893 - protein, 354 aa, unidentified
  source 1..354: note = Fluviicoccus keumensis
  REGION 1..354: note = tr|A0A4Q7ZA91|A0A4Q7ZA91_9GAMM Epoxyqueuosine reductase OS=Fluviicoccus keumensis OX=1435465 GN=queG; PE = 3 SV=1
MEKIPTTPDAATLATLIRQWGAELGFGQVGISGLDLGDHGDHLQRWLDKGYQGEMAWMASHGEKRWRPELLVEGVQSIISVRLDYLVDAPRHRHVPQEPATGVISRYARGRDYHKTLRKRLQQLADRLQTVVEGSGHRVFVDSAPVLERAVAEQAGLGWIGKNTMLIHRQAGSFFFLGELFTTLALPRDEAVSSHCGSCRACLDICPTQAFTGPYELDARRCISYLTIEYQGSIPVELRPLIGNRIFGCDDCQLICPWNRYAKLSAEADFRPRHGLENSPLWVLFGWTEEEFLRKTEGSPLRRTGYENFLRNIAVGLGNAPRLPEVLAALTARKEDESAMVREHVAWALQRHAD

SEQ ID NO: 76894 - protein, 310 aa, Fluviicola sp.
  REGION 1..310: note = tr|A0A2G2F7I9|A0A2G2F7I9_9FLAO Epoxyqueuosine reductase OS=Fluviicola sp. OX=1917219 GN=queG PE=3 SV=1
MNSKERNTQLIKQKAKDLGFFFCGISKADFLKEDAVHLDAFLKNNYQGKMSYLENHYDKRLDPRLLVDDAKSVVSLLMNYFPENEQEDPSAPKISKYAYGKDYHFLIKDRLKEFFAYIQDEIGEVGGRVFVDSAPVLDKAWAKKSGLGWVGKNANLIHPKHGSFFFIAELILDLELTEDGPMKDYCGTCTKCIDACPTGAIVKPYVVDGSKCISYLTIELKDELLPSEFKGKMDNWMFGCDICQDVCPWNRFSKPTKESHFDPHENLLKMSKVDWEDLTEEIFQELFRKSAVKRTKFKGLNRNIQFNSTE

SEQ ID NO: 76895 - protein, 311 aa, Fluviicola sp.
  REGION 1..311: note = tr|A0A316KJT7|A0A316KJT7_9FLAO Epoxyqueuosine reductase OS=Fluviicola sp. XM-24bin1 OX=2133950 GN=queG; PE = 3 SV=1
MSKEVHTQLIKGKAQELGFMYCGISKADFLEDEARRLDDWLKKDYHGKMSYMANNFDKRLDPRLLVDGAKSVVSLLLNYFPEQTQEDSDAPKISKYAYGKDYHFVIKDKLKSLMTYINEEIGEVGGRVFVDSAPVMDKAWAAKSGLGWIGKNSNLIHPKHGSFFFVAELIIDLELEPDGPMKDYCGTCTACIDECPTDAIVEPYVVDGSKCISYLTIELKDAIIPGHFKDQMDGWMFGCDVCQDVCPWNRFSKAHNELSFNPHENLLKMSKSDWEDLSEEVFREIFKNSAVKRTKYAGLKRNIQFLNNPSS

SEQ ID NO: 76896 - protein, 310 aa, Fluviicola taffensis
  REGION 1..310: note = tr|F2IB84|F2IB84_FLUTR Epoxyqueuosine reductase; OS = Fluviicola taffensis (strain DSM 16823 / NCIMB 13979 / RW262) OX=755732 GN=queG PE=3 SV=1
MQQDHIKRLIRTKAEKLGFLHVGFSKADFLASEEPRLVNWLKAEKHGKMSYMENHFDLRLDPRLLVPGAKTVISLAYNYFPESTQRKDTYQISKYAYGKDYHDVVKAKLRTLVSELQTEIGAVEGRVFVDSAPILEKAWAEKSGVGWLGKNGNLIQPKTGSFFFLAEIICDLEVEADGPIKDYCGSCTRCIDACPTQAIEAPYIVNGSKCISYATIELKDADLPELFRGNMNNWIYGCDICQDVCPWNRFSKPHSEIDFRPKDEILSFSKQDWEELDELAFQSIFKGSAVKRTKFSGLKRNVSFLSSTED

SEQ ID NO: 76897 - protein, 315 aa, Fodinibius salinus
  REGION 1..315: note = tr|A0A5D3YRI1|A0A5D3YRI1_9BACT Epoxyqueuosine reductase OS=Fodinibius salinus OX=860790 GN=queG PE=3 SV=1
MNLRKRTQKVREAALRLGFNACGFAKAGRLETEERRLREWLNQDRQGTMGWMANHFDKRVDPTKLVPGAKSVVSVIGSYYHPKHEQQQEQENSPKIAKYAQGRDYHKVYKKKLKALFAETEELLGGLEGRVFVDSAPVLDKAWAVRSGLGWMGKNSNILNKNLGSFFFIGEMIVDAKFQYDTPVTDHCGSCTRCIESCPTNAIYEPYRVDATKCISYLTIELKEEIPDEHRDDLGNWMFGCDICQDVCPWNRNAQYGQMEDLAPRDKILNHDINFWEELDIKQYDALFEGSAIRRAKFEKYKDNVAAAAANIKGD

SEQ ID NO: 76898 - protein, 582 aa, Fontibacillus panacisegetis
  REGION 1..582: note = tr|A0A1G7QKY6|A0A1G7QKY6_9BACL Methylated-DNA--protein-cysteine methyltransferase; OS = Fontibacillus panacisegetis OX=670482; GN = SAMN04488542_12277 PE=3 SV=1
MATTKNGAAGSLAGKLPIWAELKQEIVAIAPSLGIDDIGFASADPFLSLKSILQQHREKGHESGFEEPDIEKRVHPELSLEQPASLISIAVAYPSKMDNPPKSEPGKRRGILARSAWGQDYHHVLRAAMAKLEEFILSRVPEARLVNMVDTGALVDRAVAERAGIGFSGKNCAIISPKWGSWIYLGELITNIPFPPDTPVTEGCGECTKCLDACPTGALIGPGQLNAQRCISFLTQTKGFLEEEFMLKIGNRLYGCDTCQIVCPKNKGKSWNHRPELQPEPEVAKPLLLPLLDMSNREFKETFGSSAASWRGKKPMQRNAVIALGNFKDRDSVPKLIDIMQNDPRPVMRGTAAWSLSRIGGEEALEAINRAIATEQDAEVLGRLQAAQGKLKAAAIKEDAVVLSEDQVLYYDEMDSVIGKLTLVTSTRGLCHIEFGPYSDCSDVLNRWMQRYYKGSQMVASKEALSTANQQLKEYFAGERRQFDLRLDLQGSEFQRKVWDALLTIPYVKTASYKDIAEMIGQPKAVRAVGGANNKNPIPIIVPCHRVIGSNGSLVGYGGGLSIKESLLSLERNMEYGSGQDQ

SEQ ID NO: 76899 - protein, 396 aa, unidentified
  source 1..396: note = Fontibacillus phaseoli
  REGION 1..396: note = tr|A0A369B431|A0A369B431_9BACL Epoxyqueuosine reductase OS=Fontibacillus phaseoli OX=1416533; GN = DFP94_11368 PE=4 SV=1
MARANNLTSETWKPGQSVWDELKREIKAAAPSFGIDDIGFASADPFLSLKSILLDRREKGYESGFEEPDLDKRIYPELSLEQPASLISIAVAYPSKMDNPPKSEPGRRRGILARSAWGQDYHQVLRQAMAKLKGFILERVPDARIEDMVDTGALSDRAVAQRAGIGFHGKNCAIISPEWGSWIYLGELITNIPFQPDTPVTEDCGDCTKCLDACPTGALVGPGVLNAQRCISFLTQTKGFLEEEFMVKIGNRLYGCDTCQVVCPKNKGKSWSHRTELQPDPETVKPLLLPILDLSNREFKERFGDSAAAWRGKKPIQRNAVIALGNFKDLSSVPKLIDIMVNDPRPVLRGTAAWALSRIGGEEALAAVAKAAESEADPEVLERIESARIKLEEIVT

SEQ ID NO: 76900 - protein, 299 aa, unidentified
  source 1..299: note = Fonticella tunisiensis
  REGION 1..299: note = tr|A0A4V3ETD0|A0A4V3ETD0_9CLOT Epoxyqueuosine reductase OS=Fonticella tunisiensis OX=1096341; GN = EDD71_10855 PE=4 SV=1
MKEKLKNFCKSIGIEYVGIASPGPYLELQKILEDRINKGFYTGFEEKELKKRIYPEITMPDVKSIIVCLFPYYVGYSNDTNISNYTYARDYHLIVKEKLINIGEFLRENIEGFNYMAFVDTGPLVDRYLAYLAGLGFWGINTHIINDKYGSYVFIGYLMVDYEFEFDTPHDRTCIQCGSCIRNCPGGAILGGFEIDPRRCVSYLTQKKGELSEEEKGCIRNNGHSVFGCDICQKVCPHNMNKEHTNMEEFKKDLIYKLNYDELNSISNKEFKRRYGDRAFSWRGRTIIVRNFEYLMDDK

SEQ ID NO: 76901 - protein, 359 aa, unidentified
  source 1..359: note = Fontimonas thermophila
  REGION 1..359: note = tr|A0A1I2HLI0|A0A1I2HLI0_9GAMM Epoxyqueuosine reductase OS=Fontimonas thermophila OX=1076937 GN=queG; PE = 3 SV=1
MNPALDHELPARIVQWARELGFSDAGVSTRELDQDHAHLRAWLAQGRHGGMAYMARDPALRVEPERLQPGTVSVISARLPYRSAQAADPAQVLADGTRAYISRYALGRDYHRVVRARLRKLAQRIEQAIAPHGYRVLCDSAPALEKALARDARLGWIGKHTLLLHREAGSWFFLGEIYTDLPLPPPRTPAVENACGRCSACMRICPTQAIVAPYQLDARRCISYLTIEHHGPIPLELRPLIGNRIFGCDDCQLVCPWNRHAQLSAIPDFAPRHGLDAARLVDLFAWSEAEWLARTEGMALRRTGYTRWLRNLAVALGNAPTSAEVVAALRARATHPDAVVREHVHWALARHGESAAHGQ

SEQ ID NO: 76902 - protein, 352 aa, Formivibrio citricus
  REGION 1..352: note = tr|A0A1I4WJC9|A0A1I4WJC9_9NEIS Epoxyqueuosine reductase OS=Formivibrio citricus OX=83765 GN=queG PE=3; SV = 1
MHSEELDQLALQIKTWARELGFARAAIGGVDLGHAEASLQDWLAAGFHGEMDYMARHGLKRARPTELVPETRSLISVFMPYRVKDAADAKAILADGERAYISRYALGRDYHKVLRNRLQTLADRLAARIGPFGYRVFVDSAPVLEVEVARQAGQGWRGKHTLLLNRDHGSFFFLGELFTDLPLPADPPLPQEHCGSCSRCMDACPTSAIVAPYRVDARRCISYLTIELAGAIPDEFRPLIGNRVYGCDDCQLACPWNRFAVTTDEPDFAVRHGLDDVKLVELFGWSEEDFKSRMAGSAIYRIGYPRWLRNIAVGLGNAPMTPAVLAALQARRDAPDLMVRAHVRWALAQHEL

SEQ ID NO: 76903 - protein, 306 aa, Formosa agariphila
  REGION 1..306: note = tr|T2KHQ6|T2KHQ6_FORAG Epoxyqueuosine reductase; OS = Formosa agariphila (strain DSM 15362 / KCTC 12365 / LMG 23005 / KMM 3901) OX=1347342 GN=queG PE=3 SV=1
MNIKAKNTSLIKTEAKRLGFLSCGISKAEFLELEAPRLERYLNQNFHGEMDYMEHHFDKRLDPTILVEGSKSVISLLLNYYPNKLQQEDTYKLSKYAYGKDYHFVIKEKLKELLHTIESEIGAVNGRAFVDSAPVLDKAWAAKSGLGWIGKHSNLLTQQVGSFYFIAELIIDLELEYDGATTDHCGTCTKCIDACPTDAITEPYVVDGSKCISYFTIELKDQLPESEKGKFEDWMFGCDICQDVCPWNRFSQPHKEPLFNPHPELLEMSKKDWEEITEDIFRKVFQKSAVKRTKFTGLTRNIDFLK

SEQ ID NO: 76904 - protein, 306 aa, Formosa algae
  REGION 1..306: note = tr|A0A2K2ZEU5|A0A2K2ZEU5_9FLAO Epoxyqueuosine reductase OS=Formosa algae OX=225843 GN=queG PE=3 SV=1
MSLKSKHTHIIKAEAKRLGFLSCGISKAQFLEEEAPRLEAYLNKNFHGQMQYMEHHFDKRLDPTKLVEGSKSVVSLLLNYYPHECQTKDTYKLSKYAYGKDYHFVIKEKLKELLHTIQTEIGEVDGRAFVDSAPVLDKAWAAKSGLGWIGKHSNLLTQQVGSFYFIAELIIDLELNYDGITTDHCGSCTKCIDACPTDAITEPYVVDGSKCISYFTIELKDQLPESEKGKFEDWMFGCDICQDVCPWNRFSKPHNEPLFNAHPDVLSMTKSDWEDITEDTFKTIFQKSAVKRTKLAGLKRNISFLK

SEQ ID NO: 76905 - protein, 308 aa, Formosa sp.
  REGION 1..308: note = tr|A0A2D4WWS5|A0A2D4WWS5_9FLAO Epoxyqueuosine reductase OS=Formosa sp. OX=2018467 GN=queG PE=3 SV=1
MSKKAVYAQSIKSEAKRLGFLSCGISKAEFLEEEAPRLESWLHQNKHGKMYYMENHFDKRLDPTLLVEGSKSVISLTYNYYIDKPQQDPNAPKISKYAYGLDYHYVIKDKLNQLLEFIKEEIGDVHGRAFVDSAPIMEKAWAKKSGLGWIGKNSNLITQKVGSFYFISELIVDLDLEVDHAVTDHCGSCKACIDACPTEAITEPFQVDGSKCISYFTIELKDNIPNEMKGKLDHWAFGCDICQDVCPWNRFSKQHSEPLFNPKPELLSMTKNDWEEITQETFNKVFKKSAVKRTKYTGLKRNIKFLKE

SEQ ID NO: 76906 - protein, 306 aa, Formosa sp.
  REGION 1..306: note = tr|A0A516GN46|A0A516GN46_9FLAO Epoxyqueuosine reductase OS=Formosa sp. PS13 OX=2594004 GN=queG PE=3 SV=1
MRTQTRHTQIIKTEAKRLGFLSCGISKAEFLETEAPRLERFLNQNYHGQMQYMENHFDKRLDPTKLVEGSKSVVSLLLNYYPHQFQNIDSYKLSKYAYGTDYHFVIKEKLKELLYTIQTEIGDVHGRAFVDSAPVLDKAWAAKSGLGWIGKHSNLLTQQVGSFYFIAELIIDLELEYDGITTDHCGTCTKCIDACPTDAITEPYVVDGSKCISYFTIELKDQLPESEKGKFEDWMFGCDICQDVCPWNRFSKPHNEPHFNPHPDVLQMTKKDWEEITEETFKKVFQKSAVKRTKLTGLKRNINFLK

SEQ ID NO: 76907 - protein, 307 aa, Formosa spongicola
  REGION 1..307: note = tr|A0A316DS99|A0A316DS99_9FLAO Epoxyqueuosine reductase OS=Formosa spongicola OX=570520 GN=queG PE=3 SV=1
MNTKQKHTELIKTEAKRLGFLSCGISKAQFLEEEAPRLEKWLSNNMHGEMQYMENHFDKRLDPTKLVDNSKSVISLLLNYYPKDIQNQNSYKLSKYAYGTDYHFIIKDKLKSLLNYIQDEIGEVEGRAFVDSAPVLDKAWAAKSGLGWIGKHSNLLTQQVGSFYFIAELIIDLELEHDSITSDHCGTCTACIDACPTEAIKEPYVVDGSKCISYFTIELKDNLPTEFKGKFDDWMFGCDVCQDVCPWNRFSKAHNEPLFNPHPELLSMTKKDWEDITEDTFKKVFQKSAVKRTKYSGLTRNIKFLKD

SEQ ID NO: 76908 - protein, 362 aa, unidentified
  source 1..362: note = Francisella adeliensis
  REGION 1..362: note = tr|A0A2Z4XYC2|A0A2Z4XYC2_9GAMM Epoxyqueuosine reductase OS=Francisella adeliensis OX=2007306 GN=queG; PE = 3 SV=1
MQIKLSLEQWQKIQDYATNELGISSISKADCDLSEYIPYYDKWIENNYHADLGYMTKHGSKRFVPDKLVPGTNSVIVTTLNYSNRPISTKNEVKRLRSESNIADISIYAHGRDYHKVMKKKLQKLGEYINDIIDTHEFRVFTDSAPVLEKPLAEKAGLGWMGKNSMLMNKSQGSFFFIGVIYSNLDLSHLPNNPKHLDACGKCQACIKLCPTNAITPGKMIDSRRCISYLTIENKGAIAQEFRDAIGTRIYGCDDCQLVCPFNNSAPQTKEKDFQLREFLVNRPLLELYSWDSNDFDKNTQGSAIRRIGYNAWVRNISIAIGNSSYSLNNILALENKKLEFKDNDLILEHIDWAVNKQKNSQ

SEQ ID NO: 76909 - protein, 362 aa, unidentified
  source 1..362: note = Francisella cf.
  REGION 1..362: note = sp|F4BEN2|QUEG_FRACF Epoxyqueuosine reductase; OS = Francisella cf. novicida (strain Fx1) OX=984129 GN=queG; PE = 3 SV=1
MKLELSLEQWQQVKDFAIRNLNLSSISKADCDLSEYIPYYNKWLENNYHADLEYMVKHGSKRFIPNELVPGTNSVIVATLNYLNRPVNVKTEVKRLRTTSNIADISIYAHGRDYHKVMKKKLQQLGEFIDELTGGHQFRVFTDSAPVLERPLAEKAGLGWQGKSSMLMNKAQGSFFFIGVIYSNLDLSKLPDSPKHQDSCGKCQACIKLCPTGAIQPGKMIDSRKCISYLTIENKGSIPLELRDKIGTRIYGCDDCQLVCPFNNYAPITTEKDFQQRDFLVNKPLLELLAWSEKDFDKYTQGSAIRRIGYAAWIRNIAIAVGNSPFNQDNIQALELKKLEFSDNQLVLEHLDWAINKQKLLS

SEQ ID NO: 76910 - protein, 368 aa, Francisella hispaniensis
  REGION 1..368: note = tr|F4BG12|F4BG12_9GAMM Epoxyqueuosine reductase; OS = Francisella hispaniensis OX=622488 GN=queG PE=3 SV=1
MKVELSLEQWQQVKDFAIRSLNLSSISKADCDLSEYIPHYNKWLENNYHADLDYMVKHGSKRFIPNELVAGTNSVIVATLNYLNRPVNVKTEVKRLRTANNIADISIYAHGRDYHKVMKKKLQQLGEFIDKLTGGHQFRVFTDSAPVLERPLAEKAGLGWQGKSSMLMNKSQGSFFFIGVIYSNLDLSKLPDLPKHQDSCGKCQACIKLCPTGAIQSGKMIDSRKCISYLTIENKGAIPIELRDKIGTRIYGCDDCQLVCPFNNTAPITTEKDFQQRDFLVNKPLLELFAWSEKDFDKYTQGSAIRRIGYAAWIRNIAIAIGNSPFSQANLQALELKKSHFSNNQLVLEHIDWAIKKQKLLSYTDKTL

SEQ ID NO: 76911 - protein, 368 aa, Francisella hispaniensis
  REGION 1..368: note = tr|A0A153JHA4|A0A153JHA4_9GAMM Epoxyqueuosine reductase OS=Francisella hispaniensis FSC454 OX=1088883; GN = queG PE=3 SV=1
MKVELSLEQWQQVKDFAIRSLNLSSISKAHCDLSEYIPHYNKWLENNYHADLDYMVKHGSKRFIPNELVAGTNSVIVATLNYLNRPVNVKTEVKRLRTANNIADISIYAHGRDYHKVMKKKLQQLGEFIDKLTGGHQFRVFTDSAPVLERPLAEKAGLGWQGKSSMLMNKSQGSFFFIGVIYSNLDLSKLPDLPKHQDSCGKCQACIKLCPTGAIQSGKMIDSRKCISYLTIENKGAIPIELRDKIDTRIYGCDDCQLVCPFNNTAPITTEKDFQQRDFLVNKPLLELLAWSEKDFDKYTQGSAIRRIGYAAWIRNIAIAIGNSPFSQANLQALELKKSHFSNNQLVLEHIDWAIKKQKLLSYTDKTL

SEQ ID NO: 76912 - protein, 368 aa, unidentified
  source 1..368: note = Francisella marina
  REGION 1..368: note = tr|A0A5C2C233|A0A5C2C233_9GAMM Epoxyqueuosine reductase OS=Francisella marina OX=2249302 GN=queG PE=3; SV = 1
MKLKLSLEQWQQVQKFATADLGLSSISKSDCDLSEYIPHYDKWIENNYQADLEYMTKHGSKRFVPDELVPGTNSVIVATLNYLNRPVTIKNEVKRLRSQTNIAEISIYAHGRDYHKVMKKKLQKLGEYIDDLTGGHQFRVFTDSAPVLERPLAEKAGLGWQGKSSMLMNKLQGSFFFIGVIYSNLDLSDLPNLPKHQDSCGKCQACIKLCPTGAIQHGKMIDSRKCISYLTIENKGPIPLELRDKIGTRIYGCDDCQLVCPFNNNAPVTTEKDFQQRDFLINKPLLELFSWSKKDFDKYTQGSAIRRIGYDAWIRNIAVGIGNSPYKQENILSLENKKNEFIDNKIILEHIEWALNKQIKLSKIDKRL

SEQ ID NO: 76913 - protein, 125 aa, Francisella noatunensis
  REGION 1..125: note = tr|I2AZ63|I2AZ63_FRANT Uncharacterized Fe-S protein; OS = Francisella noatunensis subsp. orientalis (strain Toba 04) OX=1163389 GN=OOM_0997 PE=4 SV=1
MKLKLSAMQWQEVQKFATDSLGLSSISKADCDLSEYIPYYNKWIENNYHADLEYMVKHGSKRFIPNELVPGTNSVIVATLNYLNRPITIKNEVKRLKSSTDIADISIYAHGRDYHKVMKKTSTIR

SEQ ID NO: 76914 - protein, 147 aa, Francisella noatunensis
  REGION 1..147: note = tr|I2AZ65|I2AZ65_FRANT Putative Fe-S protein; OS = Francisella noatunensis subsp. orientalis (strain Toba 04) OX=1163389 GN=OOM_0999 PE=4 SV=1
MINLRKCISYLTIENRGSIPLELRDKIGTRIYGCDDCQLVCPFNNNTPVTTEKDFQQRDFLISKPLLELFSWSRNNFDKYTQGSAIRRIGYGAWIRNIAIGIRNSPYKQENILALENKKNEFLDKEIVLEHIICALNKQINLSKIDK

SEQ ID NO: 76915 - protein, 362 aa, unidentified
  source 1..362: note = Francisella novicida
  REGION 1..362: note = tr|A0A2L1CJ68|A0A2L1CJ68_FRANO Epoxyqueuosine reductase OS=Francisella novicida OX=264 GN=queG PE=3 SV=1
MKLELSLEQWQQVKDFAIRNLNLSSISKADCDLSEYIPYYNKWLENNYHADLEYMVKHGSKRFIPNELVPGTNSVIVATLNYLNRPVNVKTEVKRLRTTSNIADISIYAHGRDYHKVMKKKLQQLGEFIDELTGGHQFRVFTDSAPVLERPLAEKAGLGWQGKSSMLMNKAQGSFFFIGVIYSNLDLSKLPDPPKHQDSCGKCQACIKLCPTGAIQPGKMIDSRKCISYLTIENKGTIPLELRDKIGTRIYGCDDCQLVCPFNNYAPITTEKDFQQRDFLVNKPLLELLAWSEKDFDKYTQGSAIRRIGYAAWIRNIAIAVGNSPFNQDNIQALELKKLEFSDNQLVLEHLDWAINKQKLLS

SEQ ID NO: 76916 - protein, 366 aa, Francisella philomiragia
  REGION 1..366: note = tr|A0A0E1N5H8|A0A0E1N5H8_9GAMM Epoxyqueuosine reductase OS=Francisella philomiragia OX=28110 GN=queG; PE = 3 SV=1
MKLKLSAMQWQQVQKFATDSLGLSSISKADCDLSEYIPYYNKWIENNYHADLEYMIKHGSKRFVPNELVPGTNSVIVATLNYLNRTIAIKNEVKRLKSSTDIADISIYAHGRDYHKVMKKKLQRLGEYINELTGDHQFRVFTDSAPVLERPLAEKAGLGWQGKSSMLMNKIQGSFFFIGVIYSNLDLSDLPTLPKHQDSCGKCQACIKLCPTGAIQHGKMIDSRKCISYLTIENKGSIPLELRDKIGTRIYGCDDCQLVCPFNNNAPITREKDFQQRDFLINKPLLELFSWTRKDFDKYTQGSAIRRIGYDAWIRNIAIGIGNSPYKPENILSLENKKNEFLDKEIVLEHIKWALNKQINLSKIDK

SEQ ID NO: 76917 - protein, 366 aa, Francisella philomiragia
  REGION 1..366: note = tr|A0A0B6EYX9|A0A0B6EYX9_9GAMM Epoxyqueuosine reductase OS=Francisella philomiragia subsp. philomiragia ATCC 25015 OX=539329 GN=queG PE=3 SV=1
MKLKLSAMQWQQVQNFATDSLGLSSISKADCNLSEYIPYYNKWIENNYHADLEYMIKHGSKRFVPNELVPGTNSVIVATLNYLNRTIAIKNEVKRLKSSTDIADISIYAHGRDYHKVMKKKLQRLGEYINELTGDHQFRVFTDSAPVLERPLAEKAGLGWQGKSSMLMNKIQGSFFFIGVIYSNLDLSDLPTLPKHQDSCGKCQACIKLCPTGAIQHGKMIDSRKCISYLTIENKGSIPLELRDKIGTRIYGCDDCQLVCPFNNNAPITTEKDFQQRAFLINKPLLELFSWTRKDFDKYTQGSAIRRIGYDAWIRNIAIGIGNSPYKPENILSLENKKNEFLDREIVLEHIKWALNKQINLSKIDK

SEQ ID NO: 76918 - protein, 368 aa, Francisella sp.
  REGION 1..368: note = tr|F8G885|F8G885_FRAST Epoxyqueuosine reductase; OS = Francisella sp. (strain TX077308) OX=573569 GN=queG; PE = 3 SV=1
MKLKLSLEQWQQVQKFATTNLGLSSISESDCDLSEYIPHYNKWIENNYQADLEYMTKHGSKRFVPDELVPGTNSVIVATLNYLNRPVAIKNEVKRLRSQTNIAEISIYAHGRDYHKVMKKKLQKLGEYIDDLTGGHQFRVFTDSAPVLERPLAEKAGLGWQGKSSMLMNKLQGSFFFIGVIYSNLDLSDLPNLPKHQDSCGKCQACIKLCPTGAIQHGKMIDSRKCISYLTIENKGPIPLELRDKIGTRIYGCDDCQLVCPFNNNAPVTTEKDFQQRDFLINKPLLELFSWSKKDFDKYTQGSAIRRIGYDAWIRNIAVGIGNSPYKQENILSLENKKNEFIDNKIILEHIEWALNKQIKLSKIDKRL

SEQ ID NO: 76919 - protein, 366 aa, Francisella sp.
  REGION 1..366: note = tr|A0A073A7Q0|A0A073A7Q0_9GAMM Epoxyqueuosine reductase OS=Francisella sp. W12-1067 OX=1385420 GN=queG; PE = 3 SV=1
MKLELTLKQWQKVKNYAVNELGLSSLSKADCDLSEYIPYYNKWIENGYHAELDYMVKHGQKRFVPDQLVPGTNSVIVATLNYLNRPISTKTEVKRLRAPSEIAEVSIYAHGRDYHKVMKKKLQKLGEYIDKITSDHQFRVFTDSAPVLEKPLAEKAGLGWIGKNSMLMNKEQGSFFFIGVIYSNLDLSKLPNTDLKLNECGKCQACIKLCPTGAILPNKMIDSRKCISYLTIENKEAIPLEFRDKIGTRIYGCDDCQLVCPFNNQAPVTTEQDFQQRDFLVNRPLLELFSWSKEDFDKYTQGSAIRRIGYDAWIRNVSIAIGNSPYKHENLLALENKRAEYLDNFLILEHIDWAINKQRACLILVK

SEQ ID NO: 76920 - protein, 176 aa, Francisella tularensis
  REGION 1..176: note = tr|A0A0B3VE41|A0A0B3VE41_FRATU Epoxyqueuosine reductase OS=Francisella tularensis subsp. holarctica; OX = 119857 GN=queG PE=4 SV=1
MSKLPDSPKHQDSCGKCQACIKLCPTGAIQPGKMIDSRKCISYLTIENKGTIPLELRDKIGTRIYGCDDCQLVCPFNNYAPITTEKDFQQRDFLVNKPLLELLAWSEKDFDKYTQGSAIRRIGYAAWIRNIAIAVGNSPFNQDNIQALELKKLEFSHNQLVLEHLDWAINKQKLLS

SEQ ID NO: 76921 - protein, 162 aa, Francisella tularensis
  REGION 1..162: note = tr|A0A0M1U5N7|A0A0M1U5N7_FRATT Epoxyqueuosine reductase OS=Francisella tularensis subsp. tularensis (strain SCHU S4 / Schu 4) OX=177416 GN=queG PE=4 SV=1
MSKLPDSPKHQDSCGKCQACIKLCPTGAIQPGKMIDSRKCISYLTIENKGTIPLELRDKIGTRIYGCDDCQLVCPFNNYAPITTEKDFQQRDFLVNKPLLELLAWSEKDFDKYTQGSAIRRIGYAAWIRNIAIAVGNSPFNQDNIQALELKKLEFSHNQLVL

SEQ ID NO: 76922 - protein, 379 aa, unidentified
  source 1..379: note = Franconibacter pulveris
  REGION 1..379: note = tr|A0A0J8VSS8|A0A0J8VSS8_9ENTR Epoxyqueuosine reductase OS=Franconibacter pulveris OX=435910 GN=queG; PE = 3 SV=1
MSAPLDLNQLARDIKQWGAELGFQQVGITDTDLSASEGALQAWLDKQYHGEMEWMARHGMMRARPHELLPGTLRVISVRMNYLPANAAFARTLKDPSLGYVSRYALGRDYHKLLRNRLKKLGERIQQQCASLNFRPFVDSAPLLERPLAEKAGLGWTGKHSLILSRDAGSFFFLGELLIDLPLPVDKPVEEGCGKCVACMTICPTGAIVEPYTVDARRCISYLTIELEGAIPEAFRPLIGNRIYGCDDCQLICPWNRFSQLTDEEDLTPRQALHAPKLVELFGWSEAHFLKVTEGSAIRRIGHLRWLRNIAVALGNAPWDEANLQALEKRKGEHPLLDEHIEWAIAQQIARRNANVIEVQLPQKQRLVRVVEKGLPRDA

SEQ ID NO: 76923 - protein, 353 aa, Frankia sp.
  REGION 1..353: note = tr|A0A4R1DBN8|A0A4R1DBN8_9ACTN Epoxyqueuosine reductase OS=Frankia sp. BMG5.11 OX=222540 GN=queG PE=3; SV = 1
MVNRPATDDLRVALVEQARAEGFAAIGIASAAPDRPRAEQLDLWLGDDRHGTMDWMATRVAERASPQTLWPEANSVIALGMSYAPANDPLALAGESDKGRISVYAQGRDYHDTVKKALKRLARWLVAQAPGEQVKVFVDTAPVMEKPLGQAAGLGWQGKHTNLVSRADGSWLFLGAIYTTIDFAPDAAHQPRCGSCSACLDACPTAAFPAPFQLDARRCISYLTIENAGPIPHEFRKAIGNRIYGCDDCLAVCPWNRFAQSAAANAAFLPRAELAAPRLAELLALDDAAFRRLFSGSPIKRIGRNRFVRNCLIAAGNSADPTLVEPVSRLARDADPVVAEAAQWALRELTAVP

SEQ ID NO: 76924 - protein, 400 aa, Frateuria aurantia
  REGION 1..400: note = tr|H8L0U0|H8L0U0_FRAAD Epoxyqueuosine reductase; OS = Frateuria aurantia (strain ATCC 33424 / DSM 6220 / NBRC 3245 / NCIMB 13370) OX=767434 GN=queG PE=3 SV=1
MQPLAAEARRNDGRGRANRPIRSRACHPLPTIDGMSLASAIDYHHLARRIKYWAGELGFADTGIADVALGDDEGHLQRWLDAGFHGEMDYMARHGMKRARPAELEPGTRRVISVRMDYIPPGLPHAWEVIADPAAGYVARYALGRDYHKLMRNRLQKLAERIREVTGDFGYRAFVDSAPVLEKALARNAGLGWIGKHTVVINRRAGSYFFLGELYTDLPLPVDAPASAHCGSCSRCIDICPTRAIVAPYRLDARRCISYLTIELQGSIPEPLRAPIGNRIFGCDDCQLVCPWNKFAQLSTEPDFAPRHQLDGPRLIDLFSWSEATFLDRTQGMAIRRTGHAGWSRNIAVALGNATPTPAVWSALMSRALDPSDLVREHVQWALARQRQLQQTLSLRFRPA

SEQ ID NO: 76925 - protein, 358 aa, Frateuria sp.
  REGION 1..358: note = tr|A0A0Q9PTN9|A0A0Q9PTN9_9GAMM Epoxyqueuosine reductase OS=Frateuria sp. Soil773 OX=1736407 GN=queG PE=3; SV = 1
MAGMPAAAPPDYDALARDIKRWARELGFADAGISGVALGEDEQHLRRWLEDGHHGEMEYMARHGDKRSRPAELEPGTQRVISVRMDYVPPGTRNAWEVIRDGEAGYVARYALGRDYHKLMRNRLQKLAERIHAAVGDFGYRAYVDSAPVLEKALARNAGLGWIGKHTVLINRRAGSYFFLGELYTDLPLPVDEAATAHCGSCRRCIDICPTQAIVGPYRLDARRCISYLTIELRGSIPEELRAPIGNRIFGCDDCQLICPWNKFAQDAAEPDFAPRHRLDGAKLVELFGWSEDEFLKRTEGMAIRRTGYEGWLRNIAVALGNAPASAAVRDALRARLDDPSAIVREHVAWALARQQAA

SEQ ID NO: 76926 - protein, 366 aa, Frateuria terrea
  REGION 1..366: note = tr|A0A1H6YID2|A0A1H6YID2_9GAMM Epoxyqueuosine reductase OS=Frateuria terrea OX=529704 GN=queG PE=3 SV=1
MSVVPSPDYALLARDIKQWALELGFAQAAISGVELGEDETHLEHWLGEGLHGEMDYMARHGTRRSRPAELEPGTLRVISVRMDYRAPGTRHAWDVLNDGEAGYVARYALGRDYHKLMRNRLQKLAERIRAAIGEFGYRAYVDSAPVLEKALARNAGLGWIGKHTVLINKDAGSYFFLGELYTDLPLPVDAPATAHCGTCTRCIEVCPTQAILGPYRLDARRCISYLTIELKGSIPEELRAPMGNRIFGCDDCQLVCPWNKFAQDATEPDFAPRHSLDGAKLAELFGWSEQEFLRRTEGMAIRRTGYEGWLRNIAVALGNAPSSAQVVATLRTREHAASRIVREHVAWALARHGERILEGGPQPAAS

SEQ ID NO: 76927 - protein, 324 aa, unidentified
  source 1..324: note = Fremyella diplosiphon
  REGION 1..324: note = tr|A0A1Z4MDF2|A0A1Z4MDF2_MICDP Epoxyqueuosine reductase OS=Fremyella diplosiphon NIES-3275 OX=1973485; GN = queG PE=3 SV=1
MNSSGITTTDVVKKKAQELGFHKVGIAAVDGVDETAAQRLQAWLALGYNADMAWMANPKRQDIRLIMPEARSLICVALNYYTPHQRPTGEEYGKISRYGWGRDYHKVMHKRLKALNNWVQSLSENVQARYYADTGPVPDKLWAQKSGIGWIAKNGNVITREYGSWVFLGEIITNLELECDRPATEHCGTCTRCLEACPTGAITQPYVVDANRCIAYHTIENRAEQLPPNVKPHLQGWVAGCDICQDVCPWNQRFAKSTDVEEFNPYPGNLAPKLLELAEISEEEWEQQFTASALRRIKPEMLRRNARANLDASRQQNDSDSDYF

SEQ ID NO: 76928 - protein, 306 aa, unidentified
  source 1..306: note = Frisingicoccus caecimuris
  REGION 1..306: note = tr|A0A4V2SE21|A0A4V2SE21_9FIRM Epoxyqueuosine reductase OS=Frisingicoccus caecimuris OX=1796636; GN = EV212_10198 PE=4 SV=1
MVDLYRLAEELNIDDIAVCHAEKFNSVEQLLKKDVELGILPPFVETDIHRRVCPEETLARAKSFIVILEHYEPSVYKVREGLYGNISPAASGEDYHRIVRRKLSGLMSALEAADPDGRRLAYVDNSPFSEKHVAIRAGLGRLMRNGLFYSRKFGSRCYIGLILSDRPADFYGLPFRRDDEDPWFERCRTCSACQKFCPGKAITEAGMNSYRCVSYLTQKKEPLSPEEERIMGRQIYGCDVCQNVCPLNRPTVPAGYTTGTEVSLEELLTMSNKQFKMHYQATAAGWRGKKQLQKNAEIVLKNIMER

SEQ ID NO: 76929 - protein, 376 aa, unidentified
  source 1..376: note = Frisingicoccus caecimuris
  REGION 1..376: note = tr|A0A4R2LW21|A0A4R2LW21_9FIRM Epoxyqueuosine reductase OS=Frisingicoccus caecimuris OX=1796636; GN = EV212_1083 PE=4 SV=1
MNKQELTLKIKYKAYELGFARVGIAPADDFSEYEEEFRSRIDDYQFLVGDAIDPLKGSRPKTVMPEGKSIVALVWDYSKTIYPEKLVQSFGRAYLSRTYLPKENSEHGARLRVFTDYMESLGLHIAPGLHMPERNACARAGITNYGKNNFAYAEGCGSYIILRAFLVDQELVYDKPTVECGCPPNCHLCIDSCPTGALYAPGKLKPEKCLLYNQMRGTYNMEVRDKAGTSIHGCDICQAVCPRNKKVAAQANRRDHFLELLAEDFDLEKVLLLTPDYYEKVIYPIAYNYIHKLELFQRNAAIALGNTGDQAHVPALMQALETCKPRVQGAAAWALGKIGGKEAEAALKRQLMQENTDERTKAEILHALEMCAVKAF

SEQ ID NO: 76930 - protein, 342 aa, unidentified
  source 1..342: note = Fuerstia marisgermanicae
  REGION 1..342: note = tr|A0A1P8W9H5|A0A1P8W9H5_9PLAN Epoxyqueuosine reductase OS=Fuerstia marisgermanicae OX=1891926 GN=queG; PE = 4 SV=1
MSETEQLSALLKSQGKAIGFNLVGIAPAVSPAGFHPLLEWIGNGYHADMDWIPRRENAYQHPNGVLPNTRSVIVVALNYHSQPPASDTARIARYAWGTEDYHSLMRRKLKLVTETLHQHQPHDRTRVIIDTAPLLERDFAQLAGIGWRGKNTMLISREIGSWFFLGAILTTAELNYDTPFETEHCGTCTRCLDACPTDAFPEPHVLDANKCISYLTIERRDKPVPDELKNGVGNWVFGCDICQEVCPWNRFAPNDCLPEFQPVPHLHNLQIADLLSLTESQFNFQFANTPLERTGRDVIIRNAAIVAANQRDPAYLPLLQKLQTDSSPLVRDAANWAILAIQ

SEQ ID NO: 76931 - protein, 396 aa, unidentified
  source 1..396: note = Fulvimarina manganoxydans
  REGION 1..396: note = tr|A0A1W2CG56|A0A1W2CG56_9RHIZ Epoxyqueuosine reductase OS=Fulvimarina manganoxydans OX=937218 GN=queG; PE = 3 SV=1
MTDAATIGLKAFLTEDARRLGFSALGVAPGEGDGLAGERLAEFVEAGRHGTMEWMPETLDRRRSAKALWPEVRSIVVLAMNYGPDEDPLAILDRPDRGAISVYARHRDYHDVIKGKLKELAGRLVAEARRRGLGDHEVKVFVDTAPVMEKPLGAMAGLGWQGKHTNLLSRDFGSWLFLGSIFTTLPLEADEPASDRCGSCRACLDACPTDAFPAPYQLDARRCISYLTIETKHVIPRPLRKAMGNRIYGCDDCLAVCPWNKFAKQAREAKLVAREDLKAPRLTDLLALDDAAFRQLFSGSPIKRIGRAKFVSNCLVAAGNSGDPGFLPHIEALLSDDQPLVRAMAVWALAQLSPHDALQRSAPALDREGDDIVRDEWQAAARWKSDMRETASERME

SEQ ID NO: 76932 - protein, 347 aa, Fulvimarina pelagi
  REGION 1..347: note = tr|Q0G221|Q0G221_9RHIZ Iron-sulfur cluster-binding protein OS=Fulvimarina pelagi HTCC2506 OX=314231; GN = FP2506_01380 PE=4 SV=1
MAWMPKTQKRRRSARMLWPKVKSILVLAMNYGPEDDPLAVLDRPDRGGISVYARHRDYHDVIKGKLKELAGRLIAEARKAGLGDHDAKVFVDTAPVMEKPIGAMAGLGWQGKHTNLLSRDFGSWLFLGSIFTTLDLPVDEPVADRCGSCTACLDICPTDAFPAPYQLDARLCISYLTIETKRPIPRDLRPKMGNRIYGCDDCLAVCPWNKFAKKASEAKLIAREDLKAPRLADLLVLDDNGFRAFFSGSPIKRIGRDKFVSNCLIAAGNSGDSHFLPIVRRLLADPSSCVREMAVWAFGRLAEPAEVLSAAGEAQDRERDEQVREEWQAVIAMIEERSTERAGRGTV

SEQ ID NO: 76933 - protein, 385 aa, Fulvimarina sp.
  REGION 1..385: note = tr|A0A2E1H7L7|A0A2E1H7L7_9RHIZ Epoxyqueuosine reductase OS=Fulvimarina sp. OX=1969479 GN=queG PE=3 SV=1
MTTAALASLKTFLQADARRLGFASAGIAEASGNVLAGDRLAEFVAAGRHGTMGWMPQTLDRRRSPRDLWPEVRSIVVLAMNYGPDEDPLEILQHPDRGAISVYARHRDYHDVIKGRLKELAGRLVARAREAGLGDHDAKVFVDTAPIMEKPLGELAGLGWQGKHTNLLSRDFGSWLFLGSIFTTLDLPADEAGRDRCGSCRACLTACPTDAFPAPYQLDARRCISYLTIETRTVIPREFRAAMGNRIYGCDDCLAVCPWNKFAQDASEAKLIAREDLKAPRLADLLGLDDPGFRGLFSGSPIKRIGRDKFVSNCLIAAGNSGRAEFLPAAQGLLSDDAPLVRAMAVWAIGRLDRGEALRLRAAALDKEADETVRSEWHALDESQD

SEQ ID NO: 76934 - protein, 399 aa, Fulvimarina sp.
  REGION 1..399: note = tr|A0A371X665|A0A371X665_9RHIZ tRNA epoxyqueuosine(34) reductase QueG OS=Fulvimarina sp. 85; OX = 2293836 GN=queG PE=4 SV=1
MGARLKRHLAEGAERLGFSGFGIAPGTGDGVAGGRLKTFVAEGRHGTMGWMPETLERRRSAKALWPDVRSILVLAMNYGPGEDPLAILERADRGAISVYARHRDYHDVIKGKLKELASRLIAEAWREGLGAHDAKVFVDTAPVMEKPLGALAGLGWQGKHTNLLSRDFGSWLFLGSIFTTLDLPHDEPATDRCGSCTACLDICPTNAFPAPYQLDARACISYLTIETKRVIPRSLRAKMGNRIYGCDDCLAVCPWNKFAEAAREAKLIAREDLKAPRLDDLLALDDKAFRALFSGSPIKRIGRGKFVSNCLIAAGNSGDRAFLPQIRTLLGDGEALVRAMAVWAFAQLTSDADLLREAGPARDSETDEMVIEEWQAAMTERGTGGQAPTGTPTDRGERR

SEQ ID NO: 76935 - protein, 353 aa, Fulvimonas soli
  REGION 1..353: note = tr|A0A316IIA3|A0A316IIA3_9GAMM Epoxyqueuosine reductase OS=Fulvimonas soli OX=155197 GN=queG PE=3 SV=1
MTIAAPDYAALARDIKRWARELGFAEAGISGVDLGEDERHLERWLGDGLHGEMAYMARHGRKRSRPAELEPGTRRVISVRMDYVPPGTRNAWEVLGDAEAGYVARYALGRDYHKLMRHRLQKLAERIRAAVGEFGFRAYVDSAPVLEKALARNAGLGWIGKHTVLINRRAGSYFFLGELYTDLPLPVDEPATAHCGSCRRCLDVCPTRAIVAPYRLDARRCISYLTIELKGSIPEELRAPIGNRIFGCDDCQLVCPWNKFAQEAAEPDFAPRHRLDGAKLVELFGWSEEEFLRRTEGMAIRRAGYEGWLRNIAVALGNAPRSDAVRAALRARSGHPSAVVREHVAWALARQGG

SEQ ID NO: 76936 - protein, 317 aa, unidentified
  source 1..317: note = Fulvivirga imtechensis
  REGION 1..317: note = tr|L8JR24|L8JR24_9BACT Epoxyqueuosine reductase; OS = Fulvivirga imtechensis AK7 OX=1237149 GN=queG PE=3 SV=1
MHISRNTAFIKSKAKELGFMYCGISKAEFLTEEAPKLDEWLKKGFHGKMSYMENHFDKRLDPTELVPGAKSVVTLLYNYFPKEDIAGNNSYKIAKYAYGKDYHFVIKEKLKDFMTAIHTEIGEVGGRAFVDSAPVMERAWAKKSGAGWIGKNSLLLNKQSGSFFFLAELIIDLELEYDGPVKDYCGSCTACMDHCPTDAIPEPYVVDGSRCISYLTIELKDEIPNNFKGQFENWAFGCDICQDVCPWNRFSKPHNEPAFDPHEQLKSMNKNDWQEMTYEVFNEIFRKSAVKRTKYEGLMRNIKFIRENPVATNSNNE

SEQ ID NO: 76937 - protein, 311 aa, Fulvivirga sp.
  REGION 1..311: note = tr|A0A553F0Y2|A0A553F0Y2_9BACT Epoxyqueuosine reductase OS=Fulvivirga sp. M361 OX=2594266 GN=queG PE=3; SV = 1
MGRHSAKYSNTALVKKTAAELGFMYCGISKAEFLEDEAPRLEKWLKQNHHGEMAYMANHFDKRLDPTQLVPGAQSVVSLAYNYFPKQDLAKKDHFKIAKYAYGKDYHFVIKDKLKAFLNILTEQIGEINGRAFVDSAPVMERQWAQKSGLGWIGKNTLLLNKQSGSFFFLAELITDLELEFDGPVKDYCGTCTACIDACPTEAIPQPYIVDASRCISYLTIELKDNIPDTFKGKFDNWVFGCDICQDVCPWNRFSKPHSEPAFSPHDQLAELNTVDWEEMTEDVFNTLFRKSALKRTKFTGLKRNISFSKK

SEQ ID NO: 76938 - protein, 387 aa, Fusibacter sp.
  REGION 1..387: note = tr|A0A1B6BID0|A0A1B6BID0_9FIRM Epoxyqueuosine reductase QueG OS=Fusibacter sp. 3D3 OX=1048380; GN = F3D3_4121 PE=4 SV=1
MDQNMNNNKANANTNYGTNIRALFAQMDNILIRGQLSYYDFLYMGFDELKKMSVHERNLLKHIKLNPFKTEFEPEPDQRFFFRMLEAKVNSDESVLLLSVALPYPRQRAEVSKSKGFIEGSSWYYDYHTILRARMNQILVMFSEIGRDAVKESGCFVDTSDYIDRELAFLCGLGNYGKNQMLIHPDLGTQFHIGHLYIILEERMDPLLSKMESEIELDGRRLYSGCQNCDKCVKACPAEICGTIQMNRLECISYLTQTKKTLTFEEMKMMRNKLYGCDICQNVCPTNLTQNKSGVNSLNIDHWQLNDFEGIELLETLKLSQSAFKRQYGDRGFAWRGVKVFKRNALIAMGNSGDNIFYEKLKMFSELKEDDFLKSYYEYALRETKPD

SEQ ID NO: 76939 - protein, 321 aa, Fusibacter sp.
  REGION 1..321: note = tr|A0A4Q2A3W6|A0A4Q2A3W6_9FIRM Epoxyqueuosine reductase OS=Fusibacter sp. A1 OX=2283630 GN=DWB64_01915; PE = 4 SV=1
MDAGWVRSELERFVEGDFDVSFVDVRTLERYAQPAMASEEWLSRNSADYHVPDAKWAIVIARPYALCLTKREIGKGRLASTGRELDYHEDLESILDTLAGEMKKHYVDFNHKLFIDKHGYDDRKIAHASGLGFWGKHNLLIHEAYGSAFNIGYLLTDIELDAPAPKVRSSECGSCTKCIRGCPNGALVEGRPLDTSKCRSALNQKKGPLDSDQMMLISDWVYGCDICQWCCPYNDKVKVDGNLNLDLKSMMMESKSTFKKNHLTRAYGYLGASRLKRNAMVILARQYGIEALDDYFETIQRIPMLKDQYEILKTWSLKSVK

SEQ ID NO: 76940 - protein, 282 aa, unidentified; identical to SEQ ID NO: 76455
  source 1..282: note = Fusicatenibacter sp.
  REGION 1..282: note = tr|A0A174T991|A0A174T991_9FIRM Epoxyqueuosine reductase OS=Fusicatenibacter sp. 2789STDY5834925; OX = 1806509 GN=queG PE=4 SV=1

SEQ ID NO: 76941 - protein, 355 aa, unidentified
  source 1..355: note = Fusobacteriia bacterium
  REGION 1..355: note = tr|A0A1W9TK73|A0A1W9TK73_9BACT tRNA epoxyqueuosine(34) reductase QueG OS=Fusobacteriia bacterium 4572_132 OX=1971640 GN=B6I28_03300 PE=4 SV=1
MKKLRLSKKNLDWLEIFIKTNKIGEIMLEKILLKYKIDTFGVTNTTDFSYLEKIFFDKKDKGYFANFDEHDFQKRANLDNILPNIKSIISIAFPYDTQEKINNSYNYNISKYAIRKDYHLTVKKILNDIIYDLKNIFPNNKFEIFVDSNPLFEKEIAQKSGLGFYGKNSLLYTKKYGSFIFLGEIITDLFIPGKNEKFITNCNTCTICADACPNNAIHDGILDASNCIAYLTTTKENITSSKIYNNFWGCDICQDVCPLNIKKEKSPLNNFSVIHNIFLPLEDIIFMSNKKLQAYYRESAIGWTGPNILKRNAIILMGNSSEKKYIPFLENFIKLTTNDMLFNYAQKSLKQLNNK

SEQ ID NO: 76942 - protein, 314 aa, Fusobacterium periodonticum
  REGION 1..314: note = tr|A0A2G9EGQ7|A0A2G9EGQ7_9FUSO 4Fe-4S ferredoxin; OS = Fusobacterium periodonticum OX=860 GN=CTM71_06830 PE=4; SV = 1
MEQLANKIREKALEYGFSNCGIISVDKMEGFKKLYRKRIFKAPTSWLVYRTLKLSQTRKRFPWAKSVIVCTYWLGKFKFPKELQGKYAKAFILSQNNEKINKDYKEREKFEKWLEENGIRYEGGDKLGHGSIGSLRYAAVTAGLGIIRKNNFFYDERGSYVELVAYVIDKECELIHKNNLKKCSPKCDLCQKACQTKALKAPNTMEPLKCISFWTTFGKGAVPPNLKKEMFREWICGCDDCQDVCPFNRRHNWEVGEDLEGLAELSSNLMAEKIKDASDEFLINNVASLTDNHILAKDVSTLRKNAKRALSYKK

SEQ ID NO: 76943 - protein, 308 aa, Gaetbulibacter sp.
  REGION 1..308: note = tr|A0A2G5GNN0|A0A2G5GNN0_9FLAO Epoxyqueuosine reductase OS=Gaetbulibacter sp. 4G1 OX=1891971 GN=queG; PE = 3 SV=1
MVKSKANHTKLIKTEAKRLGFLSCGISKADFLEEEAPRLEKWLKNNMHGEMHYMENHFDKRLDPTKLVEGSKSVVSLLLNYYPSQEQIASSYKLSKYAYGTDYHFVIKDKLKSLLNFIQDEIGEVSGRAFVDSAPVLDKAWAAKSGLGWIGKHSNLLTQQVGSFYFIAELIIDLELDYDMPTTDHCGTCTACIDACPTEAITEPYVVDGSKCISYFTIELKENIPTEFKGKMDDWMFGCDVCQDVCPWNRFSKSHNEPLFNPHPELLSMTKKDWEEITEDTFKKVFQKSAVKRTKFSGLKRNINFLKD

SEQ ID NO: 76944 - protein, 308 aa, Gaetbulibacter sp.
  REGION 1..308: note = tr|A0A2G5KW43|A0A2G5KW43_9FLAO Epoxyqueuosine reductase OS=Gaetbulibacter sp. 5U11 OX=1889780 GN=queG; PE = 3 SV=1
MLDNKSKYTTQIKAEAKRLGFLSCGISKAGFLEKEAPRLENWLNKNMHGQMSYMQNHFDKRLDPTKLVEDSKSVISLLLNYYPSEVQKDTKAPKLSKYAYGQDYHFVIKEKLKELTHYIQQEIGDVSGRAFVDSAPVLDKAWAAKSGLGWIGKHSNLLTQQVGSFYFIAELIIDLDLEYDSIVTDHCGTCTACIDACPTQAITEPYVVDGSKCISYFTIELKEQLPTTMKGKFDHWMFGCDVCQDVCPWNKFSKPHSEPLFNPHPDLLDMTKKDWEEITEEVFKNLFKKSAVKRTKFSGLKRNIDFLK

SEQ ID NO: 76945 - protein, 307 aa, unidentified
  source 1..307: note = Galbibacter marinus
  REGION 1..307: note = tr|K2QNT5|K2QNT5_9FLAO Epoxyqueuosine reductase; OS = Galbibacter marinus OX=555500 GN=queG PE=3 SV=1
MDLRAKHTQWIKNQAKALGFMSCGISKADFLEQEAPRLEKWLSESKNGQMQYMENHFDKRLDPRKLVEGSKSVISLLLNYYPSEIQKDKQAPKISKYAYGVDYHFVIKDKLKELLSLMQDEIGDVHGRAFVDSAPVLDKAWAERSGLGWRGKHSNILSKQVGSFFFIAELIVDLELEYDSPATDHCGSCTACIDACPTQAITEPYVVDGSKCISYFTIELKEQIPTEFSGQFDDWIFGCDVCQDVCPWNRFSKAHNEPLFNPHPKLLDMTKKDWEEITEDVFREIFKKSAVKRTKFSGLRRNIEFLR

SEQ ID NO: 76946 - protein, 409 aa, Gallaecimonas pentaromativorans
  REGION 1..409: note = tr|A0A3N1P464|A0A3N1P464_9GAMM Epoxyqueuosine reductase OS=Gallaecimonas pentaromativorans OX=584787; GN = queG PE=3 SV=1
MTSQDVLMSLPTARRRAQICYPAPCNTGGAVTDYQQLANDIKAWGRELGFAQVGITDTDLKSHEAALQAWLDAGHHGDMDYMARYGMLRARPQELLPGTLRVISARMDYLPPKARFGEILGNPEKGYVSRYALGRDYHKLLRNRLKKLGEKIQAALGEYQFRPFVDSAPVLERPLAEKAGLGWVGKHSLLLNPEGGSFFFLGELLVDLPLPVDPPFGEEKCGKCVACMTICPTQAIVEPYVVDARRCISYLTIELKGPIPEPFRPLIGNRIYGCDDCQLICPWNRFAHLSSEPDFAPRAPLHAPDLLALWAWDETTFLKVTEGSPIRRIGFEHWQRNLAVALGNAPYSLDIIAALEARLEGASELVAEHILWALGQQRQKPQEGDGSGKVGQKKARLVRAVEKGLPDSA

SEQ ID NO: 76947 - protein, 378 aa, unidentified
  source 1..378: note = Gallaecimonas xiamenensis
  REGION 1..378: note = tr|K2JRQ0|K2JRQ0_9GAMM Epoxyqueuosine reductase; OS = Gallaecimonas xiamenensis 3-C-1 OX=745411 GN=queG PE=3; SV = 1
MIDYQQLADDIKGWGQELGFQQVGITDTDLTSHEAALQAWLDAGHHGDMDYMARYGMLRARPTELLPGTLRVISARMDYLPPKARFGEILGDGNKGYVSRYALGRDYHKLLRNRLKKLGERIQQACGDYQFRPFVDSAPVLERPLAAKAGLGWVGKHSLLINPQGGSFFFLGELLVDLPLPKDPPADADKCGKCVACMTICPTQAIVEPYVVDARRCISYLTIELKGAIPEPLRPLIGNRIYGCDDCQLICPWNRFAHLSVEPDFAPRSALHGPQLLDLWQWDEARFLKITEGSPIRRIGFESWQRNIAVALGNAPHSQAVIEALEHKLPQLSPLVAEHAQWALGQQRQKAQGQPAGKSGQQKARLVRAVQKGLPDSA

SEQ ID NO: 76948 - protein, 357 aa, unidentified
  source 1..357: note = Gallionella capsiferriformans
  REGION 1..357: note = tr|D9SDS5|D9SDS5_GALCS Epoxyqueuosine reductase; OS = Gallionella capsiferriformans (strain ES-2) OX=395494; GN = queG PE=3 SV=1
MQNRIPQSGQYDQLAGNIRIWAHELGFQAAGITDVDLSSAEAGLEAWLTRGFHGEMDYMAKHGVKRSRPADLVPGTVRVISLRMNYWPDEAREGFEVLGQGERAYISRYALGRDYHKVLRKRLALLADKIRGEVAEFDGRVFTDSAPVMEVALADKSGLGWRGKHTLLLTRDQGSWFFLGEIYLNLPLPVDAPVAAHCGSCDACMRICPTQAIIAPYRLDARRCISYLTIELKGPIPTEFRPLLGNRIYGCDDCQLACPWNRFAKMTVEADFAIRHHLDDVGLAELFAWDEAQFTERFAGSAIYRIGHEQWLRNIAVALGNAPASEQVRAALQSRMNHPSELVREHVQWALAQQPES

SEQ ID NO: 76949 - protein, 364 aa, Gallionella sp.
  REGION 1..364: note = tr|A0A3D2H637|A0A3D2H637_9PROT Epoxyqueuosine reductase OS=Gallionella sp. OX=2052161 GN=queG PE=3 SV=1
MQNRIPQSGQYDQLAGKIRIWAHELGFQAAGITDVDLSCAEAGLEAWLAQGFHGEMDYMAKHGVKRSRPADLVPGTVRVISLRMNYWPGEARDGVEVLGQGECAYISRYALGRDYHKLLRKRLALLADRIRGVVAEFDGRVFTDSAPVMEVALAGKSGLGWRGKHTLLLTRNQGSWFFLGEIYLNLPLPVDVPVAAHCGSCDACIRICPTQAIIAPYLLDARRCISYLTIEFKGSIPPEFRPLLGNRIYGCDDCQLVCPWNRFAKVTVEADFAIRHQLDDVGLAELFAWDEAQFREKLAGSAIHRIGHEQWLRNIAVALGNAPASEQVRAALQSRVNHPSALVREHVEWALAQQLNQHADFDVK

SEQ ID NO: 76950 - protein, 356 aa, Gallionella sp.
  REGION 1..356: note = tr|A0A3D2NNI6|A0A3D2NNI6_9PROT Epoxyqueuosine reductase OS=Gallionella sp. OX=2052161 GN=queG PE=3 SV=1
MQNGNPQSEQYVELAENIRAWARELGFQAVGITDTDLADAETDLLEWLAHGFHGDMDYMAKHGPKRSHPAELVPGTLRVISVRMNYLPAARDSEKVLQQGERAFISRYALGRDYHKVIRHRLAKLAERIRAAVAEFDGRVFTDSAPVLEVALANQAGQGWRGKHTLLLTREHGSWFFLGEIYVNLPLPVDKPQAEHCGSCQRCITICPTQAIIAPYQVDARRCISYLTIELKGNIPVELRPLIGNRIYGCDDCQLVCPWNSFAQTSVEPDFAVRHGLDDVGLVALFAWDEAEFKSKLAGSPIHRIGYEQWLRNIAVALGNAPKNAAIVAALQARSEHPSERVREHVKWALVRQGIM

SEQ ID NO: 76951 - protein, 325 aa, unidentified
  source 1..325: note = Gallionellaceae bacterium
  REGION 1..325: note = tr|A0A521PGJ6|A0A521PGJ6_9PROT tRNA epoxyqueuosine(34) reductase QueG (Fragment); OS = Gallionellaceae bacterium OX=2052162 GN=queG PE=3 SV=1
MPAKATQTKKSDPIWLSARIKEEAQRLGFALVGISPVRTAVHEKSFAQWLRKGLGGELGYLQRTEELRRDPGKLVPWALSVVSVGMNYYAPMPRPEGNDGSTGWISRYAWGDDYHDLVRERLGSLLEKIRRVYPEPVEGKAFVDSGPVLERDIAGVAGIGWIGKNTHLISPRRGSWFFLGELFLSVEMAYDRPIRDRCGKCDLCLKACPTAAFVGPYILDARRCISYLTIELKGAIPNHLRPLMGNHIFGCDICQEVCPYNVKAETTGEEAFLPREGLYAPELIPLLSLSEEEFRRRFRGSPILRAKRRGFLRNVAVALGNLKSR

SEQ ID NO: 76952 - protein, 370 aa, unidentified
  source 1..370: note = Gallionellaceae bacterium
  REGION 1..370: note = tr|A0A2H0NKX4|A0A2H0NKX4_9PROT Epoxyqueuosine reductase OS=Gallionellaceae bacterium CG11_big_fil_rev_8_21_14_0_20_60_62 OX=1974012 GN=queG; PE = 3 SV=1
MPAYPTSAMIRCMQTNVPHVDLVELAARIKTWGKALGFQLVGIGDTELGAAETHLLQWLADGRHGAMDYMAKHGAKRARPAELLPGTLRVISLCMNYYPENSRDTQALLADGERAFISRYALGRDYHKVLRHRMQQLAQQIIAAAPAASCRVFTDSAPVLEVELAHKAGLGWRGKHTLLLSREHGSYFFLGEIFINLPLPVDTAEGNHCGSCRACLDICPTQAITAPYQLDARRCISYLTIELKGSMPPELRPLIGNRIYGCDDCQMVCPWNRFAQAADEEDFAVRNRLDDVSLVDLFGWSEAEFRARLAGSAIYRIGHEQWLRNIAVALGNAPTTAEVVNALQQRAADPSELVREHVAWARQRHAPATG

SEQ ID NO: 76953 - protein, 367 aa, unidentified
  source 1..367: note = Gallionellales bacterium
  REGION 1..367: note = tr|A0A258ZK49|A0A258ZK49_9PROT Epoxyqueuosine reductase OS=Gallionellales bacterium 24-53-125 OX=1970510; GN = queG PE=3 SV=1
MWFMQNVLPQEINFETLSTRIKQWGAELGFQAVGISDTSLDVAEVRMQQWLAHGYHGTMDYMAKHGSKRSRPAELIPGTLRVISVRMNYYPPGTSDAWEVIKDGERAYISRYALGRDYHKVLRKRLEQLAQKIRTVADGSACRVFTDSAPVLEVALAEKAQLGWRGKHTLLLTREHGSYFFLGEIFTDLPLDIDAKNAENASPKNHCGSCTACLDICPTQAIVAPYQVDARRCISYLTIELKGSIPLEFRKMMGNRIYGCDDCQLACPWNRFAQTSLEPDFAARLGLDNISLAELFAWDEATFQRNFSGSAVYRIGHEQWLRNIAVALGNAPASDEVLNVLRTRLLHQSALVREHAEWAIKQHEHAA

SEQ ID NO: 76954 - protein, 352 aa, unidentified
  source 1..352: note = Gallionellales bacterium
  REGION 1..352: note = tr|A0A1G0FB28|A0A1G0FB28_9PROT Epoxyqueuosine reductase OS=Gallionellales bacterium RIFOXYB12_FULL_54_9; OX = 1798258 GN=queG PE=3 SV=1
MEGGSPDFHRLALQIKHWAVELGFQQAGIAGIDLSREEGFLQAWLNEGRHGEMEYMARHGLKRSRPAELVPGTLSVISVRLDYLPPASRSTKTLADPVRAFISRYAQGRDYHKLMRDRLQRLAERIQAEIGPFGYRAFSDSAPVLEKALAQKAGLGWIGKHTNLINPKAGSWFFLGELYTSLPLPPDSPALPHCGRCTACMDICPTRAIVAPFELDARRCISYLSIELPGPIPLELRPLLGNRIYGCDDCQLICPWNRFARPTGERDFHPRQGLDRAGLIDLFGWNETEFLQRLEGSPIRRIGHQRWLRNIAVALGNAPKSEQTRTALLERTEDPSELVREHVAWALARQTN

SEQ ID NO: 76955 - protein, 372 aa, unidentified
  source 1..372: note = Unknown
  REGION 1..372: note = tr|I2JIZ3|I2JIZ3_9GAMM Epoxyqueuosine reductase; OS = gamma proteobacterium BDW918 OX=1168065 GN=queG PE=3; SV = 1
MCKIPDYRSAQISPGTLMTQSSTDLDLLAQQIKDWGREFGFAHIGISPASNEAHAQRLREWLAKQYHGDMAYMAEREGLRGEAAELHSGTIRVISARMDYLPDAENMDAVLGNPDKAYISRYALGRDYHKLIRKRLSQLAGKISAVAGGHHRAFVDSAPVLERGFAEQAGLGWIGKNSMLINSKAGSWFFLGEIYTDLPLPVDPPQETGHCGSCRACLDDCPTGAIVAPYQVDARRCISYLTIELKTSIPEELRPLMGNRVFGCDDCQLVCPWNKFAQATAEADFSPRHQLDNSDLIELFLWNEETFLKNTEGSAIRRIGYQHWLRNLAVGLGNAPASSAAISALKQQRPSAESMAREHIDWAIGQLQGKLV

SEQ ID NO: 76956 - protein, 360 aa, unidentified
  source 1..360: note = Unknown
  REGION 1..360: note = tr|A0A421K1A2|A0A421K1A2_9GAMM Epoxyqueuosine reductase OS=gamma proteobacterium symbiont of Stewartia floridana OX=1968599 GN=queG PE=3 SV=1
MSETLSADELLKLSLQIKQWGEELGFDAVGITDTDLSEAESRLHQWLASGCHGEMDYMAKHGNKRSRPAELEPGTVRVISVRMDYLPEPMQDLQRILEDPQKAFISRYALGRDYHKLLRNRLKRLQQKIQQTLPESSNRLYVDSAPVLEKPLAEKAGLGWIGKHTNLLNKRSGSWFFLGEIYSTIPLPIDSPAENHCGRCQACLEICPTQAITAPYQLDARRCISYLTIELRGAIPEPYRAAMGNRIYGCDDCQQVCPWNRFAQLTGEQDFLARHKLDSSSLITLFEWDEATFLQKTEGSAIRRIGYQRWQRNLAVALGNAPPSVAVAEALLRQLEQASPMVKEHILWALDRQRIQPTTA

SEQ ID NO: 76957 - protein, 372 aa, unidentified
  source 1..372: note = Gammaproteobacteria bacterium
  REGION 1..372: note = tr|A0A2E6J9X6|A0A2E6J9X6_9GAMM Epoxyqueuosine reductase OS=Gammaproteobacteria bacterium OX=1913989; GN = queG PE=3 SV=1
  VARIANT 11: note = Xaa can be any naturally occurring amino acid
  VARIANT 31: note = Xaa can be any naturally occurring amino acid
  VARIANT 39: note = Xaa can be any naturally occurring amino acid
  VARIANT 81: note = Xaa can be any naturally occurring amino acid
  VARIANT 83: note = Xaa can be any naturally occurring amino acid
  VARIANT 85: note = Xaa can be any naturally occurring amino acid
  VARIANT 87: note = Xaa can be any naturally occurring amino acid
  VARIANT 96: note = Xaa can be any naturally occurring amino acid
  VARIANT 105: note = Xaa can be any naturally occurring amino acid
  VARIANT 266: note = Xaa can be any naturally occurring amino acid
  VARIANT 303: note = Xaa can be any naturally occurring amino acid
  VARIANT 347: note = Xaa can be any naturally occurring amino acid
MSEQYYKNLAXTIKTWGHELGFAQLAISDIXLGSYHDSXRQWLREDCHGDMAYMANNIDKRLYPQQLVEETCRIISVRMDXAXVXDXSLSPLSETXTAYIARYAXGRDYHKVMRKRLQKLANKINSEVGQFGYRAFVDSAPVLERALAEKAGLGWIGKNTMLINKNAGSWFFLGELFTDLPLPVDKAATNHCGSCNACLDVCPTKAFIAPNKMDAKRCISYLTVELRSSIPVEFRRAMGNRIFGCDDCQLVCPWNKFTQVSHESDXSPRHALDRTALLDLFQWSEQEFLERTEGSPIRRIGYXCWLRNLAIGLGNAEYSPELVAALQARRESASPMVREHIDWALEXHAETKPQTTLPENAPGSKSARLQSP

SEQ ID NO: 76958 - protein, 360 aa, unidentified
  source 1..360: note = Gammaproteobacteria bacterium
  REGION 1..360: note = tr|A0A1Z9AKY0|A0A1Z9AKY0_9GAMM Epoxyqueuosine reductase OS=Gammaproteobacteria bacterium TMED95; OX = 1986771 GN=queG PE=3 SV=1
MQLETLQEQITDWAYDLGFSAVGFVRLTASDHEQHLRQWLAQGFHGTMSYMDRNIDLRLDAAGLLPGAISAITVRMDYLSRDELPSLSQTLAASNQGYIARYALGRDYHKVIRGRLRALARRINEASLTLPDGPFISRACTDSAPILEKRLAEQSGLGWIGKNTLLNDTRRGSWCVIGELLTNLPVEDPHFKDDNHCGSCQRCLEICPTQAFTGPYQLDARRCISYLTIESKEAIPVALRSAVGNRIFGCDDCQLVCPWNKFAALHIDADYQARAQFTDQPLLSLFNWSEAEFLKHTEGSPIRRTGYEGWLRNCAVALGNAPFDPLIVRALSAKRPAVSPMVQEHIDWALAQQSQDQATP

SEQ ID NO: 76959 - protein, 366 aa, Garciella nitratireducens
  REGION 1..366: note = tr|A0A1T4PJA5|A0A1T4PJA5_9FIRM Epoxyqueuosine reductase OS=Garciella nitratireducens DSM 15102; OX = 1121911 GN=SAMN02745973_02104 PE=4 SV=1
MENVKEKIIEISKKIHIDCIGFTSVKPFKERKHILKEREQKGYLSGFEEEDIQKRIYPQKIFSKAQSIISIGLCYYQELETPKQKELYGNISRSSWGKDYHQVLQKKMKELIDCIEKEVTKIEYKTFVDTGPLIDREVAYRSGIGAFGKNNFIIHPKFGSWIFIGNILTNLKIQENTPIEEDICGECDLCIQACPTGALEGAYQFNAQKCVSYLTQKKDLLTEKERRSIGTNIYGCDICQLVCPKNKKVSNTCHQSFRTDGYLAFPQIKTLLNMTNKEFQEIFKPIAAGWRGKKILQRNAIIVLGNSKDSRAIPILKECLQDVRWDIRLYAIWSLSQFKKEGRKIIENFASIEKDARVKKEIQKVL

SEQ ID NO: 76960 - protein, 313 aa, unidentified
  source 1..313: note = Geitlerinema sp.
  REGION 1..313: note = tr|K9S9W5|K9S9W5_9CYAN Epoxyqueuosine reductase; OS = Geitlerinema sp. PCC 7407 OX=1173025 GN=queG PE=3 SV=1
MGTLTAAQIKDQAQRLGFHKVGIAPVGPWQDGAEARLQAWLEQGYQADMAWMADPRRQDITQVLPSARSLICLALNYYTPHPRPQGPEYAKISRYGWGRDYHRVLQRRLKALTLWLQDQAPEVEARYYVDTGPVQDKVWAQRAGLGWIGKNGNVITREYGSWVFLGEIVTNLVLEPDKPHTDHCGTCDRCLQACPTGAIAAPFVVDANRCIAYHTIENRSPALPEAIASHLQGWVAGCDICQDVCPWNQRFAKPSDIEDFQPYSWNVGPTLAELAQISEDDWQARFPASALRRIKPEMLRRNAQASLPAIADS

SEQ ID NO: 76961 - protein, 307 aa, Gelidibacter algens
  REGION 1..307: note = tr|A0A1A7R1J8|A0A1A7R1J8_9FLAO Epoxyqueuosine reductase OS=Gelidibacter algens OX=49280 GN=queG PE=3 SV=1
MNNKQQYTQLIKTEAKRLGFLSCGISKAQFLEEEAPRLEKWLKNNMQGEMRYMENHFDKRLDPTKLVDDSKSVISLLLNYYPEETQTENSFKLSKYAYGTDYHFVIKDKLKSLLNFIQEEIGDVHGRAFVDSAPVMDKAWAAKSGLGWIGKHSNLLTQQVGSFYFIAELIIDLELEYDLPTTDHCGTCTKCIDACPTQAITEPYVVDGSKCISYFTIELKDKIPTEFRGQFDDWMFGCDICQDVCPWNRFSKAHNEPLFNPHPELLSMTKKDWEEITEDVFKELFKKSAVKRTKFEGLKRNIEFLKD

SEQ ID NO: 76962 - protein, 307 aa, Gelidibacter gilvus
  REGION 1..307: note = tr|A0A4Q0XLJ0|A0A4Q0XLJ0_9FLAO Epoxyqueuosine reductase OS=Gelidibacter gilvus OX=59602 GN=queG PE=3 SV=1
MNNKSKYSQLIKTEAKRLGFMSCGISKAQFLEEEAPRLEKWLKNNMHGEMQYMENHFDKRLDPTKLVEGSKSVISLLLNYYPEETQIENTYKLSKYAYGTDYHFVIKDKLKELLNFITEEIGEVSGRAFTDSAPVLDKAWAAKSGLGWVGKHTLLLTQQTGSFYFVGELIIDLELDYDSPTTDHCGTCTKCIDACPTQAITEPYVVDGSKCISYFTIELKDKIPNDFKGQFDDWMFGCDICQDVCPWNRFSKAHSEPLFNPHPELLSMTKKDWEEITEDVFKDLFKKSPVKRTKFEGLTRNIQFLRK

SEQ ID NO: 76963 - protein, 308 aa, Gelidibacter salicanalis
  REGION 1..308: note = tr|A0A5C7AEN2|A0A5C7AEN2_9FLAO Epoxyqueuosine reductase OS=Gelidibacter salicanalis OX=291193 GN=queG; PE = 3 SV=1
MNHKSKYSQLIKSEAKRLGFLSCGISRAQFLEEEAPRLERYLKNNMHGEMRYMENHFDKRLDPTKLVEDSKSVISLLLNYYPEEHQIDHTYKISKYAYGTDYHFVIKDKLKSLLNFIQEEIGEVHGRAFTDSAPVLDKAWAAKSGLGWVGKHTLLLTQQAGSFHFVAELIIDLELEYDLPTTDHCGTCTKCIDACPTQAITEPYVVDGSKCISYFTIELKDKIPSEFKGKFDDWMFGCDICQDVCPWNRFSKAHSEPLFNPHPDLLSMTKKDWEDITEDVFKDLFTKSPVKRTKFEGLKRNINFIKEG

SEQ ID NO: 76964 - protein, 308 aa, unidentified
  source 1..308: note = Gelidibacter sediminis
  REGION 1..308: note = tr|A0A4R7QA63|A0A4R7QA63_9FLAO Epoxyqueuosine reductase OS=Gelidibacter sediminis OX=1608710 GN=queG; PE = 3 SV=1
MNNKSKYSQLIKEEAKRLGFLSCGISKAQFLEEEAPRLERYLKNNMHGEMRYMENHFDKRLDPTKLVDDSKSVISLLLNYYPEEQQIDQTYKLSKYAYGTDYHFVIKDKLKSLLNFIQEEIGEVHGRAFTDSAPVLDKAWAAKSGLGWVGKHTLLLTQQAGSFHFVAELILDLELEYDLPTTDHCGTCTKCIDACPTQAIAEPYVVDGSKCISYFTIELKDKIPTEFKGQFDDWMFGCDICQDVCPWNRFSKAHSEPLFNPHPELLSMTKKDWEEITEDVFRDLFKKSPVKRTKFEGLKRNIDFLKKN

SEQ ID NO: 76965 - protein, 357 aa, Geminicoccus sp.
  REGION 1..357: note = tr|A0A2E1V6J2|A0A2E1V6J2_9PROT Epoxyqueuosine reductase OS=Geminicoccus sp. OX=2024832 GN=queG PE=3 SV=1
MPKATSNPFNEAAPTELRAQIHAQAIALGFDACGFGPAQIPERNRERYLEFVATGQHGTMDWMQTRLDQRSDPQTLWPEARSVVVVGLNYGPEDNPLDRLDQPQRANFSVYAENRDYHDILKRRLKRLGRWIAEHTDGQPLKVFVDTAPVPEKALAAQTSVGWQGKHSNLVSPEFGSWLFLGVIYLSIDLPADTPTPDQCGSCTRCIDICPTAAIPAPYTLDATRCLAYLSIEHRGAIPVEFRKAMGNRIYGCDDCLAACPWNKFAKATAEAGFKPRDVVDQAQLLDFAGFDDAAFRAAFSGSPIKRIGIERFLRNLAICLGNSGQQKAREPLRQLARSENPIVAESAQWALGQLPT

SEQ ID NO: 76966 - protein, 358 aa, Geminicoccus sp.
  REGION 1..358: note = tr|A0A2E3IRE5|A0A2E3IRE5_9PROT Epoxyqueuosine reductase OS=Geminicoccus sp. OX=2024832 GN=queG PE=3 SV=1
MPKATSTPFDPAALKQRIDAEARALGFDAVGFGPAQIPARNRARYQDFVASGQHGTMDWMERRLDERADPQTLWEGTKSVIAVGLNYGPDSDPLDRLRDPDRANFSVYAENRDYHDILKKKLKRLGRWIGEETGQALKVFVDTAPVPEKALAAQTAVGWQGKHSNLVSQDFGSWLFLGLIYLGFELPTDSPSDDHCGSCSRCIDVCPTAAIPAPYQLDATRCLAYLSIEHDGPIPVEFRAAMGNRIYGCDDCLAVCPWNKFAQATAEAGFQPRALLADPRLLDFIGYEDAQFRAAFAGSPVKRIGIVRFLRNLAICLGNSGHEKARRPLEQLARHENAVVAESAVWALDQLRSETPAA

SEQ ID NO: 76967 - protein, 323 aa, unidentified
  source 1..323: note = Geminocystis sp.
  REGION 1..323: note = tr|A0A0D6ADT0|A0A0D6ADT0_9CHRO Epoxyqueuosine reductase OS=Geminocystis sp. NIES-3708 OX=1615909 GN=queG; PE = 3 SV=1
MKNNEKSLYFTSEDIKQQALDIGFHRIGITNVTINSYKQAENKQRLQQWLDKDYQAQMAWMSNPRRQDIKETWEETKSIISLALNYYTPHQHSDNPDTAKISRYGWGRDYHRVMAKKLKTLCQWLTAKDENIKVRYYVDTGPIQDKFWAQQAGVGWVAKNSNLITKDYGSWVFLGEILINVHLSPDQPHTNHCGTCTRCLDACPTQAITEPFVVNANLCIAYHTIENRQETLPPEIASKLNGWVAGCDICQDVCPWNQRFAKVTDVPDFSPYSANINPKLTELAQITKTEWDKRFQGSALRRIKPEMWRRNAQCQIEKSPIKD

SEQ ID NO: 76968 - protein, 316 aa, unidentified
  source 1..316: note = Geminocystis sp.
  REGION 1..316: note = tr|A0A0D6ALF1|A0A0D6ALF1_9CHRO Epoxyqueuosine reductase OS=Geminocystis sp. NIES-3709 OX=1617448 GN=queG; PE = 3 SV=1
MINSKSIVTTEEIKEQALTIGFHKVGVTTVNYNIEKQEKNKQRLQEWLDKGYQAQMAWMNNPKRQNIIECWPQAKSIVSLALNYYTPHQHSQKPNTAKISRYGWGRDYHRVMTKKLKTLANWLKKQSNNVEVRYYVDTGPVQDKFWAQEAGIGWVAKNGNVITTDYGSWIFLGEILTNIELRPDRPHTNHCGTCTRCLSACPTQAITEPFVVNANLCIAYHTIENRQANLPPEITSKLNGWVAGCDICQDVCPWNQRFAKVTDVADFFPYPANLNPTLTEIAQMTPLEWDQRFQGSALRRIKPEMWRRNAQVQIDN

SEQ ID NO: 76969 - protein, 373 aa, Gemmata obscuriglobus
  REGION 1..373: note = tr|A0A2Z3HB66|A0A2Z3HB66_9BACT tRNA epoxyqueuosine(34) reductase QueG OS=Gemmata obscuriglobus; OX = 114 GN=queG PE=4 SV=1
MGDIEERLKAEAARLGFALSGIAPATDADGFGRFAVWLDRGFAGEMSYLPKLRAERQHPRSVLDDVRSVLMVGLEYSGVRSAEFGIRSENETQEKGETSSTNSPSAVPHSEFRTPHFGRVAAYAAGPDYHRYIWDRLNALAAWLEEQVPGSRTEAVADTAPLLERDFARRAGLGWVGKNTMLINTRRGSFFFLGAILTTLELAPDPPATSSHCGTCTRCLEACPTGAFTEPYVLDARKCISYLTVELRSEIPVELREPMGHWLYGCDVCQDVCPWNRNAGERTVAFPHDPELAWLDPIELLGLDADAFRKRFKKTSLFRNRRPGLLRNAAIVLGNIGDSRAVPALEQALTDSEETIREAAAWALAQICLRSGG

SEQ ID NO: 76970 - protein, 442 aa, Gemmata sp.
  REGION 1..442: note = tr|A0A142XPU1|A0A142XPU1_9BACT Epoxyqueuosine reductase OS=Gemmata sp. SH-PL17 OX=1630693 GN=queG PE=4; SV = 1
MSHPSPQRAESRTSLSDRLKEQARTLGFELVGIAPATDADGFARFNSWLDRGFAGEMSYLPKFRTERQNPRSILEGVRSVLMVGMEYGRGERQPNPLTPFPRKEGGTKSSVALSPSPLRGGVGEGLFSEPTPPAPLPEGKGELAYEISEIGITHDDRSFSPFPSGRGAGGVGSALARVASYAAGPDYHRYIWDRLNALAAWLEDEAPGSRTEAVADTAPLLERDFARRAGLGWVGKNTMLINTRRGSFFFLGAVLTDLELEPDSPSTSSHCGTCTACLDACPTRAFPEPFVLNATKCISYLTIELRSDIPVELRESVGNWLYGCDVCQDVCPWNRNAGSRAPAFPHDPDLAWIDPAELLGLDADAFRVRFKKTSFWRNRRTGLLRNAAIVLGNIGDERSLPALEKALTDPEDVIRNAAQWAIDHIRHRTSSVKSGLPSAPSD

SEQ ID NO: 76971 - protein, 333 aa, unidentified
  source 1..333: note = Gemmataceae bacterium
  REGION 1..333: note = tr|A0A4V0HUU3|A0A4V0HUU3_9BACT 4Fe-4S ferredoxin-type domain-containing protein OS=Gemmataceae bacterium OX=2052164 GN=GCJUQL4_31080 PE=4 SV=1
MTYLREQAEQRLHPRSILEDVRSVVMLGMEYRECGVRSAECGVEDRSEETALSSIPHSALRTPHFSGRIAAYAQGPDYHRYIWDRINELAAWLEAEVPGCRTRAVADTAPLLERDFARRAGLGWVGKNTMLLNPRRGSFFFLASVLTDLKLEPDPPFAGSHCGTCTACLDACPTGAFPEPFVLDATKCISYLTIELRDPVPEELRPKIGDWLYGCDVCQDVCPWNRKPSPGPAGFPHRDDLERLDAVELLGLDAAAFRAKFKATSLWRNRRPGLLRNAALVLGNTGDARALPALEKALSDPEDIVRDAAAWAIAQIRERRGVSPPVPPNPRAG

SEQ ID NO: 76972 - protein, 376 aa, unidentified
  source 1..376: note = Gemmataceae bacterium
  REGION 1..376: note = tr|A0A5C1ANK0|A0A5C1ANK0_9BACT tRNA epoxyqueuosine(34) reductase QueG OS=Gemmataceae bacterium PX52 OX=2598579 GN=queG PE=4 SV=1
MNPNELKLQLKAEANRLGFSLFGVATATDADGFERFTSWLGEGYHGEMDYLAKRRDARRSPASVLASVRSVVMLGFEYGQAVQESYKSLGRVAAYARGPDYHGLIWEKLNALGSFLQTQDVAAEFRGVTDSAPLLEREFARRAGLGWFGKNTMLINKHRGSFFFLAGFLTNLDLPADEPYRTNHCGTCTACLDACPTDAFVTAGTLDARKCISYLTIESKSAFPLELRPAVRNWLFGCDVCQEVCPWNRHAGKTPVPFPADAELVALDPLELLAMSEAEFRTRFKPTPLFRPKWSGLRRNAAIVLGNVGDEKALPILACALADVNEVVREAATWAIDQIRERQGTGAPQPAGPDRPVAQPAVNSVSSHAGSAIING

SEQ ID NO: 76973 - protein, 387 aa, unidentified
  source 1..387: note = Gemmatimonadaceae bacterium
  REGION 1..387: note = tr|A0A2E8H3D7|A0A2E8H3D7_9BACT Epoxyqueuosine reductase OS=Gemmatimonadaceae bacterium OX=2026741; GN = queG PE=3 SV=1
MPAPGSQADHDLTRFVRSEATRLGFDLVGITSADPLEAAEFNARWVAQGYAGQMGWLERNLEKRADPRQLVPGARSVICLGMYYDPPGAAEGADGDAGLAGRMARYARGDDYHDLIKSRLAGLWESLLAEADHDISGRYYVDTAPVLERELAARAGLGWWGKNTVLIHRRGGSYFLLAELITTAALEIDAPATDHCGSCTRCLDACPTEAFPEPYVLDARRCISYLTIELKGSIPEDLRHGMGDWLLGCDICQDVCPWNRRSASTREPAFHARAGLDPVNLLELIRMDRDAFNERFRRNPAKRPKRRGMLRNAAVALGNSGQRDEAVPVLVGVLQNEEEPLVRAHAAWALGKLGGEQAKRALHEAKQVDQDSDVKREIDSALAMVKD

SEQ ID NO: 76974 - protein, 443 aa, unidentified
  source 1..443: note = Gemmatimonadaceae bacterium
  REGION 1..443: note = tr|A0A2E0DNR9|A0A2E0DNR9_9BACT tRNA epoxyqueuosine(34) reductase QueG OS=Gemmatimonadaceae bacterium OX=2026741 GN=queG PE=4 SV=1
  VARIANT 27: note = Xaa can be any naturally occurring amino acid
  VARIANT 48: note = Xaa can be any naturally occurring amino acid
  VARIANT 146: note = Xaa can be any naturally occurring amino acid
  VARIANT 253: note = Xaa can be any naturally occurring amino acid
  VARIANT 262: note = Xaa can be any naturally occurring amino acid
  VARIANT 405: note = Xaa can be any naturally occurring amino acid
  VARIANT 424: note = Xaa can be any naturally occurring amino acid
MNQVTLGLREEAERLGFEVFGIGHLNXSEHMEFFDRWLARKHHGEMEXLERPDTRERRAFPSSSFSGARSVIVVGHEYAGRAPTGAESSPTARLRADRISKIEGEGVPPHPKAEALIARYARGSDYHHIIPPKLEKMLMWLDRRIXGGVRGRALVDTAPVFERELARRAGMGWFGRNTMLIHPRRGSFFVLGLLMVDVDLETTGPCIEDHCGTCHACIDECPTGALLGREESGAPSIDARRCISYLTIELKGXIPHQYRSAXGNRVFGCDICQEVCPWNKRFAQGDGDPAYRASSPPELLVDLAKEIFEMSEKEYQRRYRGSPLSRPRRKGMLRNLLVGIGNAIREGVLTSDQKGEAIRVLAAALNDPQPLVRGHAAWALGQAGNKLETVTQRSTRDAIVTVEGXPLSSSETAETPSPLELLSXRREIETDVEVLEELRLAAH

SEQ ID NO: 76975 - protein, 366 aa, unidentified
  source 1..366: note = Gemmatimonadales bacterium
  REGION 1..366: note = tr|A0A524H0V9|A0A524H0V9_9BACT tRNA epoxyqueuosine(34) reductase QueG OS=Gemmatimonadales bacterium OX=2448054 GN=queG PE=4 SV=1
MVRLGLRPHLLPHRLPQSAAGDDRVGHFLHHVRSGCPHNYRPRSGAGFVLLDDAVRVTLTAQEVKARAAELGFVACGITDLGPSSRGDALDRWLRQGYGGNMRYINRQAKKRKDLRLIDREARRAVVILDNYYYPETAHADSIPRTARYSRSTDYHIITLKRINQLAELLLEHGAKTARPYVDTGPVPERELAERAGLGWIGKNTMLLRPGLGSWFVIGSIFTDLPLDVDPPFATDHCGSCTKCLDACPTDAFVEPYILDATKCISYLTIEYKKEIPAELAGQLGGWAFGCDICNDVCPWNLRFATEATIPEFRDRGELRGADEAFFDRMTEGEFEARFGDTPLARPGLERMRRNWRNAWGSLRKT

SEQ ID NO: 76976 - protein, 224 aa, unidentified
  source 1..224: note = Gemmatimonadetes bacterium
  REGION 1..224: note = tr|A0A3B9DT63|A0A3B9DT63_9BACT tRNA epoxyqueuosine(34) reductase QueG (Fragment); OS = Gemmatimonadetes bacterium OX=2026742 GN=queG PE=4 SV=1
MTLTTRLKEQARELGFGLVGVASVEASRHMGLYREWVEDGRHGEMGYLAREDAVARRADLRGTLPTVRSAVVVGHEYFQEDPPGVPADPARGVIARYARGQDYHGTIQKRLLELHRWIEASVAAPVEGRVYVDTGPILEREMAVRAGIGWFGKNTMLIDPKRGSYFFLGLLLLDLDLDADDPFQEDHCGTCRSCLDACPTGALLGRDASGAPVMDAPRCISYLT

SEQ ID NO: 76977 - protein, 113 aa, unidentified
  source 1..113: note = Gemmatimonadetes bacterium
  REGION 1..113: note = tr|A0A1E4BAY9|A0A1E4BAY9_9BACT Uncharacterized protein OS=Gemmatimonadetes bacterium SCN 70-22 OX=1660163; GN = ABS52_05995 PE=4 SV=1
MCPWNVRFSRELAEDSPFKPRDVLRGRDARTLARELLAMSQEEFSAAFRKSPMKRAKLRGLKRNAAAVLGNVGSGDDVDVLTRALDDEEPLVREHAAWAISQIARRISSSAAG

SEQ ID NO: 76978 - protein, 364 aa, Gemmatimonas aurantiaca
  REGION 1..364: note = tr|A0A3D4VAD7|A0A3D4VAD7_9BACT tRNA epoxyqueuosine(34) reductase QueG OS=Gemmatimonas aurantiaca OX=173480 GN=queG PE=4 SV=1
MSDVPPAARAAASAAAPTRSLSERLIAQAYGLGFDAAGIAELGEPETRAVFDAWLAAGHHGNMGYLDGAGAQLRHDSRRPHPGATHALVLAASYGGREPAGPVARYARGDDYHDVLRERMRELHRWLEQEVGAPIDARPYVDSAPILERDLAQRAGLGWFGKNTMLISPQAGSFLFLASLFVAFPLEASAPFEADRCGSCTRCIDACPTDAITAPRTVDARRCISYLTIELREEIPEALRPGIGSWLYGCDICQDVCPWNRRFAQPIRFDEFQTRPFLSDSDPRAMARSVLMMDAADYRETFRGSAMKRAKLWMLQRNAAVVLGNVGTPDDLPVLEAAAELHDQPLVREHATWAIRRVQERPEN

SEQ ID NO: 76979 - protein, 364 aa, Gemmatimonas aurantiaca; identical to SEQ ID NO: 76978
  REGION 1..364: note = tr|C1ABN3|C1ABN3_GEMAT 4Fe-4S ferredoxin-type domain-containing protein OS=Gemmatimonas aurantiaca (strain T-27 / DSM 14586 / JCM 11422 / NBRC 100505); OX = 379066 GN=G AU_2868 PE=4 SV=1

SEQ ID NO: 76980 - protein, 360 aa, unidentified
  source 1..360: note = Gemmatimonas phototrophica
  REGION 1..360: note = tr|A0A143BMD2|A0A143BMD2_9BACT 4Fe-4S ferredoxin-type domain-containing protein OS=Gemmatimonas phototrophica OX=1379270 GN=GEMMAAP_15070 PE=4 SV=1
MSAGTDQPSLSRRFLAQAYAAGFDAAGIAALGEPATYAAYADWLTEGRQADMAYLTGDGATLRADTRLPHAGATHALVVAASYGGTAPTGPVARYARGDDYHERLRERLRELHRWLEREVGHAVNARPYVDSGPVLERDLAQRAGLGWMGKNTMLITPRAGSFVFLASLFVELDLEPSVPFEADRCGTCTRCLDACPTGALPAPRVLDANRCVSYLTIEHRQSIPGALRESMGGLLYGCDICNDVCPWNHKFARDAMFSEFAPRDLFAESYDREGARALARELLMMSPANYAAAFRGSAIKRAKLWMLQRNACVVLGNIGTEEDLAVLEAMCQHKHELVREHSQWAVAHIRQGSGNHPSR

SEQ ID NO: 76981 - protein, 328 aa, Gemmatimonas sp.
  REGION 1..328: note = tr|A0A0S7ZVY7|A0A0S7ZVY7_9BACT 4Fe-4S ferredoxin-type domain-containing protein OS=Gemmatimonas sp. SG8_17 OX=1703355 GN=AMS18_10740 PE=4 SV=1
MAPGGDALVTPKRRATLVKERALQLGFDGVGVTDLSPVPHGGRLHEWLAEGMAGTMTYMQRQAGRRVEPARIVPGTHRAVVVTVNYFSQDPSPKPGFGRVAKYARGRDYHRSLLGPLKRLAAFIRSLGDAGTIAKWYVDAGPVPERELAQRAGLGWIGKNTMLIDPKRGSFCFVATVLTNLDLDLDQPFEADRCGSCRLCLDACPAMAFPEERLLDARLCISYLTIELAGEVPAEQAAKMGSWVFGCDVCQDVCPWNRSFARPSTSVTLELDPSLALLDLKSLTEIDELGFAQQYGWTPLERTGAAGISRNARIAAANFAGEPPCQNQ

SEQ ID NO: 76982 - protein, 391 aa, Gemmatimonas sp.
  REGION 1..391: note = tr|A0A0S8HA33|A0A0S8HA33_9BACT Epoxyqueuosine reductase OS=Gemmatimonas sp. SM23_52 OX=1703359 GN=queG; PE = 3 SV=1
MAPSSPPTHPAPSASQEIKRRALALGFDLVGIAPAQRPAHAEFYLEWLKRGYHGAMAYLERPDAVKRRLDPSTALPGARAIVAVAMNYSSRDSSPVDDGSRAIVARYARGADYHQLFEEKLEQLAGSLRELCGQGTGTRAYVDYGPVLERDHAQRAGLGWIGKNTVLINPAIGSYLILGVILTDAELEPDEPFLPDHCGTCERCVQACPTGAILAPRELDARLCISYLTIELRGPIPRELRRLIGNRIFGCDICQEVCPWNCETPATREPRFQPREELTGPDLVGLANLGEAEFREHYSGTAIERAKRHGFLRNVAVALGNWGDSAALPALITSLNEDVPLVRGHAAWALGCMATPEARSALQNRLQLERDDWVREEIQLALQCDYSGCDP

SEQ ID NO: 76983 - protein, 109 aa, unidentified
  source 1..109: note = Gemmatirosa kalamazoonesis
  REGION 1..109: note = tr|W0RHC6|W0RHC6_9BACT Uncharacterized protein; OS = Gemmatirosa kalamazoonesis OX=861299 GN=J421_2290 PE=4; SV = 1
MCPWNVRFSKELPNDSPYAPREALAGKDARTLARALLGMTQAEFSAAFKGSPMKRAKLRGLKRNAAVVLGNVGTADDVGVLTRALDDEEPLVREHAAWALARMRHRAGE

SEQ ID NO: 76984 - protein, 345 aa, Gemmobacter aquatilis
  REGION 1..345: note = tr|A0A1H7ZSC7|A0A1H7ZSC7_9RHOB Epoxyqueuosine reductase OS=Gemmobacter aquatilis OX=933059; GN = SAMN04488103_101597 PE=4 SV=1
MKAEDALVLKDRLVARALEEGFSKVGICAPEAVPEAAGRLRAFLAAGRHGQMGWMAEREGWRGSAAALWPEARSVIMLAEVYTPEADPLAVLAQRDRAAVSVYAQGKDYHDLVKRRLKRLGGWFVQVAGAEIKVFVDTAPVMEKPLAQAAGLGWQGKHTNLLARDLGSWFFLGAIFTTADLPKDAAEVSHCGSCRACLDACPTGAFPAPYQLDARRCISYLTIEHKGPVDEGLRGLMGNRIYGCDDCLAVCPWNKFAQAAREIGYQPRVGAPLLAELAGLDDAGFRARFAGSPIKRIGRDRFVRNVLYAIGNSGLAELRAAALALVEDADAAVADAARWACLKLA

SEQ ID NO: 76985 - protein, 348 aa, unidentified
  source 1..348: note = Gemmobacter caeni
  REGION 1..348: note = tr|A0A2T6B4S6|A0A2T6B4S6_9RHOB Epoxyqueuosine reductase OS=Gemmobacter caeni OX=589035 GN=C8N34_104195; PE = 4 SV=1
MSKGMEPSVLKDRLVARAVEEGFSKTGICAPDAVPEAAGRLRTFLAAGRHGQMGWMAEREGWRGSAAALWPEARSVIMLAEVYTPEVDPLAVLAQRERAAISVYAQGKDYHDLVKRRLKRLGRWLLDQAGGEIKVFVDTAPVMEKPLAQAAGLGWQGKHTNLLARDLGSWFFLGAIFTTLDLPKDVAEVSHCGSCRACLDICPTGAFPAPYQLDARRCISYLTIEHKGPVEPDLRALMGNRIYGCDDCLAVCPWNKFAQAARDAGYQPRVGAPELAELAALDDTAFRARFVGSPIKRIGRDRFVRNVLYAIGNSGEVALCGAASALLADPDPVVAEAAAWAVDRLSRC

SEQ ID NO: 76986 - protein, 350 aa, unidentified
  source 1..350: note = Gemmobacter intermedius
  REGION 1..350: note = tr|A0A3S3WSD0|A0A3S3WSD0_9RHOB tRNA epoxyqueuosine(34) reductase QueG OS=Gemmobacter intermedius OX=1553448 GN=queG PE=4 SV=1
MVVSPSPDLSGLKTALIAEAKAAGFVAAGFCRPDAIPHAAGALEAFVEGGYHGEMTWMAERMAWRGNPAALWPEARSVIMLAESYTPPQDPRLVLAQSDRAAVSVYAQGKDYHDLVKKRLKRVGRWLIDKAPGSEIKVFVDTAPVMEKPLAQAAGLGWQGKHTNLLSRQFGNWVFLGAIFTTVEFEPDPAEVSHCGSCTACLVACPTGAFEGEGRLNPKRCISYLTIEHKGPVPEDLRGLMGNRIYGCDDCLAACPWNKFAVDAVDPGYGHRVGAPLLAELAGLDDAAFRARFAGSPIKRIGRNRFLRNVLYAIGNSGRGDLLPCAEALTRDPDPVVADAAAWAVSRLGG

SEQ ID NO: 76987 - protein, 344 aa, unidentified
  source 1..344: note = Gemmobacter lutimaris
  REGION 1..344: note = tr|A0A398BQD5|A0A398BQD5_9RHOB Epoxyqueuosine reductase OS=Gemmobacter lutimaris OX=2306023 GN=queG PE=3; SV = 1
MEPSVLKERLVARAVEEGFSKAGICAPDAVPEAAGRLRAFLAAGRHGQMGWMAEREGWRGSAAALWPEARSVIMLAEVYTPEVDPLAVLGQRDRAAISVYAQGKDYHDLVKRRLKRLGRWLLDQAGGEIKVFVDTAPVMEKPLAQAAGLGWQGKHTNLLSRDLGSWFFLGALFTTLDLPKDAAEVSHCGSCRACLDICPTGAFPAPYQLDARRCISYLTIEHKGPVDPDLRALMGNRIYGCDDCLAVCPWNKFAQVARDVGYQPRVGAPELAELAALDDTAFRARFAGSPIKRIGRDRFVRNVLYAIGNSADPRLVPVAAALVQDSDPTVAEAAAWAMDRLSAV

SEQ ID NO: 76988 - protein, 356 aa, unidentified
  source 1..356: note = Gemmobacter megaterium
  REGION 1..356: note = tr|A0A1N7KU09|A0A1N7KU09_9RHOB Epoxyqueuosine reductase OS=Gemmobacter megaterium OX=1086013; GN = SAMN05421774_101674 PE=4 SV=1
MNLKDRLLAQAQAEGFAAMGICRPDAVPQAAARLAEYVARGHHGQMGWMAERMQWRGDPVALWAEAKSVIMLAEPYQPATDPLAILKEPALGAVAAYAQGKDYHDLVKRRLKRLGRWLLEQAGGEIKVFVDTAPVMEKPLAEAAGLGWQGKHTNLLSRDLGNWFFLGAIFTTLELEPDAPQLPHCGSCTACLDACPTRAFPAPFQLDARRCVSYLTIEHRGPVDEALRGLLGNRIYGCDDCLAVCPWNKFAVAAREIGYAHRVGAPRLEELVVLDDAGFRAMFSGSPIKRIGRDRMVRNVLYAIGNSGLARLRPLAAALVEDADPAVADAARWAVARLVAAGEQPVAQGGDGVAQI

SEQ ID NO: 76989 - protein, 111 aa, Gemmobacter sp.
  REGION 1..111: note = tr|A0A352V233|A0A352V233_9RHOB Epoxyqueuosine reductase (Fragment) OS=Gemmobacter sp. OX=1898957; GN = DC061_13905 PE=4 SV=1
MGICAPDATPETAGRLRAFLEAGHHGQMGWMAEREEWRGSAAALWPEARSVIMLAEVYTPETDPLAVLAQPDRAAVSVYAQGKDYHDLVKRRLKRLGRWLMDQLPEGAAIK

SEQ ID NO: 76990 - protein, 349 aa, Gemmobacter sp.
  REGION 1..349: note = tr|A0A3P3DJ80|A0A3P3DJ80_9RHOB Epoxyqueuosine reductase OS=Gemmobacter sp. YIM 102744-1 OX=2488730; GN = queG PE=3 SV=1
MALAPPDTTGLRTALIAEAKAAGFVAVGFCRPDAIPHAAEALEAFVEGGYHGEMAWMAERMAWRGNPAALWPEARSVIMLAESYTPPEDPRLVLGQSDRAAVSVYAQGKDYHDLVKKRLKRVGRWLIDKAPGSEIKVFVDTAPVMEKPLAQAAGLGWQGKHTNLLSRQFGNWVFLGSIFTTVDFAPDAAEVSHCGSCTSCLTACPTGAFEGEGRLNPKRCISYLTIEHKGPVPEDLRARMGNRIYGCDDCLAACPWNKFAVDAVDPGYGHRVGAPLLAELAELDDAAFRARFSGSPIKRIGRDRFLRNVLYAIGNSGRSELLPRAEALTGDPDPVVAEAAAWAAARLRG

SEQ ID NO: 76991 - protein, 389 aa, Geobacillus galactosidasius
  REGION 1..389: note = tr|A0A226QMX9|A0A226QMX9_9BACI Epoxyqueuosine reductase OS=Geobacillus galactosidasius OX=883812 GN=queG; PE = 3 SV=1
MDVAALKQEIIEYSKTIGIDKIGFASADPFVELKERLRRQQELGYQSGFEEPDIEKRTNPSLLLPEAKSIIAIALAYPSKMKNAPRGTKTERRGIFCRASWGKDYHYILRERLEKLEAFILERVPQARVKSMVDTGELADRAVAERAGIGWSGKNCSIITPEFGSYVYLGEMITNIPFPPDEPIESRCGTCTKCIDACPTGALVQGGQLNAQRCLSFLTQTKGFLADEFRDKIGNRLYGCDTCQMVCPENKGKDFHLHPEMEPDPEVVKPKLIPLLHISNREFKEKFGSIAGAWRGKKPIQRNAILALAHYKDQTAIPDLLKLLKEDSRPVIRGTAAWALGKIGDTRVISDLEEASKTEKDPEVLAEIEKGLQLLRSNEEKGKNRSPVT

SEQ ID NO: 76992 - protein, 380 aa, Geobacillus kaustophilus
  REGION 1..380: note = tr|A0A0D8BVK6|A0A0D8BVK6_GEOKU Epoxyqueuosine reductase OS=Geobacillus kaustophilus OX=1462 GN=queG PE=3; SV = 1
MDVMALKQEVIEYSRSIGIDKIGFASADPFVELKERLRRQQELGYQSGFEEPDIEKRTNPSLLLPDAKSIIAIALAYPSKMKNAPQGTKTERRGVFCRASWGKDYHDVLRERLRQLEEFLLTKVPHARVRWMVDTGELADRAVAERAGIGWSGKNCSIITPEFGSYVYLGEMITNIPFPPDEPVENRCGTCTKCIDACPTGALVQGGQLNAQRCLSFLTQTKGFLADEFREKIGNRLYGCDTCQQVCPENKGKDFHLHPEFEPDPEAVKPKLIPLLQMSNREFKEKFGAMAGSWRGKKPIQRNAILALAHYKDRTAVPHLLRLLKEDSRPVIRGTAAWALGKIGDPSAKPYLEAARQTETDADVIGEIEKGLKLLSEAKE

SEQ ID NO: 76993 - protein, 387 aa, Geobacillus kaustophilus
  REGION 1..387: note = tr|U2Y642|U2Y642_GEOKU Epoxyqueuosine reductase; OS = Geobacillus kaustophilus GBlys OX=1337888 GN=queG PE=3; SV = 1
MTKGGKTMDVMALKQEVIEYSRSIGIDKIGFASADPFVELKERLRRQQELGYQSGFEEPDIEKRTNPSLLLPEAKSIIAIALAYPSKMKNAPRGTKTERRGVFCRASWGKDYHDVLRERLQQLEEFLLAKVPHARVRSMVDTGELADRAVAERAGIGWSGKNCSIITPEFGSYVYLGEMITNIPFPPDEPVENRCGTCTKCIDACPTGALVQGGQLNAQRCLSFLTQTKGFLADEFREKIGNRLYGCDTCQQVCPENKGKDFHLHPEFEPDPEAVKPKLIPLLQMSNREFKETFGAMAGSWRGKKPIQRNAILALAHYKDQTAVPHLLRLLKEDSRPVIRGTAAWALGKIGDPSAKPYLEAARQTEADADVIAEIEKGLKLLAEAKE

SEQ ID NO: 76994 - protein, 380 aa, Geobacillus lituanicus
  REGION 1..380: note = tr|A0A223DXY7|A0A223DXY7_9BACI Epoxyqueuosine reductase OS=Geobacillus lituanicus OX=169283 GN=queG PE=3; SV = 1
MDMMALKEEVIAYSRSIGIDKIGFASADPFVELKERLRRQQELGYQSGFEEPDIEKRTNPSLLLPEAKSIIAIALAYPSKMKDAPRGTKTERRGLFCRASWGKDYHVVLRERLQKLEEFLLAKVPSARVRSMVDTGELADRAVAERAGIGWSGKNCSIITPEFGSYVYLGEMITNIPFPPDEPVENRCGTCTKCIDACPTGALVQGGQLNAQRCISFLTQTKGFLADEFREKIGNRLYGCDTCQLVCPENKGKDFHLHPEFEPDPEAAKPKLVPLLDMTNREFQEKFGAMAGSWRGKKPIQRNAIIALAHYKDRTAVPHLLRLLKEDSRPVIRGTAAWALGKIGDATAKPHLEEARQTETDMDVIAEIDKGLKLLSETKE

SEQ ID NO: 76995 - protein, 401 aa, unidentified
  source 1..401: note = Geobacillus proteiniphilus
  REGION 1..401: note = tr|A0A1Q5SJV7|A0A1Q5SJV7_9BACI Epoxyqueuosine reductase OS=Geobacillus proteiniphilus OX=860353 GN=queG; PE = 3 SV=1
MHFILITSDFILPYMTKGGKTMDVMALKREVIEYSRSIGIDKIGFASADPFVELKERLRRQQELGYQSGFEEPDIEKRTNPSLLLPEAKSIIAIALAYPSKIKNAPRGTKTERRGVFCRASWGKDYHDVLRERLQQLEEFLLAKVPHARVRSMVDTGELADRAVAERAGIGWSGKNCSIITPEFGSYVYLGEMITNIPFPPDEPVENRCGTCTKCIDACPTGALVQGGQLNAQRCLSFLTQTKGFLADEFREKIGNRLYGCDTCQQVCPENKGKDFHLHPEFEPDPEAVKPKLIPLLQMSNREFKETFGAMAGSWRGKKPIQRNAILALAHYKDQTAVPHLLRLLKEDSRPVIRGTAAWALGKIGDPSAKPYLEAARQTEADADVIAEIEKGLKLLAEAKE

SEQ ID NO: 76996 - protein, 389 aa, Geobacillus sp.
  REGION 1..389: note = tr|C5D5W5|C5D5W5_GEOSW Epoxyqueuosine reductase; OS = Geobacillus sp. (strain WCH70) OX=471223 GN=queG PE=3; SV = 1
MDVAALKQEIIEYSKTIGIDKIGFASADPFVELKERLRRQQELGYQSGFEEPDIEKRTNPSLLLPEAKSIIAIALAYPSKMKNAPRGTKTERRGIFCRASWGKDYHYILRERLEKLEAFILERVPQARVKSMVDTGELADRAVAERAGIGWSGKNCSIITPEFGSYVYLGEMITNIPFPPDEPIESRCGTCTKCIDACPTGALVQGGQLNAQRCLSFLTQTKGFLADEFRDKIGNRLYGCDTCQMVCPENKGKDFHLHPEMEPDPEVVKPKLIPLLHISNREFKEKFGSIAGSWRGKKPIQRNAILALAHYKDQTAIPDLLKLLKEDSRPVIRGTAAWALGKIGDTRVISDLEEASKTEKDPEVLAEIEKGLQLLRSNEEKGKNRSPVT

SEQ ID NO: 76997 - protein, 418 aa, Geobacillus sp.
  REGION 1..418: note = tr|S7U1Y0|S7U1Y0_9BACI Epoxyqueuosine reductase; OS = Geobacillus sp. WSUCF1 OX=886559 GN=queG PE=3 SV=1
MTPNLPEGRRCFSCSDITNFILITSDFILSYMTKGGKTMDVMALKREVIEYSRSIGIDKIGFASADPFVELKERLRRQQELGYQSGFEEPDIEKRTNPSLLLPEAKSIIAIALAYPSKMKNAPRGTKTERRGVFCRASWGKDYHDVLRERLQQLEEFLLAKVPHARVRSMVDTGELADRAVAERAGIGWSGKNCSIITPEFGSYVYLGEMITNIPFPPDEPVENRCGTCTKCIDACPTGALVQGGQLNAQRCLSFLTQTKGFLADEFREKIGNRLYGCDTCQQVCPENKGKDFHLHPEFEPDPEAVKPKLIPLLQMSNREFKETFGAMAGSWRGKKPIQRNAILALAHYKDQTAVPHLLRLLKEDSRPVIRGTAAWALGKIGDPSAKPYLEAARQTEADADVIAEIEKGLKLLAEAKE

SEQ ID NO: 76998 - protein, 380 aa, Geobacillus stearothermophilus
  REGION 1..380: note = tr|A0A3L7CM80|A0A3L7CM80_GEOSE Epoxyqueuosine reductase OS=Geobacillus stearothermophilus OX=1422; GN = queG PE=3 SV=1
MDVMALKQEVIEYSRSIGIDKIGFASADPFVELKERLRRQQELGYQSGFEEPDIEKRTNPSLLLPEAKSIIAIALAYPSKMKNAPRGTKTERRGVFCRASWGKDYHDVLRERLQQLEEFLLAKVPHARVRSMVDTGELADRAVAERAGIGWSGKNCSIITPEFGSYVYLGEMITNIPFPPDEPVENRCGTCTKCIDACPTGALVQGGQLNAQRCLSFLTQTKGFLADEFLEKIGNRLYGCDTCQQVCPENKGKDFHLHPEFEPDPEAVKPKLIPLLQMSNREFQETFGAMAGSWRGKKPIQRNAILALAHYKDQTAVPHLLRLLKEDSRPVIRGTAAWALGKIGDPSAKPYLEAARQTEADADVIAEIEKGLKLLAEAKE

SEQ ID NO: 76999 - protein, 380 aa, Geobacillus stearothermophilus
  REGION 1..380: note = tr|A0A0K2HAY1|A0A0K2HAY1_GEOSE Epoxyqueuosine reductase OS=Geobacillus stearothermophilus 10 OX=272567; GN = queG PE=3 SV=1
MDVMALKREVIEYSRSIGIDKIGFASADPFVELKERLRRQQELGYQSGFEEPDIEKRTNPSLLLPEAKSIIAIALAYPSKMKNAPRGTKTERRGVFCRASWGKDYHDVLRERLQQLEEFLLAKVPHARVRSMVDTGELADRAVAERAGIGWSGKNCSIITPEFGSYVYLGEMITNIPFPPDEPVENRCGTCTKCIDACPTGALVQGGQLNAQRCLSFLTQTKGFLADEFREKIGNRLYGCDTCQQVCPENKGKDFHLHPEFEPDPEAVKPKLIPLLQMSNREFKETFGAMAGSWRGKKPIQRNAILALAHYKDQTAVPHLLRLLKEDSRPVIRGTAAWALGKIGDPSAKSYLEAARPTEADADVIAEIEKGLKLLAEAKE

SEQ ID NO: 77000 - protein, 380 aa, Geobacillus subterraneus
  REGION 1..380: note = tr|A0A143MKF8|A0A143MKF8_9BACI Epoxyqueuosine reductase OS=Geobacillus subterraneus OX=129338 GN=queG; PE = 3 SV=1
MDVAALKQEVIEYSRSIGIDKIGFASADPFVELKERLRRQQELGYQSGFEEPDIEKRTNPSLLLSEAKSIIAIALAYPSKMKDAPRGTKTERRGLFCRASWGKDYHDVLRDRLQQLEEFLLIKVPHARVRSMVDTGELADRAVAERAGIGWSGKNCSIITPEFGSYVYLGEMITTIPFPPDEPIENRCGTCTKCIDACPTGALVQGGQLNAQRCISFLTQTKGFLADEFREKIGNRLYGCDTCQLVCPENKGKDFHLHPEFEPDPEAAKPKLIPLLQISNREFKEKFGAMAGSWRGKKPIQRNAILALAHYKDRTAVPYLLQLLKEDSRPVIRGTAAWALGKIGDVSAKPYLEEARQTETDPDVASEIEKGLKLLAEVKE

SEQ ID NO: 77001 - protein, 380 aa, Geobacillus thermocatenulatus
  REGION 1..380: note = tr|A0A226Q579|A0A226Q579_9BACI Epoxyqueuosine reductase OS=Geobacillus thermocatenulatus OX=33938; GN = queG PE=3 SV=1
MDVMALKQEVIEYSRSIGIDKIGFASADPFVELKERLRRQQELGYQSGFEEPDIEKRTNPSLLLPEAKSIIAIALAYPSKMQNAPRGTKTERRGVFCRASWGKDYHDVLRERLQQLEEFLLAKVPHARVRSMVDTGELADRAVAERAGIGWSGKNCSIITPEYGSYVYLGEMITNIPFPPDEPVENRCGTCTKCIDACPTGALVQGGQLNAQRCLSFLTQTKGFLADEFREKIGNRLYGCDTCQQVCPENKGKDFHLHPEFEPDPEAVKPKLIPLLQMSNREFQETFGAMAGSWRGKKPIQRNAILALAHYKDQTAVPHLLRLLKEDSRPVIRGTAAWALGKIGDPSAKPYLEAARQTEADADVIAEIEKGLKLLAEAKE

SEQ ID NO: 77002 - protein, 380 aa, Geobacillus thermodenitrificans
  REGION 1..380: note = tr|A0A1W6VNH2|A0A1W6VNH2_GEOTD Epoxyqueuosine reductase OS=Geobacillus thermodenitrificans OX=33940; GN = queG PE=3 SV=1
MDIVSLKQEVIEYSRSIGIDKIGFASADPFVELKERLRRQQELGYQSGFEEPDIEKRTNPSLLLPEAKSIIAIALAYPSKMKDAPRGTKNERRGLFCRASWGKDYHDVLRERLRQLEEFLLAKVPHARVRSMVDTGELADRAVAERAGIGWSGKNCSIITPEFGSYVYLGEMITTIPFPPDEPIENRCGTCTKCIDACPTGALVQGGQLNAQRCISFLTQTKGFLADEFREKIGNRLYGCDTCQLVCPENKKKDFHLHPEFEPDPEAAKPKLIPLLQVSNREFKEKFGAMAGSWRGKKPIQRNAILALAHYKDRTAVPHLLRLLKEDSRPVIRGTAAWALGKIGDVSAKPYLEEARQTETDSDVVAEIEKGLKLLTEVKE

SEQ ID NO: 77003 - protein, 380 aa, Geobacillus thermodenitrificans; identical to SEQ ID NO: 77002
  REGION 1..380: note = tr|A4IKM2|A4IKM2_GEOTN Epoxyqueuosine reductase; OS = Geobacillus thermodenitrificans (strain NG80-2); OX = 420246 GN=queG PE=3 SV=1

SEQ ID NO: 77004 - protein, 380 aa, Geobacillus thermoleovorans; identical to SEQ ID NO: 74503
  REGION 1..380: note = tr|A0A1C3D571|A0A1C3D571_GEOTH Epoxyqueuosine reductase OS=Geobacillus thermoleovorans OX=33941 GN=queG; PE = 3 SV=1

SEQ ID NO: 77005 - protein, 380 aa, Geobacillus thermoleovorans; identical to SEQ ID NO: 74503
  REGION 1..380: note = tr|G8N5M5|G8N5M5_GEOTH Epoxyqueuosine reductase; OS = Geobacillus thermoleovorans CCB_US3_UF5 OX=1111068; GN = queG PE=3 SV=1

SEQ ID NO: 77006 - protein, 380 aa, unidentified
  source 1..380: note = Geobacillus zalihae
  REGION 1..380: note = tr|A0A1V9CMQ7|A0A1V9CMQ7_9BACI Epoxyqueuosine reductase OS=Geobacillus zalihae OX=213419 GN=queG PE=3; SV = 1
MDVMALKREVIEYSRSIGIDKIGFASADPFVELKERLRRQQELGYQSGFEEPDIEKRTNPSLLLPEAKSIIAIALAYPSKMKNAPRGTKTERRGVFCRASWGKDYHDVLRERLQQLEEFLLAKVPHARVRSMVDTGELADRAVAERAGIGWSGKNCSIITPEFGSYVYLGEMITNIPFPPDEPVENRCGTCTKCIDACPTGALVQGGQLNAQRCLSFLTQTKGFLADEFREKIGNRLYGCDTCQQVCPENKGKDFHLHPEFEPDPEAVKPKLIPLLQMSNREFKETFGAMAGSWRGKKPIQRNAILALAHYKDQTAVPHLLRLLKEDSRPVIRGTAAWALGKIGDPSAKPYLEAARQTEADADVIAEIEKGLKLLAEAKE

SEQ ID NO: 77007 - protein, 254 aa, Geobacter argillaceus
  REGION 1..254: note = tr|A0A562V8S9|A0A562V8S9_9DELT Epoxyqueuosine reductase QueG OS=Geobacter argillaceus OX=345631; GN = JN12_03479 PE=4 SV=1
MKQNIKAYALELGVDDVGFAAAAGYDSPLTPALDTIFPGARTLIVMAFREASHCESENMRIAMGGRLAIMDFMKSSSYKLSHLLEREYGAKAMMIPMSYPSDISPEAKFGLIGDFSHRHAAIAAGLGSWGRHNLVIHPTLGARVLFSTILTDIELAADPPVTQELCTGCNLCVESCPGNALASEGKTEQMKCLVHSQPYGIGANIRFWKRFVDTPPEDQKKMLATPEYMRLYQASFIGYQYHCFKCYSVCPIGR

SEQ ID NO: 77008 - protein, 344 aa, Geobacter metallireducens
  REGION 1..344: note = tr|Q39WY3|Q39WY3_GEOMG Iron-sulfur cluster-binding protein OS=Geobacter metallireducens (strain GS-15 / ATCC 53774 / DSM 7210) OX=269799 GN=Gmet_0999 PE=4 SV=1
MSTDNLALNIREKAMEAGFDHCGIVKIDALADYVSRLEERAAAFPRSKPFYDFLSKLGTPQAAHEWGKSVIVCAMRYGKYRIPNRADRHIGKLYLYGGYRQPAYSQEYAGMAGFEAFLAAEGIRFAKDVFGIAPARLCAAQANLGVIRNNNFLYTEHGSWVWLETWLIDRELEYRESPNTLPSCPPGCSKCIDACPTGALKAPFLTDMGTCIARLTYSPSGEAPEPLRESMGTWLYGCDECQNACPMNKGRWEEKEEYPRLEELSRHISLEKIAEMDEHAVSDILSPMFWIIGKEKLWMWKCNVIRAMVNGKDPGHHSTIRKLCDDGNENVRRTAEWACRQLGI

SEQ ID NO: 77009 - protein, 266 aa, Geobacter sp.
  REGION 1..266: note = tr|A0A2T5RE99|A0A2T5RE99_9DELT Epoxyqueuosine reductase QueG OS=Geobacter sp. DSM 2909 OX=2135459; GN = C7376_101201 PE=4 SV=1
MNDIKEVIRNYILGLGVDDVGFASVDDYRSPRTPSLESLFPGVRSMIVMAFRELSACESPSPQLAMNARLDLMEFTRSACYRVARYVETQLGSPVVTAPVSYPMDFTTPQKIGLAEVSLRHAAVSAGLGAFGLHNLVVHPKFGTRVIFTAVLTKLELASDPAPEKNPCTSCGLCIKACPAGALNDEGKTDVMKCLMNSQPYGMGANIGFWCRFSDATPEEQKEMLQSTEYLSLYHAGSIGYQYFCFRCLAACPIGRSVRQESPGPT

SEQ ID NO: 77010 - protein, 269 aa, Geobacter sp.
  REGION 1..269: note = tr|A0A0A8WTJ7|A0A0A8WTJ7_9DELT Epoxyqueuosine reductase OS=Geobacter sp. OR-1 OX=1266765 GN=queG PE=4; SV = 1
MAERIRAEIERFVRESPLNRFPDSDTPYFDAPLVGFAAAGDPLFQRYKQIIGPFHRTPEELLNGAATVIVWSLPITQSTRESNRAESVRPSLDWARTRSFGDEFIKVLRRHLVAWLEQQGYRAIAPQLDPNWQALDDPHVGPVSTWSERHAAYAAGLGTFSLNDALITTKGIAHRLGSVVTDMVVGSTPEDRPGVRDNCLFYRDGSCMACVKRCPVDALSANGHDKKRCQSYLYTTLTQELAEQYGTPIPGCGLCQTKVPCEGGIPKGK

SEQ ID NO: 77011 - protein, 446 aa, Geobacter thiogenes
  REGION 1..446: note = tr|A0A1T4KD46|A0A1T4KD46_9DELT Epoxyqueuosine reductase QueG (Queuosine biosynthesis) OS=Geobacter thiogenes OX=115783 GN=SAMN02745119_00488 PE=4 SV=1
MELNQHPTVIRYHEKIAARASRITAQKLNAKELREICLETGVDDVGFVEINNALLADQKADILQMFPWAKTLISFVGRINRENLRSPARSIASLELHQVEERLTHAANALAAALERKGIRAATPAGGFPMEADNWLRGKMQVISHKPIAVAAGLGKMGLHRNVIHPVFGSFVLLGTVLIEAELDEYSTPLDYNPCIDCKLCVAACPTGAIGPDGFFNPVNCMTHTYRELLGGFTDWVENIADSKNSIDYRGKVSDAETVSMWQTLVCGPCYKSVYCLAVCPAGDEVIPQYLDDRKAFVNDVVKPLQQKTEPVYVLPGSDAEHHVLNKFPHKKIRRVGNGVRPPTIAAFLTSMPIAFQRHKSERLNATYHFTFSGIERAEATVVIKDKTLKIEQGHVGVADVSVRADARTWLRVLHKETSMIKQIVLRRIRVKGPLNLFKAFGKCFA

SEQ ID NO: 77012 - protein, 312 aa, Geofilum rubicundum
  REGION 1..312: note = tr|A0A0E9LT40|A0A0E9LT40_9BACT Epoxyqueuosine reductase OS=Geofilum rubicundum JCM 15548 OX=1236989; GN = queG PE=3 SV=1
MSLTSEYMAREIRSEALRIGFDDIGFSPAKELVEDKERLTQWLDNGYNAGMGYMANHFEKRVNPALLVEGSLSVITVVYNYHPSEALLSQKVPKISRYAYGLDYHDTIRKKIGSLFDFIRAHLYPQLEGRFFVDSAPLLERSLAVRAGLGWIGKNSMLINRKLGSYIFIGELVVNMELPYHESPMMDRCGGCSNCVDACPTQAILPDRVIDGNKCISYLTIENKTEIPRTFDGKLKGWAFGCDICQEVCPWNRKAPDTDEPDFRPSETLLTMEKGDWEELTAEGFSKLFKGSAVKRAKYAGWLRNYRFVTEK

SEQ ID NO: 77013 - protein, 372 aa, Geomicrobium sp.
  REGION 1..372: note = tr|A0A061NUL3|A0A061NUL3_9BACL Epoxyqueuosine reductase OS=Geomicrobium sp. JCM 19037 OX=1460634 GN=queG; PE = 3 SV=1
MNEELKEEIINFSKSIGIDRIGFASADPFLTLKERLKTQQQLGYDSGFEEPDIDKRTNPELLLPYAKSIISIALSYPSKLKNPPKGVKGNRRGLFCRASWGEDYHTVLNDRLERLQAFIKERVPEAKTASMVDTGALSDRAVAERAGIGWTGKNCMVITHEYGSYVYLGEMITTLAFEPDTPVEDGCGTCNKCVDSCPTGALIQGGQLDSQKCIAFLTQKKDMIPKRYRKKIGNRLYGCDTCQVVCPINKGKGDHYQPEFEPEPEKVKPELLPLLSMSNREFKETYGMMAGSWRGKKPIQRNAVIALGHFKEEAASPKLRDLLQNDPRPVIRGTAAWSLGEISGSENLEALRLAALHEDDDEVQKEIEEALQ

SEQ ID NO: 77014 - protein, 372 aa, Geomicrobium sp.
  REGION 1..372: note = tr|A0A061NGD8|A0A061NGD8_9BACL Iron-sulfur cluster-binding protein OS=Geomicrobium sp. JCM 19055; OX = 1460649 GN=JCM19055_4819 PE=4 SV=1
MNEELKQEIIAYSKTIGIDKIGFASADPFLTLKERLREQQRLGYESGFEESDIDLRTEPERLLPYAKSIIAIALSYPSKLKNPPKGVKGKRRGLFCRASWGADYHHVLNDRLQKLQEFIESKVPDAKMASMVDTGALSDRAVAERAGIGFSGKNCMIITPEYGSYVYLGEMITTIPFEPDTPIEEGCGTCNKCVESCPTGALIQGGQLDAQKCIAFLTQKKDFIPKQYRKKIGNRLYGCDTCQVVCPINKGKGEEYQPEFEPDPEKVKPELLPLLSLSNRQFKEKYGEMAGSWRGKKPIQRNAILALGHFKEESASETLRQLLTDDARPVIRGTAAWALGEIGGDDNELAMQQALEKEEDLDVIKEIEEALT

SEQ ID NO: 77015 - protein, 398 aa, unidentified
  source 1..398: note = Georhizobium profundi
  REGION 1..398: note = tr|A0A3Q8XL24|A0A3Q8XL24_9RHIZ Epoxyqueuosine reductase OS=Georhizobium profundi OX=2341112 GN=queG PE=3; SV = 1
MASRLANRPSSSNTNNLEATELARLVRQAALEEGFDAVRIVAPDAIESAAGHLASFIAEGRHATMDWMAETAERRGDPRVLWPDVRSVIMLAMNYGPEHDPLANLAFPDRAAISVYAQNRDYHDVIKGKLKTVAQKFASRAGADVKVFVDTAPVMEKPLAEKAGLGWQGKHTNLVSRKFGSWLFLGSIFTTAELVADEAESDHCGSCRACLDICPTNAFPAPYQLDARRCISYLTIEHKGTIPEEFRRPIGNRIYGCDDCLAVCPWNKFAETAREAKLKARDDLKAPSIADLLALDDTSFRQHFAGSPIKRIGRDRFVRNVLIAAGNSGLAELSAHCDPLLADPSPLVRAMAVWATAELADAGTLRHKAGHHLESEADPVVRAEWTRALDRQTLQETI

SEQ ID NO: 77016 - protein, 344 aa, unidentified
  source 1..344: note = Geosporobacter ferrireducens
  REGION 1..344: note = tr|A0A1D8GLQ5|A0A1D8GLQ5_9CLOT Fe-S oxidoreductase; OS = Geosporobacter ferrireducens OX=1424294 GN=Gferi_21265; PE = 4 SV=1
MSIEKLIQNKAYEFGYEKCGIVRIQDLEGYDKCLMERIDKVPASKMFYQNQSRLTHLPERYPWTKSVIVAVSHYGHYEVPGQLKGHIGKHYIFDGRVNTESQEFKRSVAMEQFLQDLGLKTASNRNFGIVGLRWAAMKAGLGVIRRNNFFYTESGSWVELEAWITDRDMELVESTNLPICPEGCSNCIKACPTCSLSSPYTMNPVSCVSFLTTFGGRDLSNDPLGKSFGTWIYGCDACQDACPMNSGKWTEKDEFPGVSEISLCLTPENIMKMEEEFYKHNIQPKFFYLSPDELWKWKVNVLNFMRNNYQESYKQYIMGACSNENEKIRDLAQMICKEMSLTDN

SEQ ID NO: 77017 - protein, 374 aa, unidentified
  source 1..374: note = Geosporobacter ferrireducens
  REGION 1..374: note = tr|A0A1D8GN68|A0A1D8GN68_9CLOT tRNA epoxyqueuosine(34) reductase QueG OS=Geosporobacter ferrireducens OX=1424294 GN=Gferi_24105 PE=4 SV=1
MVNRLKEKIKICAKDIGIDLIGFTSAAPFNEIKEILMERKEKGYLSGFEEQDIGKRIDPKQIMPDARTIIAIAINYYVEKPRLLEGKERPLGAIARSAWGRDYHEVLRDKLLLLMQNIEKLIGPFQYKIYVDTGSLSDRAVAWRAGLGWFGKNNMLITKKYGSWVFLGYAIVNFEVEPDQPMPDQCAGCNACIQACPAEALEEGYKLQGKKCLSFITQTKEDITPEVRQKMGNRLYGCDTCQCVCPHNHTVEETKHQEFSPEAYSDRPDLIEILHMDNKTFKVRYGKTAAGWRGKNNIRRNAIIALANRKDPLAIPHLKKLLFDESNMIRKYAIWAIIKLDAELARSIIKAHLENEKDEEIREIIEEFLGDDSH

SEQ ID NO: 77018 - protein, 374 aa, Geosporobacter subterraneus
  REGION 1..374: note = tr|A0A1M6G746|A0A1M6G746_9CLOT Epoxyqueuosine reductase OS=Geosporobacter subterraneus DSM 17957; OX = 1121919 GN=SAMN02745975_01200 PE=4 SV=1
MGEDLKEKIKQIARGLGIDLIGFTSAAPFNELEKIFLERKAQGYLSGFEEQDIAKRIDPRLTLENAETIIVIGMSYYTDASEICEEEGAARGTIARSAWGKDYHEVLRNKLLILMKKIEELIGFFQYRIFVDTGPLSDRAVARRAGLGWIGKNNMLITRQYGSWVFIGYGIVDFKIEQDEPLQDSCAGCNACIQACPAGALEEGYKLKGKKCLSFITQTKDEIESEECKKLGNRIYGCDTCQLVCPHNQKIKKTKTWEFLPDPSISRPKLVDLLSMDNQTFKEKYENTAAGWRGKNTLRRNAIIALANSRDPKGIPYLEKLLAEDSKMIRKYALRGIVSLEPQAAKNILKTHLKRERDAELKGFIENFLGDDCN

SEQ ID NO: 77019 - protein, 379 aa, Gibbsiella quercinecans
  REGION 1..379: note = tr|A0A250B0D8|A0A250B0D8_9ENTR Epoxyqueuosine reductase OS=Gibbsiella quercinecans OX=929813 GN=queG; PE = 3 SV=1
MTNPLDLNQLAQHIKQWGQSLGFQQVGICDTDLSAEEPKLQAWLDKQYHGEMEWMARHGMLRARPHELLPGTLRVISVRMNYLPAKAAFASTLRNPELGYVSRYALGRDYHKLLRQRLKKLGEQIKAYCGELNFRPFVDSAPVMERALAAKSGIGWIGKHSLILNREAGSWFFLGELLIDLPLPVDRPQQEQCGRCVACITTCPTGAIVAPYTVDARRCISYLTIELEGVIPLEFRPLLGNRIYGCDDCQLICPWNRFSQLTDEDDFSPRAALHAPELVELFGWSEEKFLRITEGSAIRRIGHLRWLRNIAVALGNAPYLDSAVLALRARQGESAMLDEHIAWALEQQLARRAEQGIAVLTTQKKRLIRAVEKGLPRDA

SEQ ID NO: 77020 - protein, 370 aa, Giesbergeria anulus
  REGION 1..370: note = tr|A0A1H9R1T5|A0A1H9R1T5_9BURK Epoxyqueuosine reductase OS=Giesbergeria anulus OX=180197 GN=queG PE=3; SV = 1
MVVSSSQLVPQIRQWARELGFSQIGVAGVDLSSAEAGLIQWLEQGFHGDMHYMAAHGLKRARPAELVPGTVSVITARMDYLPRTTPAGWQALEFARLQQPAQGVVSMYARGRDYHKVLRTRLQKLADQLAQAVGPLGHRVFTDSAPVLEAELAARSGQGWRGKHTLVLHRQAGSLFFLGEIYIDLALEPTEPVSAHCGQCTACLDVCPTQAIVAPYRLDARRCISYLTIEHSGPIPLELRPLLGNHIYGCDDCQLVCPWNKFAQTSTLPDFDARTGVSGQQLIHLFSWDEATFLRLTEGGPIRRIGHERWLRNVAVALGNALRTADSQQVLDLRTALQERVADSSALVREHVVWALAQGQASSVQMGSRL

SEQ ID NO: 77021 - protein, 307 aa, Gillisia hiemivivida
  REGION 1..307: note = tr|A0A5C7A0X4|A0A5C7A0X4_9FLAO Epoxyqueuosine reductase OS=Gillisia hiemivivida OX=291190 GN=queG PE=3; SV = 1
MELRSKYSEIIKAEAKRLGFMSCGISKAEFLETEAPRLEKWLKQNMHGEMSYMENHFDKRLDPTKLVSGSKSVISLLLNYYPSEFQNKDSYKISKYAYGTDYHFVIKEKLKQLLQFIQQEIGEVEGRAFVDSAPVLDKAWAAKSGLGWIGKNSNLLTKQVGSFYFIAELIVDLELEYDTPVTDHCGSCTACIDACPTQAIVEPYKVDGSKCISYFTIELKNELPNSYKDQFDDWMFGCDVCQDVCPWNKFSKSHNEPLFDPNPQILEYDKKDWEELTKETFNEIFKKSAVKRTKFDGLKRNIEFLKK

SEQ ID NO: 77022 - protein, 307 aa, Gillisia limnaea
  REGION 1..307: note = tr|H2BYG1|H2BYG1_9FLAO Epoxyqueuosine reductase; OS = Gillisia limnaea DSM 15749 OX=865937 GN=queG PE=3 SV=1
MATKNNHTQLIKTEAMRLGFMSCGISKAEFLETEAPRLESWLKRNMHGEMSYMENHFDIRLDPTKLVDGSKSVISFLLNYYPSQFQKADSYKISKYAYGTDYHFVIKEKLKQLLQFIQQEIGEVKGRAFVDSAPVLDKAWAAKSGLGWIGKNSNLLTKQVGSFYFIAELIVDLELEYDTPVTDHCGSCTACIDACPTQAIVDPYKVDGSKCISYFTIELKEELPTSVNGQFDDWMFGCDICQDVCPWNKFSKPHNEPLFNPHTDLLGMNKKDWQEITKEIFSEIFKKSAVKRTKFEGLKRNLRFLED

SEQ ID NO: 77023 - protein, 306 aa, Gillisia mitskevichiae
  REGION 1..306: note = tr|A0A495PZJ0|A0A495PZJ0_9FLAO Epoxyqueuosine reductase OS=Gillisia mitskevichiae OX=270921 GN=queG PE=3; SV = 1
MLQKAKYSELIKSEAKRLGFMSCGISKAEFLEEEAPRLEKWLKLNMHGEMSYMENHFDKRLDPTKLVSGSKSVISLLLNYYPSEFQREDTFKISKYAYGTDYHFVIKDKLKQLLQFIQQEIGEVDGRAFVDSAPVLDKAWAAKSGLGWIGKNSNLLTKQVGSFYFIAELIVDLELEYDLPVTDHCGSCTACIDACPTQAIVEPYKVDGSKCISYFTIELKNELPNSYKDQFDDWMFGCDICQDVCPWNKFSKSHNEPLFDPNPQVLTNDRKDWEELTKETFNEIFKKSAVKRTKFEGLKRNIDFLK

SEQ ID NO: 77024 - protein, 307 aa, Gillisia sp.
  REGION 1..307: note = tr|A0A559PJH5|A0A559PJH5_9FLAO Epoxyqueuosine reductase OS=Gillisia sp. Hel_I_86 OX=1249981 GN=queG PE=3; SV = 1
MLQKAKYSKLIKTKAKRLGFMSCGISKAGFLEEEAPRLENWLKQDMQGEMHYMENHFDKRLDPTKLVEGSKSVISLLLNYYPSALQREDSYKISKYAYGIDYHFVIKEKLKHLLQFIQQEIGEVGGRAFVDSAPVLDKAWAAKSGLGWIGKHSNLLTKQAGSFYFIAELIVDLDLEYDLPVTDHCGSCTACIDACPTQAIVEPYKVDGSKCISYFTIELKNELPNTYKNQFDDWMFGCDVCQDVCPWNKFSKSHNEPLFDPNPQLLNFDRKDWEELTKETFDEIFRKSAVKRTKFDGLKRNIEFLKE

SEQ ID NO: 77025 - protein, 307 aa, Gillisia sp.
  REGION 1..307: note = tr|A0A1H1LBP0|A0A1H1LBP0_9FLAO Epoxyqueuosine reductase OS=Gillisia sp. Hel1_33_143 OX=1336796 GN=queG; PE = 3 SV=1
MLQKSKYSELIKTEAKRLGFMSCGISKAEFLEEEAPRLETWLQKNMHGEMSYMENHFDKRLDPTKLVEGSKSVISLLLNYYPSEFQREDTYKISKYAFGTDYHFVIKDKLKNLLKYIQDEIGEVDGRAFVDSAPVLDKAWAARSGLGWIGKNANLLTKQVGSFYFIAELIVDLELEYDTPVTDHCGSCTACIDACPTQAIVEPYKVDGSKCISYFTIELKNELPNSYKDQFNDWMFGCDVCQDVCPWNKFSQPHNEPLFNPNLRLLDNSKKDWEELTKETFNEIFKKSAVKRTKFEGLRRNIDFLKK

SEQ ID NO: 77026 - protein, 313 aa, Gilvibacter sp.
  REGION 1..313: note = tr|A0A1Y0MN18|A0A1Y0MN18_9FLAO Epoxyqueuosine reductase OS=Gilvibacter sp. SZ-19 OX=754429 GN=queG PE=3; SV = 1
MNQNQSTYAKLIKTHAQRLGFLSCGISKAEFLAEEAPRLEQWLKAGMHGQMAYMENHFDKRLDPTLLVPGAKSVVSLLYNYYPQQKQDKDSFKISKYAYGEDYHFVVKDKLKELMHVLSEEIGEIGGRVFVDSAPVLDKVWAAKSGLGWIGKHSNLLSKKTGSFFFVAELIIDLDLEYDHPVTDHCGTCTACIDACPTQAIIKPYVVDGSKCISYATIELKEAIPKSFSGQMDDWMFGCDVCQDVCPWNRFSKPHSESRFNPKPELLQLDKNAWRELTEEVFGELFKKSAVKRTKYTGLMRNIAFLDRDTSSQ

SEQ ID NO: 77027 - protein, 409 aa, unidentified
  source 1..409: note = Gimesia maris
  REGION 1..409: note = tr|A0A3D3R005|A0A3D3R005_9PLAN tRNA epoxyqueuosine(34) reductase QueG OS=Gimesia maris OX=122; GN = queG PE=4 SV=1
MGTDAGPSLALNNESTVEKIMGEATGSTADEQSRKSAVIKQMAFDCGFDLAGLAPAITPAGFHHFLEWLNQGYAGEMSYLERRKDAYQHPQHVMSSVRSVLMLTLNYRTEDPPPVTGTEARVSRYAWGTTDYHKVIRKKLKQLSRQIREKCPDCETRGVVDTAPLLERDFAQLAGLGWIGKNTLLLNKSEGSWFFLAGLLLSDELEYDEPHHSSHCGTCTRCLDACPTDAFVAGGTLDARKCISYLTIELRDQPIPQELRPGLEDWAFGCDVCQDVCPWNRKTPLSREIAFQPVETYAPLDACELLTLNDAQFQERFQSTPMSRSGRAGLLRNAAIVLGNRGDVSAVPVLKNVLNDREPLIRGAAAWALGKLGDAEVQTFLKEQLAVEPEPHVRQELQQAIADMNIQSK

SEQ ID NO: 77028 - protein, 409 aa, unidentified
  source 1..409: note = Gimesia maris
  REGION 1..409: note = tr|A6CFA7|A6CFA7_9PLAN 4Fe-4S ferredoxin-type domain-containing protein OS=Gimesia maris DSM 8797; OX = 344747 GN=PM8797T_06707 PE=4 SV=1
MGTDAGSSLALNNESTVEKIMGEATGSTADEQSRKSAVIKQMAFDCGFDLAGLAPAITPAGFHHFLEWLNQGYAGEMSYLERRKDAYQHPQHVMSSVRSVLMLTLNYRTEEPPPVTGTEARVSRYAWGTTDYHKVIRKKLKQLSRLIREKYPDCETRGVVDTAPLLERDFAQLAGLGWIGKNTLLLNKSEGSWFFLAGLLLSDELEYDEPHHSSHCGTCTRCLDACPTDAFVAGGVLDARKCISYLTIELRDQPIPQELRPGLEDWAFGCDVCQDVCPWNRKTPLSREIAFQPVETYAPLDACELLSLDEVQFRERFQSTPMSRAGRAGLLRNAAIVLGNRGDVSAVPALKNVLNDREPLIRGAAAWALGKLGDAEVQTFLKEQLAVEPEPHVRQELQQAIADMNIQSK

SEQ ID NO: 77029 - protein, 368 aa, unidentified
  source 1..368: note = Gimesia sp.
  REGION 1..368: note = tr|A0A2E2C092|A0A2E2C092_9PLAN tRNA epoxyqueuosine(34) reductase QueG OS=Gimesia sp.; OX = 2024833 GN=queG PE=4 SV=1
MAYECGFDLAGLAPAITPAGYHHFLEWLNQGYAGEMNYLERRKDAYQHPAHVMSSVRSVMMLTLNYRTEDPPPVSGTEARVSRYAWGSTDYHKVIRKKLKQLSRLIREQFPDCETRGVVDTAPLLERDFAQLAGLGWIGKNTLLLNKTEGSWFFLAGLLLSDELDYDEPHHSSHCGTCTRCLDACPTDAFVEGGVLDARKCISYLTIELRDQPIPSELRPGLQDWAFGCDVCQDVCPWNRKTPLSREIAFQPVESYSPLDACELLTLDDAQFQERFQSTPMSRSGRAGLLRNAAIVLGNRGDQSAVPVLKRVLSDTEPLIRGAAAWALGQLGETETLDSLAAQLSVERESSVRLELQQAITSIKASGK

SEQ ID NO: 77030 - protein, 386 aa, unidentified
  source 1..386: note = Gimesia sp.
  REGION 1..386: note = tr|A0A5A8BC98|A0A5A8BC98_9PLAN tRNA epoxyqueuosine(34) reductase QueG OS=Gimesia sp. JC646; OX = 2605989 GN=queG PE=4 SV=1
MGKSAETTGKSLSQQSELIKRLAREVGFDLAGIAPAVTPTGYHSFLDWLNQGYAGEMSYLERRKEAYEHPRYVMSSVRSVLMLTLNYQTEAPPEVTGTEARVSRYAWGTTDYHKVIRKKLKQLSRLIREQYPDCETRGVVDTAPLLERDFAQLAGLGWIGKNTLLLNKREGSWFFLAGLLLSDELEYDEPQQTSHCGTCTRCLEACPTDAFVEAGTLDARKCISYLTIELRDQPIPAELRPGMQDWMFGCDVCQDVCPWNRKAPISGETAFQPVETFTPVDACELLTLDEAAFQERFQSTPMSRARRAGLLRNAAIVLGNRGDETAVQALLGVLNDEEPLIRGAAAWALGRLGAPTTVETLQTRLETETETDVIEELKQALSRLVS

SEQ ID NO: 77031 - protein, 387 aa, Glaciecola nitratireducens
  REGION 1..387: note = tr|G4QJ99|G4QJ99_GLANF Epoxyqueuosine reductase; OS = Glaciecola nitratireducens (strain JCM 12485 / KCTC 12276 / FR1064) OX=1085623 GN=queG PE=3 SV=1
MSVINSIDLNQLTDNIKTWGKSLGFQQVGVSDVDLSQHEKALRNWLENGYQGDMSFLERNIDKRLSPSELVPGTLRIISVRMDYLPPDASFASNLKSSSTAYISRYALGRDYHKVIRKKLQKLAEQIQEYTQDLSFRPFVDSAPVLEHAVAEKAGIGWTGKHSLTINKEAGSYFFLGELFINLPLPVDQAVEENCGKCTACISICPTQAIVEPYVVDARKCISYLTIENDGAIPVIYRKAIGNRIYGCDDCQLVCPWNKYAEVTEEKDFFARQHMHNRSLLDLFKWTEDEFLEHTEGSAIRRIGYRKWKRNIAVGLGNQIVQSVEDAENIKSVLQNARDFPDDMVQEHIRWALAEIEQSELQLGKKSVNRKTLSLARSVEKGMPRHG

SEQ ID NO: 77032 - protein, 407 aa, Glaciecola pallidula
  REGION 1..407: note = tr|K6ZNQ4|K6ZNQ4_9ALTE Epoxyqueuosine reductase; OS = Glaciecola pallidula DSM 14239 = ACAM 615 OX=1121922; GN = queG PE=3 SV=1
MSVINSIDLSQLTDNIKTWGKSLGFQQIGISDVDLSQHEKALKNWLENDYQGSMSFLERNVEKRLSPNELVPGTLRIISVRMDYLPPDASFASNLKSSSTAYISRYALGRDYHKVIRKKLQKLAEQIQEYTQDFSFRPFVDSAPVLEHAIAEKAGLGWTGKHSLTINKEAGSYFFLGELFINLPLPVDQPVEENCGKCTACISICPTQAIVAPYVVDARKCISYLTIENDGEIPIIYRKAIGNRVYGCDDCQLVCPWNKYAKVTEEKDFFARQHMHNRSLLDLFKWTENEFLKNTEGSAIRRIGYRKWKRNIAVGLGNQIAKTPQETEEIKSALENALDFPDAMVQEHIQWALAEVMQSDVQQVDTNVTRNKEEDGSASDTSLGKNTVNRKTQRLARSVEKGMPKHK

SEQ ID NO: 77033 - protein, 397 aa, Glaciecola punicea
  REGION 1..397: note = tr|H5TC39|H5TC39_9ALTE Epoxyqueuosine reductase; OS = Glaciecola punicea ACAM 611 OX=1121923 GN=queG PE=3 SV=1
MSLINSTNGSAHADVNDSSCLDLLALANNIKAWGKALGFQQVGVCDIDVSQQKPMLEAYLEKGYHASMDYLARNVDKRLAPEKLHPNTCRIISVRMNYLPPEAQFANNLQNDKQAYISRYALGRDYHKVMRSRLKKLGERIKQHCEALDYRPFVDSAPVLEHAIAQKAGLGWTGKHTLTLNEEAGSWFFLGELFVNIPLPLDESAQENCGTCTACISICPTQAIVAPYQLDARRCISYLTIEHKGVIPLVYRKAMGNRIYGCDDCQLVCPWNRYAEVTQEKDFFAKEFLQGASLVSLFELTKLEFLEKTQGSPIRRIGYESWQRNLSIAMGNAGFDEQILSSLQRALSCAVSDVLKEHFAWAIAEQKTRKANPEKAVSTRQHERLIRIVQKGLPRDA

SEQ ID NO: 77034 - protein, 414 aa, Glaciecola sp.
  REGION 1..414: note = tr|A0A3B8T1Q7|A0A3B8T1Q7_9ALTE Epoxyqueuosine reductase OS=Glaciecola sp. OX=1905676 GN=queG PE=3 SV=1
MSQINSIDLDNLAQNIKVWAKALGFQHVGICDVDLSQHSDHLKAWLDKQYYGDMLYFPERGMLRSDPAQLVPGTVRIISVSMDYLPPDASFAQHLSDPTKGYVSRYALGRDYHKLVRKRLKQLGDQIHTYCADTQFRPFVDSAPILEHAVAEKAGIGFTGKHSLTINPQTGSWSFLGELFINLPLPIDSPIADNCGTCTACKSICPTGAIVSDYVVDARKCISYLTIEHQGAIPEQYRAPMGNRIYGCDDCQLVCPYNRAAPLTQESDFFAREPLHGNSLLNLFSWDEQMFLRQTEGSAIRRIGYAKWQRNISVALGNAPTDTVISTVLHDKSKHLLAIQVMLNKPETLENPEKASQLANIARTYGFSEIPSLPDITMLIEHLSWALNTHGQSSLSRQQARLVRSIQKGLVRDA

SEQ ID NO: 77035 - protein, 407 aa, Glaciecola sp.
  REGION 1..407: note = tr|A0A2N1HXQ2|A0A2N1HXQ2_9ALTE Epoxyqueuosine reductase OS=Glaciecola sp. 33A OX=2057807 GN=queG PE=3; SV = 1
MSVINSIDLSQLTDNIKTWGKSLGFQQIGISDVDLSQHEKALKNWLENDYQGSMSFLERNVEKRLSPNELVPGTLRIISVRMDYLPPDASFASNLKSSSTAYISRYALGRDYHKVIRKKLQKLAEQIQEYTQDFSFRPFVDSAPVLEHAIAEKAGLGWTGKHSLTINKEAGSYFFLGELFINLPLPVDQPVEENCGKCTACISICPTQAIVAPYVVDARKCISYLTIENDGEIPIIYRKAIGNRVYGCDDCQLVCPWNKYAKVTEEKDFFARQHMHNRSLLDLFKWTENEFLKNTEGSAIRRIGYRKWKRNIAVGLGNQIAKTPQETQEIKSALENALDFPDEMVQEHIQWALAEVMQSDVQPINTNVARNKEEDGSASDGSLGKNTVNRKTQRLARSVEKGMPKHK

SEQ ID NO: 77036 - protein, 377 aa, Glaciimonas sp.
  REGION 1..377: note = tr|A0A2T6FB89|A0A2T6FB89_9BURK Epoxyqueuosine reductase OS=Glaciimonas sp. PCH181 OX=2133943 GN=queG; PE = 3 SV=1
MSQSSFTESENNPVNPAPLALTALAVTIKAWGRELGFADVRITDVDLSQQEAGFQAWLALGYHGEMDYMAAHGLKRARPAELVPGTIRSISVRMDYLPQDTDAAWRAYEKNRLNPEAAATATVSLYARGRDYHKVLRSRLQQLADRITAEIGPFGYRVFTDSAPVMEVALAQKAGLGWRGKHTLLLNREAGSLFFLGEMLTDLPLPTDTPITPHCGQCSACIDVCPTKAIIAPYTLDARRCISYLTIELKGSIPLEFRPLIGNRVYGCDDCQLFCPWNKFAQPSTLSDFDVRNGLDQATLVELFSWTEEQFNQRLQGSPIRRIGHERWLRNIAVGLGNAATSATEIIAALKARADDPSALIREHVEWALQQHGLPPL

SEQ ID NO: 77037 - protein, 393 aa, Globicatella sanguinis
  REGION 1..393: note = tr|A0A2I1PHF6|A0A2I1PHF6_9LACT tRNA epoxyqueuosine(34) reductase QueG OS=Globicatella sanguinis OX=13076 GN=queG PE=4 SV=1
MVTASAQLKEEIIAAAKEIGIDKIGFSTAEPFAHLKASLEEQKAKGHTSGFEHPNIDERLYPELIFDGPKSIISIALAYPSRIKNPYPQDRENRRGMFARASWGTDYHHILQDRLDKLIAFIKTKTETANFKPMVDTGELIDVAAAQRAGLGFIGKNGLLITKEFGSYVYLGEIITDIEFEPDTPVENGCGECTRCIDACPTNALLGDGRMNAQLCLSYQTQTKGYMPKEFRRKITHVIYGCDICQIVCPYNQGIDSHIHPEMEPNPDQVQPLLKPMLTMSNKEFNAKFGEMAGSWRGKKPLQRNAIIALANYRDRTALPLLLEIMEQDPRPMIRGTAAWAIAQIQRYYNVSMIQCVADQLEKETDPETIQEMTEALQTLKNKRMPRDEKKVE

SEQ ID NO: 77038 - protein, 393 aa, Globicatella sp.; identical to SEQ ID NO: 77037
  REGION 1..393: note = tr|A0A1E8YJU4|A0A1E8YJU4_9LACT Epoxyqueuosine reductase OS=Globicatella sp. HMSC072A10 OX=1739315; GN = HMPREF2811_01490 PE=4 SV=1

SEQ ID NO: 77039 - protein, 410 aa, Globicatella sulfidifaciens
  REGION 1..410: note = tr|A0A1T4NFI1|A0A1T4NFI1_9LACT Epoxyqueuosine reductase OS=Globicatella sulfidifaciens DSM 15739; OX = 1121925 GN=SAMN02746011_01741 PE=4 SV=1
MEVGAQVSTFFIERGMVMVTASAQLKEEIIAAAKEIGIDKIGFSTAEPFAHLKASLEEQKAKGHTSGFEHPNIDERLYPELIFDGPKSIISIALAYPSRIKNPYPQDRENRRGMFARASWGTDYHHILQDRLDKLISFIKTKTETANFKPMVDTGELIDVAAAQRAGLGFIGKNGLLITKEFGSYVYLGEIITDIEFEPDTPVENGCGECTRCIDACPTNALLGDGRMNAQLCLSYQTQTKGYMPKEFRRKITHVIYGCDICQIVCPYNQGIDSHIHPEMEPNPDQVQPLLKPMLTMSNKEFNAKFGEMAGSWRGKKPLQRNAIIALANYRDRTALPLLLEIMEQDPRPMIRGTAAWAIAQIQRYYNVSMIQCVANQLEKETDPETIQEMTEALETLKNKRMPRDEKKVE

SEQ ID NO: 77040 - protein, 309 aa, unidentified
  source 1..309: note = Gloeobacter kilaueensis
  REGION 1..309: note = tr|U5QIV1|U5QIV1_9CYAN Epoxyqueuosine reductase; OS = Gloeobacter kilaueensis JS1 OX=1183438 GN=queG PE=3 SV=1
MAPTAGQIKAQAQQLGFHKVGIAHADALTADPDWLREWLAQGYAADMQWMHDPRRQDIQQVLPGVQSVICVALNYSVPQEDPCPDQARIARYALGRDYHKVLGRPLKALARWIEASAPGHRAIAYVDTGPIQEKAWAQAAGLGWIGKNACLITLEYGSWVFLGEVLTTVELEPDGAHANYCGSCTRCLAACPTAAIVRPAQVDARACLAYHTIENRAERLPATISSQQHNWVVGCDLCQSCCPYNQRAERWGHYSDVADFAPREPWQRLDLQRAQQMSDDEFDRLSTGSAIRRVRASGLRRNAQSALGE

SEQ ID NO: 77041 - protein, 319 aa, unidentified
  source 1..319: note = Gloeobacter violaceus
  REGION 1..319: note = sp|Q7NKL3|QUEG_GLOVI Epoxyqueuosine reductase; OS = Gloeobacter violaceus (strain ATCC 29082 / PCC 7421); OX = 251221 GN=queG PE=3 SV=1
MAPTAAQIKSRARALGFHKVGIARADALDGEAAERLGGWLAAGYAGEMRWMHDPRRRDIQQVLPGVRSVICVALSYNTAQGEPAPGQARISRYALGRDYHKVLGKPLKELARWIEASDPGCRAVAYVDTGPVQEKAWAEAAGLGWIGKNACLITLEYGSWVFLGEILTTLDLEANDPHPNYCGTCTRCLSACPTAALVEPAVVDARKCLAYHTIENRAPELPEAIAEHQHGWVVGCDLCQTCCPFNLRAERWGRYSEVADFAPRDPWNEITLDQLADLSDAEFERWSEGSAIRRVKASGLRRNARSALGASGDSLAQAH

SEQ ID NO: 77042 - protein, 309 aa, Gloeocapsa sp.
  REGION 1..309: note = tr|L8LJQ1|L8LJQ1_9CHRO Epoxyqueuosine reductase; OS = Gloeocapsa sp. PCC 73106 OX=102232 GN=queG PE=3 SV=1
MSFLDSEAIKTKILAMGFDRVGIAPVEAQNEDDANSQLKTWLALGYHGDLSWMENPKRLDIKACLPEVQSVICVALNYYTPVERPVGKEYGKISRYAWGRDYHKIMHKKLKQVCDWLESQCETIKTRYYSDTGPIQDKAWAQRAGLGWIAKNANLITRNYGSWVFLGEILINVPLQPDQPHTEHCGSCTRCLDACPTQAITQPFVVDANLCIAYHTIENRAEELPSQIAQNLQGWVAGCDICQDVCPWNQRFAKPTDKIEFNPYPHNVGPKLTELANLTELEWDWRFRSSALRRIKPAMFRRNARANLS

SEQ ID NO: 77043 - protein, 316 aa, Gloeocapsa sp.
  REGION 1..316: note = tr|K9XDD9|K9XDD9_9CHRO Epoxyqueuosine reductase; OS = Gloeocapsa sp. PCC 7428 OX=1173026 GN=queG PE=3 SV=1
MSIDTTQIKQKALELGFHRVGIAAVDKGVTEPQHLQAWLALGYQADMAWMANPKRQDIKLVMPDVRSLICVAINYYTPHQRPQEAKYAKISRYGWGRDYHKVLHKKLKLFSTWLEAQAEGIKARYYADTGPVQDKVWAQQAGIGWIAKNGNVITREYGSWVFLGEVLTNLSLTPDQPHTEHCGTCTRCLDACPTDAIAQPFVVDANRCIAYHTIENRSEELPDAVAAQLHGWVAGCDICQDVCPWNQRFAKETDVAEFQPYPWNISPTLAELAEISDAEWDKRFPASALRRIKPEMLRRNAKANLQGAAIMSTSQE

SEQ ID NO: 77044 - protein, 333 aa, unidentified
  source 1..333: note = Gloeomargarita lithophora
  REGION 1..333: note = tr|A0A1J0AA94|A0A1J0AA94_9CYAN Epoxyqueuosine reductase OS=Gloeomargarita lithophora Alchichica-D10; OX = 1188229 GN=queG PE=3 SV=1
MLTAEAVKAEASRLGFHRVGIASVTPAPNSHLSEWLAAGYQGDMAWLSDERRHDLERVLPGVRSVIAVALNYYWPGAQPAVGKIARYAWGRDYHRVVGRRLKAFAHWLQQSAPDTQTRAYVDTGPVAEKLWAEWAGLGWVGKHSNLITRQYGSWVVLGEVLTTLELTPDAPHREHCGTCTRCLEACPTQAIVRPFVVDSRRCIAYHTIENRQAELPPAIAANLQGWLAGCDICQEVCPWNQRFAQPTDIQEFAPRLPPWSLRVWAALDVETWDQSLRGSALRRIKPAMWRRNAQALLANTPPEPASRSIPFGGQSSEETPSPSCAPGVAPCLE

SEQ ID NO: 77045 - protein, 306 aa, unidentified
  source 1..306: note = Gloeothece citriformis
  REGION 1..306: note = tr|B7KL35|B7KL35_GLOC7 Epoxyqueuosine reductase; OS = Gloeothece citriformis (strain PCC 7424) OX=65393; GN = queG PE=3 SV=1
MVKEEQIKQEAIALGFHKVGIAQVNAQETAVTRLKAWLSLGYHGDMAWMANPKRFDVRACMPEVKSIICVALNYYTPHQRPQGDEYGKISRYSWGRDYHRVMDKKLKELSRWLEGQEKGIKTRYYADTGPIQDKVWAQQAGIGWIAKNGNVITRDYGSWVFLGEILTNLQLTPDQPHTEHCGTCRRCIDACPTGAITQPFIVDANRCIAYHTIENRSETIPEAIASHLEGWVAGCDICQDVCPWNQRFAKTTDIDEFQPYSGNIAPKLTELAQLSEQEWNERFPASALRRIKPQMWRRNARANLEK

SEQ ID NO: 77046 - protein, 306 aa, unidentified
  source 1..306: note = Gloeothece verrucosa
  REGION 1..306: note = tr|E0UCU4|E0UCU4_GLOV7 Epoxyqueuosine reductase; OS = Gloeothece verrucosa (strain PCC 7822) OX=497965; GN = queG PE=3 SV=1
MILRDQIKQQAIRLGFHKVGIAAAKGQEAAVSQLKAWLSLGYQADMEWMANPKRFDVRACMPEVKSIICVALNYYTAHQRPEGKEYGKIARYGWGRDYHRVMHKKLKALSQWLEGHEPGIQTRYYADTGPIQDKVWAQEAGMGWLAKNGNVITREYGSWVFLGEILTNIELKPDQPHTAHCGTCQRCIEACPTGAITQPFVVDANRCIAYHTIENRQEKLPEAITSNLGGWVAGCDICQDVCPWNQRFAVETDVEDFQPLPGNVAPKLTELAQMSEQEWNDRFPASALRRIKPQMWRRNARANLET

SEQ ID NO: 77047 - protein, 357 aa, Gluconacetobacter diazotrophicus
  REGION 1..357: note = tr|A9HBJ5|A9HBJ5_GLUDA Epoxyqueuosine reductase; OS = Gluconacetobacter diazotrophicus (strain ATCC 49037 / DSM 5601 / PAl5) OX=272568 GN=queG PE=3 SV=1
MEGGLPPGRAAILRDAIRDRALALGFDAVGFCEAALGDEARARLADFLAAGHHGSMGWLAERSAQRGDPRALWPEARSVIALGLSYAPGTDALATVGRADRGNISVYARNRDYHDVVKGMLKHVAQFVVAEGARAGAATGVKVFVDTAPVLEKPLAERAGLGWQGKHTNLVSRRHGSWLLLGEIYTTLALPRTDPSGGGCGTCRRCLDACPTNAFPEPYRMDARRCISYLTIENPGPIPLEFRAAMGNRIYGCDDCLAVCPWNRFATASRQMKLQARDDLTAPRLGALARLDDAAFRALFSGSPVKRIGRDRFVRNVLVAIGNSGLAALRPVAQDLCGDPDPVVAEAARWAVERLPS

SEQ ID NO: 77048 - protein, 357 aa, Gluconacetobacter diazotrophicus
  REGION 1..357: note = tr|B5ZGL6|B5ZGL6_GLUDA Epoxyqueuosine reductase; OS = Gluconacetobacter diazotrophicus (strain ATCC 49037 / DSM 5601 / PAl5) OX=272568 GN=queG PE=3 SV=1
MEGGLPPGRAAILRDAIRDRALALGFDAVGFCEAALGDEARARLADFLAAGHHGSMGWLAERSAQRGDPRALWPEARSVIALGLSYAPGTDALATVGRADRGNISVYARNRDYHDVVKGMLKHVAQFVVAEGARAGAATGVKVFVDTAPVLEKPLAERAGLGWQGKHTNLVSRRHGSWLLLGEIYTTLALPRTDPSGGGCGTCRRCLDACPTNAFPEPYRMDARRCISYLTIENPGPIPLEFRAAMGNRIYGCDDCLAVCPWNRFATASRQMKLQARDDLTAPRLAALARLDDAAFRALFSGSPVKRIGRDRFVRNVLVAIGNSGLAALRPVAQDLCGDPDPVVAEAARWAVERLPS

SEQ ID NO: 77049 - protein, 365 aa, Gluconacetobacter entanii
  REGION 1..365: note = tr|A0A318Q5Q2|A0A318Q5Q2_9PROT Epoxyqueuosine reductase OS=Gluconacetobacter entanii OX=108528 GN=queG; PE = 3 SV=1
MARARPVTYSPDAQGRLARRIHERALAVGFDAVGFAPAMLDDATRARLREFVATGHHGAMDWMAQRMAWRGDPRALWPEARSVISLGLSYAPEGDALATLRDPMAGNISVYARHRDYHDVVKGMLKQVAQFVVAEGRRQHGDDAPPPGVKVFVDTAPVMEKPLAERAGLGWQGKHTNLVSRTHGSWLFLGEIYTTLDLPHSAPSGGGCGTCTRCLDVCPTSAFPAPGQMDARRCISYQTIENPDPIPHDLRPLMGNHIYGCDDCLAVCPWNRFAQATRQMKLRARPDLVAPALRDLAVLDDAAFRALFSGSPVKRIGRARFVRNVLVAIGNSARADLRCVAQALCDDPDPVVADAARWAVGCLPS

SEQ ID NO: 77050 - protein, 357 aa, Gluconacetobacter liquefaciens
  REGION 1..357: note = tr|A0A370FXF1|A0A370FXF1_GLULI Epoxyqueuosine reductase OS=Gluconacetobacter liquefaciens OX=89584; GN = queG PE=3 SV=1
MENGPPPGRAVALRDAIRDKALALGFDAVGFCAAALGDDARRHLADFLAAGHHGAMGWLADRVEQRGDPRALWPEARSVIALGLSYAPAGDALATTRLADRGNISVYARHRDYHDVVKGMLKHLAQFVVAQGARAGVTPEVKVFVDTAPVMEKPLAEQAGLGWQGKHTNLVSRRHGSWLFLGEIYTSLELPASDESGGRCGSCHRCLDACPTDAFPAPYQLDARRCISYLTIESSGPIPEPFRAAMGNRIYGCDDCLAVCPWNRFATESRHMKLRAREDLTMPRLADLARLDDAGFRALFSGSPVKRIGRDRFVRNVLVAVGNSGQAALVPVAQDLCEDANAVVAETARWAVGRLPR

SEQ ID NO: 77051 - protein, 357 aa, Gluconacetobacter sp.
  REGION 1..357: note = tr|F3S4J2|F3S4J2_9PROT Epoxyqueuosine reductase; OS = Gluconacetobacter sp. SXCC-1 OX=1004836 GN=queG PE=3; SV = 1
MARAACAHDPAALAARIADHARRLGFDAVGFTPARLDDGTRARLAAFVENGFAGSMGWMAQRMEQRGDPRGLWPEVRSVIALGVSYTPDGDPLATTRVPDAGNISVYARNRDYHDVVKGMLKHLAQFVVNEGRRQGSDTEVKVFVDTAPVMEKPLARDAGLGWQGKHTSLVSRQHGSWLFLGEVYTTLDLPQSAPSGGGCGTCTRCLVACPTDAFPAPGVMDARRCLSYLTIENRGPIPHALRPAMGNRIYGCDDCLAACPWNRFAQATRHMKLAARDDLRAPALRELAALDDGGFRRRFSGSPIKRIGRERFVRNVAVAIGNSGQPALRSAAMALCSDPDPVVAEAARWAVARLPR

SEQ ID NO: 77052 - protein, 352 aa, Gluconobacter albidus
  REGION 1..352: note = tr|A0A1U9L007|A0A1U9L007_9PROT Epoxyqueuosine reductase OS=Gluconobacter albidus OX=318683 GN=queG PE=3; SV = 1
MPDFPTPNTGLETRIADHARHLGFDAVGFCKAELGPEVAQGLREFVAQGHHGTMEWMETRIEERAHPQALWPEVRSVISLGLSYAPAQGPTTDPECGNISVYARNRDYHDVIKGMLKHLAQYVVKLGGPETQVKVFVDTAPVSERALAEKAQLGWTGKHTCLVSREHGSWLLLGEIYTTLELAPSEPKGGSCGSCTRCLTACPTDAFTAPYRMDARRCISYLTIEHKGPIPHELRAKIGNHIYGCDDCLSVCPWNRFAESARHIKLQARPELVAPKLDELVRLDDATFRTFFSGSPIKRIGRNRFVRNVLIAIGNSADPSLLPAARDLLADPDPDVAETAHWAITCLEDHPA

SEQ ID NO: 77053 - protein, 352 aa, Gluconobacter albidus
  REGION 1..352: note = tr|A0A149TL79|A0A149TL79_9PROT Epoxyqueuosine reductase OS=Gluconobacter albidus OX=318683 GN=queG PE=3; SV = 1
MPDFPTPNTGLETRIADHARHLGFDAVGFCKAELGPEVAQGLQEFVAQGHHGTMEWMETRIEERAHPQALWPEVRSVISLGLSYAPAQGPTTDPECGNISVYARNRDYHDVIKGMLKHLAQYVVKLGGPETQVKVFVDTAPVSERALAEKAQLGWTGKHTCLVSREHGSWLLLGEIYTTLELAPSEPKGGSCGSCTRCLTACPTDAFTAPYRMDARRCISYLTIEHKGPIPHELRAKIGNHIYGCDDCLSVCPWNRFAESARHIKLQARPELVAPKLDELVRLDDATFRTFFSGSPIKRIGRNRFVRNVLIAIGNSADPSLLPAARDLLADPDPDVAETAHWAITCLEDHPA

SEQ ID NO: 77054 - protein, 354 aa, Gluconobacter cerinus
  REGION 1..354: note = tr|A0A1B6VJU3|A0A1B6VJU3_9PROT Epoxyqueuosine reductase OS=Gluconobacter cerinus OX=38307 GN=queG PE=3; SV = 1
MTSRPSPSRPGRSLEERIEDHARHLGFDAVGFCAAELGPDVEAGLRAFVAHGHHGTMEWMETRIEQRSHPQTLWPEARSVISLAVCYAPAEDPDATLRQPDRGNISVYARNRDYHDVIKGMLKHLAQFVVKLGDETTQVKVFVDTAPVSERALAEKAHLGWQGKHTCLVSRTHGSWLLLGEIYTTLDLSPSEPKGGSCGTCTSCLTACPTDAFLGPYRMDARRCISYLTIEHKGPIPHDLREKMGNHIYGCDDCISACPWNRFAEASRHIKLQARPELIDPKLAELAALDDAAFRTLFSGSPVKRIGRNRFVRNVLIAIGNSNDPALVPSAQALQSDPDPDIAETAGWALERLT

SEQ ID NO: 77055 - protein, 354 aa, Gluconobacter frateurii
  REGION 1..354: note = tr|A0A0D6PSL8|A0A0D6PSL8_9PROT Epoxyqueuosine reductase OS=Gluconobacter frateurii M-2 OX=1231354; GN = queG PE=3 SV=1
MTSRPSLSRAGRSLEERIEDHARHLGFDAVGFCTAELGPDVEAGLRAFVAQGHHGTMEWMETRIEQRSHPQALWPEARSVISLALCYAPAEDPDATLRQPDRGNISVYARNRDYHDVIKGMLKHLAQFVVKLGDETTQVKVFVDTAPVSERALAEKAHLGWQGKHTCLVSRTHGSWLLLGEIYTTLDLSASEPKSGSCGTCTSCLTACPTDAFLGPYRMDARRCISYLTIEHKGPIPLDLREKMGNHIYGCDDCIAACPWNRFAEASRHIKLQARPDLVEPKLADLAALDDAAFRTFFSGSPVKRIGRNRFVRNVLIAIGNSNDPGLVPSAQALQSDPDPDIAETARWALERLT

SEQ ID NO: 77056 - protein, 354 aa, Gluconobacter frateurii
  REGION 1..354: note = tr|A0A0S6TDF7|A0A0S6TDF7_9PROT Epoxyqueuosine reductase OS=Gluconobacter frateurii NBRC 103465; OX = 1307834 GN=queG PE=3 SV=1
MTSRPSPSRPGRSLEERIKDHARHLGFDAVGFCAAELGPDVEAGLRAFVAQGHHGTMEWMETRIEQRSHPQALWPEARSVISLAVCYAPAEDPDATLRQPDRGNISVYARNRDYHDVIKGMLKHLAQFVVKLGDETTQVKVFVDTAPVSERALAEKAHLGWQGKHTCLVSRTHGSWLLLGEIYTTLDLRPSEPKGGSCGTCTSCLTACPTDAFLGPYRMDARRCISYLTIEHKGPIPHDLREKMGNHIYGCDDCIAACPWNRFAEASRHIKLQARPELIEPKLAELAALDDAAFRTLFSGSPVKRIGRNRFVRNVLIAIGNSNDPELVPSAQALQSDPDPDIAETACWALERLT

SEQ ID NO: 77057 - protein, 354 aa, Gluconobacter japonicus
  REGION 1..354: note = tr|A0A149SHD8|A0A149SHD8_GLUJA Epoxyqueuosine reductase OS=Gluconobacter japonicus OX=376620 GN=queG; PE = 3 SV=1
MTSRPSPSRPGRSLEERIEGHARHLGFDAVGFCAAELGPDVEAGLRAFVAQGHHGTMEWMETRIEQRSHPQALWPEARSVISLAVCYAPAEDPDATLRQPDRGNISVYARNRDYHDVIKGMLKHLAQFVVKLGDETTQVKVFVDTAPVSERALAEKAHLGWQGKHTCLVSRTHGSWLLLGEIYTTLDLRPSEPKGGSCGTCTSCLTACPTNAFIGPYRMDARRCISYLTIEHKGPIPHDLREKMGNHIYGCDDCIAACPWNRFAEASRHIKLQARPELIEPKLAELAALDDAAFRTLFSGSPVKRIGRNRFVRNVLIAIGNSNDPELVPSAQALQSDPDPDIAETACWALERLI

SEQ ID NO: 77058 - protein, 354 aa, Gluconobacter japonicus
  REGION 1..354: note = tr|A0A149SHW7|A0A149SHW7_GLUJA Epoxyqueuosine reductase OS=Gluconobacter japonicus OX=376620 GN=queG; PE = 3 SV=1
MTSRPSPSRPGRSLEERIEDHARHLGFDAVGFCAAELGPDVEAGLRAFIAQGHHGTMEWMETRIEQRSHPQALWPEARSVISLAVCYAPAEDPAATLRQPDRGNISVYARNRDYHDVIKGMLKHLAQFVVKLGDETTQVKVFVDTAPVSERALAEKAHLGWQGKHTCLVSRTHGSWLLLGEIYTTLDLRPSEPKGGSCGTCTSCLTACPTDAFLGPYRMDARRCISYLTIEHKGPIPHDLREKMGNHIYGCDDCIAACPWNRFAEASSHIKLQARPELIEPKLAELAALDDAAFRTFFSGSPVKRIGRNRFVRNVLIAIGNSNDPELVPSAQALQSDPDPDIAETARWALERLT

SEQ ID NO: 77059 - protein, 352 aa, Gluconobacter kanchanaburiensis
  REGION 1..352: note = tr|A0A511B9R3|A0A511B9R3_9PROT Epoxyqueuosine reductase OS=Gluconobacter kanchanaburiensis NBRC 103587; OX = 1307948 GN=queG PE=3 SV=1
MRTSQKADTGLETRITDHARHLGFDAVGFCKAELGPEVAQGLREFVAQGHHGTMEWMETRIEERAHPQALWPEVQSVISLGLSYAPAEGPTTDPECGNISVYARNRDYHDVIKGMLKHLAQYVVKLGGPETQVKVFVDTAPVSERALAEKAQLGWTGKHTCLVSREHGSWLLLGEIYTTLELTPSQPTGGSCGSCTRCLTACPTDAFTAPGKMDARRCISYLTIEHKGPIPHDLRPKIGNHIYGCDDCLSVCPWNRFAESARHIKLQARPELVAPKLDELVRLDDVAFRTFFSASPIKRIGRNRFVRNVLIAIGNSADPTLASSARALLNDPDPDISETAHWALNRLEGQSA

SEQ ID NO: 77060 - protein, 358 aa, unidentified
  source 1..358: note = Gluconobacter morbifer
  REGION 1..358: note = tr|G6XMQ6|G6XMQ6_9PROT Epoxyqueuosine reductase; OS = Gluconobacter morbifer G707 OX=1088869 GN=queG PE=3 SV=1
MICMSSSAKSSATTRSFLEDRIAEQARRLGFDAVGFCEARLDPEIEKTLRVFVGDGHHGTMEWMETRIEQRAQPRVLWPEVRSIIVLGVSYAPADNALETLGNPDCGNISVYARNRDYHDVIKGMLKHLAQFVVKLGDNDTQVKVFVDTAPVSERALAEKAQLGWTGKHTCLVSRTQGSWLLLGEIYTTLDLRPSAPQGGSCGTCSRCLTACPTEAFLGPYQMDARRCISYLTIEHKGPIPHELREKVGNRIYGCDDCLAVCPWNRFAAASRHIKMQPRPELVAPKLDELAALDDAAFRRLFSGSPVKRIGRDRFVRNVLIAIGNSGDRALAPSARALLADADEDVAETARWALEKLI

SEQ ID NO: 77061 - protein, 405 aa, Gluconobacter oxydans
  REGION 1..405: note = tr|A0A4R3ZVN3|A0A4R3ZVN3_GLUOY Epoxyqueuosine reductase OS=Gluconobacter oxydans OX=442 GN=queG PE=3 SV=1
MARRCRPVPDVASHFQIVTNAVCISRSGQQKSWSVCLPDGITAPRSPARPVPSMPASPKPDTGPEARIAAHARHLGFDAVGFCKAELGPDVARNLREFVAQGHHGTMEWMETRLEERAHPKALWPEVRSVISLGLSYAPAEGPTTDPECGNISVYARNRDYHDVIKGMLKHLAQFVVKLGGPETQVKVFVDTAPVSERALAEKAHLGWTGKHTCLVSREHGSWLLLGEIYTTLELTPSEPTGGSCGSCTRCLTACPTEAFTGPGKMDARRCISYLTIEHKGPIPHDLRPKIGNHIYGCDDCLSVCPWNRFAETARHIKLQARPELIAPKLDELVRLDDATFRTFFSGSPVKRIGRNRFVRNVLIAIGNSADPSLVSSARDLLNDPDPDVSETAQWALSRLEEQPA

SEQ ID NO: 77062 - protein, 354 aa, Gluconobacter oxydans; identical to SEQ ID NO: 77055
  REGION 1..354: note = tr|K7T9F4|K7T9F4_GLUOY Epoxyqueuosine reductase; OS = Gluconobacter oxydans H24 OX=1224746 GN=queG PE=3 SV=1

SEQ ID NO: 77063 - protein, 352 aa, Gluconobacter roseus
  REGION 1..352: note = tr|A0A4Y3MF55|A0A4Y3MF55_9PROT Epoxyqueuosine reductase OS=Gluconobacter roseus NBRC 3990 OX=1307950; GN = queG PE=3 SV=1
MSASARSDTAIENRIADHARHLGFDAVGFCKAELGPDVAEGLREFVAQGHHGTMEWMETRLDERAHPQALWPEVQSVISLGLSYAPAEGPTTDPECGNISVYARNRDYHDVIKGMLKHLAQFVVKLGGPDTQVKVFVDTAPVSERALAEKAHLGWTGKHTCLVSREHGSWLLLGEIYTTLELTSSDPMGGSCGSCTRCLTACPTEAFTGPGKMDARRCISYLTIEHKGPIPHELRPKIGNHIYGCDDCLAVCPWNRFAESAHHIKLQARPELIAPKLDELVRLDDATFRTFFSGSPVKRIGRNHFVRNVLIAIGNSADLSLVPAARNLLTDPDPDVSETAQWAINRLEGLSA

SEQ ID NO: 77064 - protein, 354 aa, Gluconobacter sp.
  REGION 1..354: note = tr|A0A252BNF5|A0A252BNF5_9PROT Epoxyqueuosine reductase OS=Gluconobacter sp. DsW_058 OX=1511210 GN=queG; PE = 3 SV=1
MTSRPSPSRPGRSLEERIEDHARHLGFDAVGFCAAELGPDVEAGLRAFVAQGHHGTMEWMETRIEQRSHPQALWPEARSVISLALCYAPAEAPDATLRQPDRGNISVYARNRDYHDVIKGMLKHLAQFVVKLGDETTQVKVFVDTAPVSERALAEKAHLGWQGKHTCLVSRTHGSWLLLGEIYTTLDLSPSEPKGGSCGTCTSCLTACPTDAFLGPYRMDARRCISYLTIEHKGPIPHDLREKMGNHIYGCDDCISACPWNRFAEASRHIKLQARPDLIEPKLAELAALDDAAFRTLFSGSPVKRIGRNRFVRNVLIAIGNSDDPALVPSAQALQSDPDPDIAETARWALERLT

SEQ ID NO: 77065 - protein, 352 aa, Gluconobacter sphaericus
  REGION 1..352: note = tr|A0A4Y3QCV2|A0A4Y3QCV2_9PROT Epoxyqueuosine reductase OS=Gluconobacter sphaericus NBRC 12467; OX = 1307951 GN=queG PE=3 SV=1
MPTSPKPDTGLEARIAAHALHLGFDAVGFCKAELGPEVARNLREFVAQGYHGTMDWMETRIEERSHPQALWPEVRSVISLGLSYAPAEGPTTNPECGNISVYARNRDYHDVIKGMLKHLAQFVVKLGGPETQVKVFVDTAPVSERALAEKAHLGWTGKHTCLVSREHGSWLLLGEIYTTLELTPSAPMGGGCGSCTRCLTACPTEAFTGPGKMDARRCISYLTIEHKGPIPHELRPKIGNHIYGCDDCLAVCPWNRFAESARHIKLQARPELIAPKLDGLVRLDDATFRTFFAGSPVKRIGRNRFVRNVLIAIGNSADPSLISSARELLSDPDPDVSETAQWALNRLEAQPK

SEQ ID NO: 77066 - protein, 354 aa, Gluconobacter thailandicus
  REGION 1..354: note = tr|A0A5C0A168|A0A5C0A168_GLUTH Epoxyqueuosine reductase OS=Gluconobacter thailandicus OX=257438 GN=queG; PE = 3 SV=1
MTSRPSPSRPGRSLEERIEDHARHLGFDAVGFCAAELGPDVEAGLRAFVAQGHHGTMEWMETRIEQRSHPQALWPEARSVISLALCYAPAEDPDATLRQPDRGNISVYARNRDYHDVIKGMLKHLAQFVVKLGDETTQVKVFVDTAPVSERALAEKAHLGWQGKHTCLVSRTHGSWLLLGEIYTTLDLSASEPKGGSCGTCTSCLTACPTDAFLGPYRMDARRCISYLTIEHKGPIPLDLREKMGNHIYGCDDCIAACPWNRFAETSRHIKLQARPDLIEPKLADLAALDDTAFRTLFSGSPVKRIGRNRFVRNVLIAIGNSNDPGLVPSAQALQSDPDPDIAETARWALERLT

SEQ ID NO: 77067 - protein, 354 aa, Gluconobacter thailandicus; identical to SEQ ID NO: 77055
  REGION 1..354: note = tr|M9M7B8|M9M7B8_GLUTH Epoxyqueuosine reductase; OS = Gluconobacter thailandicus NBRC 3255 OX=1291534 GN=queG; PE = 3 SV=1

SEQ ID NO: 77068 - protein, 330 aa, Gluconobacter wancherniae
  REGION 1..330: note = tr|A0A511B2U0|A0A511B2U0_9PROT Epoxyqueuosine reductase OS=Gluconobacter wancherniae NBRC 103581; OX = 656744 GN=queG PE=4 SV=1
MGFDAIGFCKAELDPGVEKGLRAFVLQGHHGTMEWMETRIEERAQPKVLWPEVQSVISLALSYAPAEDPHATLRQPDRGNISVYARNRDYHDVLKGMLKQLAQFVVKSGGEQTQVKVFVDTAPVSERALAEKAQLGWHGKHTCLVSRSSGSWLLLGEIYTTLDLTPSEPKAGSCGTCNRCMVACPTDAFPAPYRLDARRCISYLTIEHKGPIPLDLRQKIGNRIYGCDDCIAACPWNRFASASHHIKMQARPELIEPRLADLAALDDAAFRKLFSGSPVKRIGRNRFVRNVLIAIGNSQDQSLIPSAIALMGDPDPDIVETAHWALEQLQ

SEQ ID NO: 77069 - protein, 373 aa, unidentified
  source 1..373: note = Glycocaulis alkaliphilus
  REGION 1..373: note = tr|A0A3T0E5L8|A0A3T0E5L8_9RHOB Epoxyqueuosine reductase OS=Glycocaulis alkaliphilus OX=1434191 GN=queG; PE = 3 SV=1
MTSGELSNRVRALARDAGFDAVRITRADAPWEAGERLRAFVEAGHHGSMGWMEETLDRRVHPTAMWAEARSAVVVGLNYGPEHNPLVDLAHTDRAVISVYARNRDYHDLLKKRLKQMARAFHGETGEGVKVFVDTAPLMEKPLAARSGLGWQGKHTNLVSRDWGSWLFLGVMLTEAELVPDTAETDHCGSCRACLDICPTDAFPAPYKLDARRCISYLTIEHKGPIPVEFRAAMGNRIYGCDDCLAVCPWNKFAARTEETAFHARAELEAPLLGALSRLDDAGFRALFTASPVKRIGRDRFVRNVLIALGNDTGPDALEAVLARLDDDSALVRGAAVWALSRLDQARFQAEREVRLAAETDSDVCAEWNADPC

SEQ ID NO: 77070 - protein, 370 aa, unidentified
  source 1..370: note = Glycocaulis sp.
  REGION 1..370: note = tr|A0A550KKH9|A0A550KKH9_9RHOB Epoxyqueuosine reductase OS=Glycocaulis sp. ZYF765 OX=2518983 GN=queG; PE = 3 SV=1
MSQPLDARAVKALAREIGFDAARIARADAPWAAGRRLSDFVEAGRHGEMGWMEDTLARRSHPTAMWPDAKSAVVVGLNYGPDRDPLEILDRRDEAAISVYAQNRDYHDLIKKRLKRLARAFHQKTGEAVKVFVDTAPLMEKPLAQTSGLGWQGKHTNLVSREWGSWLFLGVMLTAAELEPDPPETDHCGSCRKCLDVCPTDAFPAPYQLDARRCISYLTIELKGPIPAQFRAPMGNRIYGCDDCLAVCPWNKFAAATQETAFHPREALTGPKLAELAELDDTAFRALFTASPVKRIGRDRFLRNVMIALGNSADPALVSAVLPRLDDDSALVRGAAVWALSKLDPARFEAERARRAERERDAEVRAEWEG

SEQ ID NO: 77071 - protein, 364 aa, unidentified
  source 1..364: note = Gottschalkia acidurici
  REGION 1..364: note = tr|K0AY03|K0AY03_GOTA9 4Fe-4S ferredoxin, iron-sulpur binding domain protein OS=Gottschalkia acidurici (strain ATCC 7906 / DSM 604 / BCRC 14475 / CIP 104303 / NCIMB10678 / 9a) OX=1128398 GN=Curi_c10750 PE=4; SV = 1
MNIKKYIIDKCKEVGIDIIGFTNSNEFTELSEFLKNRKEKNYETEFEEKDIEKRISPRKIMGEGETIIVIGVSYDKSGVMYEGISKSSVGTDYHIVLNEKMNKLIDEIKKVQKDFKYFSGVDTTPLIDRYLAKKSGIGWFGRNCSIINDEYGSFIFIGYIITNLKLEEDREVESKCKDCDLCIRSCPVGAIKPNYELNAKRCISYLTQTKETIPYELRDKMENKIYGCDTCQLVCPKNKDIIEKRTSQWEGAYKNIDLEELFKMTNKEFTEKYGHMAFSWRGKNIIKRNIIIKMGNLKNKDYMKLLKVALKDNSPMIRKYSAWSILKIDFNSGLNILEEHIKNEKDGDVISEINNLIDYFKNLG

SEQ ID NO: 77072 - protein, 375 aa, unidentified
  source 1..375: note = Gottschalkia purinilytica
  REGION 1..375: note = tr|A0A0L0WFD7|A0A0L0WFD7_GOTPU Epoxyqueuosine reductase QueG OS=Gottschalkia purinilytica OX=1503; GN = queG PE=4 SV=1
MNLKEYIKNKSKDLNIDIVGFTNGEKFSHLDKFLLNRREKKYETEFEEKDIDLRLNPLNTLNEVKTIIVIGISYNVDYETKKRPYLSGRLSKSSLGEDYHNVLKHKMNMLVNEIKKVTDFKYFIGVDTGPLIDRELASKSGIGWYGKNCCIVNDIYGSFIFIGYILTDLDIECDERIKAKCDDCTLCLKACPTNAIGDNYEINARRCISYLTQTKDKIPYELRDKMGTKIYGCDTCQLVCPKNKGITKGKNKDFIPMSTNGYIEIKELFQLSNKEFKEKYGHMAGSWRGKNVLKRNAIIALGNIGDKDSIGLIEQGLKDDSSMIREYAAWALLKIDLDEGTKILKKHILKEKNETVIDEINNLIKYFSTLSSHKR

SEQ ID NO: 77073 - protein, 372 aa, unidentified
  source 1..372: note = Gottschalkiaceae bacterium
  REGION 1..372: note = tr|A0A521J3X8|A0A521J3X8_9FIRM tRNA epoxyqueuosine(34) reductase QueG OS=Gottschalkiaceae bacterium OX=2527676 GN=queG PE=4 SV=1
MDLKEYIAHKSKIVGIDIIGFTKPEKMDNLIGFLEKRKEKEYNTEFEESNILSRTNPLALMPESRTIIAIGVSYNIEYKSVPHESGKGTGLLSKSSWGEDYHKVLKNKMEDLVKEIKKEIDFKYIICVDTSPLIDREISKSAGIGWYGKNCSIINDDYGSFIFLGYILTDLDLEENERIEEKCGNCRLCIDACPTQAIEEGYIINAKRCISYMTQTKKKIPYDLREKIGMKIYGCDTCQLVCPKNDKVIKGSSKEFVPQLTKGIIPVEEIITISNKDFKEKYGSMSGAWRGKNILKRNAIIALGNIRDKSSIKLLKTALHDESPMIREYAAWSLIRIDKEEGVKLIRERLFKENDIEAFEEMRRLIHLFGHD

SEQ ID NO: 77074 - protein, 380 aa, Gracilibacillus boraciitolerans
  REGION 1..380: note = tr|W4VGG9|W4VGG9_9BACI Iron-sulfur cluster-binding protein OS=Gracilibacillus boraciitolerans JCM 21714; OX = 1298598 GN=JCM21714_871 PE=4 SV=1
MAYQQLKEELIAFSKEIGIEKIGFASAEPFSDLKSRLEEQQTLGYASGFEKGTNEERTEPKRLMPQAESIIAIALAYPTRIKNDPKSVKGDRRGMFCRASWGTDYHLVLQEKLDQLASFLQEKVEDFQYSSMVDTGGELSDRAVAERAGIGFSGKNTLIISPEYGSYIYLGEMITNLPFPPDQPLTDGCGTCTKCIDACPTGALVEPGRLNAQQCLAYLTTTKGFMPEEHRDKLGNFIYGYETCQVVCPYNKGIDFHHHPEFEPDPDLVKPRLVDLLAISNREFKEKFGKMAGSWRGKKPLQRNAILALGHYKEVAALDTLIDVMNQDPRPVIRGTAAWAIAKIGEERGFEAIRGAKGHENNAEVIEEMNKGLEMEILSH

SEQ ID NO: 77075 - protein, 384 aa, Gracilibacillus dipsosauri
  REGION 1..384: note = tr|A0A317L2L6|A0A317L2L6_9BACI Epoxyqueuosine reductase OS=Gracilibacillus dipsosauri OX=178340 GN=queG; PE = 3 SV=1
MAYNQLKQQLIEYSKEIGIDKIGFTSASPFSELKSRLKEQQDLGYASGFEKGTIEERTEPQKLMQGAESIIAIALAYPTKIPNAPRSKKGERRGMFCRASWGTDYHIVLQEKLQKLADFLEERIANFQYSSMVDTGELSDRAVAERAGIGFSGKNTLLISPELGSYIYLGEMITNIPFTPDQPLSEGCGTCTKCLDACPTGALVEPGRLNAQQCLAFLTQTKGYMPEEHRDKLGNFIYGFETCQVVCPYNYRVDFHHHPEFEPDPDLVKPKLVDLLFISNRDFKKKFGKMAGSWRGKKPLQRNAILALAHYQEKDAIEKLIQLMNEDPRPVIRGTAAWAIGKIGTIEGYQAIEKAMEEENDQEVLIEMKKGLNFRDEKKRGISK

SEQ ID NO: 77076 - protein, 380 aa, Gracilibacillus halophilus
  REGION 1..380: note = tr|N4WBK6|N4WBK6_9BACI Iron-sulfur cluster-binding protein OS=Gracilibacillus halophilus YIM-C55.5 OX=1308866; GN = J416_09614 PE=4 SV=1
MAYEQLKQEVIAYSKEIGIDKIGFASAEPFAELKARLKEQQELGYASGFEKGTIEERTEPKRLMPGAESLIAIALSYPTRMKNEPKSVKGDRRGMFARASWGTDYHIVLKEKLDKLAAFLQEKLAGFESRSMVDTGELSDRAVAERAGIGFSGKNTLMISPEYGSYIYLGEMITNVPFTPDDTITDGCGTCTKCIDACPTGALVEPGRLNSQACMAFQSLTKGFMPDEHRNKLGNLIYGYETCQVVCPYNRDVDFHHHEEFEPDPELVKPRLLDLLSISNREFKEKFGKMAGSWRGKKPLQRNAILSLAHYKEKAATDKLIELMQQDPRPVIRGTAAWAIGKIGEEKGFDAIEEAMKRESDHEVLVEMEKGLDFRIEHTN

SEQ ID NO: 77077 - protein, 379 aa, Gracilibacillus kekensis
  REGION 1..379: note = tr|A0A1M7PXD3|A0A1M7PXD3_9BACI Epoxyqueuosine reductase OS=Gracilibacillus kekensis OX=1027249 GN=queG; PE = 3 SV=1
MAYAQLKEELIQFSKEIGIDKIGFASVDTFSTLKSRLEEQQALGYASGFEKGSNEERTEPKRLLPQAESIIAIALAYPTRIKNDPKSVKGDRRGMFCRASWGTDYHLVLQEKLDQLADFLQEKIGDFQYSSMVDTGELSDRAVAERAGIGFSGKNTLIISPEYGSYMYLGEMITNIPFEADQPLQEGCGTCTKCLDACPTGALVEAGRLNAQQCLAYLTQTKGFLPDEHRDKLGNFIYGYETCQVVCPYNKGVDFHHHEQFEPDPDLVKPRLVDLLSISNKEFKSKFGKMAGSWRGKKPLQRNAIIALGHYKEVAALDVLIELMQQDPRPVIRGTAAWSIGKIGEKRGFQAIRDAKIQETNEEVINEMNKGLEMEKEFL

SEQ ID NO: 77078 - protein, 379 aa, Gracilibacillus orientalis
  REGION 1..379: note = tr|A0A1I4IKV9|A0A1I4IKV9_9BACI Epoxyqueuosine reductase OS=Gracilibacillus orientalis OX=334253 GN=queG; PE = 3 SV=1
MAYQKLKEELIAYSKEIGIDKIGFASAKPFSEFKSRLEEQQALGYASGFEKGTNEERTEPERLMPGSESIIAIALAYPTKIKDEPKSVKGDRRGLFARASWGTDYHIVLKEKLDKLASFLQEKEPEVQFSSMVDTGELSDRAVAERAGIGFSGSNTLIISPELGSYMYLGEMITNIPFSADQPLDEGCGTCTKCIDACPTGALVEPGRLNAQKCLAFLTQTKDFMPDDHREKLGNYIYGYETCQVVCPYNKGVDFHNHEEFEPDPELVKPRLVDLLSVSNREFKENFGKMAGSWRGKKPLQRNAILALAHYKEVAAIDKLIELMKDDPRPVIRGTAAWAIGKIGEVRGFRAIEQAMEQEKDSEVIAEMEKGLQFESISK

SEQ ID NO: 77079 - protein, 376 aa, Gracilibacillus ureilyticus
  REGION 1..376: note = tr|A0A1H9PJ00|A0A1H9PJ00_9BACI Epoxyqueuosine reductase OS=Gracilibacillus ureilyticus OX=531814 GN=queG; PE = 3 SV=1
MAYEKLKEEIITYSKEIGIDKIGFASAAPFSQFKARLEEQQELGYASGFEKGTIEERTEPSLLLSGAESIIAIALAYPTRMKNSPKSVKGDRRGMFCRASWGTDYHIVLNEKLEKLSEFIKDRVEGFTCRSMVDTGELSDRAVAERAGIGFSGKNTLMIAPELGSYIYLGEMITNIPFPPDQPLDDGCGDCTKCLDACPTGALVEPGRLNAQQCLAFLTQTKGFMPDEHRDKLGNLIYGFETCQVVCPYNRGIDLHFHEEFEPDPELVKPRLVDLLNISNREFKEKFGKMAGSWRGKKPIQRNAILALAHYKETSAMEDLIRLMEEDPRPVIRGTAAWAIGKIGEEDGFKKIEAAMALEESDEVIEEMKKGLAFRK

SEQ ID NO: 77080 - protein, 317 aa, unidentified
  source 1..317: note = Gracilimonas mengyeensis
  REGION 1..317: note = tr|A0A521D8C2|A0A521D8C2_9BACT Epoxyqueuosine reductase OS=Gracilimonas mengyeensis OX=1302730 GN=queG; PE = 3 SV=1
MLKQQKITEQIRAHALQLGFDACGFAQAQHLPQEARRLEEWLTQNRNGEMGWMENHFEKRVDPTLLVPGSKTVVSVLASYHHPKHNEQIGVTDRPLISKYAQGRDYHKVLKKKLKHLFQFTEELLGGLEGRIFTDSAPVLDKVWAQRAGLGWIGKNSNLLNKNIGSFFFIGEMIIDAELSYDTPVTDHCGSCTRCLDACPTDAIYEPYRVDATKCISYLTIELKEQMEEELQSKVQNWLYGCDICQDVCPWNSKSILASFTDLHPREYVTDHDLEYWKNLTPDQYNDIFEGSAIRRAKFDKFSSNVDVVARNLERKF

SEQ ID NO: 77081 - protein, 315 aa, Gracilimonas sp.
  REGION 1..315: note = tr|A0A316TT39|A0A316TT39_9BACT Epoxyqueuosine reductase OS=Gracilimonas sp. 8A47 OX=2079485 GN=queG PE=3; SV = 1
MDPLAATIKVRHKALELGFDQCGFARAEPLDEEARRLEQWLHEHRHGSMEWMERHFDKRIDPTLLVPGSKSVVSVIAGYRFRENEQFDRQHPDAPKIAKYARGRDYHKVFKSKLKKLFRYTEELIGDIQGRIFVDSAPVMDKAWARRAGLGWIGKNSNLLNKSHGSWFLIGEMILDAAFVYDAPETDHCGSCTQCIDACPTDAIYEPFKVDSNRCISYLTIELKENIPDRYHEDLGDWMFGCDICQDVCPWNRKSEYGHIHDLKPRGRVLHPPDRNWSSITEDEFDKLFEGSPVRRAGYERFVKQAEIVKKNLDK

SEQ ID NO: 77082 - protein, 300 aa, unidentified
  source 1..300: note = Gramella flava
  REGION 1..300: note = tr|A0A1L7I4Z3|A0A1L7I4Z3_9FLAO Epoxyqueuosine reductase OS=Gramella flava JLT2011 OX=1229726 GN=queG; PE = 3 SV=1
MIKSEAKRLGFLSCGISKAEFLEEEAPRLESWLEQNMHGEMRYMENYFDKRLDPTKLVPGSKSVISLLLNYYPSELQNQDSYKISKYAYGRDYHFVIKDKLKQLLSGLQEQIGDFHGRAFVDSAPVLDKAWAAKSGLGWIGKHSNLLSKKTGSFYFIAELIVDLDLEYDTAVTDHCGSCTACIDACPTNAIVEPYKVDGSKCISYFTIELKDEIPYSMAGQFDDWMFGCDVCQDVCPWNRFSKAHREPLFDPHPAILEYDKKDWEEITRETFNEIFRKSAVKRTKFEGLRRNMEFLKKRT

SEQ ID NO: 77083 - protein, 307 aa, unidentified
  source 1..307: note = Gramella forsetii
  REGION 1..307: note = tr|A0LXR9|A0LXR9_GRAFK Epoxyqueuosine reductase; OS = Gramella forsetii (strain KT0803) OX=411154 GN=queG; PE = 3 SV=1
MSVKSKHTEFIKAEAKRLGFLSCGISKAEFLEEEAPRLENWLNNNMHGEMRYMENYFDKRLDPTKLVPGSKSVISLLLNYYPSDFQNKDSYKISKYAYGRDYHFVIKDKLKQLLSTLQDEIGDFHGRAFVDSAPVLDKAWAAKSGLGWIGKHSNLLSKQTGSFYFIAELIVDLDLEYDTPVTDHCGSCTACIDACPTDAIVEPYKVDGSRCISYFTIELKDELPDSMKNQFDDWMFGCDVCQDVCPWNRFSKPHNEPLFNPHPELLENDKKDWEEITRETFNEIFRKSAVKRTKFEGLKRNISFLKD

SEQ ID NO: 77084 - protein, 308 aa, Gramella gaetbulicola
  REGION 1..308: note = tr|A0A2T6AKV7|A0A2T6AKV7_9FLAO Epoxyqueuosine reductase OS=Gramella gaetbulicola OX=703340 GN=queG PE=3; SV = 1
MNGNKRSNTELIKAEAKRLGFLSCGISKAEFLEEEAPRLESWLNNNMHGEMRYMENYFDKRLDPTKLVPGSKSVISLLFNYYPHEFQNQDSYKISKYAYGRDYHFVIKDKLKELLSTLQDEIGDFHGRAFVDSAPVLDKAWAAKSGLGWIGKHSNLLSKQTGSFYFIAELIVDLDLEYDTPVTDHCGSCTACIDACPTNAIVEPYKVDGSKCISYFTIELKDELPNSYKDKFDDWMFGCDVCQDVCPWNRFSKPHNEPLFNPHPDLLSNEKKDWEEITRETFNEIFRKSAVKRTKFEGLKRNISFLKE

SEQ ID NO: 77085 - protein, 308 aa, unidentified
  source 1..308: note = Gramella salexigens
  REGION 1..308: note = tr|A0A1L3J5K1|A0A1L3J5K1_9FLAO Epoxyqueuosine reductase OS=Gramella salexigens OX=1913577 GN=queG PE=3; SV = 1
MNTRAKYTEFIKAEAKRLGFLSCGISKAGFLEEEAPRLESWLNDNMHGEMRYMENYFDKRLDPTKLVPGSKSVISLLLNYYPHELQNEDSYKISKYAYGKDYHFVIKDKLKHLLTSLQDEIGDFHGRAFVDSAPVLDKAWAAKSGLGWIGKHSNLLSKKTGSFYFIAELIVDLDLEYDTPVTDHCGSCTACIDACPTNAIVEPYKVDGSKCISYFTIELKDDLPPSFKDKFDEWMFGCDVCQDVCPWNRFSKPHNEPLFDPHPQLLENDKKDWEEITRETFNEIFRKSAVKRTKYEGLKRNISFLKKD

SEQ ID NO: 77086 - protein, 307 aa, Gramella sp.
  REGION 1..307: note = tr|A0A2D8KQR2|A0A2D8KQR2_9FLAO Epoxyqueuosine reductase OS=Gramella sp. OX=1931228 GN=queG PE=3 SV=1
MSSKYSELIKSEAKRLGFLSCGISKAEFLEEEAPRLESWLEQNMHGEMRYMENYFDKRLDPTKLVPGSKSVISLLLNYYPSELQNQDSYKISKYAYGRDYHFVIKDKLKQLLSSLQEQIGDFHGRAFVDSAPVLDKAWAAKSGLGWIGKHSNLLSKKTGSFYFIAELIVDLDLEYDTPVTDHCGSCTACIDACPTNAIVEPYKVDGSKCISYFTIELKDEIPYSMAGQFDDWMFGCDVCQDVCPWNRFSKAHREPLFDPHPAILEYDKKDWEEITRETFNEIFRKSAVKRTKFEGLRRNMEFLKKRT

SEQ ID NO: 77087 - protein, 307 aa, Gramella sp.
  REGION 1..307: note = tr|A0A2R3Z4W0|A0A2R3Z4W0_9FLAO Epoxyqueuosine reductase OS=Gramella sp. SH35 OX=2126553 GN=queG PE=3 SV=1
MNTKQKHTRLIKAEAKRLGFMSCGISKAEFLEEEAPRLEKWLSEERHGEMRYMENHFDKRLDPTKLVPDSKSVISLLLNYYPEKFQREDSYKISKYAYGRDYHFIIKDKLKSLLSFLQDEIGEIHGRAFVDSAPVLDKAWAAKSGLGWIGKNSNLLTKQVGSFYFIAELIVDLELEYDTPVTDHCGSCTACIDACPTNAIYEPYRVDGSKCISYFTIELKDELPGSYRDKFEDWMFGCDICQDVCPWNRFSKSHNEPLFDPHPKLLENDKKDWEEITRETFNEIFRKSAVKRTKYEGLKRNIRFLKD

SEQ ID NO: 77088 - protein, 366 aa, Granulibacter bethesdensis
  REGION 1..366: note = tr|W6I1Q0|W6I1Q0_9PROT Epoxyqueuosine reductase; OS = Granulibacter bethesdensis OX=364410 GN=queG PE=3 SV=1
MFVTKQPDPLQSALTLKTQKKAKQDIAAYAQELGFASVGFSPATLTQTAQDGLAAFLEAGGHGTMGWMAERSDQRADPKILWPETGTVIALGMSYAPVENPLANLDQPQIGNISVYARNRDYHDIIKGKLKQIAQRIVSRHGGMVKVFVDTAPVMEKPLARQAGLGWQGKHSNLVSRQHGSWLLLGEIFTTLVLPEDDPHPDRCGTCRRCLDACPTGAFPAPYRLDATRCVSYYTIEFHGPVPEPFRRAMGNRIYGCDDCLAVCPWNRFAVQASEAKLKARPELVAPRLDQLVQLDDTSFRLLFSGSPIKRIGRDRFIRNVLYAIGNSGDSSLLPKAQALTDDASDIVADAARWAVARLAEAQSPS

SEQ ID NO: 77089 - protein, 366 aa, Granulibacter bethesdensis
  REGION 1..366: note = tr|Q0BVF9|Q0BVF9_GRABC Epoxyqueuosine reductase; OS = Granulibacter bethesdensis (strain ATCC BAA-1260 / CGDNIH1) OX=391165 GN=queG PE=3 SV=2
MFVTKQPDPLQSALTLKMQKKAKQDIAAYAQELGFASVGFSPATLTQTAQDGLAAFLEAGGHGTMGWMAERSDQRADPKILWPETGTVIALGMSYAPVENPLGNLDQPQIGNISVYARNRDYHDIIKGKLKQIAQRIVSRHGGMVKVFVDTAPVMEKPLARQAGLGWQGKHSNLVSRQHGSWLLLGEIFTTLVLPHDDPHPDRCGTCRRCLDACPTGAFPAPYRLDATRCVSYYTIEFHGPVPEPFRHAMGNRIYGCDDCLAVCPWNRFAVQASEAKLKARPELVAPRLDQLVQLDDTSFRLLFSGSPIKRIGRDRFIRNVLYAIGNSGDSSLLPKAQALTDDASDIVADAARWAVARLAEAQSPS

SEQ ID NO: 77090 - protein, 402 aa, Granulicatella adiacens
  REGION 1..402: note = tr|C8NJ02|C8NJ02_9LACT Putative iron-sulfur cluster-binding protein OS=Granulicatella adiacens ATCC 49175 OX=638301 GN=HMPREF0444_1897 PE=4 SV=1
MDTAVLKQKIIAKSKELGIDKIGFASAEPFTHLEESMRRSKELGHTTGFEHPVLEERIYPEKIFDTPKTIISIALAYPTLPKNKPERVKGERRGAFARASWGEDYHFILSRRMEALINYIKEEVQDDDSRFKPMVDTGELIDVRVAERAGIGFVGKNGLLITKEFGSYVYLGELITNIEFPTDEMVDYGCGDCTRCVDFCPTGALLGDGRMNAMRCLSYQTQTKGFMPQEFRKKIGHVIYGCDICQQVCPYNKGKDFHLHPEMEPSVEETHPLLKPLVTISNKEFKERFGQMAGSWRGKKPLQRNAIIALANYRDKSAVPLLLRVMKEDMRPVMKGTAAWAVAEIVNESNQEMIDYFNEQKEAAVKKRDSLENPTKEDIELIEELEKAIVVLQEKYREEANK

SEQ ID NO: 77091 - protein, 403 aa, Granulicatella elegans
  REGION 1..403: note = tr|D0BLT8|D0BLT8_9LACT Putative iron-sulfur cluster-binding protein OS=Granulicatella elegans ATCC 700633 OX=626369 GN=HMPREF0446_00941 PE=4 SV=1
MDTALLKEKIQKKSKELGIDKIGFASAAPFDHLAQGMQESKELGHTTGFEHPILEERIYPEKIFDSPKTIISIALAYPTLPSQKPERVKGERRGAFARASWGEDYHFILSRRMEALIEYIKSEVNQEDVAFKPMVDTGELIDVRVAERAGIGFVGKNGLLVTKEFGSYVYLGELITNIEFPVDAPVDYGCGDCTRCVDFCPTNALLGNGKMNAQRCLSYQTQTKGFMPKEYRKKMGHVIYGCDICQQVCPYNKGKDFHLHPEMEPSVEETHPLLKPLVTISNKEFKERFGKMAGSWRGKKPLQRNAIIALANYRDKTAVPLLLKVMKEDMRPVIKGTAAWAVSEIISESSEELIHYFTEMLEKAQKIEATTKEEADLVVELEEAIQTLHEKLPKNPEEGSYDD

SEQ ID NO: 77092 - protein, 403 aa, Granulicatella sp.
  REGION 1..403: note = tr|A0A420YTL0|A0A420YTL0_9LACT tRNA epoxyqueuosine(34) reductase QueG OS=Granulicatella sp.; OX = 2049028 GN=queG PE=4 SV=1
MDTALLKEKIQKKSKELGIDKIGFASAAPFDHLAQGMQESKELGHTTGFEHPILEERIYPEKIFDSPKTIISIALAYPTLPSQKPERVKGERRGAFARASWGEDYHFILSRRMEALIEYIKSEVNQEDVAFKPMVDTGELIDVRVAERAGIGFVGKNGLLVTKEFGSYVYLGELITNIEFPVDAPVDYGCGDCTRCVDFCPTNALLGNGKMNAQRCLSYQTQTKGFMPKEYRKKMGHVIYGCDICQQVCPYNKGKDFHLHPEMEPSVEETHPLLKPLVTISNKEFKERFGKMAGSWRGKKPLQRNAIIALANYRDKTAVPLLLKVMKEDMRPVIKGTAAWAVSEIISESSEELIHYFTEMLEKARKIEATTKEEADLVIELEEAIQTLHEKLPKNPEEGSYDD

SEQ ID NO: 77093 - protein, 384 aa, Granulicatella sp.
  REGION 1..384: note = tr|A0A4Y9J5S6|A0A4Y9J5S6_9LACT tRNA epoxyqueuosine(34) reductase QueG OS=Granulicatella sp. WM01 OX=2558277 GN=queG PE=4 SV=1
MTLNLKQKIIQEAKALGIDKIGFTSAQPFDYLKKSLQEQKDLGRTTGFEHENIDERVYPHLIFEQPKSIIAIALAYPSRLNQALNQDKEDRRGSFARASWGQDYHDILKDRMNKLIAYIKTQASTATFKPMVDTGELIDVAVAQRAGLGFIGKNGLLITEEFGSYVYLGEIITNIEFEPDTPIPDGCGDCIRCLRACPPKALLGDGRLDGKRCLSYQTQTKGYMPEEYRKKMTHVIYGCDICQMVCPYNQGKDFHLHQEMEPVPSHVQPSLKKMLTLSNKEFKQEFGYMSGSWRGKKPLQRNAIIALANYRDQSALPKLIEIMECDVRPVIRGTAAWAISQIQRDYNELIIECMQAQLEKEDDRETIEEMQKAIDVLKQKKKRG

SEQ ID NO: 77094 - protein, 371 aa, unidentified
  source 1..371: note = Granulicella mallensis
  REGION 1..371: note = tr|G8NTW5|G8NTW5_GRAMM 4Fe-4S ferredoxin-type domain-containing protein OS=Granulicella mallensis (strain ATCC BAA-1857 / DSM 23137 / MP5ACTX8) OX=682795; GN = AciX8_32 20 PE=4 SV=1
MLMRADRDWIQARAQAAGFDLAGIAAVPAESSPEADTNDRRFAEWIAAGRAGEMEYLKRANEAGELLRGDLHRAMPWAQSVIVCAVNYNAEEPRSIDPAPATAGWIARYAWSGRESADASHEAKGSDYHEVLLPKLRAVEAELKQRFGESCETRCYVDTGPILERGYAERAGVGWIGKNTCVINQQQGSWLLLGVIVTSLQLATDAWAVPAADRCGSCTRCIDACPTDALVAPRQMDASRCIAYLTIEKKGSLDEDLLPLMGRQVFGCDICQDVCPWNRRAPVAASPALPARRELVNPALEWLAGMDGPTFNRWFRGSPLERTRRKRVLRNIAIAMGNSGEHEFLPQLESWAAGDDAVLAEAAAWAIRRLS

SEQ ID NO: 77095 - protein, 368 aa, Granulicella pectinivorans
  REGION 1..368: note = tr|A0A1I6M4D7|A0A1I6M4D7_9BACT Epoxyqueuosine reductase OS=Granulicella pectinivorans OX=474950; GN = SAMN05421771_1808 PE=4 SV=1
MRTSYPEEVLEPAWNPDLTAWLTAAAAASGFDASGVAPAESPENAERFAAWIDQGRAGEMDWLKRRDEQGTLVRSSVRVAIPWARSVVVCAMNYNAAAPRSIDPADADQGWIARYAWSGSEGKPVDYHDDLLARLRTIEAGLQEKAPCQTRCYVDTGPLVERNAAVQAGIGWVGKNTCVIRQGIGSWMLVGVILTSLPLEETPALVADRCGSCTRCLDACPTHALVAPREMDASLCIAYLTIEKKGSIPETLREAIGRQLFGCDICQDVCPWNRKAPIAAKSGLETRSELVNPALDWLASLDSAGFRRLFRGSPLERTGKKRLHRNVAIAMGNSGDARFVPQLDIWSKAEDPVLAETAAWALGRLRTS

SEQ ID NO: 77096 - protein, 369 aa, Granulicella rosea
  REGION 1..369: note = tr|A0A239IMC4|A0A239IMC4_9BACT Epoxyqueuosine reductase OS=Granulicella rosea OX=474952; GN = SAMN05421770_103184 PE=4 SV=1
MRAQAVAAGFDLAGVAPAHSAGEPAGALTAERFAAWVEAGRAGEMEYLKRRDEAGELLRTSVQVAIPWARSVLVCAMSYNAAAPRSVEPAPATAGWIARYAWSGTPDGAPMDYHDDMLARLRVVEAALLGKTGCETRCYVDTGPILERDLAAKAGIGWIGKNTCVLNQQLGSWLLLGVIATSLPAFEGELALAPDRCGSCTRCIDACPTDALIAPRQMDASLCIAYLTIEKKGMIAEELRAKVGRQVFGCDICQDVCPWNRRSPVAVKQGLMTRTELVNPDLEQLASLDAAEFKLWFKGSPLERTKRHRLHRNVAIAMGNSGDRRFAARLERWSASEDAVLAEAARWALTRLAILTEESNLAEESKDRL

SEQ ID NO: 77097 - protein, 386 aa, unidentified
  source 1..386: note = Granulicella sibirica
  REGION 1..386: note = tr|A0A4Q0T3J2|A0A4Q0T3J2_9BACT Epoxyqueuosine (OQ) reductase QueG OS=Granulicella sibirica OX=2479048; GN = GRAN_2978 PE=4 SV=1
MSLCEWTEGLIAWVKDASRQTGFDVSGVTAADNPIDGARFVDWVEAGRAGEMDWLKRRDERGALVRSAVKVALPWARSVVVCAMNYNAAAPLSLDVAEPGAGWIGRYAWSGRKVGEAVQAVDYHDDLLARLREVEAGLKVRSECETRCYVDTGPLVERGMATKAGIGWVGKNTCVIREGMGSWMLMGVIVTSLPLAETTVISLPAEDRCGSCTRCLEACPTGALVAPREMDASLCIAYLTIEKKGSITEDLREAVGRQVFGCDICQDVCPWNRKAPIAWKQGLETRRELVNPALEWLAQLDSAGFRRVFKGSPLERTGKKRLHRNVAIAMGNSGQSQFIPQLEVWAAGEDAVLAESAVWALGRLRRSGSSEDPVGSVENASSASIG

SEQ ID NO: 77098 - protein, 389 aa, Granulicella sp.
  REGION 1..389: note = tr|A0A3N1JNR2|A0A3N1JNR2_9BACT Epoxyqueuosine reductase OS=Granulicella sp. GAS466 OX=2485170; GN = EDE14_1609 PE=4 SV=1
MTGEWTPELEKWVRDSALEAGFDEAGVAPIVGLECDEERVEAERFTAWVDAGRAGEMEYLKRRDERGILLRSVAQAAMPWARSVIVGAMNYNSQAPLSIEDAPEGTGWIARYAWSGKGDGAGKSVPTDYHDDLLRRLRKVESAVKLKFDCETKCYVDTGPLVERAIAVRAGVGWIGKNTCVLNQRLGSWLLLGVVVTSLPVPEKLPLHVAADRCGSCTRCIDACPTDALVAPREMDASRCIAYLTIEKKETIAEELRGLMGRQVFGCDICQDVCPWNRRSPVAVKEGMRPRPELVNPALEWLAGMDAVEFRRWFKGSPLERTRLKRLQRNVAIAMGNSGDERFLPQLELWGMGDEEVLAESARWAIERISTHGCKLDEERKINGIASES

SEQ ID NO: 77099 - protein, 377 aa, Granulicella sp.; identical to SEQ ID NO: 74013
  REGION 1..377: note = tr|A0A1D2UF79|A0A1D2UF79_9BACT tRNA epoxyqueuosine(34) reductase QueG OS=Granulicella sp. SCN 62-9 OX=1660100 GN=ABT04_01855 PE=4 SV=1

SEQ ID NO: 77100 - protein, 682 aa, unidentified
  source 1..682: note = Granulicella tundricola
  REGION 1..682: note = tr|E8X1U3|E8X1U3_GRATM Ribonuclease BN; OS = Granulicella tundricola (strain ATCC BAA-1859 / DSM 23138 / MP5ACTX9) OX=1198114 GN=AciX9_2059 PE=4 SV=1
MGSAWSSELVEWVRGSAVGAGFDLCGVAGAPASGESEGVLTAERFSEWVAGGRAGEMEYLKRRDEAGELLRRSARVAMPWVRSVVVCALNYHAEGPLSVDAAAKGAGWIGRYAWSGGEDGEPVDYHDDLMRRLKVVEAGLVARVSSETLQTKCYVDTGPLLERDFAARAGVGWVGKNTCVINQGVGSWLLLGVIVCSLEVETEAAALVAADRCGSCTRCIEACPTGALVASREMDASLCIAYLTIEKKGAIAEELREKMGRQVFGCDICQDVCPWNRKAPVGDHVGFRARGELVNPSLDWLGGMSADEFRRWFKGSPLERTKRHRVQRNVAIAMGNSGDESFVPKLMEWAGGEDAVLAESAGWALRRLGLLASRQRAWMLSEDVKKSEAEPEVKPIEAVKPTVREDGAWPQVKALAMYMASTEVHTYAFSVAANVILSLFPFIVLLLTLAQKVFHSPAMVAVVGDLLRTILPNNQDFIVRNMTSLVHPHGSTRVFSVVMLLITSTGVFLPLEVALNNVWGVKENRNYLQNQMVSLGLAAAVGALAMASVALATGQQRITTWIFFGHTDNIFFNFLAGGVLKICAVVMSVLLFFLIYWVLPHRKIPAMAVLPTAIVIGLSWEVAKYLYVLALPHLDFESVYGPFKVSVGLMMWAFLSGLMLLAGAHFSATRYTLRLAREAEAE

SEQ ID NO: 77101 - protein, 356 aa, Granulosicoccus antarcticus
  REGION 1..356: note = tr|A0A2Z2NYY4|A0A2Z2NYY4_9GAMM Epoxyqueuosine reductase OS=Granulosicoccus antarcticus IMCC3135; OX = 1192854 GN=queG PE=3 SV=1
MATITEAPAELASFVKKSAAELGLSHCAITDTQLDTHETHLLNWLDAGFHGEMDYMQRHGTRRSRPADLLPGTIRIISVRLDYYPPDSADAESVLADPSLGYVSRYALGRDYHKVLRNRLQKLAQLISEQYGAFGYRAFVDSAPVLEKALAEKAGLGWIGKHSNLLSSKAGSWFFLGELYTDLPLPIDEPLPRSHCGSCSACIQACPTDAIVAPYRVDARRCISYLTIELKGTIPIEFRKAMGNRIYGCDDCQLVCPFNKFSKDTLEEDFNVRNQLDSPSLTALFRWSEQDFKSRMAGSPIYRIGHESWIRNIAIALGNAPATTDVIAALESRSNDPSEIIREHVTWALQQTALTL

SEQ ID NO: 77102 - protein, 379 aa, unidentified
  source 1..379: note = Grimontella sp.
  REGION 1..379: note = tr|A0A318GL04|A0A318GL04_9GAMM Epoxyqueuosine reductase OS=Grimontella sp. AG753 OX=2183905 GN=queG PE=3; SV = 1
MSEPLDLNQLAHSIKQWGTELGFQQVGIADTDLSASEPKLQAWLDKQYHGEMEWMARHGMMRARPHELLPGTLRVISVRMNYLPANAAFASTLKNPALGYVSRYALGRDYHKLLRNRLKQLGEKIQQHCASLNFRPFVDSAPILERPLAEKAGLGWVGKHSLILNRQAGSFFFLGELLIDLPLPVDQPVEEDCGRCVACLTICPTGAIVEPYTVDARRCISYLTIELEGAIPEEFRPLIGNRIYGCDDCQLICPWNRFSQLTDEADFSPRKALHSPELIELFAWSESWFLKVTEGSAIRRIGHLRWLRNIAVALGNAPWDEANIRALEQRRGEHPLLDEHIEWAIAQQVEKRNACVVEVQTPKKQRLVRVIEKGLIRDA

SEQ ID NO: 77103 - protein, 384 aa, unidentified
  source 1..384: note = Grimontia celer
  REGION 1..384: note = tr|A0A128FCI2|A0A128FCI2_9GAMM Epoxyqueuosine reductase OS=Grimontia celer OX=1796497 GN=queG PE=3 SV=1
MPESRSLSSINFTQLAENIRQWGHELGFQHIGITDVDLSQHEAQLQRWLDNGYHGEMDWMTRHGMMRARPQELVEGTVRVISARMNYLPPDAGFAKTLETPSLAYISRYALGRDYHKLIRNRLKKLGQRIEEEVGKFGYRPFVDSAPVLERPLAEKAGLGWTGKHSLLLSEDVGSWFFLGELLIDLPLPVDEPTVSQCGKCVACITSCPTDAIVGDTIVDARRCISYLTIELDGEIPEEFREAMGNRIYGCDDCQLVCPYNREAELTNESDFYGRESLVQQPLKTLFSWDESTFLKETEGSAIRRIGHEKWRRNLSVAMGNAPYDPEIIELLESAKGFSAMLDQHLDWALEQQIKRRNEHAVDVLSSSTKRLVRIVQKGLPRDA

SEQ ID NO: 77104 - protein, 384 aa, Grimontia hollisae
  REGION 1..384: note = tr|A0A377HJ33|A0A377HJ33_GRIHO Epoxyqueuosine reductase OS=Grimontia hollisae OX=673 GN=queG PE=3 SV=1
MSESRSLSSINLTQLAENIRQWGRELGFQHIGITDVDLRQHEEQLQRWLDNGYHGEMDWMARHGMMRARPQELVEGTVRVISARMNYLPPDAGFAKTLDNPSLAYISRYALGRDYHKLIRNRLKKLAQRIEEEVGKFGYRPFVDSAPVLERPLAEKAGLGWTGKHSLLLSQDVGSWFFLGELLIDLPLPVDEPSQGNCGKCVACMTSCPTGAIVDETVVDARRCISYLTIELDGEIPEAFRKAIGNRIYGCDDCQLVCPYNREAELTTEPDFYSRNSLVQRPLKVLFGWDEATFLRETEGSAIRRIGHEKWRRNLSVAMGNAPYDPEIVELLESAKGFSAMLDQHLDWALEQQIKRRNENAIDVLPASTKRLVRIVKKGLPRDA

SEQ ID NO: 77105 - protein, 384 aa, Grimontia hollisae; identical to SEQ ID NO: 77104
  REGION 1..384: note = tr|D0I8R9|D0I8R9_GRIHO Epoxyqueuosine reductase; OS = Grimontia hollisae CIP 101886 OX=675812 GN=queG PE=3; SV = 1

SEQ ID NO: 77106 - protein, 325 aa, unidentified
  source 1..325: note = Grimontia indica
  REGION 1..325: note = tr|R1INQ8|R1INQ8_9GAMM Iron-sulfur cluster-binding protein OS=Grimontia indica OX=1056512 GN=D515_02019 PE=4; SV = 1
MVRHGMMRARPQELVEGTVRVISARMNYLPPDAGFAKTLETPSLAYISRYALGRDYHKLIRNRLKKLGQRIEEEVGKFGYRPFVDSAPVLERPLAEKAGLGWTGKHSLLLSEDVGSWFFLGELLIDLPLPVDEPTESQCGKCVACITSCPTDAIVGDTIVDARRCISYLTIELDGEIPEEFREAMGNRIYGCDDCQLVCPYNREAELTNESDFYGRESLVQQPLKTLFSWDESTFLKETEGSAIRRIGHEKWRRNLSVAMGNAPYDPEIIELLESAKGFSAMLDQHLDWALEQQIKRRNEHAVDVLPSSTKRLVRIVQKGLPRDA

SEQ ID NO: 77107 - protein, 384 aa, unidentified
  source 1..384: note = Grimontia marina
  REGION 1..384: note = tr|A0A128FE70|A0A128FE70_9GAMM Epoxyqueuosine reductase OS=Grimontia marina OX=646534 GN=queG PE=3 SV=1
MSESRSSSSINFTQLAENIRQWGHELGFQHIGITDVDLRQHEEQLQRWLDNGYHGEMDWMARHGMMRARPQELVEGTVRVISARMNYLPPDAGFAKTLETPSLAYISRYALGRDYHKLIRNRLKKLGQCIEEEVGKFGYRPFVDSAPVLERPLAEKAGLGWTGKHSLLLSKDTGSWFFLGELLIDLPLPVDEPSENQCGKCVACITSCPTEAIVGDTIVDARRCISYLTIELDGEIPEEFREAMGNRIYGCDDCQLVCPYNREADLTNESDFYGRESLIQQPLKTLFSWDEATFLKETEGSAIRRIGHEKWRRNLSVAMGNAPYDPEIIELLESARGFSAMLDQHLNWALEQQMKRRSGHFIDVLPSSTKRLVRIVQKGLPRDA

SEQ ID NO: 77108 - protein, 384 aa, Grimontia sp.
  REGION 1..384: note = tr|A0A0F6A477|A0A0F6A477_9GAMM Epoxyqueuosine reductase OS=Grimontia sp. AD028 OX=1581149 GN=queG PE=3; SV = 1
MSESRSSSSINFTQLAENIRQWGHELGFQHIGITDVDLSQHEAQLQRWLDNGYHGEMDWMARHGMMRARPQELVEGTVRVISARMNYLPPDAGFAKTLETPSLAYISRYALGRDYHKLIRNRLKKLGQRIEEEVGKFGYRPFVDSAPVLERPLAEKAGLGWTGKHSLLLSEDVGSWFFLGELLIDLPLPVDEPTESQCGKCVACITSCPTDAIVGDTIVDARRCISYLTIELDGEIPEEFREAMGNRIYGCDDCQLVCPYNREAELTNESDFYGRESLVQQPLKTLFSWDESTFLKETEGSAIRRIGHEKWRRNLSVAMGNAPYDPEIIELLESAKGFSAMLDQHLDWALEQQIKRRNEHAVDVLPSSTKRLVRIVQKGLPRDA

SEQ ID NO: 77109 - protein, 365 aa, Gulbenkiania indica
  REGION 1..365: note = tr|A0A0K6GSF8|A0A0K6GSF8_9NEIS Epoxyqueuosine reductase OS=Gulbenkiania indica OX=375574 GN=queG PE=3; SV = 1
MTLPRSENANYRELARQIKDWAREDGFADARISRAALPPEAEQRLARWLEKGYHGEMDYMARHGVLRLRPAELVPGTLSVISVRMNYWPAEAAPAEAVLADGSRAYISRYALGRDYHKVLRNRLQRLAEKVTQAVGQHGYRVFTDSAPVAEVALAAQAGMGWRGKHTLLLNRSEGSLFFLGEILTDLPLPEDASEAGHCGRCTRCIEVCPTGAIVAPYEVDARRCISYLTIELKGPIPEPLRPLIGNRVYGCDDCQLVCPWNRFAVPTREGDFAVRHGLDNSTLAELFTWTEETFRLRMAGSPIWRIGYEKWLSNLAIGLGNAPSTPEVLAALALRRNHPSALVREHVAWALARHDGRGKEGAAG

SEQ ID NO: 77110 - protein, 356 aa, unidentified
  source 1..356: note = Guyparkeria sp.
  REGION 1..356: note = tr|A0A426QPD3|A0A426QPD3_9GAMM Epoxyqueuosine reductase OS=Guyparkeria sp. SCN-R1 OX=2341113 GN=queG; PE = 3 SV=1
MTTRLSPQRLKESIRDWAAELGFTEARVTDTDLSAYEAGFERWLAEGHAGTMGFFQRHGLMRFHPEELVPGTRRVLMVTRDYLPPESLGPSKVLGEPELGYVSRYALGRDYHKLVRKRLAQLAQRISESVGPFTYRAFCDSAPVYETGLAERAGVGWKGKHSLVLNRSGGSWFFLGALFLDIDLPVDEPVQPHCGSCTACLDVCPTGAIVADGVVDARRCISYLTIESHDDIPESLRPLMGNRIYGCDDCQLVCPWNRFARTTDDADFHARQGLDAPDLVELFGWDEQTFLTRTEGSAIRRIAWWRWRRNLAVALGNLPAGHPRVPAALAVLRGGLGEAGDQVDRHINWALARLAD

SEQ ID NO: 77111 - protein, 358 aa, unidentified
  source 1..358: note = Gynuella sunshinyii
  REGION 1..358: note = tr|A0A0C5VVC3|A0A0C5VVC3_9GAMM Epoxyqueuosine reductase OS=Gynuella sunshinyii YC6258 OX=1445510 GN=queG; PE = 3 SV=1
MSQISALNLDLVKDQIKQFASELGFQACSFSVPDVSVYADLHKQHIDSGYHGTMLWLENNQHVRYDPRLLVDGVKTIVSVRMNYRPDSVTRMRELLSQPDKAYVARYALGRDYHKVMRNKLQTLGEKINTELEATRFRAFVDSAPVLERELAEQSGLGWIGKNTLLLNEQAGSWFFLGELFLTLELPPDPSVSGKHCGSCQQCLTECPTGAFVGAGVLDARKCISYLTIEHDGTIPESLRPLMGNRIYGCDDCQIVCPFTKFSQLTEELDYQSRHALDEPSLADLWHWNEQQFLDRMQGSPIRRIGYEKWTRNLAVAIGNSGEWGWVDMLLQKLGEVSPMVDEHIDWAAGRLRQQQPD

SEQ ID NO: 77112 - protein, 351 aa, unidentified
  source 1..351: note = Haematobacter genomosp.
  REGION 1..351: note = tr|A0A212AGX9|A0A212AGX9_9RHOB Epoxyqueuosine reductase OS=Haematobacter genomosp. 1 OX=366618 GN=queG; PE = 3 SV=1
MPISTSELKARLVAQALAEGFSAARLCRPTDIPEVPERYRAFLDAGFHGQMGWLAERVPWRTDPAALWPEARSVIMLAESYTPEENPMAAVARRDRGAISVYARGKDYHDLVKKRLKRLARWLIAEGGGEVKVFVDTAPVPEKPLAQAAGLGWQGKHTNLVSREMGNWFFLGAIFTTLDLPVDGAEADHCGSCTRCQTACPTDAFPAPYQLDARRCISYLTIEHHGPVEESLRQRMGNRIYGCDDCLAACPWNKFAVEARETRYAAREDLVSPPLAELALLDDAAFRARFSGSPIKRIGRNRFVRNVLYAIGNSAESRLMPSAMALCSDPDPVVAEAAEWAVNRLSMQRDQ

SEQ ID NO: 77113 - protein, 349 aa, Haematobacter massiliensis
  REGION 1..349: note = tr|A0A086Y890|A0A086Y890_9RHOB Epoxyqueuosine reductase OS=Haematobacter massiliensis OX=195105 GN=queG; PE = 3 SV=1
MPTSTSDLKTRLVAQALAEGFSAARLCRPTDIPEVPERYQAFLDAGFHGQMGWLAERVHWRTEPAALWPEARSVIMLAESYTPEENPMAAVARRDRGAISVYARGKDYHDLVKKRLKRLARWLIAEGGGEVKVFVDTAPVPEKPLAQAAGLGWQGKHTNLVSREMGNWFFLGAIFTTLDLPSDAPEVDHCGSCTRCQVACPTDAFPAPYQLDARRCISYLTIEHRGPVEEPLRERMGNRIYGCDDCLAACPWNKFAVEARETRYAAREDLVSPPLAELALLDDEAFRERFSGSPIKRIGRDRFVRNVLYAIGNSGMAALAPVARDRLCDPDPVVAEAAAWALARLTPPG

SEQ ID NO: 77114 - protein, 351 aa, Haematobacter missouriensis
  REGION 1..351: note = tr|A0A225CUU4|A0A225CUU4_9RHOB Epoxyqueuosine reductase OS=Haematobacter missouriensis OX=366616 GN=queG; PE = 3 SV=1
MPISTSDLKERLVAQALVEGFSAARLCRPTDIPEVPERYRAFLDAGFHGQMGWLAERVHWRTDPAALWPEARSVIMLAESYTPEENPMAAVAQRDRGAISVYARGKDYHDLVKKRLKRLARWLIAEGGGEVKVFVDTAPVPEKPLAQAAGLGWQGKHTNLVSREMGNWFFLGAIFTTLDLPVDGPEADHCGSCTRCQTACPTDAFPAPYQLDARRCISYLTIEHHGPVEESLRQRMGNRIYGCDDCLAACPWNKFAVEARETRYAAREDLVAPPLAELALLDDAAFRARFSGSPIKRIGRDRFVRNVLYAIGNSADSRLMPSAMALRSDPDPVVAEAAEWAVNRLSTQRDQ

SEQ ID NO: 77115 - protein, 382 aa, unidentified
  source 1..382: note = Haematospirillum jordaniae
  REGION 1..382: note = tr|A0A143DDD1|A0A143DDD1_9PROT Epoxyqueuosine reductase OS=Haematospirillum jordaniae OX=1549855 GN=queG; PE = 3 SV=1
MQTGTDQIKERIRKAAIKEGFDCIGFARAELNEKTRRRLSSWLAQGCHGTMGWMAETQSRRTDPRALWPEAATVISLGTNYAPGHNPLSGLMHHSRGYISVYARNRDYHDLIKGRLKQLGARIQHICDQDIKVFVDTAPLMEKPLAAAAGLGWQGKHTNIVSRRFGSWLFLGEILTTLDLPPDSPASEHCGRCTRCLDICPTSAFDAEGRIDARKCISYLTIEHKGPIPYALRSRFGNRIYGCDDCTAVCPWNRFAPPTPHDAFKPRVELTAPRLADLLELDDASFRTLFSASPVKRISRPRFIRNVLIAAGNSGDAAITKKITPHLNDPNPVIRGAAVWALSRLLDIRDFHDLAEAYGKDESDPCVREEWMLGGKPSSIQP

SEQ ID NO: 77116 - protein, 381 aa, Hafnia alvei
  REGION 1..381: note = tr|A0A2J9GZ34|A0A2J9GZ34_HAFAL Epoxyqueuosine reductase OS=Hafnia alvei OX=569 GN=queG PE=3 SV=1
MTHPLDLNQLAQHIKQWGQSLGFQQVGICDTDLSVEEPRLQAWLDKQYHGEMEWMARHGMMRARPHELHPGTLRVISVRMNYLPANASFAKTLKNPQLGYVSRYALGRDYHKLLRNRLKRLGDMIQEYCVGIDVNSRPFVDSAPILERPLAAKAGIGWVGKHSLILNKEAGSWFFLGELLLDLPLPVDKPQEEQCGRCVACITTCPTGAIVEPYVVDARRCISYLTIELESAIPEEFRPLMGNRIYGCDDCQMICPWNRFSQLTEEGDFSPRQNLHTPELIALFQWDEKTFLKITEGSAIRRIGHLRWLRNISVALGNAPYDAQIIPLLQSRMGLSEVLDEHIEWAVKQQQEKRSENAIEIQTSQQKRLIRAIEKGLPRDA

SEQ ID NO: 77117 - protein, 381 aa, Hafnia alvei
  REGION 1..381: note = tr|A0A097QYD2|A0A097QYD2_HAFAL Epoxyqueuosine reductase OS=Hafnia alvei FB1 OX=1453496 GN=queG PE=3 SV=1
MTHPLDLNQLAQHIKQWGQSLGFQQVGICDTDLSVEEPRLQAWLDKQYHGEMEWMARHGMMRARPHELHPGTLRVISVRMNYLPANASFAKTLKNPQLGYVSRYALGRDYHKLLRNRLKRLGDMIQEYCVGIDVNSRPFVDSAPILERPLAAKAGIGWVGKHSLILNKEAGSWFFLGELLLDLPLPIDKPQDEQCGRCVACITTCPTGAIVEPYVVDARRCISYLTIELESAIPEEFRPLMGNRIYGCDDCQMICPWNRFSQLTEEGDFSPRQNLHTPELIALFQWDEKTFLKITEGSAIRRIGHLRWLRNISVALGNAPYDAQIIPLLQSRRGLSEVLDEHIEWAVKQQQEKRSENVIEIQTSQQKRLIRAIEKGLPRDA

SEQ ID NO: 77118 - protein, 381 aa, Hafnia paralvei
  REGION 1..381: note = tr|A0A4Q9EXP8|A0A4Q9EXP8_9GAMM Epoxyqueuosine reductase OS=Hafnia paralvei OX=546367 GN=queG PE=3 SV=1
MTHPLDLNQLAQHIKQWGQSLGFQQVGICDTDLSVEEPRLQAWLDKQYHGEMAWMERHGMMRARPHELQPGTLRVISVRMNYLPTHAFLAKTLKNPQLGYISRYALGRDYHKLLRNRLKRLGEMIQEYCEGIDINFRPFVDSAPILERPLAAKAGIGWVGKHSLILNQEAGSWFFLGELLIDLPLPVDQPQEEQCGRCVACMTTCPTGAIVEPYVVDARRCISYLTIELESAIPEEFRPLMGNRIYGCDDCQMICPWNRFSQLTNEDDFSPRQKLHTPELIELFQWDEPTFLKITEGSAIRRIGHLRWLRNISVALGNAPYESQIIPLLESRLGMSDVLDEHIVWAVKQQLEKRGENAIEIQTSQQKRLIRAVEKGLPRDA

SEQ ID NO: 77119 - protein, 381 aa, Hafnia paralvei
  REGION 1..381: note = tr|A0A4S1D260|A0A4S1D260_9GAMM Epoxyqueuosine reductase OS=Hafnia paralvei OX=546367 GN=queG PE=3 SV=1
MTHPLDLNQLAQHIKQWGQSLGFQQVGICDTDLSVEEPRLKAWLDKQYHGEMAWMERHGMMRARPHELQPGTLRVISVRMNYLPAHAFFAKTLKNPQLGYISRYALGRDYHKLLRNRLKRLGEMIQEYCEGIDINFRPFVDSAPILERPLAAKAGIGWVGKHSLILNQEAGSWFFLGELLIDLPLPVDKPLEEQCGRCVACMTTCPTGAIVEPYVVDARRCISYLTIELESAIPEEFRPLMGNRIYGCDDCQMICPWNRFSQLTNEDDFSPRQKLHTPELIELFQWDEPTFLKITEGSAIRRIGHLRWLRNISVALGNAPYEAQIIPLLESRLGMSDVLDEHIVWAVKQQLEKRGENAIEIQTSQQKRLIRAVEKGLPRDA

SEQ ID NO: 77120 - protein, 374 aa, Hahella chejuensis
  REGION 1..374: note = tr|Q2SBB5|Q2SBB5_HAHCH Epoxyqueuosine reductase; OS = Hahella chejuensis (strain KCTC 2396) OX=349521 GN=queG; PE = 3 SV=1
MTNDTYSQPQLNQLAGDIKQWAQELGFQQCGVTDVDLGHHEDALKDWLSKGYHGSMNYMADHGNKRSRPAELLPGALRVISVRMDYWPEQKGKAQARLEQDQSAYVSRYAVGRDYHKLMRKRLAQLGKRIQEEIAESAYRVFVDSAPVLERALAQKAGLGWIGKNTMLINPKAGSYFFLGELFTDLPLPIDAPYPKYHCGSCSACLDLCPTKAFVAPHILDARRCISYLTIELKGDIPEELRPMMGNRIFGCDDCQMVCPWNKFSRLTGEKDFSPRHRLDSAELLELFEWTEEQFLNNTEGSAIRRTGHESWLRNIAVALGNAPTTPTIIAALKGKLSHPSVIVQEHVRWALARHGEPLAETTERQETDKSSVR

SEQ ID NO: 77121 - protein, 357 aa, Hahella sp.
  REGION 1..357: note = tr|A0A261GJ65|A0A261GJ65_9GAMM Epoxyqueuosine reductase OS=Hahella sp. CCB-MM4 OX=1926491 GN=queG PE=3; SV = 1
MSYTDFTSLAKSIKSWALELGFQQCGITDVDLGDHADHFQQWLANDHHGTMDYMASHGSKRYKPDELVPGTIRVISVRMDYWPQKDNAANAEKTLAEDSKAYVSRYTLGRDYHKLIRKRLAHLAERVQKKIESTQYRVFVDSAPVLERALAQKAGLGWIGKNTMLINPKAGSYFFLGEIFTDLPLPVDDPFDSHHCGSCSACMDFCPTNAFVGPQELDARRCISYLTIELKGSIPTELRPLMGNRIFGCDDCQMVCPWNKFNHPTVEEDFTPRHQLDSSELLKLFNWTEEEFLTNTQGSAIRRTGYESWLRNIAVALGNATPSREILTALEEKANHPSAIVREHVAWALERLNRVPS

SEQ ID NO: 77122 - protein, 374 aa, Hahella sp.
  REGION 1..374: note = tr|A0A3T0VHX5|A0A3T0VHX5_9GAMM Epoxyqueuosine reductase OS=Hahella sp. KA22 OX=1628392 GN=queG PE=3 SV=1
MTNDTYSQSQLSQLAGDIKQWAQELGFQQCGVTDVDLGRHEEALRDWLSKGYHGSMGYMADHGDKRSRPAELLPGTLRVISVRMDYWPEKKGEAQARLEQDQSAYVSRYAVGRDYHKLMRKRLAQLGKRIQEEITESAYRVFVDSAPVLERALAQKAGLGWIGKNTMLINPKAGSYFFLGELFTDLPLPVDPPYPKNHCGSCSACMDFCPTKAFVAPNVLDARRCISYLTIELKGKIPEDLRPMMGNRIFGCDDCQMVCPWNKFSRLTGEKDFSPRHRLDSAELLELFAWTEEEFLSNTEGSAIRRTGHESWLRNIAVALGNAPTSPAIIAALKEKLLHPSAIVQEHVRWALTQHGEPLADMAERQEAEKTSVR

SEQ ID NO: 77123 - protein, 377 aa, unidentified
  source 1..377: note = Hahellaceae bacterium
  REGION 1..377: note = tr|A0A2D8R7V9|A0A2D8R7V9_9GAMM Epoxyqueuosine reductase OS=Hahellaceae bacterium OX=2048971 GN=queG PE=3; SV = 1
MTDLREAPSADPLIMRELRRKLDIWANELGFQQLGVSGIQLGDHPEALQRWLDKGYHGQMSYMAERASLRAAPETLFENAASIISVRMDFWPAKRAKKGLPPALDDGETAYVASYALGRDYHKLMRSRLKKLADRVRDFAGDYDMRPFVDSAPVLERGVAQQAGLGWIGKNTMLINPAAGSHFFLGELFTSLPLPADKPFTDQHCGSCRACLDVCPTSAFPEPGVLDARRCISYLTIEHRGSIDEALRPLMGNRVFGCDDCQAICPWNKFAHFTKEADFHPRQQISDRKMVELFNWSEETFLKQTEGSAIRRTGYESWLRNLAIGLGNALAGRGVLGKAAPMADKDAIRRALETRLDHESAVVREHVRWALSQQAPS

SEQ ID NO: 77124 - protein, 379 aa, Halalkalibacillus sp.
  REGION 1..379: note = tr|A0A2I0QV49|A0A2I0QV49_9BACI tRNA epoxyqueuosine(34) reductase QueG OS=Halalkalibacillus sp. B3227 OX=2018042 GN=queG PE=4 SV=1
MDVAQLKQELIEYSKEINIQEIGFTSADTFDSLKQRLIVQQSLKFQSGFEKGSVEERTTPSELMPKARSIISIALAYPSKMKGAPKSTKQEPRGVFARASWGQDYHDVLREKLRLLGEFLQEKVDGVAYKAMVDTGELHDRAVAERAGVGFVGKNCALITEDYGSYVYLGELITNIPFQPDEPIEEGCGDCNICVDTCPTGALVQGGQLNAQRCIAYLTLTKGFLEDEFRTKIGNRVYGCDTCQVVCPKNKSKDFHLHPEMEPDPELVKPKLQPLLKISNREFKEKYGYMSGSWRGKKPIQRNAIIALAHYKNEDSVDDLADLMNNDPRPVIRGTAAWAIGKIGRSDSEELILKAKERESDEQVINEMEKGLSFKHQTV

SEQ ID NO: 77125 - protein, 365 aa, Halanaerobium congolense
  REGION 1..365: note = tr|A0A1G6HTB3|A0A1G6HTB3_9FIRM Epoxyqueuosine reductase OS=Halanaerobium congolense OX=54121; GN = C7954_10174 PE=4 SV=1
MQINKLVKECAAELNIDICRVTDNQKLETEFEILKERSQGQFWPQPFANQNLEELTTPVLHFPNLKSIIAAAVSYNHNEANLFLSNYVTVEDYHSYLENKLEKLASRLQQKLNYSFNYKIFVDQAPFLEKALAQKAGLGFIGKNTLLINPKLGSNLFLGEIFTDLEIAVDQPLDLDCGSCRLCLESCQVQALKEANLLAAEDCTAYLTQKKGILTESEIKKIGHHIWGCDDCKDVCPYNKKSKASAAKKLQFFNKNLEYFLNLESKEVPAELDNTAVTWRGSRILLRNAMLAAANLKEKRFFNKIKQKLNDNSPIIRYYAAYSLLKIDFKKAKKIVKEYLNQEQNSEYKNKIKKILVSEEDNNGS

SEQ ID NO: 77126 - protein, 365 aa, Halanaerobium congolense
  REGION 1..365: note = tr|A0A1G9P064|A0A1G9P064_9FIRM Epoxyqueuosine reductase OS=Halanaerobium congolense OX=54121; GN = BY453_10519 PE=4 SV=1
MQINKLVKECAAELNIDICRVTDNQKLETEFEILKERSQGQFWPQPFANQNLEELTTPVLHFPNLKSIIAAAVSYNHNEANLFLSNYVTVEDYHSYLENKLEKLASRLQQKLNYSFNYKIFVDQAPFLEKALAQKAGLGFIGKNTLLINPKLGSNLFLGEIFTDLEIAVDQPLDLDCGSCRLCLESCQVQALKEANLLAAEDCTAYLTQKKGILTESEIKKIGHHIWGCDDCKDVCPYNKKSKASAVKKLQFFNKNLEYFLNLESKEVPAELDNTAVTWRGSRILLRNAMLAAANLKEKRFFNKIKQKLNDNSPIIRYYAAYSLLKIDFKKAKKIVEEYLNQEQNSEYKNKIKKILVSEEDNNGS

SEQ ID NO: 77127 - protein, 358 aa, unidentified
  source 1..358: note = Halanaerobium hydrogeniformans
  REGION 1..358: note = tr|E4RLP0|E4RLP0_HALHG DUF1730 domain-containing protein OS=Halanaerobium hydrogeniformans OX=656519; GN = Halsa_1529 PE=4 SV=1
MIKKELIKNIASELEIDICRITDGGGLKKYRKILEQRKKTGLWPQAFTEEDIDKLCNPSLHFEGLKSIIVIAINYHNNSKQINKCLSNYVTQKDYHIYLKEVMEIMVKKIKAKIKKDFNYKIFVDNAPFLEKALAERAGAGFIAKNSLLINPDFGSYIFLGEIFTDLEIEKDKALDLDCGECTICLENCAGNALTAPYQLEADKCIAYLTQKKGIIPLAERKKMGGHIWGCDICQIICPYNKNTSKSSKKELQYFERGIEYFLKIDRNNPPEELKNTAIFWRGSRILIRNALITAANLQKEEYFDLIKTKLNDNSSLIRYYAVWSLSEIDYQKSLSILKKHLLKEKNKEVKQVIKNIL

SEQ ID NO: 77128 - protein, 252 aa, Halanaerobium kushneri
  REGION 1..252: note = tr|A0A1N6P8U5|A0A1N6P8U5_9FIRM Epoxyqueuosine reductase QueG (Queuosine biosynthesis) OS=Halanaerobium kushneri OX=56779 GN=SAMN05421834_1011 PE=4 SV=1
MKQEIENLIHDFIANYQEKDDIKSSWKEPIIKYAAADDPMFGELKKAVSEDHLMPEDLMPGARTIIAYFIPFSKGIADSNIEGKYSSDQWAKAYIETNQLIADLNQHLKEKLSKKGYQASLIAATNNFDKERLISDWSHRHAAYIAGLGTFGLNNMLITEKGCAGRIGTLVTDLNIEASERSEQDKCLNKAGFNCSKCVDRCVNGSLQKDSFDRHQCYQLLSENDKIHPESELTDVCGKCSVDLPCSFSSPV

SEQ ID NO: 77129 - protein, 361 aa, Halanaerobium kushneri
  REGION 1..361: note = tr|A0A1N7BH35|A0A1N7BH35_9FIRM Epoxyqueuosine reductase OS=Halanaerobium kushneri OX=56779; GN = SAMN05421834_13117 PE=4 SV=1
MRINNLVKETAAELNIDLCGITDGSDLNDERKKLKKRIQTKYWPQPFASQQLDLLTKPSLQFKNLQSIIVIAMSYNNGASSSFLSNYVTVKDYHNFLQEKLEKMASVLQNKLKKKFDYKIFVDTAPFLERALAKRAGIGFIGKNSMLINPKFGSYLFLGELFTDLEIKKDQPLNLDCGECQICIKNCEGKALKDEYLLDGEVCISYLTQKKGVLSAAEINKIGTHVWGCDACQNKCPYNINKTENSEPELNFFNKNLEYFLELDRKVPPSELKNTAIMWRGSRILQRNALIAVYNLGEERYFEAVKRKLKDNSPIIRYYSVLALLELNYQRAKKPVEQAIKNEKNSRYKKEMLKLLEQKGE

SEQ ID NO: 77130 - protein, 364 aa, Halanaerobium praevalens
  REGION 1..364: note = tr|E3DQX8|E3DQX8_HALPG DUF1730 domain-containing protein OS=Halanaerobium praevalens (strain ATCC 33744 / DSM 2228 / GSL) OX=572479 GN=Hprae_0799 PE=4 SV=1
MQLNSLVKKSAANLKIDICQITDGNDLVEARKILEQRVKSEYWPQPLTNQNLDELTKPRLQLDNLNSIIVAAISYNNQGGNQYLSNYVTVLDYHNYLENKLEELVNNLKNKIDKDFNYKIFVDTAPFLEREVARKAGVGFIGKNTMLINPNFGSYLFLGEILTDLKIKKDQPLINTCANCKICLENCEGDALKKDYLLAADDCISYLTQKKSLLTEENIKKINNHLWGCDACQEKCPYNKNILTTNNKNLNFFNKNLSYFLNLKRKKIPAELEKTAIVWRGNRILLRNALIVAANLKKEQYFDLIIDKLDDNSPIIRYYAAYALAKINFKRAKKIIKKQLIKEKDQFYQKKITEILEQEAENEA

SEQ ID NO: 77131 - protein, 365 aa, Halanaerobium saccharolyticum
  REGION 1..365: note = tr|A0A2T5RK67|A0A2T5RK67_9FIRM Epoxyqueuosine reductase OS=Halanaerobium saccharolyticum OX=43595; GN = C8C76_11117 PE=4 SV=1
MQINKLVKKTAAELKIDLCGITDGSELTEERLILEKRAETEYWPQPFTNRDLDQLTKPALQFENLNSIIVTAISYNNGGASPFLSNYVTVEDYHDYLQQKLKKLALELQQKLNRDFNYKIFVDTAPFLERALAKRAGIGFIGKNSMLINPELGSYLFLGELFTDLEIEKDEPLELDCGQCQICLQNCEGGALKDEYLLDGEVCISYLTQKKGILSKSEVNKIGTHIWGCDACQTKCPYNVNKEQITQPELSFFDKKLNYFLEIERNNPPSELKNTAIMWRGSRILLRNALIAVSNLEDEKYFEAVQKKLQDNSPIIRYYAVLALLKINYQRAKELVKKTAAAENNSKYQKLIFSLLEQKGEENEY

SEQ ID NO: 77132 - protein, 365 aa, Halanaerobium saccharolyticum
  REGION 1..365: note = tr|M5E029|M5E029_9FIRM Epoxyqueuosine (OQ) reductase QueG OS=Halanaerobium saccharolyticum subsp. saccharolyticum DSM 6643 OX=1293054 GN=HSACCH_01351 PE=4; SV = 1
MQINNLVKECAAKLNIDLCRITDNGELKQERKILEKRSKDKYWPQPFANQDIAELTNPAFHFPNLKSIIVAAVSYNKNGTNPFLSNYVTIEDYHVYLENKLEKLAARLQKKLNKSFNYKIFVDEAPFLEKALARKAGIGFIGKNTLLINPELGSNLFLGEIFTDLEITKDQPLADDCGDCRRCIDNCQVDALKSEYLLAAEECTAYLTQKKGILSEAEIKKIGHHIWGCDDCKDVCPYNKKADKLTASELMIFDKGLQYFLNLERKELPEELANTAITWRGSRILIRNAMLAAANLKELKYFNLIKEKLNDNSPVIRYYAALSLLEIDFKEAKGVIEKHIAQENNKEYKNKIKNILAAKEENHGY

SEQ ID NO: 77133 - protein, 369 aa, Halanaerobium salsuginis
  REGION 1..369: note = tr|A0A1I4EM68|A0A1I4EM68_9FIRM Epoxyqueuosine reductase OS=Halanaerobium salsuginis OX=29563; GN = SAMN02983006_00048 PE=4 SV=1
MLKNKIIKNVAYQNGLDICRITDGNELIAAREKLQARAETEYWPQPLANQNITELTTPSLFLTNLKSIIVLGVNYYNQGVFNQKLSSYITAVDYHNYLQNKLEKLVEQLKLKFNFDFSYKIFVDTAPFLEREVARKAGVGFIGKNTMLINPQYGSYLFLAEILTDLEIEIDYPLTNNCGSCQICLNNCEGGALKEEYLLAGKDCISYLTQKKGMLTEAARKKIGTHFWGCDICQQKCPYNQQLSYNKQAELQFFAKDLSYFLELERNNLPAELEKTALSWRGARILQRNALIVAANLQEEKYFELIRKYLTDNSPIIRCYAVWALSKLDYARSVDLLQKQLVKENDRLVKKEIKAILFNGGDRINEYSN

SEQ ID NO: 77134 - protein, 192 aa, Halanaerobium sp.
  REGION 1..192: note = tr|A0A315QSX1|A0A315QSX1_9FIRM Uncharacterized protein (Fragment) OS=Halanaerobium sp. OX=1895664; GN = CI947_2303 PE=4 SV=1
MCIRDRCQICLQNCEGGALKDEYLLDGEVCISYLTQKKGILAKSEVNKIGTHIWGCDACQTKCPYNVNKEQITQPELSFFDKKLSYFLEIERNNPPSELKNTAIMWRGSRILLRNALIAVSNLEDEKYFEAVQKKLQDNSPIIRYYAVLALLKINYQRAKELVKKTAAAENNSKYQKLIFSLLEQKGEENEY

SEQ ID NO: 77135 - protein, 365 aa, Halanaerobium sp.
  REGION 1..365: note = tr|A0A139D969|A0A139D969_9FIRM 4Fe-4S ferredoxin-type domain-containing protein OS=Halanaerobium sp. T82-1 OX=1794808 GN=AWL62_481 PE=4 SV=1
MQINKLVKECAAELNIDICRVTDNQKLETEFEILKERSQGQFWPQPFANQNLEELTTPVLHFPNLKSIIAAAVSYNHNEANLFLSNYVTVEDYHSYLENKLEKLASRLQQKLNYSFNYKIFVDQAPFLEKALAQKAGLGFIGKNTLLINPKLGSNLFLGEIFTDLEIAVDQPLDLDCGSCRLCLESCQVQALKEANLLAAEDCTAYLTQKKGILTESEIKKIGHHIWGCDDCKDVCPYNKKSKASAAKKLQFFNKNLEYFLNLESKEVPAELDNTAVTWRGSRILLRNAMLAAANLKEKRFFNKIKQKLNDNSPIIRYYAAYSLLKIDFKKAKKIVEEYLNQEQNSEYKNKIKKILVSEEDNNGS

SEQ ID NO: 77136 - protein, 393 aa, Halarsenatibacter silvermanii
  REGION 1..393: note = tr|A0A1G9NW16|A0A1G9NW16_9FIRM Epoxyqueuosine reductase OS=Halarsenatibacter silvermanii OX=321763; GN = SAMN04488692_11143 PE=4 SV=1
MTTSMDNFELEKKARQHGFEAVGSVSIDVLKKIKSRGDTKKYIPENTETFFIFFQSYPLADPINFKDYSEEIRIAYFARIYDYHDILKRKLKEISQELTAETGRFHSWWGADDHSLPEKYLAKKAGLGFWGLNTLLINRDLGSFGFLGVIASPLKFEEVQEQKSSPVEKAHIEKTDSCCYKPARICEDCFKCLKACPVDALSKEKIKLDSDKCISSLTQRRGRFDWRRLAQFQNHFWGCDICQQVCPCNKILDYGRKNYGDYDAGNRGISADHWPRVGPMTVNEVLKLRRRDLPSCWSSYAFGWRGTRILVRNMLIVLANNLKPVYVKEIEEMTRDPSPIIRFYAFYCLYRWYWQENKDRAKNFIAEKIEEEKNSKNLQTLKNIWNSREEFVT

SEQ ID NO: 77137 - protein, 445 aa, Haliangium ochraceum
  REGION 1..445: note = tr|D0LI60|D0LI60_HALO1 Uncharacterized protein; OS = Haliangium ochraceum (strain DSM 14365 / JCM 11303 / SMP-2) OX=502025 GN=Hoch_3940 PE=4 SV=1
MSPDAGETRPERLRELLVRGARARGFHRVATAPLTPPRRFAAYRAWLAQDMHGGMGYMAEDAHIAGRAEPASLLAEARSVAIVALAYPAEDGPGAPDAPDAPDASEADAPPGDEDGVIRGFVARYARGRDYHNVLKERLFALAEELAEAVGAPVAARPCVDSAPVLERDLAESAGLGFTGKNTMLITPGLGSYTVLGELLLAAEVAPTLVQVSENKQRCGSCRACLDACPTNAFPAPFVLDARRCVSYLTIEHEGAIPLALRPGLGTRIFGCDVCQEVCPFNARAPARTPADPELSAAAAPAARGTGPAAAVGPRAAPDLVRLLGLGANQRRRYVDGTAMRRASRERLSRNVCVALGNAGDVRAIPALLGALAERSPVVRAHAAWALGRLGAREELRAALADETEAEVRAEMRAALDALASGGDALADAGGDAHAGAGNGADEDR

SEQ ID NO: 77138 - protein, 198 aa, Haliea salexigens
  REGION 1..198: note = tr|A0A3C1KMM6|A0A3C1KMM6_9GAMM tRNA epoxyqueuosine(34) reductase QueG (Fragment) OS=Haliea salexigens OX=287487 GN=queG PE=4 SV=1
PLDADPPQASKHCGSCSACLSVCPTDAFAGPFELDARRCISYLTIEHHGSIDPSLRPLLGNRVFGCDDCQLVCPWNKFARHSDETDFQPRHNLQNSELVTLFLWDEETFLQRTEGSAIRRIGHERWLRNLAVGLGNGPATPRAIAALEARLTHPSALVREHVGWALEVLRARAENAPGSSAARQPIHEYHPAPGGSRP

SEQ ID NO: 77139 - protein, 352 aa, Haliea sp.
  REGION 1..352: note = tr|A0A2D5F9V4|A0A2D5F9V4_9GAMM Epoxyqueuosine reductase OS=Haliea sp. OX=1932666 GN=queG PE=3 SV=1
MPQDQDFQQLRQALEAQAREAGFQALAVADIDLAEHEAHLERWLAAGHHGSMDYMQRHGRKRSRPEELVPGTCRVITLRLDYLPVGREPEATLQQSDRAYISRYALGRDYHKLMRKRLARLADWLREQAGGQYRVFVDSAPVLERALAERGGLGWIAKNTMLINERAGSWFFLGEIYTDLPLAADPPREQKHCGSCRACLDICPTRAFVGPFQLDARRCISYLTIEHRGSIDPELRPLMGNRIYGCDDCQLVCPWNKFARHSAEDDFQPRHGLDDIELVTLFAWDEETFLQRTEGSAIRRIGHVCWLRNIAVALGNAATSEAVLNALHSRRDHPSDLVREHVAWALARHGAL

SEQ ID NO: 77140 - protein, 351 aa, Haliea sp.
  REGION 1..351: note = tr|A0A4Z0M140|A0A4Z0M140_9GAMM Epoxyqueuosine reductase OS=Haliea sp. SAOS-164 OX=2562682 GN=queG PE=3; SV = 1
MPATQADSLLDQIRDWAAEFGFGQLGVADIDLGEHPAYLRKWLDAGYHGSMDYMARHADKRAQPAELVPGTCRVISVRMDYLADTQAEQVLDDPQRAYISRYALGRDYHKLLRRRLAHLAKRIEERAGGGHYRAFVDSAPVLERAVAERAGLGWIAKNTMLINSDAGSWFFLGEIYTDLPLPTTAPQQTKHCGSCTRCLEICPTQAFVGPFELDARRCISYLTIEHRGSIDPALRPLLGNRVFGCDDCQLVCPWNKFAQPSPEEDFRPRHGLDNSTLVELFEWDEDTFLANTEGSAIRRIGYECWLRNLAVGLGNGPPDPAALSALRSRMEHPSALVREHVAWALTRLEAA

SEQ ID NO: 77141 - protein, 144 aa, unidentified
  source 1..144: note = Halieaceae bacterium
  REGION 1..144: note = tr|A0A3C7VXZ2|A0A3C7VXZ2_9GAMM tRNA epoxyqueuosine(34) reductase QueG (Fragment) OS=Halieaceae bacterium OX=2026743 GN=queG PE=4 SV=1
PGPFELDARRCISYLTIEHKGSIDEALRPLMGNRVFGCDDCQLVCPWNKFASPTAEDDFRPRHGLDAPGLAELFAWDEATFLKRTAGSPIRRVGFERWLRNLAVGLGNAPTSAPVVEALRGRRDHPSALVREHVEWALARHGAL

SEQ ID NO: 77142 - protein, 366 aa, unidentified
  source 1..366: note = Halieaceae bacterium
  REGION 1..366: note = tr|A0A2A5WS42|A0A2A5WS42_9GAMM Epoxyqueuosine reductase OS=Halieaceae bacterium MED-G26 OX=1986253; GN = queG PE=3 SV=1
MRRVYLGQPPICHNVVVNNAEHNELVDTIRDWAKALGFQDIGFTGIELNEHEAYLQKWLDAGYHGTMDWMDRHGTKRSRPSELVPGTCTVISCRMDYQPEAKDAWQVLDTSDKGFVSRYAVGRDYHKIIRSRLAKLADRIRSELGSGDFRAFVDSAPVLERAIAEQSGLGWIAKNTMLINESAGSYFFLGEIYTDIPLPRSEPKQEKHCGSCSACLTACPTDAFVGPFVLDARRCISYLTIEHEGSIAEELREKMGNRIYGCDDCQLVCPWNKFAAISNEADFAPRWDLDNPNLVELFSWTEVEFLDRLQGSPIRRIGYEKWLRNIAVALGNAETSPEILQALKSREHHASSLVREHVTWALSQHG

SEQ ID NO: 77143 - protein, 352 aa, unidentified
  source 1..352: note = Halioglobus japonicus
  REGION 1..352: note = tr|A0A2N5Y8Y0|A0A2N5Y8Y0_9GAMM Epoxyqueuosine reductase OS=Halioglobus japonicus OX=930805 GN=queG PE=3; SV = 1
MSDQPSQLLADIRAHAAQLGFQQLGVTDVNLAEHEAYLQKWLDAGYHGSMDYMAKHGTKRSRPDELVPGTCRVLSLRMDYHVPEAGAEDVLASSEKAYISRYTLGRDYHKLIRKRLSQLAKYIQEKAGGGHYRAFVDSAPVLERAIAEQAGLGWIAKNTMLINSDAGSWFFLGEIYTDLPLPADPPQPSKHCGTCTACLEACPTDAFVGPFELDARKCISYLTIEHHGSIDEALRPLMGNRVFGCDDCQLVCPWNKFAQPTDKDDFKPRHGLESADLVTLFEWDEETFLTRTEGSAIRRIGYERWLRNLAIGLGNGPASPAAISALKHRSGHPSPLVREHIAWALKTLGSGL

SEQ ID NO: 77144 - protein, 359 aa, unidentified
  source 1..359: note = Halioglobus lutimaris
  REGION 1..359: note = tr|A0A2N5X1L9|A0A2N5X1L9_9GAMM Epoxyqueuosine reductase OS=Halioglobus lutimaris OX=1737061 GN=queG PE=3; SV = 1
MPAQDAPQITMPDADALLQQVQQWAEELGFQQLGISDVDLGEHEAYLQKWLDAGYHGSMDYMARHGSKRSRPAELVPDTCRVLSLRMDYLVDEQAERVLASPEKAYISRYTLGRDYHKLMRKRLSQLAQRIANRAGGGQFRAFVDSAPVLERAIAEQAGLGWIAKNTMLINSGAGSWFFLGEIYTDLPLPPTQAQASKHCGSCTACLDICPTDAFVGPFQLDARRCISYLTIEHQGSIDPTLRPLLGNRVFGCDDCQLVCPWNKFAQLTDETDFRPRHGLDDASLVALFLWDESTYLARTEGSAIRRIGFERWLRNLAVGLGNGPASAEAIAALRSRLDYPSELVREHVAWALARLQAN

SEQ ID NO: 77145 - protein, 409 aa, unidentified
  source 1..409: note = Halioglobus sp.
  REGION 1..409: note = tr|A0A2E0Z1T7|A0A2E0Z1T7_9GAMM Epoxyqueuosine reductase OS=Halioglobus sp. OX=2024834 GN=queG PE=3 SV=1
MAVPDTRPTPAARSNIAAYAARPFWQNYTSSSRPVTPLSDQPPQASPQQLDQLARDIRGWAAELGFAQVGIAGTDPGEHERYLQRWLDAGHHGQMDWMARHGSKRSRPPELVPGTCRVICLRMDYLAPDTRPEQVLASPDKAYISRYALGRDYHKRVRGRLARLARRIEDAAQAGHYRAFVDSAPVLERAFAEQAGLGWIAKNTMLINSDAGSWFFLGEIYTDLPLPLDEPQRDKHCGSCTACLDVCPTNAFKGPFELDARRCISYLTIEHEGSIDPELRPLMGNRVFGCDDCQLCCPWNKFATPTTAEDFAPRHGLDAAQLAQLMLWEEEDYLRRTEGSAIRRIGYERWLRNLAIALGNAPGEDAVIDALQRRRDHPSALVREHVAWALQRHGVTPGAGSARGSSASR

SEQ ID NO: 77146 - protein, 363 aa, unidentified
  source 1..363: note = Halioglobus sp.
  REGION 1..363: note = tr|A0A3L7E2E6|A0A3L7E2E6_9GAMM Epoxyqueuosine reductase OS=Halioglobus sp. U0301 OX=2283635 GN=queG PE=3; SV = 1
MSDSGDPKISVPQASELLQDVRRWAAELGFQQVGVSSVDLGDHEAYLQKWLDAGYHGSMDYMARHGSKRSRPAELVPETCRVISLRMDYLTDDSANAVLASSEKAYISRYALGRDYHKLVRKRLAQLAARIEAEAGGGRFRAFVDSAPVLERALAEQAGLGWIAKNTMLINPEAGSWFFLGEIYTDLPLPETAAQESKHCGTCTACLTACPTDAFVAPFQLDARRCISYLTIEHHGSIDPQLRPLMGNRVFGCDDCQLVCPWTKFAGASGEDDFQPRHGLADAELVALFLWDEDTFLARTAGSPIRRIGYERWLRNLAVGLGNGPATAAAIAALRQRQAHPSALVREHVAWALARLNPKGSGL

SEQ ID NO: 77147 - protein, 310 aa, Haliscomenobacter hydrossis
  REGION 1..310: note = tr|F4L4H9|F4L4H9_HALH1 Epoxyqueuosine reductase; OS = Haliscomenobacter hydrossis (strain ATCC 27775 / DSM 1100 / LMG 10767 / O) OX=760192 GN=queG PE=3 SV=1
MQTAQTHTTMIRAEAQRLGFDQVGMAKAEFMEEEARHLEQWLQQGMHGQMHYMANHFDKRIDPTQLVPGAKSVISLVYNYYNPAKQEDPTAPKISQYAYGKDYHFVVKDKLKALLHFIQQEIGEVQGRCFVDSAPVLERDWAKRAGLGWIGRNTLLINPKAGSYFFLAELILDLELEYDAPMRDYCGTCRRCIDACPTEAISPEGYLVDGSKCISYLTIELREAIPDEFKGKMDNWMFGCDICQDVCPWNRFSEPHHEPAFAPHPDLLSMRKADWEEITQEVFNQVFQHSAVKRTKWDGLQRNIKFLQEE

SEQ ID NO: 77148 - protein, 377 aa, Halobacillus aidingensis
  REGION 1..377: note = tr|A0A1H0V997|A0A1H0V997_HALAD Epoxyqueuosine reductase OS=Halobacillus aidingensis OX=240303 GN=queG; PE = 3 SV=1
MDFHQFKEEVIAYSKEIGIDKIGFASADVFGELKARLKRQQELGYQSGFEKGSVQERTEPGRLLPGAQSIISIALAYPSKMHDAPKSKKGDRRGIFCRASWGQDYHDVVRDRLNRLGAFLQEKFPDVELKSMVDTGELSDRAVAERAGIGFSGKNCAVITPEFGSYVYLGELVTNIPFAPDEPVDDSCGDCNICVDACPTDALVQGGQLNANRCIAFLTQTKDFLPDEFRTKIGNRLYGCDTCQTVCPKNRKKDFHNHEEFEPDPEIVKPKLTPLLSISNRQFKEKFGFISGSWRGKKPIQRNAILALAHYRDETAIDELIRLMKEDPRPVIRGTAAWGLGKIGKPECFAAIEEAMGREENEQVLYEMEKGVQFQEQ

SEQ ID NO: 77149 - protein, 377 aa, Halobacillus alkaliphilus
  REGION 1..377: note = tr|A0A1I2QGD8|A0A1I2QGD8_9BACI Epoxyqueuosine reductase OS=Halobacillus alkaliphilus OX=396056 GN=queG; PE = 3 SV=1
MDYHELKEQVIAYSKEIGIDKIGFASADVFGELKARLKRQEALGYQSGFEKGDVDERTDPGRLLPGAQSIISIAMAYPSKMHDAPKSRKGDRRGLFCRASWGEDYHTVLRDRLNKLGAYLQELFPDVELKSMVDTGELSDRAVAERAGIGFSGKNCAIITPEFGSYVYLAELVTNIPFAPDEPVQEGCGDCNICVDACPTGALVQGGQLNAQRCIAFLTQTKDFLPDEFRSKIGNRLYGCDTCQTVCPINRKKDFHHHEEFEPDPEVVKPKLTPLLSISNRQFKEKFGFISGSWRGKKPIQRNAILALAHYRDETSISELIRLMNEDPRPVIRGTAAWGLGKIGTVDCFTAIKDAMINEKDEQVIYEMEKGLQFEKI

SEQ ID NO: 77150 - protein, 377 aa, Halobacillus dabanensis
  REGION 1..377: note = tr|A0A1I3SRP1|A0A1I3SRP1_HALDA Epoxyqueuosine reductase OS=Halobacillus dabanensis OX=240302 GN=queG; PE = 3 SV=1
MDFHQFKEEVIAYSKEIGIDKIGFASADVFGELKSRLKRQEELQYQSGFEKGSVEERTEPVRLLPGAQSIISIALAYPSKMHNAPKSKKGDRRGIFCRASWGQDYHDVLRDRLQRLGAFLQEKFPEVELKSMVDTGELSDRAVAERAGIGFSGKNCAVITPEFGSYVYLGELVTNIPFVPDEPVDDSCGDCNICVDACPTGALIQGGQLNAQRCIAFLTQTKDFLPDEFRTKIGNRLYGCDTCQTVCPKNRKIDFHHHEEFEPDPEVVKPKLTPLLSISNRQFKEKFGFISGSWRGKKPIQRNAILALAHYRDETAVGELIRLMKDDPRPVIRGTAAWGLGKIGKPECFQAIEEAREHEQDEQVLFEMEKGVRFQQQ

SEQ ID NO: 77151 - protein, 377 aa, Halobacillus faecis
  REGION 1..377: note = tr|A0A511WVR4|A0A511WVR4_9BACI Epoxyqueuosine reductase OS=Halobacillus faecis OX=360184 GN=queG PE=3; SV = 1
MDFHQFKEEVIAYSKEIGIDKIGFASADVFGELKARLKRQQELGYQSGFEKGSVQERTEPGRLLPGAQSIISIALAYPSKMHDAPKSKKGERRGIFCRASWGQDYHDVLRDRLHRLGAFIQEKFPEVELKSMVDTGELSDRAVAERAGIGFSGKNCAVITPEFGSYVYLGELVTNIPFAPDEPVDDSCGDCNICVDACPTDALVQGGQLNANRCIAFLTQTKGFLPDEFRTKIGNRLYGCDTCQTVCPKNRKKDFHNHEEFEPDPEIVKPKLTPLLSISNRQFKEKFGFISGSWRGKKPIQRNAILALAHYRDETAIDELIRLMKEDPRPVIRGTAAWGLGKIGKPECFAAIEEAMGKEEDEQVLYEMEKGVQFQEQ

SEQ ID NO: 77152 - protein, 377 aa, Halobacillus halophilus
  REGION 1..377: note = tr|I0JJX2|I0JJX2_HALH3 Epoxyqueuosine reductase; OS = Halobacillus halophilus (strain ATCC 35676 / DSM 2266 / JCM 20832 / NBRC 102448/ NCIMB 2269) OX=866895 GN=queG PE= 3 SV=1
MDYHELKEQVIAYSKEIGIDKIGFASADVFGELKARLKRQEALGYQSGFEKGDVDERTEPGRLLPGAQSIISIAMAYPSKMHDAPKSRKGDRRGLFCRASWGEDYHTVLRDRLNKLGAYLQELFPDVELKSMVDTGELSDRAVAERAGIGFSGKNCAIITPEFGSYVYLAELVTNIPFAPDEPVQEGCGDCNICVDACPTGALVQGGQLNAQRCIAFLTQTKDFLPDEFRSKIGNRLYGCDTCQTVCPINRKKDFHHHEEFEPDPEVVKPKLTPLLSISNRQFKEKFGSISGSWRGKKPIQRNVILALAHYRDETSISELIRLMNEDPRPVIRGTAAWGLGKIGTSDCFTAIKDAMINEKDEQVIYEMEKGLQFEKI

SEQ ID NO: 77153 - protein, 377 aa, Halobacillus karajensis
  REGION 1..377: note = tr|A0A024P7X4|A0A024P7X4_9BACI Epoxyqueuosine reductase OS=Halobacillus karajensis OX=195088 GN=queG; PE = 3 SV=1
MDFHQFKEEVIAHSKEIGIDKIGFASADVFGELKARLKRQQELGYQSGFEKGSVQERTEPGRLLPGAQSIISIALAYPSKMHDAPKSKKGDRRGIFCRASWGQDYHNVLRDRLHRLGAFLQEKFPEVELKTMVDTGELSDRAVAERAGIGFSGKNCAVITPEFGSYVYLGELVTNIPFAPDDPVEDSCGDCNICVDACPTDALVQGGQLNAQRCIAFLTQTKDFLPDEFRTKIGNRLYGCDTCQTVCPKNRKKDFHNHEEFEPDPDVVKPRLTPLLSISNRQFKEKFGFISGSWRGKKPIQRNAILALAHYRDETAIDELIRLMKEDPRPVIRGTAAWGLGKIGNPECFQAIEEAKRLEEDEKVLYEMEKGLQFLEQ

SEQ ID NO: 77154 - protein, 377 aa, Halobacillus litoralis
  REGION 1..377: note = tr|A0A410MAQ6|A0A410MAQ6_9BACI Epoxyqueuosine reductase OS=Halobacillus litoralis OX=45668 GN=queG PE=3; SV = 1
MDFHQFKEEVIAYSKEIGIDKIGFASADVFGELKARLKRQQELEYQSGFEKGSVEERTEPGRLLPGAQSIISIALAYPSKMHDAPRSKKGDRRGIFCRASWGQDYHNVLRDRLQKLGAFLQEKFPEVELKSMVDTGELSDRAVAERAGIGFSGKNCAVITPEFGSYVYLGELVTNIPFAPDEPVNDSCGECNICVDACPTGALVQGGQLNAQRCIAFLTQTKDFLPDEFRTKIGNRLYGCDTCQTVCPKNRKKDFHNHEELEPDPEVSKPKLTPLLSISNRQFKDKFGFISGSWRGKKPIQRNAILALAHYRDETAIDELVRLMNEDPRPVIRGTSAWGLGKIGKPECFAAIEEAMEREEDEQVLFEMEKGVQFQKQ

SEQ ID NO: 77155 - protein, 377 aa, Halobacillus mangrovi
  REGION 1..377: note = tr|A0A1W5ZY77|A0A1W5ZY77_9BACI Epoxyqueuosine reductase OS=Halobacillus mangrovi OX=402384 GN=queG PE=3; SV = 1
MDFHKFKEEVIAYSKEIGIDKIGFASADVFGELKARLKRQEALGYQSGFEKGSVNERTEPSRLLPGAQSIISIALAYPSKMHDAPKSRKGDRRGIFCRASWGQDYHDVLRDRLNKLGAFIQEHFPEVELKSMVDTGELSDRAVAERAGIGFSGKNCAVITPEFGSYVYLGELVTNIPFAPDDPVDDSCGDCNICVDACPTGALVQGGQLNAQRCIAFLTQTKGFLPDEFRTKIGNRLYGCDTCQTVCPKNRKKDFHHHQEFEPDPEIVKPKLTPLLSISNRQFKEKFGFISGSWRGKKPIQRNAILALAHYRDETSISELIRLMNDDPRPVIRGTAAWGLGKIGTPECFEAVEKAMAKEDDEQVLYEMEKGLQFAKL

SEQ ID NO: 77156 - protein, 377 aa, Halobacillus salinus
  REGION 1..377: note = tr|A0A4Z0H4Q5|A0A4Z0H4Q5_9BACI Epoxyqueuosine reductase OS=Halobacillus salinus OX=192814 GN=queG PE=3; SV = 1
MNYHDFKEEVIAYSKEIGIDKIGFASADVFSELKGRLIRQQENSYQSGFEKGTVEERTEPSRLLPGSQSIISIALAYPSKMKDAPKSKKGERRGIFARASWGRDYHDVLRDRLNKLGAYLQEHFPEVELKSMVDTGELSDRAVAERAGIGFSGKNCAIITPEFGSYVYLGEIVTNIPFPPDEPVDDSCGDCNICVDACPTGALVQGGQLNAQRCIAFLTQTKDFLPDEFRTKIGNRLYGCDTCQTVCPKNRKKDFHLHEEFEPDPEVVKPKLIPLLSISNRQFKETFGPISGSWRGKKPIQRNAILALGHYKDETAVDELIRLMNEDPRPVIRGTAAYSLGKIGNEDCYKAIKDAIIKEEDSKVIVEMEKGLEFELQ

SEQ ID NO: 77157 - protein, 377 aa, Halobacillus sp.
  REGION 1..377: note = tr|L5NA71|L5NA71_9BACI Epoxyqueuosine reductase; OS = Halobacillus sp. BAB-2008 OX=1246484 GN=queG PE=3 SV=1
MDYQQLKDEVIAYSKEIGIDKIGFAAADVFGELKARLIRQEELGYQSGFEKGSAEERTEPSRLLPGAQSILSIALAYPSKMKDAPKSRKGERRGLFCRASWGQDYHDVLRDRLQKLGEFLKQKVPDAELKMMVDTGELSDRAVAERAGIGFSGKNCAVITPEFGSYVYLGEIVTNIPFAPDEPVDDSCGDCSICVDACPTDALVQGGQLNAQRCIAFLTQTKDFLPDEFRTVIGNRLYGCDTCQTVCPKNRKKDFHNHEEFEPDPEVVKPKLVPLLSISNREFKNTYGSISGSWRGKKPIQRNAILALAHYRDETAVPELIRLMKEDPRPVIRGTSAWALGKIGTEDGREEILKAMEKEENDQVRVEMEKGLQFEKL

SEQ ID NO: 77158 - protein, 380 aa, Halobacillus sp.
  REGION 1..380: note = tr|A0A444Q2C4|A0A444Q2C4_9BACI Epoxyqueuosine reductase OS=Halobacillus sp. SKP4-6 OX=2498856 GN=queG; PE = 3 SV=1
MDFHQFKEEVIAYSKEIGIDKIGFASADVFGELKGRLIRQQELGYSSGFEKGNVEERTEPGRLLPGAQSIISIALAYPSKMQDAPKSKKGARRGIFCRASWGRDYHDVLRDRLNKLGAFLQEHFPDVELKSMVDTGELADRAVAERAGIGFSGKNCAVITPEFGSYVYLGEIVTNIPFAPDEPVDDSCGDCNICVDACPTGALVEGGQLNAQRCIAFLTQTKDFLPDEFRSKIGNRLYGCDTCQTVCPKNRKKDFHRHEEFEPDPEVAKPLLTPLLSISNREFKETFGPMSGSWRGKKPIQRNAILALGHYRDETAIDELIRLMNHDPRPVIRGTAAWSLGKIGKKDCFEAIKDAIIKEEDEQVIYEMKKGLQFELQYNG

SEQ ID NO: 77159 - protein, 377 aa, Halobacillus trueperi
  REGION 1..377: note = tr|A0A3D8VN96|A0A3D8VN96_9BACI Epoxyqueuosine reductase OS=Halobacillus trueperi OX=156205 GN=queG PE=3; SV = 1
MDFHQFKEEVIAYSKEIGIDKVGFASADVFGELKARLKRQQELGYQSGFEKGSVQERTEPGRLLPGAQSIISIALAYPSKMHDAPKSKKGDRRGIFCRASWGQDYHDVVRDRLNRLGAFLQEKFPDVELKSMVDTGELSDRAVAERAGIGFSGKNCAVITPEFGSYVYLGELVTNIPFAPDEPVDDSCGDCNICVDACPTDALVQGGQLNANRCIAFLTQTKDFLPDEFRTKIGNRLYGCDTCQTVCPKNRKKDFHNHEEFEPDPEIVKPKLTPLLSISNRQFKEKFGFISGSWRGKKPIQRNAILALAHYRDETAINELIRLMMEDPRPVIRGTAAWGLGKIGKPECFAAIEEAMGREENEQVLYEMEKGVQFQEQ

SEQ ID NO: 77160 - protein, 377 aa, Halobacillus trueperi
  REGION 1..377: note = tr|A0A3E0J224|A0A3E0J224_9BACI Epoxyqueuosine reductase OS=Halobacillus trueperi OX=156205 GN=queG PE=3; SV = 1
MDFHQFKEEVIAYSKEIGIDKIGFASADVFGELKARLKRQQELGYQSGFEKGSVQERTEPGRLLPGAQSIISIALAYPSKMHDAPKSKKGDRRGIFCRASWGQDYHDVVRDRLNRLGAFLQKKFPDVELKSMVDTGELSDRAVAERAGIGFSGKNCAVITPEFGSYVYLGELVTNIPFAPDEPVDDSCGDCNICVDACPTDALVQGGQLNANRCIAFLTQTKDFLPDEFRTKIGNRLYGCDTCQTVCPKNRKKDFHNHEEFEPDPEIVKPKLTPLLSISNRQFKEKFGFISGSWRGKKPIQRNAILALAHYRDETAIDELIRLMKEDPRPVIRGTAAWGLGKIGKPECFAAIEEAMGREENEQVLYEMEKGVQFQEQ

SEQ ID NO: 77161 - protein, 318 aa, unidentified
  source 1..318: note = Halobacteriovoraceae bacterium
  REGION 1..318: note = tr|A0A2E3W1L7|A0A2E3W1L7_9PROT tRNA epoxyqueuosine(34) reductase QueG OS=Halobacteriovoraceae bacterium OX=2026745 GN=queG PE=4 SV=1
MSLLNLSDEFLKGIQIVDWGYTEASTPVTFNHFDKWAQSGLDGGLKYLTDHRKDLRKDLKEVFPEFKSALVFLFEYASEKKRLQESDSPLKIASYVTGFDGMDYHHWIREKLDSITAKLSEELSDLETFYSIDAQPVLERDLAYRAGLGWFGKNSMLISKKHGSYFIIGTLLLNQKLSLPTKLSVEPDHCGNCTACIDHCPTDAIVANKVVDASKCISTYTIEMFKEAQAPKGYPSQSNEVFGCDICQEVCPWNNKPLKRVEASEEVDWVKFFERNPKLILSELEDMSNRQYRKKFKGTPLERTGIVGMIKNLNKLKS

SEQ ID NO: 77162 - protein, 321 aa, unidentified
  source 1..321: note = Halobacteriovoraceae bacterium
  REGION 1..321: note = tr|A0A2E4DC94|A0A2E4DC94_9PROT tRNA epoxyqueuosine(34) reductase QueG OS=Halobacteriovoraceae bacterium OX=2026745 GN=queG PE=4 SV=1
MKDLFSLTPENLQTMQIVDWGYTEQMQATSFDKLQNWVENNEHEPLGYLADERMLKRKNLELIYPFAKSAFVFLFDYTSSKKSLEELAPENKVASYALGFEDQDYHYWIQEKLHLIQAELKKEVGEFEFGISLDIHPVLERDLAYRSGLGWFGKNSMLISRSLGSYFLIGSIIIDRKLNLNQRELETDHCGSCTRCLEACPTKAINNDRTVNAKKCISTYTIELFKDAPAPEGYPTATHEVFGCDICQEVCPWNLKPMARADETQFSENSLIEFFNRPIEVIYDQVNQMSNREYKRFFAKTSLERLGKKGLLKNLDKFITD

SEQ ID NO: 77163 - protein, 342 aa, unidentified
  source 1..342: note = Halobacteriovorax marinus
  REGION 1..342: note = tr|A0A1Y5FCK3|A0A1Y5FCK3_9PROT Uncharacterized protein OS=Halobacteriovorax marinus OX=97084; GN = A9Q84_09535 PE=4 SV=1
MKNQLIREVLNDSLFKKFDIVDWGCTTDPRPVTWEHFSAWVEKGHNGILKYLEGDRKEKRESIKNYFPEFESALVFQFSYADQKFALDNFYNSSESNGLKVAGYVMGFDGVDYHHVLKERLDAIGKLIQAVDPEVEYKISLDIHPVLERDLAYRAGLGFFGKNSMFISKSKGSFFLLGSLLLSKDYDFESKPIETDHCGSCTRCIDACPTVAIDPNTRTIISDKCISTYTIELFKDLGEAPVGMENSDGEVFGCDICQDVCPWNKRLLRINRDVDREESKSETYQSIMDFFLKRPIAKIIEDLEALSNRKFQKLFFGTPLQRTGRVGLLKNIRFFSNKSKKS

SEQ ID NO: 77164 - protein, 339 aa, unidentified
  source 1..339: note = Halobacteriovorax marinus
  REGION 1..339: note = tr|E1X5H0|E1X5H0_HALMS Putative 4Fe-4S binding protein OS=Halobacteriovorax marinus (strain ATCC BAA-682 / DSM 15412 / SJ) OX=862908 GN=yjeS PE=4 SV=1
MRERLLKEVLNSENLKKYGIVDWGVTTESRPKTWKYYYSWVEKGLNGILKYLEGERRDKREDLRKYYPEFKSAIVFQFSYANKKYELDKFYKSPLSNGLKIASYVLGFGGVDYHFKLREALEDIAHQIKAIDPTLDYKLSLDTQPILERDLAFRAGLGWFGKNSMFISKSEGSFFILGSLLLSKDYELSQRELEVDHCGQCTRCADSCPTLAIDIETRTLNSNLCISTYTIEDFKGVQEAPKGMEDSNGEIFGCDICQEVCPWNKRLLRVGKVSINENEISDKEREMREFFLERAPEDVILDLENMSNRGFQRKFKSTPIERTGRVGLLKNLRFFSGKR

SEQ ID NO: 77165 - protein, 328 aa, unidentified
  source 1..328: note = Halobacteriovorax sp.
  REGION 1..328: note = tr|A0A2E6H022|A0A2E6H022_9PROT Uncharacterized protein OS=Halobacteriovorax sp. OX=2020862 GN=CME70_03745; PE = 4 SV=1
MRKLLDLDQKLLEDLGIVDWGYTEEAVPKSFDRYESWVEKGNHGPLGYLSDHRKDLRKSLEAVKENFESAIVFLFSYAPEKAALEKFYKSKDSNGLKVAGYSVSFEGHDYHYKIKEKLELLGHKIDKPFKISLDIQPVLERDLAYRSGLGWFGKNSMLINRKKGSFNMIGALLFEEKLPISKQPIETDHCGQCTACFDICPTDAIDLPNRQIIANKCISTFTIELFKESEAPVGYDKADEIFGCDLCQDICPWNKRMEREGEFSIDHSWPTQRSKELVEFFLARPPLEIKNELESMSNKAYIRKFKGTSFERTGRLGLLKNLKKFFAL

SEQ ID NO: 77166 - protein, 330 aa, unidentified
  source 1..330: note = Halobacteriovorax sp.
  REGION 1..330: note = tr|A0A4Z0KWD4|A0A4Z0KWD4_9PROT tRNA epoxyqueuosine(34) reductase QueG OS=Halobacteriovorax sp. Y22 OX=2505978 GN=queG PE=4 SV=1
MIKRDDIQNILNGQGLKVWGVVSESKPKSLDRFKKWVSDGLYGALGYLADERAIKREDLKNYYPDIKSTLVIAFDYSHIARSAKKFYESSESNGLKIANYVVGFKGRDYHYEVRDKLQAIGEELQKLDPNLEFKFSLDTQPILERDFAYQSGLGWYGKNSMLINRHIGSYFIIGSLLLNKEVEAPNDKFETDHCGQCTRCADACPTDAIDLEKRTIVADKCISTFTIEHFKDIQAPEGFDKARGEFFGCDICQDVCPWNKRLERKLESDSEAFKESGRQFIDFFLTRPVDEIINDLEAMSNREYRRQFKGTPLERTGRVGMLKNLRYYLD

SEQ ID NO: 77167 - protein, 374 aa, Halobacteroides halobius
  REGION 1..374: note = tr|L0K5R4|L0K5R4_HALHC Iron-sulfur cluster binding protein, putative OS=Halobacteroides halobius (strain ATCC 35273 / DSM 5150 / MD-1) OX=748449 GN=Halha_0327 PE=4 S V=1
MKLKSKINQYATKLGIDKIGITTTDDFSRLRDFLYKMREKEFLSKFVKKDLELITDPKEVLSNAKSVIVCAISYQVDDVYITESKEKTTKELRGKLSRFAWGQDYHHVLGKKLDKLVQFLQREEENLKAKTFVDTGPTIDRALARRAGIGWQGKNCSIINPEYGSWIFIGGIITNLDLEIDQPIEDQCGDCRKCLDACPTGALKAPYTLDSRKCLGYLTLKRGYIDRDNRKKFGTRLWGCDTCQEVCPSNQEVEIGDHKEFRPQKLAAYPKLPQLLSLTKSEYRDKFGPTPMNWRGKRPIQRNAAIILGNLGDKEAVPYLIEALEDPKPIVRAHAAWALAEIGDGSVVDDLKKVLVKEKEERVKEEVQEAINQF

SEQ ID NO: 77168 - protein, 373 aa, Halocella sp.
  REGION 1..373: note = tr|A0A3S9H2C1|A0A3S9H2C1_9FIRM tRNA epoxyqueuosine(34) reductase QueG OS=Halocella sp. SP3-1; OX = 2382161 GN=queG PE=4 SV=1
MWILAGERVDIMPNLAKIIKKKAINIGFDLVGITSAEPFEDTAKRLNNRKLSSFIKNDIELLTKPRLHLPSARSIIAVALSYASSQKYNGDCYISIYARGRDYHHVMKNKLEKLMGFIREIVPGVDMLAYSDTGPLLDRMIASRAGLGWIGKNNNLINPVYGSYLFLGEILTNLELEHNQPLNNQCCDCNLCIKNCPSSALMEAYHLKADRCISYLTQKKGIIPEEEREVINNHLWGCDNCQDFCPYNKNVPTDLHEEFTPLLKAELSEILRIDNLAERDLWTNSALYWRGPRILKRNAIINIANNGDRCYLSDLIQKIDDPSPIIRFYTAWAVGKIASKEYIKTLNNRLLEEKDKDVRNELKKAINRIKRRI

SEQ ID NO: 77169 - protein, 327 aa, unidentified
  source 1..327: note = Halocynthiibacter arcticus
  REGION 1..327: note = tr|A0A126V780|A0A126V780_9RHOB Epoxyqueuosine reductase OS=Halocynthiibacter arcticus OX=1579316; GN = RC74_07175 PE=4 SV=1
MGVCRPDSIPEIAARLEAFVSKERHGQMSWMAERMHWRGAPDALWPEAKSVIMLAEPYTQTHDPRHVLSKRDCGAISVYAQNRDYHDIVKKRLKRVGRWLLEQDPDAQIKVFVDTAPVMEKPLAASAGLGWQGKHTNLLSRDLGSWFFLGAIFTTIELPVDSPARENCGSCTSCLDACPTKAFPAPFQLDARRCISYLTIEHHGPVDEELRALMGNHIYGCDDCLAACPWNKFAVEAQELRYAAKDDLIAPPLDVLVTLTDTQFREKFSGSPIKRIGRNRFIRNVLYAIGNSGETRFRPAIEPLLSDDDAVVRDAAIWAKARLSMVS

SEQ ID NO: 77170 - protein, 392 aa, Halolactibacillus alkaliphilus
  REGION 1..392: note = tr|A0A511X1S7|A0A511X1S7_9BACI Epoxyqueuosine reductase OS=Halolactibacillus alkaliphilus OX=442899; GN = queG PE=4 SV=1
MAYDELKQTIIDYAHSIGIDKIGFGSIDPFTQMKARLKAQQDQNYQSGFEKGTIEERTEPAMHLAGAESIIAVALSYPSRMRERPENKKGARRGTVCRASWGVDYHVVLNDKLQQLHAFLAEKVPGFRSKIMVDTGELPDRAVAERAGIGFSGKNCAIITPEFGSYVYLGEMITNIPLEPDDMLEDACGDCTKCIDACPTGALVGPGQLNAKNCIAYLTQTKDFLPDQFREKLGNQLYGFDTCQLVCPYNKGVDFHLHEAFEPKPELAKPELLPLLTISNREFKETFGEMSGAWRGKKPLQRNAILALGHYREVASLETLEELMTKDPRPVIRGTAAYAIGKIGHVDSYLMIERAKVKETDPEVIEEMDKGLRFEKVYREKGKIKIDQIKPD

SEQ ID NO: 77171 - protein, 395 aa, Halolactibacillus halophilus
  REGION 1..395: note = tr|A0A1I5MVF4|A0A1I5MVF4_9BACI Epoxyqueuosine reductase OS=Halolactibacillus halophilus OX=306540; GN = SAMN05421839_106110 PE=4 SV=1
MAYGTLKQDIIDYAKQIGIDTIGFGSVDPFTQMKARLKAQQEKNYQSGFEKGTIEERTEPALHLTGAESIISIALAYPSRMRDRPENKSGTRRGNVCRASWGVDYHVVLNDKLNQLHAYLEERIPGFRSKIMVDTGELPDRAVAERAGIGFSGKNCSIITPEFGSYVYLGEMITNIPLEPDTMLEDGCGDCTKCIDACPTGALVGPGQLNTANCIAFLTQTKDYLPDEFRSVLGNQLYGFDTCQLVCPYNKGVDFHLHADFEPKPDLAKPELLSLLTISNREFKETFGEMAGSWRGKKPLQRNAILALGHYREVSSIETLATLMRKDPRPVIRGTAAFSIGKIGREDSYALIREAMTKEEDETVRLEMEKGLQFEAIYLEKGKIKAASAQAQLET

SEQ ID NO: 77172 - protein, 389 aa, Halolactibacillus miurensis
  REGION 1..389: note = tr|A0A1I6TMZ0|A0A1I6TMZ0_9BACI Epoxyqueuosine reductase OS=Halolactibacillus miurensis OX=306541; GN = SAMN05421668_11653 PE=4 SV=1
MAYNTLKQDIIDYAEKIGIDKIGFGSVDPFTQMKARLKAQQEKNYQSGFEKGTIEERTEPAMHLTGAESIISIALAYPSRLTDRPANKRGARRGNVCRASWGVDYHVVLNEKLNRLHAFLENRVPGFRSKIMVDTGELPDRAVAERAGIGFSGKNCSIITPEFGSYVYLGEMITNIPLEPDEMLEDGCGDCTKCIDACPTGALVGPGQLNTTNCIAFLTQTKDYLPDEFRSVLGNQLYGFDTCQLVCPYNKGVDFHLHEAFEPKPDLAKPELLPLLTISNREFKETFGEMAGSWRGKKPLQRNAILALGHYREVSSIETLATLMRKDPRPVIRGTAAFAIGKIGREDSYELIREAMIKEEDATVMKEMEKGLEFEAIYADNGKLKARTE

SEQ ID NO: 77173 - protein, 314 aa, unidentified
  source 1..314: note = Halomicronema excentricum
  REGION 1..314: note = tr|A0A4Q7E4P6|A0A4Q7E4P6_9CYAN Epoxyqueuosine reductase OS=Halomicronema excentricum str. Lakshadweep; OX = 2294035 GN=queG PE=3 SV=1
MTLDIDVIRQQAHHVGFHRVGIARIDHSQPAAIAANTALQNWLHQGYQADMAWMSNPKRQDIQQVMPGVRSLICVALNYYTPHQHSDNAQHGKISRYGWGRDYHRVMQKKLKALSEWLRSHHPDIQTRFYVDTGPVSDKFWAQQAGIGWIAKNGNVITRDYGSWVFLGEILTNLDLPADTPHTAHCGTCTRCIEACPTDAIAAPFVVDANRCIAYHTIENRDPTLPPNIAQNLHGWVAGCDICQDVCPWNQRFAQPTDVKDFQPYPDNVAPNLAELTNLSEVDWNRRFPASALRRIKPSMWRRNARAAQQSRPS

SEQ ID NO: 77174 - protein, 316 aa, unidentified
  source 1..316: note = Halomicronema hongdechloris
  REGION 1..316: note = tr|A0A1Z3HSC7|A0A1Z3HSC7_9CYAN Epoxyqueuosine reductase OS=Halomicronema hongdechloris C2206 OX=1641165; GN = queG PE=3 SV=1
MSALTAEAIKQQAKTLGFHRVGIAAVPPPEAEGEAIAQMRTALQRWLTQGYQADMAWMANPKRQDIHQVMPEVRSLVCVALNYYTDHERPPGDAYGKISRYGWGRDYHRVMTQKLKALVGWMRSQAPSSQLRYYVDTGPVQDKFWAQQAGLGWIAKNGNLITRDYGSWVFLGEILSDLELAADRPHTEHCGSCTRCLEACPTNAIPHPFVVDANRCIAYHTIENRADTLPAEIQKNLHNWVAGCDICQDVCPWNQRFAQETDTVEFRPYPENVAPSLAELATLSEAEWNRRFTASALRRIKPEMWRRNARAALGNP

SEQ ID NO: 77175 - protein, 370 aa, unidentified
  source 1..370: note = Halomonadaceae bacterium
  REGION 1..370: note = tr|A0A139CBV3|A0A139CBV3_9GAMM Epoxyqueuosine reductase OS=Halomonadaceae bacterium T82-2 OX=1783518; GN = queG PE=3 SV=1
MSASQSSSVREPIDLDTLAERIKQWGRELGFQQIGITDTDLESHEHHLERWLAAGHHGEMDYMARHGTKRTRPAELVPGTLRVISARMDYLPPEVETTQVLGRPEKAYVSRYALGRDYHKLIRKRLAELAKRIEAEVGAFGYRAFVDSAPVMERALAQKAGLGWFGKNAMLLNPRAGSLFFLGELYTDLPLPVDAPFEGEHCGSCSACRTACPTGAIVDDKVVDSRRCISYLTIELHGSIPERYREAIGNRVYGCDDCQLVCPFTRFTRVSREGDFAPRHDLDRADLLTLFAWSEAEFLDRTAGSAIRRIGYERWLRNLAVGLGNAPWSRAVEAALRARLAYPSDLVREHVRWALARQRDKRQARIASDA

SEQ ID NO: 77176 - protein, 367 aa, unidentified
  source 1..367: note = Halomonas aestuarii
  REGION 1..367: note = tr|A0A1J0VDD3|A0A1J0VDD3_9GAMM Epoxyqueuosine reductase OS=Halomonas aestuarii OX=1897729 GN=queG PE=3; SV = 1
MTPVPPPGDEPDMAALAETIKTWGRELGFQQLGITDVDLAEDEAHLEAWLAAGHHGEMGFMAKHGTKRTRPEELVPGTRRVISVRLDYLPAEVETTKVLGRPSLAYVSRYATGRDYHKLMRKRLATLAKWIEAEVGAFGYRAFVDSAPVMERALARKAGLGWFGKNAMLLNPRAGSLFFLGELYTDLPLPVDEPFETDHCGSCSACRTACPTQAIVEDRVVDARACISYLTIELFGAIPERYREAMGNRVFGCDDCQLVCPYTRFTRVSREGDFAPRHDLDRASLVSLFAWSEEEFLEKTAGNPIRRIGYERWLRNLAVGLGNAPWSRAVEAALMARLPYPSDLVREHVRWALDRQREKRRQRIASA

SEQ ID NO: 77177 - protein, 377 aa, Halomonas alkaliantarctica
  REGION 1..377: note = tr|A0A4R7YQC2|A0A4R7YQC2_9GAMM Epoxyqueuosine reductase OS=Halomonas alkaliantarctica OX=232346 GN=queG; PE = 3 SV=1
MSNSTAFARSDGAMTDQKLARLADLIKIWGRELGFQQVGITDTELSAHEDHLDAWLEKGYHGEMGFMAKHGTKRTRPEELEPGTQRIISVRMDYLPAEVESTKVLGQPSRAYVSRYALGRDYHKLIRKRLALLAKKIEQEVGDFGYRAFVDSAPVMERALAQKAGLGWFGKNAMLLNPKAGSLFFLGELYTDLPLPIDAPFEHEHCGSCSACRTACPTGAIVDDKVVDSRKCISYLTIELHGAIPVEFRRAMGNRIYGCDDCQLVCPFTRFTHITQEDDFAPRHDLDRASLISLFGWGEAEFLDKTAGSPIRRIGYQRWLRNIAIGLGNAPWSEAVEAALWARRAYPSALVREHVAWALEEQRRKHGERIATDTCSS

SEQ ID NO: 77178 - protein, 370 aa, Halomonas alkaliphila
  REGION 1..370: note = tr|A0A386X2L8|A0A386X2L8_9GAMM Epoxyqueuosine reductase OS=Halomonas alkaliphila OX=272774 GN=queG PE=3; SV = 1
MQNSTTFSLSDDDLTRLAALIKTWGRELGFQQVGITDTQLAAHEKHLDAWLEKGHHGDMSFMAKHGTKRTRPEELEPGTQRVISVRMDYLPAEVESTKVLGQPSRAYVSRYALGRDYHKLMRKRLAQLAKKIEQQVGAFGYRAFVDSAPVMERALAQKAGLGWFGKNAMLLNPKAGSLFFLGELYTDLPLPIDAPFTQEHCGSCSACRTACPTGAIVDDKVVDSRKCISYLTIELHGAIPTEFRRAMGNRIYGCDDCQLVCPFTRFTRVTQEDDFAPRHDLDRADLLSLFAWGEDEFLDKTAGSPIRRIGYERWLRNLAIGLGNAPWSRAVEAALWARRAYPSSLVREHVAWALEEQRLKRGAKIATDGA

SEQ ID NO: 77179 - protein, 372 aa, Halomonas andesensis
  REGION 1..372: note = tr|A0A3S0W9S3|A0A3S0W9S3_9GAMM Epoxyqueuosine reductase OS=Halomonas andesensis OX=447567 GN=queG PE=3; SV = 1
MQSFTTFSLSDDDLTRLASLIKTWGRELGFQQVGITDTQLAVHETYLDAWLENGYHGDMGFMAKHGTKRTRPEELEPGTQRVISVRMDYLPAEVESTKVLGQPSRAYVSRYALGRDYHKLMRKRLAQLAKNIEQEVGAFGYRAFVDSAPVMERALAQKAGLGWFGKNAMLLNPKAGSLFFLGELYTDLPLPVDEPFTQEHCGSCSACRTACPTGAIVDDKVVDSRKCISYLTIELHGAIPTEFRRAMGNRIYGCDDCQLVCPFTRFTRITQEDDFAPRHDLDRAELIHLFAWGEDEFLDKTAGSPIRRIGYERWLRNLAIGLGNAPWSRAVEAALWSRRAYPSSLVREHVAWALAEQRLKQEARIETSLISE

SEQ ID NO: 77180 - protein, 370 aa, Halomonas anticariensis
  REGION 1..370: note = tr|S2L9A3|S2L9A3_HALAF Epoxyqueuosine reductase; OS = Halomonas anticariensis (strain DSM 16096 / FP35); OX = 1121939 GN=queG PE=3 SV=1
MSSLTTALDATDLSALADSIKTWGRELGFQQVGITDTDLETHERYLERWLAAGHHGEMDFMAKHGYKRTRPNELIPGTLRVISVRMDYLPPEVETTKVLGQPDKAYVSRYALGRDYHKLIRKRLARLAQYIEDEVGPFGYRAFVDSAPVMERALAQKAGLGWFGKNSMLLNPQAGSLFFLGELYTDLPLPVDEPFDSEHCGSCSACRTACPTGAIVDDKVVDSRRCISYLTIELHGSIPEAYREAIGNRVYGCDDCQLVCPFTRFTRASHERDFAPRHDLDRAELVTLFAWSEEEFLTKTEGSAIRRIGYERWLRNLAVGLGNAPWSETVEAALRARLAYPSDLVREHVHWALERQREKRERLIAVSRKP

SEQ ID NO: 77181 - protein, 384 aa, Halomonas aquamarina
  REGION 1..384: note = tr|A0A1H8FI11|A0A1H8FI11_9GAMM Epoxyqueuosine reductase OS=Halomonas aquamarina OX=77097 GN=queG PE=3; SV = 1
MPSSTTFSLSRNQPSREHPTHERLSAEQLRQLAALIKQWGRELGFQQVGITDTDLNDHETHLTNWLDKGYHGEMGFMAKHGTKRTRPDELEPGTRRVISVRMDYLPAEVESAKVLGQPSRAYVSRYALGRDYHKLMRKRLAQLAKHIEQEVGKFGFRAFVDSAPVMERALAQKAGLGWFGKNAMLLNPKAGSLFFLGELYTDLPLPVDAPFAQEHCGSCSACRTACPTGAIVDDKVVDSRKCISYLTIELHGAIPVEYRRAMGNRVYGCDDCQLVCPFTRFTKITQEEDFSPRHDLDRASLIALFSWGEEEFLDKTAGSPIRRIGYERWLRNLAVGLGNAPWSDAVEAALWARRAYPSALVREHVAWALDEQRHKRDARIATRA

SEQ ID NO: 77182 - protein, 363 aa, Halomonas arcis
  REGION 1..363: note = tr|A0A1G9ZEB3|A0A1G9ZEB3_9GAMM Epoxyqueuosine reductase OS=Halomonas arcis OX=416873 GN=queG PE=3 SV=1
MLSDDTLADLAELIKTWGRELGFQQVGITDTQLDAHEAHLNAWLDKGYHGEMSFMAKHGTKRTRPAELEPGTQRVICVRMDYLPAEVESTKVLGQPNRAYVSRYALGRDYHKLMRKRLAQLAKQIEHEVGAFGYRAFVDSAPVMERALAQKAGLGWFGKNAMLLNPKAGSLFFLGELYTDLPLPVDAPFEEEHCGSCSACRTACPTGAIVDDKVIDSRKCISYLTIELHGAIPTEYRRAMGNRIYGCDDCQLVCPFTRFTRVTQEEDFAPRHDLDRASLIRLFAWGEEEFLAKTAGSPIRRIGYERWLRNIAVGLGNAPWSEALEAALWSRRAYPSALVREHVAWALEEQRLKRATRIATDVS

SEQ ID NO: 77183 - protein, 336 aa, Halomonas axialensis
  REGION 1..336: note = tr|A0A455V442|A0A455V442_9GAMM Epoxyqueuosine reductase OS=Halomonas axialensis OX=115555 GN=queG PE=3; SV = 2
MPSSTTFSLSRNQPSREHPTHERLSAEQLRQLAALIKQWGRELGFQQVGITDTDLNDHESHLTNWLDKGYHGEMGFMAKHGTKRTRPDELEPGTRRVISVRMDYLPAEVESAKVLGQPNRAYVSRYALGRDYHKLMRKRLAQLAKHIEQEVGKFGFRAFVDSAPVMERALAQKAGLGWFGKNAMLLNPKAGSLFFLGELYTDLPLPVDAPFAQEHCGSCSACRTACPTGAIVDDKVVDSRKCISYLTIELHGAIPVEYRRAMGNRVYGCDDCQLVCPFTRFTKITQEEDFSPRHDLDRASLIALFSWGEEEFWTKPQAAPFAALAMSAGYVILPSG

SEQ ID NO: 77184 - protein, 369 aa, unidentified
  source 1..369: note = Halomonas beimenensis
  REGION 1..369: note = tr|A0A291PA53|A0A291PA53_9GAMM Epoxyqueuosine reductase OS=Halomonas beimenensis OX=475662 GN=queG PE=3; SV = 1
MTQPSPQGDAPDLHRLAERIKTWGRELGFQQVGITDVDLAEDEARLQRWLDAGHHGEMGFMAKHGTKRTRPEELVPGTARVISVRLDYLPAEVETTKMLARPEKAYVSRYAVGRDYHKLMRKRLATLAKWIQSEAGPFGYRAFVDSAPVMERALARKAGLGWFGKNAMLLNPKAGSLFFLGELYTDLPLPVDAPFEAEHCGSCSACRTACPTDAIVEDRVVDARRCISYHTIELFGPIPEEFRAAMGNRVFGCDDCQLVCPFTRFARVSREADFAPRHDLDRAELTALFAWSEEEFLDKTAGSPIRRIGYERWLRNLAVGLGNAPWSESVEAVLRARLPYPSDLVREHVRWALDRQREKRERLIATESA

SEQ ID NO: 77185 - protein, 364 aa, Halomonas boliviensis
  REGION 1..364: note = tr|A0A265DXY2|A0A265DXY2_9GAMM Epoxyqueuosine reductase OS=Halomonas boliviensis LC1 OX=1072583 GN=queG; PE = 3 SV=1
MTDQKLAHLADLIKTWGRELGFQQVGITDTELSVHEAHLDTWLENGYHGEMGFMAKHGTKRTRPGELEPGTQRIISVRMDYLPAEVESTKVLGQPSRAYVSRYALGRDYHKLIRKRLALLAKKIEQEVGDFGYRAFVDSAPVMERALAQKAGLGWFGKNAMLLNPKAGSLFFLGELYTDLPLPIDAPFEHEHCGSCSACRTACPTGAIVDDKVVDSRKCISYLTIELHGAIPVEFRRAMGNRIYGCDDCQLVCPFTRFTRITQEDDFAPRHDLDRASLISLFCWGEAEFLDKTAGSPIRRIGYQRWLRNIAIGLGNAPWSEAVEAALWARRAYPSTLVREHVAWALDEQRLKRDKRIATDILSS

SEQ ID NO: 77186 - protein, 364 aa, Halomonas campaniensis
  REGION 1..364: note = tr|A0A246S4X7|A0A246S4X7_9GAMM Epoxyqueuosine reductase OS=Halomonas campaniensis OX=213554 GN=queG PE=3; SV = 1
MTDQKLARLADLIKIWGRELGFQQVGITDTELSAHEAHLDAWLEEGYHGEMGFMAKHGTKRTRPAELEPGTQRIISVRMDYLPAEVESTKVLGQPSRAYVSRYALGRDYHKLIRKRLALLAKKIEQEVGEFGYRAFVDSAPVMERALAQKAGLGWFGKNAMLLNPKAGSLFFLGELYTDLPLPIDAPFEHEHCGSCSACQTACPTGAIVDDKVVDSRKCISYLTIELHGAIPVEYRRAMGNRIYGCDDCQLVCPFTRFTRTTQENDFAPRHDLDRASLISLFAWGEEEFLDKTAGSPIRRIGYERWLRNIAIGLGNAPWSVAVESALWARRAYPSELVREHVDWALEEQRLKRGKRIATDIHSS

SEQ ID NO: 77187 - protein, 370 aa, Halomonas campaniensis; identical to SEQ ID NO: 77178
  REGION 1..370: note = tr|A0A060B850|A0A060B850_9GAMM Epoxyqueuosine reductase OS=Halomonas campaniensis OX=213554 GN=queG PE=3; SV = 1

SEQ ID NO: 77188 - protein, 369 aa, Halomonas caseinilytica
  REGION 1..369: note = tr|A0A1M6MDT6|A0A1M6MDT6_9GAMM Epoxyqueuosine reductase OS=Halomonas caseinilytica OX=438744 GN=queG; PE = 3 SV=1
MSQPSAQGDASPDLQALADSIKTWGRELGFQQVGITDVDLAEDEARLQRWLDLGHHGEMHFMAKHGTKRTRPEELVPGTVRVISVRLDYLPPEVETTRMLARPEKAYVSRYAVGRDYHKLMRKRLATLAKQIQDEIGPFGYRAFVDSAPVMERALARKAGLGWVGKNAMILNPKAGSLFFLGELYTDLPLPVDPPYEGAHCGSCSACRTGCPTDAIVEDRVVDSRRCISYLTIELHGAIPEEFRAAMGNRVFGCDDCQLVCPFTRFTRASRERDFAPRHDLDRADLVSLFAWSEEEFLDKTAGSPIRRIGYERWLRNLAVGLGNAPWSESVESALRARLPYPSDLVREHVRWALARQRAKRTDMIAVEA

SEQ ID NO: 77189 - protein, 387 aa, unidentified
  source 1..387: note = Halomonas chromatireducens
  REGION 1..387: note = tr|A0A120JVQ3|A0A120JVQ3_9GAMM Epoxyqueuosine reductase OS=Halomonas chromatireducens OX=507626 GN=queG; PE = 3 SV=1
MRNGAFANPPSTHLPGFFSIMTLPATLDDSALAALADTIKTWGRELGFQQVGITDVDLADDERYLQRWLDAGHHGEMGFMAKHGTKRTRPEELIPGTIRVVSVRLDYLPADVESAKVLGQPDTAYVSRYAVGRDYHKLMRKRLATLAKWIEEKAGPYGYRAFVDSAPVMERALARKAGLGWVGKNAMLLNPRAGSLFFLGELYVDLPLPVDPPFESEHCGSCSACRTACPTGAIVEDRVVDARACISYLTIELFGAIPERYREAMGNRVFGCDDCQLVCPFTRFTHATQEADFAPRHDLDRASLVSLFAWGEEEFLEKTAGSPIRRIGYERWLRNLAVGLGNAPWSETVEAALRARLAYPSDLVREHVRWALMRQIEKRRQLISRQI

SEQ ID NO: 77190 - protein, 366 aa, Halomonas cupida
  REGION 1..366: note = tr|A0A1M7EP31|A0A1M7EP31_9GAMM Epoxyqueuosine reductase OS=Halomonas cupida OX=44933 GN=queG PE=3 SV=1
MSTPSAITDNDLGALALRIKTWGRELGFQQLGITDVDLAEDEQRLERWLDAGYQGEMHFMAKHGRKRTRPAELEPGTVRVISVRLDYLPPEVETTKVLGQPAKAYVSRYATGRDYHKLMRKRLQTLARRIEAEVGPIGYRAFVDSAPVMERALARKAGLGWFGKNAMLLNPKAGSLFFLGELYTDLPLPVDEPFETEHCGSCNACRTACPTGAIVEDQVVDARACISYLTIELFGAIPEQYRAAMGNRVFGCDDCQLVCPFTRFTRASSEPDFAPRHDLDRAELVTLFGWSETEFLERTAGSPIRRIGYERWLRNLAVGLGNAPWSPTVEAALLVRLAYPSDLVREHVRWALKRQREKRQETIAVG

SEQ ID NO: 77191 - protein, 355 aa, Halomonas daqiaonensis
  REGION 1..355: note = tr|A0A1H7U335|A0A1H7U335_9GAMM Epoxyqueuosine reductase OS=Halomonas daqiaonensis OX=650850 GN=queG PE=3; SV = 1
MSGLAERIKTWGRELGFQQVGITDVDLAEDERYLQRWLAAGHHGEMGFMAKHGTKRTRPEELVPGTVRVISVRLDYLPAEVETTKVLGQPETAYVSRYATGRDYHKLMRKRLATLAKWMEAEVGSFGYRAFVDSAPVMERALARKAGLGWFGKNAMLLNPKAGSLFFLGELYTDLPLPVDAPFEGDHCGSCNACRTACPTGAIVEDRVVDARACISYLTIELFGSIPERYREAMGNRVFGCDDCQLVCPFTRFTRASREADFAPRHDLDRASLVSLFAWGEEEFLEKTAGSPIRRIGYERWLRNLAVGLGNAPWSEAVESTLMARLPYPSDLVREHVRWALARQREKRQRLIASG

SEQ ID NO: 77192 - protein, 366 aa, Halomonas daqingensis
  REGION 1..366: note = tr|A0A1H5TNX9|A0A1H5TNX9_9GAMM Epoxyqueuosine reductase OS=Halomonas daqingensis OX=419596 GN=queG PE=3; SV = 1
MTLPAILQDSALDQLATTIKTWGRELGFQQVGIADVDLAEDERHLQRWLEAGYHGEMGFMAKHGSKRTRPEELVPGTLRVISVRLDYLPAEVESAKVLGQPQTAYVSRYAVGRDYHKLMRKRLATLAKWIEDEIGPFGYRAFVDSAPVMERALARKAGLGWVGKNAMLLNPRAGSLFFLGELYVDLPLPVDPPFDGEHCGSCSACRTACPTGAIVEDKVVDARACISYLTIELFGAIPERYREAMGNRVFGCDDCQLVCPFTRFTRATQEEDFAPRHDLDRASLVSLFAWGEEEFLDKTAGSPIRRIGYERWLRNLAVGLGNAPWSESVEAALHARLAYPSDLVREHVRWALERQREKRDRLIASI

SEQ ID NO: 77193 - protein, 375 aa, Halomonas elongata
  REGION 1..375: note = tr|A0A329Q6W7|A0A329Q6W7_HALEL Epoxyqueuosine reductase OS=Halomonas elongata OX=2746 GN=queG PE=3 SV=1
MSQPSAQGDASPDLQALAESIKTWGRELGFQQVGITDVDLAEDEARLQRWLDAGHHGEMHFMAKHGTKRTRPEELVPGTVRVISVRLDYLPPEVETTRMLARPEKAYVSRYAVGRDYHKLMRKRLATLAKQIQDEIGPFGYRAFVDSAPVMERALARKAGLGWVGKNAMILNPKAGSLFFLGELYTDLPLPVDPPYEGAHCGSCNACRTGCPTDAIVEDGVVDSRRCISYLTIELHGAIPEEFRAAMGNRVFGCDDCQLVCPFTRFTRVSRERDFAPRHDLDRADLVSLFAWSEEEFLDKTAGSPIRRIGYERWLRNLAVGLGNAPWSESVESALRARLAYPSDLVREHVRWALERQREKRNDVIAVEASPLTQH

SEQ ID NO: 77194 - protein, 375 aa, Halomonas elongata; identical to SEQ ID NO: 77193
  REGION 1..375: note = tr|E1V683|E1V683_HALED Epoxyqueuosine reductase; OS = Halomonas elongata (strain ATCC 33173 / DSM 2581 / NBRC 15536 / NCIMB 2198 / 1H9) OX=768066 GN=queG PE=3 SV=1

SEQ ID NO: 77195 - protein, 367 aa, unidentified
  source 1..367: note = Halomonas endophytica
  REGION 1..367: note = tr|A0A2N7U077|A0A2N7U077_9GAMM Epoxyqueuosine reductase OS=Halomonas endophytica OX=2033802 GN=queG PE=3; SV = 1
MTPPAPLDDTELANLADTIKTWGRELGFQQVGITDIDLTDDERYLQRWLDAGHHGEMGFMAKHGTRRTRPEALIPGTVRLISVRLDYLPADVESAKVLGQPETAYVSRYAVGRDYHKLMRKRLATLAQWIEARTGPFGYRAFVDSAPVMERAIARKAGLGWVGKNAMLLNPKAGSLFFLGELYVDLPLPVDPPFEADHCGSCSACRTACPTGAIVADRVVDARACISYLTIELFGAIPEQYREAMGNRVFGCDDCQLVCPFTRFARATREADFAPRHDLDRASLVSLFGWGEEEFLDKTAGSPIRRIGYERWLRNLAVGLGNAPWSEAVEAALMARLSYPSDLVREHVRWALGRQREKRGRLIASQG

SEQ ID NO: 77196 - protein, 375 aa, Halomonas eurihalina
  REGION 1..375: note = tr|A0A5D9CLT7|A0A5D9CLT7_HALER Epoxyqueuosine reductase OS=Halomonas eurihalina OX=42566 GN=queG PE=3; SV = 1
MSQPSAQGDASPDLQALAESIKTWGRELGFQQVGITDVDLAEDEARLQRWLDEGHHGEMHFMAKHGTKRTRPEELVPGTVRVISVRLDYLPPEVETTRMLARPEKAYVSRYAVGRDYHKLMRKRLATLAKQIQDEIGPFGYRAFVDSAPVMERALARKAGLGWVGKNAMILNPKAGSLFFLGELYTDLPLPVDPPYEGAHCGSCSACRTACPTDAIVEDGVVDSRRCISYLTIELHGAIPEEFRAAMGNRVFGCDDCQLVCPFTRFTRVSRERDFAPRHDLDRADLVSLFAWSEEEFLDKTAGSPIRRIGYERWLRNLAVGLGNAPRSESVESALRARLAYPSDLVREHVRWALERQREKRNDVIAVEASPLTQH

SEQ ID NO: 77197 - protein, 369 aa, Halomonas gudaonensis
  REGION 1..369: note = tr|A0A1G9ANS1|A0A1G9ANS1_9GAMM Epoxyqueuosine reductase OS=Halomonas gudaonensis OX=376427 GN=queG PE=3; SV = 1
MSCVTCATDTDLSGLADTIKQWGRELGFQQVGITDIDLAEDERRLARWLDAGYQGEMGFMAKHGTKRTRPAELVPGTLRVISVRLDYLPAEVESAKVLGQPQTAYVSRYAVGRDYHKLMRKRLATLARWIENEAGPFGHRAFVDSAPVMERALGRKAGLGWVGKNAMLLNPRAGSLFFLGELYVDLPLPVDPPFEGDHCGSCSACRTACPTGAIVEDRVVDARACISYLTIELHGAIPERYREAMGNRVFGCDDCQLVCPFTRFTRASREPDFAPRHDLDRASLLSLFAWGEEEFLDKTAGSPIRRIGYARWLRNLAVGLGNAPWSEAVEAALRARLAYPSDLVREHVRWALARQREKRQQLIAVSREP

SEQ ID NO: 77198 - protein, 394 aa, Halomonas halmophila
  REGION 1..394: note = tr|A0A4Y4F0V2|A0A4Y4F0V2_9GAMM Epoxyqueuosine reductase OS=Halomonas halmophila OX=252 GN=queG PE=3 SV=1
MLSVSFSVPDAKRRGAILRGVFTIMSQPSAKDAATPDLEALASSIKTWGRELGFQQVGITDVDLAEDEVRLQRWLDLGYQGEMHFMAKHGTKRTRPEELVPGTLRVISVRLDYLPPEVETTRTLAQPEKAYISRYALGRDYHKLMRKRLGTLAKQIEAEIGPFGYRAFVDSAPVMERALARKAGIGWVGKNAMILNPQAGSLFFLGELYTDLPLPVDPPYAGAHCGSCSACRTACPTDAIVEDRVVDSRRCISYLTIELHGAIPEEFRAAMGNRVFGCDDCQLVCPFTRFTRVSDEPDFAPRHDLDRAELTRLFSWSEEEFLDKTAGSPIRRIGYERWLRNLAVGLGNAPWSERVESALRARLAYPSDLVREHVRWALAQQQQRRAGMIAVEAS

SEQ ID NO: 77199 - protein, 368 aa, Halomonas halophila
  REGION 1..368: note = tr|A0A510ZIQ1|A0A510ZIQ1_9GAMM Epoxyqueuosine reductase OS=Halomonas halophila OX=29573 GN=queG PE=3 SV=1
MTQPSPPGDAPDLTQLAERIKTWGRELGFQQVGIADVDLAEDEARLQRWLDAGHHGEMGFMAKHGTKRTRPAELEPGTVRVISVRLDYLPPEVETTKMLARPEKAYVSRYAVGRDYHKLMRKRLASLAKQIQAEIGPFGYRAFVDSAPVMERGLARKAGLGWFGKNAMLLNPKAGSLFFLGELYTDLPLPVDAPFETEHCGSCSACRTACPTDAIVEDKVVDARRCISYHTIELHGAIPEEFRAAMGNRVFGCDDCQLVCPFTRFTRASREADFAPRHDLDRADLVALFAWGEEEFLDRTAGSPIRRIGYERWLRNLAVGLGNAPWSETVEAALRARLAYPSDLVREHVRWALARQQEKKRNMIAVEA

SEQ ID NO: 77200 - protein, 368 aa, unidentified
  source 1..368: note = Halomonas heilongjiangensis
  REGION 1..368: note = tr|A0A2N7TM65|A0A2N7TM65_9GAMM Epoxyqueuosine reductase OS=Halomonas heilongjiangensis OX=1387883; GN = queG PE=3 SV=1
MSAPAPIPDTPPDLQALADRIRTWGRELGFQQVGITDTDLAEDEQRLARWLAAGHHGEMGFMAKHGTKRTRPAELVPGTLRVISVRLDYLPAEVETAKVLGEPSIAYVSRYATGRDYHKLMRKRLASLAQRIEAEAGPFGYRAFVDSAPVMERALARKAGLGWFGKNAMLLNPRAGSLFFLGELYTDLPLPVDEPFESDHCGSCSACRSACPTGAIVEDRVVDARACISYLTIELFGAIPERYREAMGNRVFGCDDCQLVCPFTRFTRVTREADFAPRHDLDRASLVSLFAWGEEEFLDRTAGSPIRRIGYERWLRNLAVGLGNAPWSVAVEAALMARLPYPSDLVREHVRWALARQRQKRRALIAST

SEQ ID NO: 77201 - protein, 366 aa, unidentified
  source 1..366: note = Halomonas huangheensis
  REGION 1..366: note = tr|W1N3V4|W1N3V4_9GAMM Epoxyqueuosine reductase; OS = Halomonas huangheensis OX=1178482 GN=queG PE=3 SV=1
MPTPSAITDIDLGALADRIKSWGRELGFQQLGITDVDLAEDEQRLERWLADGHHGEMQFMAKHGRKRTRPAELEPGTVRVISARLDYLPPEVETTKVLGQPTRAYVSRYATGRDYHKLMRKRLQSLARMIEAEVGPFGYRAFVDSAPVMERALARKAGLGWFGKNAMLLNPKAGSLFFLGELYTDLPLPVDEPFEHEHCGSCSACRSACPTGAIVDDRIVDARACISYLTIELHGAIPEHYREAMGNRVFGCDDCQLVCPFTRFTRVSNEVDFAPRHDLDRASLLSLFGWSEEEFLERTAGSPIRRIGYERWLRNLAIGLGNAPWSRAVEAALLLRLAYPSDLVREHVRWALDRQRDKRQATIAVA

SEQ ID NO: 77202 - protein, 369 aa, Halomonas hydrothermalis
  REGION 1..369: note = tr|A0A291JYF5|A0A291JYF5_9GAMM Epoxyqueuosine reductase OS=Halomonas hydrothermalis OX=115561 GN=queG; PE = 3 SV=1
MPPSSDFSLSAEQLQQLAERIKRWGRELGFQQVGITDTDLAVHERHLERWLEQGYQGDMGFMAKHGTKRTRPAELEPGTQRVISVRMDYLPADVATTKVLGQPQRAYVSRYALGRDYHKLMRKRLAQLARQIEQEVGAFGFRAFVDSAPVMERALAQKAGLGWFGKNAMLLNPQAGSLFFLGELYTDLPLPVDPPFEREHCGSCSACRTACPTGAIVDDKVVDSRKCVSYLTIELHGAIPVEYRRAMGNRVYGCDDCQLVCPFTRFTRPTQEQDFAPRHDLDRASLVTLFGWSEAEFLDKTAGSPIRRIGYERWLRNLAVGLGNAPWSRDVEAALWARRAYPSALVREHVVWALAEQHQKRGARIATQG

SEQ ID NO: 77203 - protein, 384 aa, Halomonas ilicicola
  REGION 1..384: note = tr|A0A1M4SC76|A0A1M4SC76_9GAMM Epoxyqueuosine reductase OS=Halomonas ilicicola DSM 19980 OX=1121942; GN = queG PE=3 SV=1
MTTRQLSQDIDLQALADRIKAWGRELGFQQVGITDIDLESHERHLEHWLAAGHQGEMDFMAKHGTKRTRPDELVPGTVRVISVRMDYLPPEVETTRVLGEPRKAYVSRYALGRDYHKLMRKRLATLARTIEDEIGPHGYRAFVDSAPVMERALAQKAGLGWFGKNSMLLNPRAGSLFFLGELYTDLPLPVDAPFEEEHCGSCAQCRIACPTGAIVDDKVVDSRRCISYLTIELHGSIPEEYREAMGNRVYGCDDCQLVCPFTRFTRASHEEDFSPRHDLDRADLLRLFAWSEEEFLLKTEGSAIRRIGYERWLRNLAVGLGNAPWSLGVEAALRARLAFPSDLVREHVRWALRRQGEKRQTLIASSAQALSCEPEAIMRRNVSR

SEQ ID NO: 77204 - protein, 374 aa, Halomonas korlensis
  REGION 1..374: note = tr|A0A1I7HUF9|A0A1I7HUF9_9GAMM Epoxyqueuosine reductase OS=Halomonas korlensis OX=463301 GN=queG PE=3; SV = 1
MSATMSHTQPDTLADAQPDLHALAARIKTWGRELGFQQLGITDIDLSADEARLERWLAAGHHGEMGFMAKHGTRRTRPEELIPGTVRVISVRLDYLPAEVETTKVLGQPRKAYVSRYATGRDYHKLMRKRLATLAKWIEAETGPFGYRAFVDSAPVMERALARKAGLGWFGKNAMLLHPKAGSLFFLGELYTDLPLPVDAPFEGEHCGSCSACRSACPTGAIVEDHVVDARACISYLTIELFGAIPERYREAMGNRVFGCDDCQLVCPFTRFTRASDEADFAPRHDLDRASLVSLFAWGEQEFLDKTAGSPIHRIGYERWLRNLAVGLGNAPWSETVEAALRARLPYPSDLVREHVRWALARQRDKREALIASA

SEQ ID NO: 77205 - protein, 350 aa, Halomonas meridiana
  REGION 1..350: note = tr|A0A0D7V1R7|A0A0D7V1R7_9GAMM Epoxyqueuosine reductase OS=Halomonas meridiana OX=29570 GN=queG PE=3 SV=1
MIKQWGRELGFQQVGITDTDLNDHESHLTNWLDKGYHGEMGFMAKHGTKRTRPDELEPGTRRVISVRMDYLPAEVESAKVLGQPNRAYVSRYALGRDYHKLMRKRLAQLAKHIEQEVGKFGFRAFVDSAPVMERALAQKAGLGWFGKNAMLLNPKAGSLFFLGELYTDLPLPVDAPFAQEHCGSCSACRTACPTGAIVDDKVVDSRKCISYLTIELHGAIPVEYRRAMGNRVYGCDDCQLVCPFTRFTKITQEEDFSPRHDLDRASLIALFSWGEEEFLDKTAGSPIRRIGYERWLRNLAVGLGNAPWSDAVEAALWARRAYPSALVREHVAWALDEQRHKRDARIATRA

SEQ ID NO: 77206 - protein, 384 aa, Halomonas meridiana
  REGION 1..384: note = tr|A0A1N6G4A1|A0A1N6G4A1_9GAMM Epoxyqueuosine reductase OS=Halomonas meridiana OX=29570 GN=queG PE=3 SV=1
MPSSTTFSLSRNQPSREHPTHERLSAEQLRQLAALIKQWGRELGFQQVGITDTDLNDHESHLTNWLDKGYHGEMGFMAKHGTKRTRPDELEPGTRRVISVRMDYLPAEVESAKVLGQPNRAYVSRYALGRDYHKLMRKRLAQLAKHIEQEVGKFGFRAFVDSAPVMERALAQKAGLGWFGKNAMLLNPKAGSLFFLGELYTDLPLPVDAPFAQEHCGSCSACRTACPTGAIVDDKVVDSRKCISYLTIELHGAIPVEYRRAMGNRVYGCDDCQLVCPFTRFTKITQEEDFSPRHDLDRASLIALFSWGEEEFLDKTAGSPIRRIGYERWLRNLAVGLGNAPWSDAVEAALWARRAYPSALVREHVAWALDEQRHKRDARIATRA

SEQ ID NO: 77207 - protein, 370 aa, Halomonas muralis
  REGION 1..370: note = tr|A0A1G9PQH6|A0A1G9PQH6_9GAMM Epoxyqueuosine reductase OS=Halomonas muralis OX=119000 GN=queG PE=3 SV=1
MPTTVADIQDYSPRELTELAERIKQWGRELGFAQVGITDTDLEAHERYLERWLAAGRHGEMGFMAKHGSKRTRPHELIPGTLRVISVRMDYLPPEVETTKLLAKPDKAYVSRYALGRDYHKLIRKRLAALVKHIEDEVGAFGYRAFVDSAPVMERALAQKAGLGWFGKNSMLLNPQAGSLFFLGELYTDLPLPVDAPFENEHCGNCSQCRTACPTGAIVDDKVVDSRRCISYLTIELHGSIPEQYREAMGNRVYGCDDCQLVCPFTRFTRASHERDFAPRHDLDRASLVRLFAWSEEEFLAKTEGSAIRRIGYIRWLRNLAVGLGNAPWSETLEAALRARLSYPSELVREHVRWALARQYEKRQRLIARS

SEQ ID NO: 77208 - protein, 382 aa, unidentified
  source 1..382: note = Halomonas nigrificans
  REGION 1..382: note = tr|A0A2A4HRY4|A0A2A4HRY4_9GAMM Epoxyqueuosine reductase OS=Halomonas nigrificans OX=2042704 GN=queG PE=3; SV = 1
MPSSTTFPLSSEQLTSEQLSQLAELIKRWGRELGFQQVGITDTQLAAHETHLNAWLEKGYHGEMGFMAKHGTKRTRPEELEPGTQRVISVRMDYLPAEVESAKVLGQPQRAYVSRYALGRDYHKLIRKRLALLAKKIEQEVGKIGYRAFVDSAPVMERALAQKAGLGWFGKNAMLLNPKAGSLFFLGELYTDLPLPIDPPFEHEHCGSCSACRTACPTGAIVDDKVVDSRKCISYLTIELHGAIPIEFRRPMGNRVYGCDDCQLVCPFTRFTRTTQEDDFTPRHDLDRASLISLFAWGEAEFLDKTAGSPIRRIGYERWLRNIAIGLGNAPWSEAVEAALFARRAYPSALVREHVAWALEEQRLKRGERISTKTLYSSSSPA

SEQ ID NO: 77209 - protein, 370 aa, Halomonas nitroreducens
  REGION 1..370: note = tr|A0A3S0I6F2|A0A3S0I6F2_9GAMM Epoxyqueuosine reductase OS=Halomonas nitroreducens OX=447425 GN=queG; PE = 3 SV=1
MTQPSPAGDAPDLDRLAELIKTWGRELGFQQVGITDVDLAEDEARLQRWLDAGHHGEMGFMAKHGTRRTRPEELVPGTVRVISVRLDYLPAEVETTRMLARPDKAYVSRYAVGRDYHKLMRKRLAHLAKRIEDTVGAFGYRAFVDSAPVMERALARKAGLGWVGKNAMLLNPRAGSLFFLGELYTDLPLPVDAPFEAEHCGRCSACRSACPTDAIVEDKVVDARRCISYHTIELHGPIPEEFRAAMGNRVFGCDDCQLVCPFTRFTRTTREDDFSPRHALDRADLTTLFAWSEAEFLDKTAGSPIRRIGYERWLRNLAVGLGNAPWSEAVEAVLRARLPYPSDLVREHVRWALDRQHEKRQQLIAVSRKA

SEQ ID NO: 77210 - protein, 340 aa, unidentified
  source 1..340: note = Halomonas olivaria
  REGION 1..340: note = tr|A0A3T1DNH8|A0A3T1DNH8_9GAMM Epoxyqueuosine reductase OS=Halomonas olivaria OX=390919 GN=queG PE=3 SV=1
MGITDTELSAHEAHLDAWLEEGYHGEMGFMAKHGTKRTRPAELEPGTQRIISVRMDYLPAEVESTKVLGQPNRAYVSRYALGRDYHKLIRKRLALLAKKIEQEVGEFGYRAFVDSAPVMERALAQKAGLGWFGKNAMLLNPKAGSLFFLGELYTDLPLPIDAPFEHEHCGSCSACQTACPTGAIVDDKVVDSRKCISYLTIELHGAIPVEYRRAMGNRIYGCDDCQLVCPFTRFTRTTQENDFAPRHDLDRASLISLFAWGEAEFLDKTAGSPIRRIGYERWLRNIAIGLGNAPWSVAVESALWARRAYPSELVREHVDWALEEQRLKRGKRIATDIHSS

SEQ ID NO: 77211 - protein, 369 aa, Halomonas pacifica
  REGION 1..369: note = tr|A0A510XBL6|A0A510XBL6_9GAMM Epoxyqueuosine reductase OS=Halomonas pacifica OX=77098 GN=queG PE=3 SV=1
MPAPDDLAPDALDPAALAATIKTWGRELGFQQVGITDTDLATHERYLARWLAAGHHGEMGFMAKHGTKRTRPEELVPGTLRVISVRMDYLPPEVETTRLLGRPEKAYVSRYALGRDYHKLIRKRLAQLAKRIEGEVGAFGYRAFVDSAPVMERALAQKAGLGWFGKNAMLLNPRAGSLFFLGELYTDLPLPVDPPFESEHCGKCSACRSACPTDAIVDDKVVDSRRCISYLTIELHGAIPEEFREAMGNRVYGCDDCQLVCPFTRFTRLSDEADFAPRHDLDRTDLLRLFAWSEEEFLSKTEGSPIRRIGYERWLRNLAVGLGNAPWSEATEAALEARLAYPSDLVREHVRWALARQRDKRERRIATEG

SEQ ID NO: 77212 - protein, 367 aa, Halomonas pantelleriensis
  REGION 1..367: note = tr|A0A1G9H079|A0A1G9H079_9GAMM Epoxyqueuosine reductase OS=Halomonas pantelleriensis OX=48727 GN=queG; PE = 3 SV=1
MSETTSSLAPADLQALADDIKTWGRELGFQQVGITDTDLEHHERYLERWLAAGHHGEMSFMAKHGTKRTRPAELVPGTLRVISARMDYLPPEVETTKTLGQPQIAYVSRYALGRDYHKLIRKRLAQLAKQIEQRVGAFGYRAFVDSAPVMERALAQKAGLGWFGKNSMLLNPQAGSLFFIGELYTDLPLPVDEPFASEHCGKCDACQVACPTGAIVDDKVVDSRRCISYLTIELHGAIPEQYRRAMGNRVYGCDDCQLVCPFTRFTRLSREDDFAPRHDLDRASLLRLFSWSEEEFLSNTEGSAIRRIGYPRWLRNLAVGLGNAPPSEAVRAALRARLAYPSDLVREHVRWALAEQAQKQAALIAAE

SEQ ID NO: 77213 - protein, 368 aa, Halomonas saccharevitans
  REGION 1..368: note = tr|A0A1I6Y3Q5|A0A1I6Y3Q5_9GAMM Epoxyqueuosine reductase OS=Halomonas saccharevitans OX=416872 GN=queG; PE = 3 SV=1
MSPVSPTGDDPDMAALAERIKTWGRELGFQQLGITDVDLAEDEAHLEAWLDAGYHGEMGFMAKHGTKRTRPEELVPGTRRVISVRLDYLPAEVETTKVLGRPSLAYVSRYATGRDYHKLMRKRLATLAKWIEAEVGDFGYRAFVDSAPVMERGLARKAGLGWFGKNAMLLNPKAGSLFFLGELYTDLPLPVDAPFETDHCGSCSACRTACPTGAIVEDKVVDARACISYLTIELFGAIPERYREAMGNRVFGCDDCQLVCPFTRFTRVSQEPDFAPRHDLDRASLVSLFAWGEEEFLEKTAGNPIRRIGYERWLRNLAVGLGNAPWSQAVEAALLARLPYPSDLVREHVRWALDRQREKRRARIASTG

SEQ ID NO: 77214 - protein, 367 aa, Halomonas shengliensis
  REGION 1..367: note = tr|A0A1H0HP54|A0A1H0HP54_9GAMM Epoxyqueuosine reductase OS=Halomonas shengliensis OX=419597 GN=queG PE=3; SV = 1
MSSPSALDDAPDPHALAERLRGWAHELGFQQLGITDVDLAEDEARLARWLAAGHHGEMGFMAKHGSKRTRPQELVPGTIRVISVRLDYLPAEVETLETLARPQTAFVSRYATGRDYHKLMRKRLAALAKRLEAEVGPFGYRAFVDSAPVMERALARKAGLGWVGKNAMLLHPRAGSWFFLGELYTDLPLPVDPPFEGEHCGSCSACRTACPTDAIVADRVVDARACISYLTIELHGAIPERYREAMGNRVFGCDDCQLVCPFTRFASPTGEADFTPRHALDRASLLALFAWGEEEFLEKTAGSPIRRIGYERWLRNLAVGLGNAPWSEAVEAALRARLAYPSELVREHVRWALDRQREKRQNIITSA

SEQ ID NO: 77215 - protein, 362 aa, unidentified
  source 1..362: note = Halomonas songnenensis
  REGION 1..362: note = tr|A0A2T0V7N4|A0A2T0V7N4_9GAMM Epoxyqueuosine reductase OS=Halomonas songnenensis OX=1176243 GN=queG; PE = 3 SV=1
MPHDELARLADLVKTWGRELGFQQVGITDVQLDAHEQHLATWLDKGYHGEMGFMAKHGTKRTRPAELEPGTQRVISVRMDYLPPEVETTKVLGQPGNAYVSRYALGRDYHKLMRKRLAQLARQIEQEVGTFGYRAFVDSAPVMERALAQKAGLGWFGKNAMLLNPKAGSLFFLGELYTDLPLPVDPPFEQEHCGSCSACRTACPTGAIVDDKVIDSRKCISYLTIELQGAIPVEFRRAMGNRVYGCDDCQLVCPFTRFTRISREQDFAPRHDLDRASLISLFAWGEEEFLDKTAGSPIRRIGYERWLRNLAVGLGNAPWSEAVEAALWARRAYPSPLVREHVAWALDEQRHKRGARIATAAP

SEQ ID NO: 77216 - protein, 384 aa, Halomonas sp.
  REGION 1..384: note = tr|A0A2D6PMY7|A0A2D6PMY7_HALSX Epoxyqueuosine reductase OS=Halomonas sp. OX=1486246 GN=queG PE=3 SV=1
  VARIANT 18: note = Xaa can be any naturally occurring amino acid
  VARIANT 60: note = Xaa can be any naturally occurring amino acid
  VARIANT 185: note = Xaa can be any naturally occurring amino acid
  VARIANT 248: note = Xaa can be any naturally occurring amino acid
  VARIANT 270: note = Xaa can be any naturally occurring amino acid
  VARIANT 294: note = Xaa can be any naturally occurring amino acid
MPSSTTFSLSRNQPSREXPTHERLSAEQLRQLAALIKQWGRELGFQQVGITDTDLNDHEXHLTNWLDKGYHGEMGFMAKHGTKRTRPDELEPGTRRVISVRMDYLPAEVESAKVLGQPSRAYVSRYALGRDYHKLMRKRLAQLAKHIEQEVGKFGFRAFVDSAPVMERALAQKAGLGWFGKNAMXLNPKAGSLFFLGELYTDLPLPVDAPFAQEHCGSCSACRTACPTGAIVDDKVVDSRKCISYLTXELHGAIPVEYRRAMGNRVYGCXDCQLVCPFTRFTKITQEEDFSPRXDLDRASLIALFSWGEEEFLDKTAGSPIRRIGYERWLRNLAVGLGNAPWSDAVEAALWARRAYPSALVREHVAWALDEQRHKRDARIATRA

SEQ ID NO: 77217 - protein, 366 aa, Halomonas sp.
  REGION 1..366: note = tr|A0A3N9U834|A0A3N9U834_9GAMM Epoxyqueuosine reductase OS=Halomonas sp. YLB-10 OX=2483111 GN=queG PE=3; SV = 1
MSASSPSTDVDFNDLAARIRTWGRELGFQQVGITDVDLSDDEAHLERWLEAGFHGEMGFMAKHGTKRTRPAELEPGTIRVISVRLDYLPPEVETTKVLGQPSRAYVSRYATGRDYHKLMRKRLQRLAKTIEAEVGDFGYRAFVDSAPVMERGLARKAGIGWFGKNAMLLNPRAGSMFFLGELYTDLPLPVDEPFEQEHCGSCSACRTACPTGAIVEDKVVDARACISYLTIELFGAIPERYREAMGNRVFGCDDCQLVCPFTRFTRASSEPDFAPRHDLDRVELLTLFGWSEEEFLERTAGSPIRRIGYERWLRNLAVGLGNAPWSAAIERALLTRLAYPSELVREHVRWALARQRQRRAELITSA

SEQ ID NO: 77218 - protein, 375 aa, Halomonas subglaciescola
  REGION 1..375: note = tr|A0A1M7F682|A0A1M7F682_9GAMM Epoxyqueuosine reductase OS=Halomonas subglaciescola OX=29571 GN=queG; PE = 3 SV=1
MSATVPPSSSRTASLSAAELASLADDIKAWGDELGFQQVGITDTQLEDHEAHLNDWLDKGYHGEMGFMTKHGTKRTRPAELEPGTIRVISVRMDYLPADMESVAVLNQPERAYVSRYALGRDYHKLMRKRLAALAKRIEAQVGSFGYRAFVDSAPVMERALAQKAGLGWFGKNAMMLNPQAGSLFFLGELYTDLPLPVDAPFARDHCGSCNACQTVCPTGAIVADKVVDARKCISYLTIELHGAIPEQYRRAMGNRIYGCDDCQLFCPFTRFTQTTREADFAPRHDLDRAELLTLFGWGEEEFLDKTAGSAIRRIGYERWLRNIAVALGNAPFSHAVEAALMARRSYPSALVREHVAWALTEQRHRRNNRIATAE

SEQ ID NO: 77219 - protein, 363 aa, Halomonas subterranea
  REGION 1..363: note = tr|A0A1H9R3H6|A0A1H9R3H6_9GAMM Epoxyqueuosine reductase OS=Halomonas subterranea OX=416874 GN=queG PE=3; SV = 1
MLSDDTLAGLADLIKTWGRELGFQQVGITDTQLEAHEAHLHAWLDKGYHGEMGFMAKHGTKRTRPAELEPGTQRVISVRMDYLPAEVESTKVLGQPNRAYVSRYALGRDYHKLMRKRLAQLAKQIEHEVGAFGYRAFVDSAPVMERALAQKAGLGWFGKNAMLLNPKAGSLFFLGELYTDLPLPVDAPFEEEHCGSCSACRTACPTGAIVDDKVIDSRKCISYLTIELHGSIPVEYRRAMGNRIYGCDDCQLVCPFTRFTRATQEDDFAPRHDLDRASLVRLFAWGEEEFLAKTAGSPIRRIGYERWLRNIAVGLGNAPWSEAVETALWSRRAYPSALVREHVAWALEEQRFKRATCIATAAS

SEQ ID NO: 77220 - protein, 179 aa, Halomonas sulfidaeris
  REGION 1..179: note = tr|A0A455U8G4|A0A455U8G4_9GAMM 4Fe-4S ferredoxin-type domain-containing protein OS=Halomonas sulfidaeris OX=115553 GN=HSBAA_23450 PE=4 SV=1
MPIDAPFEQEHCGSCSACRTACPTGAIVDDKVVDSRKCISYLTIELHDAIPVELRRAMGNRIYGCDDCQLVCPFTRFTRITQEDDFAPRHDLDRTTLISLFAWGEAEFLDKTAGSPIRRIGYERWLRNIAIGLGNAPWSQAVEAALWARRAYQAHWCVNTSPGRLKNNSSSAVIALPLI

SEQ ID NO: 77221 - protein, 107 aa, Halomonas sulfidaeris
  REGION 1..107: note = tr|A0A455U4K8|A0A455U4K8_9GAMM DUF1730 domain-containing protein OS=Halomonas sulfidaeris; OX = 115553 GN=HSBAA_23460 PE=4 SV=1
MGFMAKHGTKRTRPAELEPGTQRIISVRMDYLPAEVESTKVLGQPSRAYVSRYALGRDYHKLMRKRLALLAKKIEQAVGRFGYRAFVDSAPVMERALAQKSRARLVR

SEQ ID NO: 77222 - protein, 373 aa, Halomonas taeanensis
  REGION 1..373: note = tr|A0A1G7NAA8|A0A1G7NAA8_9GAMM Epoxyqueuosine reductase OS=Halomonas taeanensis OX=284577 GN=queG PE=3; SV = 1
MSTTASPQAPSAPQALSDTDLAALAAKIKVWGRELGFQELGITDTDLSNHERYLERWLAAGYHGEMGFMEKHGTKRTRPAELVPGTLRVISARMDYLPPEVETTKVLGQPDTAYVSRYALGRDYHKLIRKRLATLAKRIEAEVGTFGYRAFVDSAPVMERALARKAGLGWFGKNAMLLNPKAGSLFFLGELYTDLPLPADEPFESEHCGKCSSCRTACPTGAIVEDKVVDSRRCISYLTIELHGAIPEQYREAMGNRVYGCDDCQLVCPFTRFTRISQEEDFAPRHDLDRIELTRLFAWSEEEFLDKTTGSAIRRIGYERWLRNLAVGLGNAPWSETVEAALKARLAYPSDLVREHVRWALERQRDKRAQRII

SEQ ID NO: 77223 - protein, 379 aa, Halomonas taeanensis
  REGION 1..379: note = tr|A0A328XQM9|A0A328XQM9_9GAMM Epoxyqueuosine reductase OS=Halomonas taeanensis OX=284577 GN=queG PE=3; SV = 1
MSTTASQQAPSAQQASSGAKALSDADLAALAAKIKVWGRELGFQELGITDTDLSSHERYLERWLAAGYHGEMGFMEKHGTKRTRPEELVPGTLRVISARMDYLPPEVETTKVLGKPDIAYVSRYALGRDYHKLIRKRLATLAKRIEAEVGAFGYRAFVDSAPVMERALAQKAGLGWFGKNAMLLNPQAGSLFFLGELYTDLPLPVDAPFETEHCGKCSSCRTACPTGAIVDDKVVDSRRCISYLTIELHGAIPEQYREAMGNRVYGCDDCQLVCPFTRFTRASQEEDFAPRHDLDRIALTRLFAWSEEEFLDKTAGSAIRRIGYERWLRNLAVGLGNAPWSETVEAALKARLAYPSDLVREHVRWALERQRDKRAQRIL

SEQ ID NO: 77224 - protein, 363 aa, Halomonas titanicae
  REGION 1..363: note = tr|A0A558J2P6|A0A558J2P6_9GAMM Epoxyqueuosine reductase OS=Halomonas titanicae OX=664683 GN=queG PE=3; SV = 1
MLSENTLTDLADLIKTWGRELGFQQVGITDTELSAHEAHLDAWLENGHHGEMGFMAKHGTKRTRPAELEPGTQRIISVRMDYLPAEVESTKVLGQPSRAYVSRYALGRDYHKLIRKRLALLAKKIEQEVGDFGYRAFVDSAPVMERALAQKAGLGWFGKNAMLLNPKAGSLFFLGELYTDLPLPIDAPFEHEHCGSCSACRTACPTGAIVDDKVVDSRKCISYLTIELHGAIPVEYRRAMGNRIYGCDDCQLVCPFTRFTHITQEDDFAPRHDLDRATLISLFCWGEAEFLDKTAGSPIRRIGYERWLRNIAVGLGNAPWSEAVEAALWARRAYPSALVREHVAWALEEQRLKRSERIATDAS

SEQ ID NO: 77225 - protein, 386 aa, unidentified
  source 1..386: note = Halomonas urumqiensis
  REGION 1..386: note = tr|A0A2N7UCX0|A0A2N7UCX0_9GAMM Epoxyqueuosine reductase OS=Halomonas urumqiensis OX=1684789 GN=queG PE=3; SV = 1
MTVHSPFTDSADANEIGADVTRPGNAPDLTALAQRIKTWGRELGFQQVGITDVDLREDEAHLQRWLDAGHHGEMGFMAKHGTKRTRPAELEPGTLRVISVRLDYLPAEVETTKVLGQPERAYVSRYATGRDYHKLMRKRLARLARQIEAEVGPIGYRAFVDSAPVMERALARKAGLGWFGKNAMLLNPKAGSLFFLGELYTDLPLPVDPPFEGDHCGSCSACRSACPTDAIVEDRVVDARRCISYLTIELHGSIPEEFREAMGNRVFGCDDCQLVCPFTRFTRISAEADFAPRHDLDRASLLSLFAWSEEEFLAKTAGSPIRRIGYARWLRNLAVGLGNAPWSEAVEAALMARLPYPSALVREHVRWALARQRDKRQRMIAVSRES

SEQ ID NO: 77226 - protein, 368 aa, Halomonas ventosae
  REGION 1..368: note = tr|A0A4R6ZFD7|A0A4R6ZFD7_9GAMM Epoxyqueuosine reductase OS=Halomonas ventosae OX=229007 GN=queG PE=3 SV=1
MSAPAPIPDTPSDLQALADRIRTWGRELGFQQLGITDVDLAEDEQRLARWLGAGHHGEMAFMAKHGTKRTRPAELVPGTVRVISVRLDYLPAEVETAKVLGRPQTAYVSRYATGRDYHKLMRKRLATLAKWIEAEVGSFGYRAFVDSAPVMERALARKAGLGWFGKNAMLLNPRAGSLFFLGELYTDLPLPVDAPFEGDHCGSCSACRTACPTGAIVEDRVVDARACISYLTIELHGAIPERFRAAMGNRVFGCDDCQLVCPFTRFTRVSREADFAPRHDLDRASLVSLFAWGEEEFLEKTAGSPIRRIGYERWLRNLAVGLGNAPWSEAVEAALWARLPYPSALVREHVRWALARQREKRQRLIAAG

SEQ ID NO: 77227 - protein, 368 aa, Halomonas ventosae
  REGION 1..368: note = tr|A0A4R6HJM5|A0A4R6HJM5_9GAMM Epoxyqueuosine reductase OS=Halomonas ventosae OX=229007 GN=queG PE=3 SV=1
MSMPATTCDTSPDLHALAERIRAWGRELGFQQLGITDTDLTEDEHHLQRWLEAGHHGEMEFMAKHGTRRTRPAELVPGTLRVISVRLDYLPAEVDTAKVLGQPTTAYVSRYATGRDYHKLMRKRLATLAKWIEAEVGPIGYRAFVDSAPVMERALARKAGLGWFGKNAMLLNPRAGSLFFLGELYTDLPLPVDEPFAGDHCGSCSACRTACPTGAIVEDRVVDARACISYLTIELHGAIPERYRAAMGNRVFGCDDCQLVCPFTRFTRLSREADFAPRHELDRASLLSLFAWGEEEFLDKTAGSPIRRIGYARWLRNLAVGLGNAPWSEAVEAALWARLPYPSELVREHVRWALARQREKRQRLIAAG

SEQ ID NO: 77228 - protein, 370 aa, Halomonas venusta
  REGION 1..370: note = tr|A0A3Q8WEC0|A0A3Q8WEC0_9GAMM Epoxyqueuosine reductase OS=Halomonas venusta OX=44935 GN=queG PE=3 SV=1
MQNSTTFSLSDDDLTHLAALIKTWGRELGFQQVGITDTQLAVHEKHLATWLEKGYHGDMSFMAKHGTKRTRPEELEPGTQRVISVRMDYLPAEVESTKVLGQPSRAYVSRYALGRDYHKLIRKRLAQLAKKIEQQVGAFGYRAFVDSAPVMERALAQKAGLGWFGKNAMLLNPKAGSLFFLGELYTDLPLPIDTPFTQQHCGSCSACRTACPTGAIVDDKVVDSRKCISYLTIELHGAIPTEFRRAMGNRIYGCDDCQLVCPFTRFTRVTQEDDFAPRHDLDRADLLNLFAWGEDEFLDKTAGSPIRRIGYERWLRNIAIGLGNAPWSRAVEAALWARRAYPSSLVREHVAWALEEQRLKRGAKIATDGV

SEQ ID NO: 77229 - protein, 370 aa, Halomonas xianhensis
  REGION 1..370: note = tr|A0A1I2Y761|A0A1I2Y761_9GAMM Epoxyqueuosine reductase OS=Halomonas xianhensis OX=442341 GN=queG PE=3; SV = 1
MMTRQSVHDGDALDLTGLAERIRQWGRELGFQQIGITDTDLATHERYLERWLAAGHHGEMAFMAKHGSKRTRPEELVPGTLRVISARMDYLPPEIETTKVLGQADKAYVSRYALGRDYHKLIRKRLATLAKHIENEVGSFGYRAFVDSAPVMERALAQKAGLGWFGKNSMLLHPQAGSLFFLGELYTDLPLPVDAPFDSEHCGKCNQCRTACPTGAIIDDKVVDSRRCISYLTIELHGSIPEAYREAMGNRIYGCDDCQLVCPFTRFTRASHEEDFAPRHDLDRAALVRLFAWSEEEFLLRTEGSAIRRIGYERWLRNLAVGLGNAPWSETVEAALRARLAYPSDLVREHVRWALDRQSDKRGRLIATID

SEQ ID NO: 77230 - protein, 370 aa, Halomonas xianhensis
  REGION 1..370: note = tr|A0A4R8G425|A0A4R8G425_9GAMM Epoxyqueuosine reductase OS=Halomonas xianhensis OX=442341 GN=queG PE=3; SV = 1
MMTRQSVHDGDALDLTGLAERIRQWGRELGFQQIGITDTDLATHERYLERWLAAGHHGEMAFMAKHGSKRTRPEELVPGTLRVISARMDYLPPDVETTKVLAQADKAYVSRYALGRDYHKLIRKRLATLAKHIENEVGSFGYRAFVDSAPVMERALAQKAGLGWFGKNSMLLHPQAGSLFFLGELYTDLPLPVDAPFDSEHCGKCNQCRTACPTGAIIDDKVVDSRRCISYLTIELHGSIPEEYREAMGNRVYGCDDCQLVCPFTRFTRASHEEDFAPRHDLDRAALVRLFAWSEEEFLLRTEGSAIRRIGYERWLRNLAVGLGNAPWSETVEAALRARLAYPSDLVREHVRWALERQSDKRRRLIATTD

SEQ ID NO: 77231 - protein, 377 aa, unidentified
  source 1..377: note = Halopeptonella vilamensis
  REGION 1..377: note = tr|A0A4Q8D0Y1|A0A4Q8D0Y1_9GAMM Epoxyqueuosine reductase OS=Halopeptonella vilamensis OX=531306 GN=queG; PE = 3 SV=1
MAQTHDNSRILPEIREWAGELGFDELGVARPALARDEQHLLRWLQDGRHGTMRWMARHGVKRARPERLVPGTIRVISVRMDYLPPDLEADDAILADGRRAFIARYALGRDYHKLMRKRLQALAQRIESAVGSFGYRVFVDSAPVLEKALGRDAGLGWIGKNTLLLNRHAGSYFFLGEIFTDLPLPTSEPVADLCGSCRACIDVCPTGAITGPGQLDARRCVSYLTIEHEGSIPEELRPAIGNRVFGCDDCQAVCPWNRYAQPTDEADFHPRHGLESASLVALFRWDEATFLKRTEGSAIRRLGHERWLRNLAVALGNGPADPEAIEALRERLDHPSALVTEHVQWALARLLNPASRDSAQSVQRWSYPVPSARDRRQ

SEQ ID NO: 77232 - protein, 342 aa, Haloplasma contractile
  REGION 1..342: note = tr|U2EDD8|U2EDD8_9BACT 2-oxoglutarate ferredoxin oxidoreductase subunit delta protein OS=Haloplasma contractile SSD-17B OX=1033810 GN=HLPCO_000602 PE=4 SV=1
MDKRKNLANFIESLGNYKVGFVQCDILHELEEILTRNIEQNFDSNMIKVAVEDRINPFRYMENAKTILVLAVPYYYDDDSLKKERYVFSRSSWGRDYHHVVKELLQKVSKYIKDTFNHNSVILSDNHDLDERFLAYKSGIGHYGKNASIINDEYGTYFYLGLLITDLPLEEESYTNQDELVDLCKDCNLCVNACPTDALTGDKRLDAKKCMSYLTQAKEEIDEPFIKKFQKYIYGCDICQIVCPHNKKIEKTDIHELFTPTGNEKVNPDELFNLSNRQFKSKYGDLSGSWRGKKVLLRNAILIAANNNHEAVIQLAREMDLEKEPEWFKHTVKQILNKRKEQ

SEQ ID NO: 77233 - protein, 354 aa, Halorhodospira halochloris
  REGION 1..354: note = tr|A0A0X8X7X7|A0A0X8X7X7_HALHR Epoxyqueuosine reductase OS=Halorhodospira halochloris OX=1052 GN=queG; PE = 3 SV=1
MSTEPIDPAPIRSWAKELGFSDCRIAAPHLPIEDEERLLDWLRQQRHGEMHFMARHGRKRARPKQLFPDAQAIIVVRMDHFPATSAAQQAVLAEPSRGYVARYALGRDYHKVLRQRLALLGQRIAQEYSSHGPISHRTFVDSAPVLERALARQAGIGWVGKNTQLICKDAGSYCLLGELFVSLPLAPDSPVSNHCGSCRACLHNCPSQALLSPYQLDARRCVSYLTIEHPGSIPEELRPAIGNRIFGCDSCQQVCPWNHQTAQTALDDFQPRHGLDNALLAHLFEWDEATFLDRTAGMVIRRAGYERWRRNLAVALGNCAPSAESVSALNSGLSDPSAVVREHVRWALERLGHG

SEQ ID NO: 77234 - protein, 355 aa, Halorhodospira halophila
  REGION 1..355: note = tr|A1WUU2|A1WUU2_HALHL Epoxyqueuosine reductase; OS = Halorhodospira halophila (strain DSM 244 / SL1); OX = 349124 GN=queG PE=3 SV=1
MDPSDLTPSIRTWAAELGFSACGIASTELPGDEAHLIRWLQAGHQGAMGFMGRHGRKRARPRQLVPGTRSVVVVRMDYTPDQAADPRAVLDDPQRAFITRYSLGRDYHKLVRRRLQKLAERIQAAIGPFGYRAFVDSAPVLERALARDAGLGWIGKNTMLLNRHAGSYFFLGELFTDLPLPTDTPVRTHCGSCRRCLHACPTDAFVGPYQLDARRCISYLTIEHPGPIPEALRPAMGNRIFGCDDCQLVCPWNRYAHPTAEADFQPRHGLDDAALVALFGWDEATYLERTAGSAIRRIGHERWLRNLAVALGNAASTREVVAALGERLDHPSALVREHVRWALARHGAAPERTGD

SEQ ID NO: 77235 - protein, 351 aa, Halospina denitrificans
  REGION 1..351: note = tr|A0A4R7JXT1|A0A4R7JXT1_9GAMM Epoxyqueuosine reductase OS=Halospina denitrificans OX=332522 GN=queG; PE = 3 SV=1
MTDSLQATADKIRDWAHELGFQAVGITDTQLEETGQRLNQWLDRELNADLGYMAQHGEKRYRPAQLVEGTERIIAVRLDYRPDPDDPDAVLADDEKAYITRYSLGRDYHKLMRKRLAKLAKWIDEALPGYYHRAFVDSAPVMEKPIAVKAGLGWQGKHTLLLHPKAGSWFFLGEIYTSAPLPMDAPYPTDHCGSCTACLDVCPTNAFPEPYVLDAARCISYLTIENNGPIPEELRPLMGNRVFGCDDCQLVCPFNKFSESTEEPDFQPRHGLDNSTLAELFLWDEETFLKRTEGSAIRRAGYEGWLRNLAVGLGNAPSTIPVIEALRARKEYPSEMVREHVEWALRRHEVA

SEQ ID NO: 77236 - protein, 353 aa, Halospina sp.
  REGION 1..353: note = tr|A0A5J5FHM4|A0A5J5FHM4_9GAMM tRNA epoxyqueuosine(34) reductase QueG OS=Halospina sp. K52047b; OX = 2614160 GN=queG PE=4 SV=1
MTNDLTATAEQIRDWAHELGFQAVGITDTELEETGQRLNQWLDRGLNADLSYMAQHGEKRYRPAQLVEGTERIIAVRLDYRPEPDAPDAVLADDEKAYITRYSLGRDYHKLMRKRLAKLAKWIDEALPGYYHRAFVDSAPVMEKPIAVKAGLGWQGKHTLLLHPQAGSWFFLGEIYTSAPLPVDEPWTTDHCGSCTACLDVCPTNAFPEPYVLDAARCISYLTIENNGPIPEELRPLMGNRVFGCDDCQLVCPFNKFSESTEEPDFQPRHGLDNSTLAELFLWDEATFLKRTEGSAIRRAGYEGWLRNLAVGLGNAPSTIPVIEALRAREDCPSELVREHVQWALRRHGIVQV

SEQ ID NO: 77237 - protein, 366 aa, Halotalea alkalilenta
  REGION 1..366: note = tr|A0A172YDV3|A0A172YDV3_9GAMM Epoxyqueuosine reductase OS=Halotalea alkalilenta OX=376489 GN=queG PE=3; SV = 1
MTDDALRQEPDLTALKAKLLVWGRELGFQQLGVADVELGEHREHLARWLDAGMHGEMGYMAEHGDKRWRPDQLVPGTRRVITARMDYLPPEVETTKLLGQPDKAYISRYALGRDYHKLIRKRLTTLAKWLEAEIGPFGYRAFVDSAPVLERALAQRSGLGWFGKNSMLLSPKAGSLFFLGELYTDLPLPVDPPFEREHCGSCERCKSACPTGAIVDDKVIDARRCISYLTIELKGAIPLEFRRAIGNRVYGCDDCQLVCPFTRFTRASPEPDFAPRHALDRAELIELFAWSEEEFLERTEGSAIRRIGHQRWLRNIAVGLGNAPWSPRVVDALEARRNDPSALVREHVEWALAEQRRRAPTLLAHG

SEQ ID NO: 77238 - protein, 310 aa, unidentified
  source 1..310: note = Halothece sp.
  REGION 1..310: note = tr|K9Y860|K9Y860_HALP7 Epoxyqueuosine reductase; OS = Halothece sp. (strain PCC 7418) OX=65093 GN=queG PE=3; SV = 1
MSLNSTQIKAKAKSLGFHKVGIAAANNQEQIEAQTRLKNWLTLGYQADMKWMDNPKRFDLEKCLPNVQSVIAVALNYYTSHSQPENSEQGKVSRYAWGRDYHKVMQKKLKALARWLDEQAPEARSRYYSDTGPVQDKFWAQQAGLGWIAKNSNVITRDYGSWVFLGEVLTTLTLTPDSPHTEHCGTCTRCLEACPTDAFPQPFVVDANRCIAYHTIENRAEKLPENIDLKGWVAGCDICQEVCPWNQRFAQETDCEDFQLRSDHLAPNLAELAQLSAETWDQKTRGSALRRIKPEMWRRNARANLGKDGT

SEQ ID NO: 77239 - protein, 367 aa, Halothermothrix orenii
  REGION 1..367: note = tr|B8CX11|B8CX11_HALOH Iron-sulfur cluster binding protein, putative OS=Halothermothrix orenii (strain H 168 / OCM 544 / DSM 9562) OX=373903 GN=Hore_10760 PE=4 SV=1
MDLTTMIKAKARDIGFDIVGITSAAPLLKAREVLEKRKEAGQLPGFTDEDILLSTTPRMHLEDARSIIALAMSYASKVEFDEEVYIALYARGKDYHTIMRNKMNELIDFIKNINPESNCKSFVDTGPLLDKEIAARAGLGWIGKNNLLINPEYGSFLVLGEILTSLELKYDNPIENGCKNCQACIQMCPTGALKPYYLDLSRCRSNITQKTGILSEEEKKAIGENLWGCDSCQMVCPYNENLPLDLHPEYRPVLPGKIEEVLGLTKKNMGDQWKNSPMMWRGTNIIKRNALINLVNLYNKGVNITDVLEIIKKGLKSPSPVVRITAAWAAGKIKARELKDFILKLLKSEKDKVVENYFKKVIKRLNQ

SEQ ID NO: 77240 - protein, 357 aa, unidentified
  source 1..357: note = Halothiobacillaceae bacterium
  REGION 1..357: note = tr|A0A545SJJ2|A0A545SJJ2_9GAMM Epoxyqueuosine reductase OS=Halothiobacillaceae bacterium OX=2268194; GN = queG PE=3 SV=1
MSMDPVELAAMIKAMGAELGFQHVGITGIDLSRHEAGFLRWLDAGMHGEMDYMARHGLKRLRPAELQPGTRSVISVRMDYMPEGLADAPGVLMDGRKGYVSRYALGRDYHKVLRSRLQRLAERIQAHIGPFGHRVFVDSAPVYETGLAEQAGLGWKGKHSLVLHRGAGSWFFLGELFVDLALPPDEPAAQGHCGRCTACIDICPTGAIVADGVVDARRCISYLTIEHAGAIPVELRPMLGNRIYGCDDCQLACPWNRFARPTGETDFAPRNGLEAADLLALWAWDERAFLSRTEGSPIRRIGFERWRRNLAVALGNAPADKATLRALETALEGSDGVVAEHVRWAIGRQRAMLRGRD

SEQ ID NO: 77241 - protein, 373 aa, Halothiobacillus neapolitanus
  REGION 1..373: note = tr|D0KZJ3|D0KZJ3_HALNC Epoxyqueuosine reductase; OS = Halothiobacillus neapolitanus (strain ATCC 23641 / c2); OX = 555778 GN=queG PE=3 SV=1
MFNPDELKAQIKVWAIELGFDELRVTDTDLSHYEAGYLDWIAQKHQGTMDYLVTHGLKRFRPAELVPGTLRVLAVRKNYLPPDSSGPRDVLHNPELGYVSRYALGRDYHKVMRSNLQKLAERITQEIGAFGFRAFVDSAPVYETGLAEKAGIGWKGKHSLILNRQGGSWFFLGELFIDFDLPVDEPVESHCGSCTACITVCPTQAIVADGVVDARRCISYLTIESKDDIPPEFREAMGNRIYGCDDCQLVCPWNRFARVAADADFRARHGLDAPGLIELFLWDEPTFLHKTEGMAIRRIGWQRWLRNVAVALGNLLRNQPDNTSAVAALQARCGQVGDQLDRHIQWALAQREGLPNGESKTAKMFEDALSMPE

SEQ ID NO: 77242 - protein, 351 aa, Halothiobacillus sp.
  REGION 1..351: note = tr|A0A259RVL5|A0A259RVL5_9GAMM Epoxyqueuosine reductase OS=Halothiobacillus sp. 13-55-115 OX=1970378; GN = queG PE=3 SV=1
MFDPVELKAQIKDWAIEFDFDDLRVTDTDLSRYEAGFIQWIEQNYHGTMDYMAKYGLTRLRPHELVPKTLRILCVRKNYLPPDARGPRDVLHDSELGYVSRYALGRDYHKVLRSNLQKLAERITDAIGPFGFRAFVDSAPVYETGLAEKAGIGWKGKHSLILNRQAGSWFFLGELFIDFDLPLDEPVESHCGSCTACITVCPTQAIVADGVVDARRCISYLTIESKDDIPQELRPAMGNRIYGCDDCQLVCPWNRFARVAADADFRARHGLDAPGLIELFLWDERTFLHKTEGMAIRRIGWQLWLRNVAVALGNLLRNQPDNTPAIEALQARYGQVSDQLDRHIQWALAQR

SEQ ID NO: 77243 - protein, 355 aa, Halothiobacillus sp.
  REGION 1..355: note = tr|A0A0W1RW93|A0A0W1RW93_9GAMM Epoxyqueuosine reductase OS=Halothiobacillus sp. XI15 OX=1766620 GN=queG; PE = 3 SV=1
MSVEAEDLKRRILAWAEELGFTDARVTDTDLSAYEQGFRDWLADGNAGSMTFLERHGLLRFRPEELVPGTRRVLMVSRDYLPPETTGPRHVLGNPALGYVSRYALGRDYHKLVRKRLAQLARRISDEIGPFTHRAFVDSAPVYETGLAEKAGLGWKGKHSLVLNRSGGSWFFLGALFLDLDLPVDEPVDDHCGTCTACIDVCPTGAIVADGVVDARRCISYLTIEADEDIPESLRPMIGNRIYGCDDCQLVCPWNRFARQTEDADFHARNGLDAPELVTLFRWDEATFLQRTEGSAIRRIGWRRWRRNLAVALGNIPTDTPGVAEAVAALEAGLGEAGDQVDRHIRWALARLRAA

SEQ ID NO: 77244 - protein, 361 aa, Halovibrio sp.
  REGION 1..361: note = tr|A0A2A2F1F1|A0A2A2F1F1_9GAMM Epoxyqueuosine reductase OS=Halovibrio sp. YL5-2 OX=2032626 GN=queG PE=3; SV = 1
MTDDLTATAQRIRDWAHDLGFQAVGITDTHLEETGQQLNQWLERGLNADLSYMSAHGEKRYRPAQLVEGTERIIAVRLDYRPEPDDPDTVLADDEKAYITRYSLGRDYHKLMRKRLAKLAKWIDEALPGYYHRAFVDSAPVMEKPIAVKAGLGWQGKHTLLLHPQAGSWFFLGEIYTSAPLPVDEPWATDHCGTCTACLDVCPTNAFPEPYVLDAGRCISYLTIENNGPIPEELRPLMGNRVFGCDDCQLVCPFNKFSESTEEPDFQPRHGLDNSTLAELFLWDEETFLKRTEGSAIRRAGYEGWLRNLAVGLGNAPSTIPVIEALKARTDYPSEMVREHVQWALRQHDPISPRADASAGQ

SEQ ID NO: 77245 - protein, 381 aa, unidentified
  source 1..381: note = Halovibrio variabilis
  REGION 1..381: note = tr|A0A511UPL5|A0A511UPL5_9GAMM Epoxyqueuosine reductase OS=Halovibrio variabilis OX=31910 GN=queG PE=3; SV = 1
MPDSTALARSRDAFSDQALARLADLIKTWGRELGFQQVGITDTELSNHEAHLDAWLEKGYHGEMGFMAKHGTKRTRPAELEPGTQRIICVRMDYLPAEVESTKVLGQPSRAYVSRYALGRDYHKLMRKRLAQLAKKIEHEVGDFGYRAFVDSAPVMERALAQKAGLGWFGKNAMLLNPKAGSLFFLGELYTDLPLPVDTPFSEEHCGSCSACRTACPTGAIVDDKVIDSRKCISYLTIELDGAIPVEFRRAMGNRVYGCDDCQLVCPFTRFTRITKENDFAPRHDLDRASLISLFAWGEAEFLDKTAGSPIRRIGYERWLRNIAVGLGNAPWSEAVEAALWSRRAYPSELVREHVAWALEEQRGKRVKRIATDTYSSSSLC

SEQ ID NO: 77246 - protein, 243 aa, unidentified
  source 1..243: note = Handelsmanbacteria sp.
  REGION 1..243: note = tr|A0A1F6CBG9|A0A1F6CBG9_HANXR tRNA epoxyqueuosine(34) reductase QueG (Fragment); OS = Handelsmanbacteria sp. (strain RIFCSPLOWO2_12_FULL_64_10) OX=1817868 GN=A3F84_271 30 PE=4; SV = 1
DTGPVLEREAAVRAGLGWFGKHTGLIHKRAGSWLLLGEILLTAELDYDTPGPDHCGTCTRCIDACPTGAILEPYVLDSRKCISYLTIEVKGAIPADMRAQVGDWVFGCDVCQEVCPWNRKAPATAEPAFAPHEGPEAPDLIELLRMDQAAFSARFKGSPIKRTKRRGLLRNAAVSLGNSGDRRAVPALAEALNDPEALVRGHAAWALGRLGGDEARAVLKAALGREEDAEARGEIERALGAIA

SEQ ID NO: 77247 - protein, 376 aa, Hansschlegelia sp.
  REGION 1..376: note = tr|A0A4Q9GGP6|A0A4Q9GGP6_9RHIZ Epoxyqueuosine reductase OS=Hansschlegelia sp. Dub OX=2528245 GN=queG; PE = 3 SV=1
MTPVALRSALEARARSLGFDAFGVTTPGGIPQAAPRLAQALADGHHGTMRWLSDRAEWRGDPSALWPEARSVVMLGMNYGPDEDPRAVLQRRERGAISVYARGDDYHEVIKGRLKQVAGALASMGAQAKVFVDTAPVMEKPLAEAAGLGWQGKHTNLLSREFGSWLFLGAIFTTAELPIDEPAVGSCGSCRACLDACPTDAFPAPYRLDARRCISYLTIEHAGPIPQEFREAIGSRIYGCDDCLAACPWNKFAQEGREMRLSAREALRAPALAELAGLNDADFRALFAKSPIKRIGRDRFLRNVALAIGNSGVPAMAVHAERLTRDSSALVRGAAVWALSRLAPATVSALAEDAASTETEASVRDEWRAATALEPA

SEQ ID NO: 77248 - protein, 377 aa, Hansschlegelia zhihuaiae
  REGION 1..377: note = tr|A0A4Q0MPQ4|A0A4Q0MPQ4_9RHIZ Epoxyqueuosine reductase OS=Hansschlegelia zhihuaiae OX=405005 GN=queG; PE = 3 SV=1
MTPEALKADIVRRAAALGFDVVRVTRPDAIPQAASRLARALADGHHGTMGWLAERAEWRGDPQALWPEARSVVTLAMNYAPDRDPRVALQTPDRAAISVYAQGDDYHEVIKGRLKQVAGALAAAGAPAKVFVDTAPVMEKPLAEAAGVGWQGKHTNLVSRDFGSWLFLGAIFTTAELPVDPPAEDACGSCRACLDACPTDAFPAPYRLDARRCVSYLTIEHAGPIPREFRAGIGNRIYGCDDCLAACPWNKFAHEGREMRLAAREALKSPPLEELAALDDAGFRALFAKSAVKRIGRDRFARNVLVAIGNSGRPDLAEAAAARLDDASAVVRGAAVWALSRLVPAATTRALFEARRTRETDADVLGEWDRALDREAA

SEQ ID NO: 77249 - protein, 308 aa, unidentified
  source 1..308: note = Hanstruepera neustonica
  REGION 1..308: note = tr|A0A2K1E184|A0A2K1E184_9FLAO Epoxyqueuosine reductase OS=Hanstruepera neustonica OX=1445657 GN=queG; PE = 3 SV=1
MSLKEKYSQLIKTEAKRLGFLSCGISKAQFLEEEAPRLEKWLKDNRHGEMRYMENHFDKRLDPTKLVEGSKSVISLLLNYYNPEKQNDESAPKISQYAYGIDYHFVIKDKLKALLQFIQEEIGQISGRAFVDSAPVLDKAWAAKSGLGWIGKHSNLLTQQVGSFYFIAELIVDLELDYDSPTTDHCGTCTACIDACPTEAIIQPYVVDGSKCISYLTIELKDNIPTTFKGQMDNWMFGCDVCQDVCPWNRFSKPHQEPLFDPHPDLLDMTKQDWEEITEETFKKVFKKSAVKRTKFSGLKRNINFLKQ

SEQ ID NO: 77250 - protein, 318 aa, Hapalosiphon sp.
  REGION 1..318: note = tr|A0A0M0SFW5|A0A0M0SFW5_9CYAN Epoxyqueuosine reductase OS=Hapalosiphon sp. MRB220 OX=1704290 GN=queG; PE = 3 SV=1
MNQLSGTNSTEVKQKAIELGFHKVGIAAVDGKEDIQMQQLRAWIKLGYHADMEWMTSPKRQDIRLVMSEVRSLICVALNYYTPDQRPGGKEYGKISRYAWGRDYHKVMHKKLKALSNWLQEQGENIQARYYADTGPVQDKVWAQKAGIGWIAKNGNVITREYGSWVFLGEVLTNLELDPDKGHTQHCGNCTRCLEACPTNAITSPFVVDANRCIAYHTIENRQEKLPEAIASNLQGWVAGCDICQDVCPWNQRFATPTDVEEFQPYPGNIAPKLVELAQISDQEWDQRFPASALRRIKPEMLRRNARANLNAFQQAQE

SEQ ID NO: 77251 - protein, 318 aa, unidentified
  source 1..318: note = Hapalosiphonaceae cyanobacterium
  REGION 1..318: note = tr|A0A328ICE8|A0A328ICE8_9CYAN Epoxyqueuosine reductase OS=Hapalosiphonaceae cyanobacterium JJU2; OX = 2109628 GN=queG PE=3 SV=1
MNQFPGTNSAEVKQKAVELGFHKVGIAAVDGTDEQQMERLQAWIELGYHADMKWMTSLKRQDIKLVMSEVRSLICVALNYYTPHQRPRGEEYAKISRYAWGRDYHKVMHKKLKALSGWLQGQGENIQARYYADTGPVQDKVWAQKAGIGWIAKNGNVITREYGSWVFLGEVLTNLELEPDKPHTQHCGNCTRCLEACPTDAITSPFVVDANRCIAYHTIENRQEKLPEAIASNLQGWIAGCDICQDVCPWNQRFASPTDVEEFQPYPGNIAPKLVELAQISDHEWDERFPASALRRIKPEMLRRNARANLNAFQQAQE

SEQ ID NO: 77252 - protein, 275 aa, unidentified
  source 1..275: note = Harryflintia acetispora
  REGION 1..275: note = tr|A0A3E2T416|A0A3E2T416_9FIRM Epoxyqueuosine reductase OS=Harryflintia acetispora OX=1849041; GN = DW086_04495 PE=4 SV=1
MEPTEELLRALFQEAGLSEYGTCDFDPALCRLPSRKRLPPGARSLVMAAVPYYVGRFPHRNVSRYAMVQDYHTVSGALLERVSLRLRKAFPGEQFLALVDASPIDEVEAGRRAGLGVRGLHGQLINETYGSYIFIGAIVSTVRFPPSRPKEGGCLRCGRCLAACPTGALNDQGLVRGRCRSHLTQKKKLTDPEERAQIAAGGMAWGCDICTDCCPMNRGKAYSGIPDFYRNICAVVRDTNLDAMIADRAYAYKGQAVLRRNLGLIEHSAAPDAHR

SEQ ID NO: 77253 - protein, 251 aa, unidentified
  source 1..251: note = Harryflintia acetispora
  REGION 1..251: note = tr|A0A3E2T368|A0A3E2T368_9FIRM Epoxyqueuosine reductase OS=Harryflintia acetispora OX=1849041; GN = DW086_03410 PE=4 SV=1
MSKTELKDEVSALAQSLGANLCGVADLGARKDFIAETYGEKWAAYPRAVSLAVFFPREVVLEQLDGPTRSYSYFYAAINRQLDTIGLAVSNLLQTKGCRAYPVPTSDYRLAGEAKGLHERLAAGESPEPFHTERVGMFSHRLAAVLAGLGWVGKNCSLITPQAGPRLRLTTVLTDAPLPPGKPIENRCGSCTRCRDICPPRALKGVAFREEDPVDVRLDRERCNAYLDRVASVFGRHTCARCLAVCPWGRK

SEQ ID NO: 77254 - protein, 381 aa, unidentified
  source 1..381: note = Hartmannibacter diazotrophicus
  REGION 1..381: note = tr|A0A2C9D0C5|A0A2C9D0C5_9RHIZ Epoxyqueuosine reductase OS=Hartmannibacter diazotrophicus OX=1482074; GN = queG PE=3 SV=1
MAEDILKAARERALRLGFAAFRVTAPERVPDAGARLRQAIADGHHATMDWLPETADRRSDPRALWPEVRSVVMLGFNYGPETDPLALLERKDRASISVYSRNRDYHDILKGRLKEVAGLIARDTGAEVKVFVDTAPVMEKPLAASAGLGWQGKHTNLVSRDYGSWLFLGAVFSAADLPLDEPERDHCGSCRACLDICPTKAFPAPYRLDARRCISYLTIEHDGPIPHEFRKAMGNRIYGCDDCLAVCPWNKFAEVAAEQKLRARADLEAPDIADLLALNETAFRVRFCGSPVKRIGRDRFIRNVLIAAGNSAMEELAEQVRQHLADPSPMVRGAAVWALARLGGPDRIEDLAGRLPPDEKDEGVRDEWRRVTGRESADEIG

SEQ ID NO: 77255 - protein, 348 aa, Hasllibacter halocynthiae
  REGION 1..348: note = tr|A0A2T0X231|A0A2T0X231_9RHOB Epoxyqueuosine reductase OS=Hasllibacter halocynthiae OX=595589 GN=queG; PE = 3 SV=1
MTSCEASLTERLRARAREEGFAACGITGPDAIPDAPKRLGVFLEAGHHGEMRWMGERTAWRGDPRALWPECRSVVMLAESYAPEADPLAQLADPSRGAISVYAQGRDYHDVVKKRLKRLGRWLLEEVPGEAIKVFVDTAPVMEKPLAQAAGIGWQGKHTNVLSRDWGNWAFLGAIFATVALDRDPPEAEHCGTCRRCLDVCPTDAFPAPFRLDATRCVSYLTIEHSGPVPEDLRPGLGNRIYGCDDCLAVCPWNKFAVAASDARLVARDSPTPLAELAMLDDAAFRQRFRGTAVKRIGRARFVRNVAYAIGNSGDPALAEPARHLAADADPVVAEAGRWALRRLATVS

SEQ ID NO: 77256 - protein, 332 aa, unidentified
  source 1..332: note = Hathewaya histolytica
  REGION 1..332: note = tr|A0A4V6KET7|A0A4V6KET7_HATHI Iron-sulfur cluster-binding protein OS=Hathewaya histolytica OX=1498; GN = queG PE=4 SV=1
MELKDKIKKFCNSLGLNNIGFIECKRFDDLEKFLKYKKEKGILNEFEEEDIEKRIDPKLLMKEGKTIISIAFPYFYEDVKKDLIYFSKYTLGMDYHIIVKEYLNKIGEYIVELGGNYKCFVDNNPLPERYIAMKSGVGFIGKNNCLITEEYGSYIFLGEIITDLYIEEDKPIKNKCGECNKCTKACPTKAILNWDTKNNASGINNNSNVCLSYINQKKQLEDVWIKKIGGRIWGCDTCQDVCPFNQNIKKSNLEAFKPIEYMKKPNLEELSTLDKRTFNEKYKSIACSWRGKNILTRNTFIALKNIKKEIPHIDKFNSPYVEEYYNKIKNLK

SEQ ID NO: 77257 - protein, 333 aa, unidentified
  source 1..333: note = Hathewaya proteolytica
  REGION 1..333: note = tr|A0A1M6RNG5|A0A1M6RNG5_9CLOT Epoxyqueuosine reductase OS=Hathewaya proteolytica DSM 3090 OX=1121331; GN = SAMN02745248_02338 PE=4 SV=1
MVYKDLIKEFCKSHGLDIVRFLPCQSCNDVENYFQYRKENGLINEFEEKDIIVRSNANYSMENAKTIISIAFPYRYKIDKSSNKFCVSKYTLGEDYHKVVKKYLTCISDFIKVKLGGDAKVFVDSNSLPERYIAMKCGVGFIGKNNCIITEKYGSYVFLGEILTDLDIEGDKPIENLCGACRNCIEACPTKAINGSENNKDNNSNICISYTSQKKDLESFWFPYLKNSLWGCDICQDVCPFNEKAHYSNIVEFSPKPYMLDLNIENIISMNNEEFNRNYRNLACGWRGKNLIIRNAIICEKNVYGVVKNRNNIASPYVKSYYDRLLKGKKFII

SEQ ID NO: 77258 - protein, 382 aa, unidentified
  source 1..382: note = Hazenella coriacea
  REGION 1..382: note = tr|A0A4R3L9R4|A0A4R3L9R4_9BACL Epoxyqueuosine reductase OS=Hazenella coriacea OX=1179467 GN=EDD58_101473; PE = 4 SV=1
MQLIELKNKIITKAKELGIDKIGFASADPFIELRERLIESQEKGYASGFEEPDIEKRVQPSLSLPEAKTIIAIALAYPSKLKNPPRSEAGAYRGIFCRASWGQDYHHVLRQKLHALETAIHQWVPDVRTQVMVDTGALSDRAVAERAGIGFTGKNTSLITDEFGSWVYLGEMILDVYIPPDEPVTESCGECTRCMDACPTGALVQPGQLNAQACIAYLTQTKGFLAEIYREKLGNRLYGCDTCQTVCPKNRRLHFDHHVEFTPDPERVKPLLKPLLSMSNREFKEHFGEMSGSWRGKKPIQRNAIIALAHFKDQSAIPDLVSLLQQDVRPVIRGTAAWALGKIGGDDAKEALRKALEKETKQEVIQEIHHAFELIEESTVKP

SEQ ID NO: 77259 - protein, 376 aa, unidentified
  source 1..376: note = Henriciella algicola
  REGION 1..376: note = tr|A0A399RN58|A0A399RN58_9RHOB Epoxyqueuosine reductase OS=Henriciella algicola OX=1608422 GN=queG PE=3; SV = 1
MAGAATTLEAWLKDEALALGFSDCRICRADEDWPVGDRLAEWVEDGRHGDMAWMEATLERRKHPTNMWENARSGIMLSVNYGPETDPMKALEQTSNGNISVYARGGDYHDLIKKRLKQLARAFVEKAGAEVKVFVDTAPLMEKPLAARAGLGWQGKHTNLLSREFGNWLFLGSILTDADLTPDAPEADHCGSCRSCIDVCPTQAITAPYQLDARRCISYLTIENAGHIPVEFRAAMGNRIYGCDDCLAICPWNKFASRSAETKLWARPELKLPELSDLAALDDAAFREVFSGSPIKRIGRNRMLRNVLIAIGNSNDAALVEPSVIPHLDDEAAIVRGAAIWALACLDTARFAAEKAAREATEMDEEVSAEWQKTPA

SEQ ID NO: 77260 - protein, 376 aa, unidentified
  source 1..376: note = Henriciella barbarensis
  REGION 1..376: note = tr|A0A399R499|A0A399R499_9RHOB Epoxyqueuosine reductase OS=Henriciella barbarensis OX=86342 GN=queG PE=3; SV = 1
MADAAETLEAWLKEAALELGFSDCRICRADEAWPVGERLAEWVEEGRHGDMAWMEATLERRKHPTNMWENARSAIMLAVNYGPETDPLEALEQTSHGNISVYARGGDYHDLIKKRLKQLARAFVEKAGAEVKVFVDTAPLMEKPLAARAGLGWQGKHTNLLSREFGNWLFLGSILTDAELTPDAPEADHCGSCTSCIEICPTQAITAPYQLDARRCISYLTIENAGHIPVEFRAAMGNRIYGCDDCLAICPWNKFASRSAETKLWARPELKLPELSDLAALDDAAFREVFSGSPIKRIGRNRMLRNVLIAIANSGDASLVEPSVIPHLDDEAAIVRGAAIWALACLDTARFAVEKAARKATETDEEVSAEWQKTPA

SEQ ID NO: 77261 - protein, 376 aa, Henriciella sp.
  REGION 1..376: note = tr|A0A2G2HTF7|A0A2G2HTF7_9RHOB Epoxyqueuosine reductase OS=Henriciella sp. OX=1968823 GN=queG PE=3 SV=1
MTQETGTLEARLKRDALALGFADCAICRADEPWQAGERLEAFVEEGRHGEMDWMEATLKRRKTPQAMWEGARSAIMLAVNYGPDTNPLETLEHKTLGNISVYARGGDYHDLIKKRLKQLARAFAEESGAEVKVFVDTAPLMEKPLAAKAGLGWQGKHTNLLSRTFGNWLFLGAILTDAELTPDEAETDHCGSCTACLDVCPTKAFPAPYQLDARRCISYLTIEYPGHIPHEFRAAMGNRIYGCDDCLAICPWNKFASRSAEQKLWARAELKLPELSDLAALDDASFREVFAGSPVKRTGRNRMLRNVLIAIGNSGEPSLVDQSVIPHLGDEAAIVRAAAIWALGRLDKTRFAAEKADRLELEHDEDVRGEWQAVNQ

SEQ ID NO: 77262 - protein, 376 aa, Henriciella sp.
  REGION 1..376: note = tr|A0A399RHJ3|A0A399RHJ3_9RHOB Epoxyqueuosine reductase OS=Henriciella sp. JN25 OX=2305466 GN=queG PE=3; SV = 1
MSTSDNSPEARLKQMAADIGFADCRICRADEPWAAGARLETFVAQGRHGGMDWMETTLERRKAPTAMWPEAKSAIMLAMNYGPPASPLPLLEMREHGNISVYARGADYHELIKKKLKQLARVFAEETGEAVKVFVDTAPLMEKPLAEKAGLGWQGKHTNLVSREHGSWLFLGAILTAAALEPDAPEADHCGSCTACLDICPTDAFPAPYQLDARRCISYLTIEHAGPIPAEFREPMGNRIYGCDDCLAVCPWNKFAHTSAEQKLWARAELKLPELEELAALDDAAFREVFSGSPVKRTGRNRMLRNVLIAIGNSGQPDLVDGSVVPHLDDDEPIVRGAAVWALSRLDMARFESERAQREASETDPGVKAEWALTPL

SEQ ID NO: 77263 - protein, 380 aa, unidentified
  source 1..380: note = Hephaestia caeni
  REGION 1..380: note = tr|A0A397NSL9|A0A397NSL9_9SPHN Epoxyqueuosine reductase OS=Hephaestia caeni OX=645617 GN=queG PE=3 SV=1
MSQDNPFESRLKEHARAEGFVACGIARADAAPAAGERLRQWLDDGRHGDMIWMEERAHHRAAPEGLWPEVRSVIALGMSYAPATDPLALAGAPDIGRISVYAQGGDYHDLIKRKLKALARWMVAEAPGTDLKVFVDTAPVMEKPLSEAAGLGWQGKHTNLVSREHGSWLFLGAIYTTLALTPDAPGHDTCGSCDACQRACPTDAFPAPYQLDARRCISYLTIELKGPIPPEFRENIGNRIYGCDDCLAVCPWNKFAAAAHANLAFAPRAELTAPRLADLLALDDAAFRQVFAGSPIKRIGRDRMVRNALIAAGNSGDAAFVARIAALLDDDAPVVRGAAVWALARLDRARSLTERAAHAAETDPDVIAEWAAISPDRAFP

SEQ ID NO: 77264 - protein, 394 aa, Herbaspirillum aquaticum
  REGION 1..394: note = tr|A0A225SZL3|A0A225SZL3_9BURK Epoxyqueuosine reductase OS=Herbaspirillum aquaticum OX=568783 GN=queG; PE = 3 SV=1
MSIHPTPADPAGSTAIADPAGLAALAAAIKAWGRELGFAEVRIADVDLSHREAGFQAWLDKGYHGEMDYMASHGLKRARPAELVPGTVRVVSVRMPYLPAAADPDQPDQPDWRAREEARSADPAAAQVSIYARGRDYHKVLRARLQQLATRIEGRIGAFGYRVFTDSAPVMEVALAEKAGLGWRGKHTLLLHREAGSMFFLGEMLTDLPLPVDEPVSSHCGQCSACITACPTGAIVAPYELDARRCISYLTIELKGSIPEDLRPLIGNRIYGCDDCQLYCPWNKFAQRASLPDFDPRHGLDSASLVELFGWSEEVFLKNTEGSAIRRIGHERWLRNLAVGLGNAADTPSHRGDAAIVAALRGRLDHPSALVAEHVAWALARHGVHGVAGADGVE

SEQ ID NO: 77265 - protein, 357 aa, Herbaspirillum hiltneri
  REGION 1..357: note = tr|A0A561JV08|A0A561JV08_9BURK Epoxyqueuosine reductase OS=Herbaspirillum hiltneri OX=341045 GN=queG; PE = 3 SV=1
MTDLVALADTIKAWGRDLGFADLRIADVDLSHREAGFQAWLDKGYHGEMDYMASHGMKRVRPAELVPGTVRVITVRMPYLPRATAPGWREREEGRGADGSAAVVSLYARGRDYHKVLRARLQQLAGRIEKEIGAFGYRVFTDSAPVMEVALAEKSGLGWRGKHTLLLNREAGSMFFLGELFTDLALPVDAPVTPHCGQCSSCIDVCPTQAIVAPYELDARRCISYLTIELKGSIPVELRNLIGNRVYGCDDCQLYCPWNKFAQTSTLPDFDARHGLGSASLIELLNWSEDDFNRNTEGSAIRRIGHERWLRNMAVGLGNAAATHKGDAEIVSALQARLDHPSGLVREHVAWALAQHS

SEQ ID NO: 77266 - protein, 394 aa, Herbaspirillum huttiense
  REGION 1..394: note = tr|A0A561K9J2|A0A561K9J2_9BURK Epoxyqueuosine reductase OS=Herbaspirillum huttiense OX=863372 GN=queG; PE = 3 SV=1
MSIHPTPADPAGSTAIADPAGLAALAAAIKAWGRELGFAEVRIADVDLSHREAGFQAWLDKGYHGEMDYMASHGLKRARPAELVPGTVRVVSVRMPYLPPAADPDQPDQPDWRAREEARSADPAAAQVSIYARGRDYHKVLRARLQQLATRIEGRIGPFGYRVFTDSAPVMEVALAEKAGLGWRGKHTLLLHREAGSMFFLGEMLTDLPLPVDEPVSSHCGQCSACITACPTGAIVAPYELDARRCISYLTIELKGSIPEDLRPLIGNRIYGCDDCQLYCPWNKFAQRASLPDFDPRHGLDRASLVDLFGWSEEVFLKNTEGSAIRRIGHERWLRNLAVGLGNAADVPSHRGDAAIVAALQARLDHPSALVAEHVAWALARHGVHGVAPADGVE

SEQ ID NO: 77267 - protein, 394 aa, Herbaspirillum huttiense
  REGION 1..394: note = tr|A0A4R8KIA2|A0A4R8KIA2_9BURK Epoxyqueuosine reductase OS=Herbaspirillum huttiense OX=863372 GN=queG; PE = 3 SV=1
MSIHPTPADPIGSTAIADPAGLAALAAAIKAWGRELGFAEVRIADVDLSHREAGFQAWLDKGYHGEMDYMASHGLKRARPAELVPGTVRVVSVRMPYLPPAADPDQPEQPDWRAREEARSADPAAAQVSIYARGRDYHKVLRARLQQLATRIEGRIGPFGYRVFTDSAPVMEVALAEKAGLGWRGKHTLLLHREAGSMFFLGEMLTDLPLPVDEPVTSHCGQCSACITACPTGAIVAPYELDARRCISYLTIELKGSIPQDLRPLIGNRIYGCDDCQLYCPWNKFAQRASLPDFDPRHGLDRASLIELFGWSEEVFLKNTEGSAIRRIGHERWLRNLAVGLGNAADAPSHRGDAEIVAALRARLDHPSALVAEHVAWALARHGVHGVAGADGVE

SEQ ID NO: 77268 - protein, 370 aa, unidentified
  source 1..370: note = Herbaspirillum robiniae
  REGION 1..370: note = tr|A0A246WUX1|A0A246WUX1_9BURK Epoxyqueuosine reductase OS=Herbaspirillum robiniae OX=2014887 GN=queG; PE = 3 SV=1
MTASVDPVDLSALAAAIKAWGKDLGFAEVRIADVDLSHREAGFQAWLDKGYHGEMDYMASHGMKRARPAELVPGTVRVVSVRMPYLPAPGDGQQADWRAREEARSADPAAAQVSVYARGRDYHKVLRSRLQQLAIRIEGQIGAFGYRVFTDSAPVMEVALAEKAGLGWKGKHTLLLHREAGSMFFLGEMLTDLPLPVDEPVTPHCGQCRSCIDVCPTQAIVAPYELDARRCISYLTIELKGSIPEELRPLIGNRIYGCDDCQLYCPWNKFAQRAALADFDVRNGLDDSSLVRLFGWSEEEFLTNTEGSAIRRIGHERWLRNLAVGLGNAAQSQAHRGDAGMVAALRARQAHPSALVREHVAWALEKHGVK

SEQ ID NO: 77269 - protein, 376 aa, Herbaspirillum rubrisubalbicans
  REGION 1..376: note = tr|A0A328J213|A0A328J213_9BURK Epoxyqueuosine reductase OS=Herbaspirillum rubrisubalbicans OX=80842; GN = queG PE=3 SV=1
MSAHTVPVDLADPAFLAALAATIKAWGRELGFAEVRIADVDLAHREAGFQAWLDKGYHGEMDYMASHGLKRARPAELVPGAVRVVSVRMPYLPAASDADTHDWRSREEARSADPAAAQVSIYARGRDYHKVLRARLQQLASRIEGRIGAFGYRVFTDSAPVMEVALAEKAGLGWRGKHTLLLHREAGSMFFLGEMLTDLPLPVDAPVTSHCGQCSACITACPTGAIVAPYELDARRCISYLTIELKGSIPQELRPLIGNRIYGCDDCQLYCPWNKFAQRASLPDFDPRHGLDSASLVDLFGWSEEQFLKNTEGSAIRRIGHERWLRNLAVGLGNAADAPDYRGDAAIVAALRARLDHPSPLVVEHVRWALARHGIA

SEQ ID NO: 77270 - protein, 376 aa, Herbaspirillum rubrisubalbicans
  REGION 1..376: note = tr|A0A0U3AN61|A0A0U3AN61_9BURK Epoxyqueuosine reductase OS=Herbaspirillum rubrisubalbicans M1 OX=1078773; GN = fdx PE=3 SV=1
MSAHTVPVDLADPAFLAALAATIKAWGRELGFAEVRIADVDLAHREAGFQAWLDKGYHGEMDYMASHGLKRVRPAELVPGTVRVVSVRMPYLPAASQVDAPDWRSREEARSADPAAAQVSIYARGRDYHKVLRARLQQLATRIEGRIGTFGYRVFTDSAPVMEVALAEKAGLGWRGKHTLLLHREAGSMFFLGEMLTDLPLPVDAPVSSHCGQCSACITACPTGAIVAPYELDARRCISYLTIELKGSIPQDLRPLIGNRIYGCDDCQLYCPWNKFAQRASLPDFDPRHGLDSASLVELFDWSEDQFLKNTEGSAIRRIGHERWLRNLAVGLGNAADASDYRGDVAIVAALRARLDHPSSLVVEHVRWALARHGIA

SEQ ID NO: 77271 - protein, 394 aa, Herbaspirillum seropedicae
  REGION 1..394: note = tr|A0A4R8NNJ9|A0A4R8NNJ9_HERSE Epoxyqueuosine reductase OS=Herbaspirillum seropedicae OX=964 GN=queG; PE = 3 SV=1
MSIHPTPADPIGSTAIADPAGLAALAAAIKAWGRELGFAEVRIADVDLSHREAGFQAWLDKGYHGEMDYMASHGLKRARPAELVPGTVRVVSVRMPYLPAAADPDQPEQPDWRAREEARSADPAAAQVSIYARGRDYHKVLRARLQQLATRIEGRIGPFGYRVFTDSAPVMEVALAEKAGLGWRGKHTLLLHREAGSMFFLGEMLTDLPLPVDEPVTSHCGQCSACITACPTGAIVAPYELDARRCISYLTIELKGSIPQDLRPLIGNRIYGCDDCQLYCPWNKFAQRASLPDFDPRHGLDRASLVELFGWSEEVFLKNTEGSAIRRIGHERWLRNLAVGLGNAADAPSHRGDAEIVAALRARLDHPSALVAEHVAWALARHGVHGVAGADGVE

SEQ ID NO: 77272 - protein, 347 aa, Herbaspirillum seropedicae
  REGION 1..347: note = tr|D8J021|D8J021_HERSS Epoxyqueuosine reductase; OS = Herbaspirillum seropedicae (strain SmR1) OX=757424; GN = fdx PE=3 SV=1
MGFADVRIADVDLSHREAGFQAWLDKGYHGEMDYMASHGLKRARPAELVPGTVRVVSVRMPYLPKASGPAEPDWRAREEARSADPGGAQVSIYARGRDYHKVLRARLQQLATRIEGRIGPFGYRVFTDSAPVMEVALAEKAGLGWRGKHTLLLHREAGSMFFLGEMLTDLPLPVDDPVTPHCGQCSACITACPTGAIVAPYELDARRCISYLTIELKGSIPSELRPLIGNRIYGCDDCQLYCPWNKFAQRASLPDFDVRHGLDSASLVGLFGWSEEEFLKNTEGSAIRRIGHERWLRNLAVGLGNAADAASHRGDAAIVAALRARLAHPSALVVEHVQWALARHGVS

SEQ ID NO: 77273 - protein, 379 aa, Herbaspirillum sp.
  REGION 1..379: note = tr|A0A2E7P156|A0A2E7P156_9BURK Epoxyqueuosine reductase OS=Herbaspirillum sp. OX=1890675 GN=queG PE=3; SV = 1
MADPAGLAALAAAIKAWGRELGFAEVRIADVDLSHREAGFQAWLDKGYHGEMDYMASHGLKRARPAELVPGTVRVVSVRMPYLPAAADPDQPEQPDWRAREEARSADPAAAQVSIYARGRDYHKVLRARLQQLATRIEGRIGPFGYRVFTDSAPVMEVALAEKAGLGWRGKHTLLLHREAGSMFFLGEMLTDLPLPVDDPVTSHCGQCSACITACPTGAIVAPHELDARRCISYLTIELKGSIPQDLRPLIGNRIYGCDDCQLYCPWNKFAQRASLPDFDPRHGLDRASLVELFGWSEEVFLKNTEGSAIRRIGHERWLRNLAVGLGNAADAPSHRGDAEIVAALRARLDHPSALVAEHVAWALARHGVHGVAGADGVE

SEQ ID NO: 77274 - protein, 360 aa, Herbaspirillum sp.
  REGION 1..360: note = tr|J3HL43|J3HL43_9BURK Epoxyqueuosine reductase; OS = Herbaspirillum sp. YR522 OX=1144342 GN=queG PE=3 SV=1
MTDLAALAVDIKAWGQELGFAELRIADVDLSHREAGFQAWLDRGYHGEMDYMASHGMKRARPAELVPGTVRVITARMPYLPAASGDDWRARESARSADARMAQVSLYARGRDYHKVLRARLQQLASRIEARTGPFGYRVFTDSAPVMEVALAEKAGLGWRGKHTLLLHREAGSMFFLGEILTDLPLPVDAPVTPRCGQCTSCIEVCPTQAIVAPYELDARRCISYLTIELKGSIPPELRPLIGNRIYGCDDCQLYCPWNKFAQRSTLADFDARHGLDSASLLELFAWSEEQFLNNTEGSAIRRIGHERWLRNLAVGLGNAADDPAIRGSAPIVAALQDAGAHPSEMVREHAAWALARHQD

SEQ ID NO: 77275 - protein, 297 aa, unidentified
  source 1..297: note = Herbinix hemicellulosilytica
  REGION 1..297: note = tr|A0A3R9Q4J8|A0A3R9Q4J8_HERHM Epoxyqueuosine reductase OS=Herbinix hemicellulosilytica OX=1564487; GN = BJW19_1811 PE=4 SV=1
MKEKLIAFCKSINIECVGIAPAEPFHDFEQIWKRQIERGYVSGFEETDINKRVHPELSLKGAKSFIVCLFPYYSGQASDANLSKSAYSRDYHIIVKDKLELIGKYLESNIKGFEYKAYVDTGPFSDRYLAYRAGLGFFGINNNLINDRYGSYFFIGSLLNNYPFEADKPQNKTCLQCFACVNNCPGQCILGDFTINPLKCRSYISQKKKDLSAEDEEILKKQPLIYGCDVCQDVCPHNRDVKKTIIEEFTQDLIYRLDYEDLKQMSNKEFMKKYNDRAFAWRGKSVLIRNHNIINDS

SEQ ID NO: 77276 - protein, 383 aa, Herpetosiphon aurantiacus
  REGION 1..383: note = tr|A9B4V7|A9B4V7_HERA2 Uncharacterized protein; OS = Herpetosiphon aurantiacus (strain ATCC 23779 / DSM 785 / 114-95) OX=316274 GN=Haur_3042 PE=4 SV=1
MTNNLAEAVRAQAAQLGFNLVGITPAKPSPTLAAYQAWVEAGMYGEMGYLARPDRQARRQDLNVIVPNVRSLIIVALDYRTQPIPASLLNDPSRGRIAAYAWGIDYHDLMTPRLQELANWLQAQIAEPVQQRVYVDTGAILERSHAQQAGLGFIGKNTMLISPRRGSFFFLGEILTTYEFADYDQPAPPTMCGSCSRCLQACPTKAFPKPHVLDARRCISYLTIEYKGSIARELRPQMANWIVGCDVCQDVCPWQRFGVQSQESAFFPIDHDRAAPPLASLLTLDPAGFGERYGEAAISRLKRDRLVRNACVAAGNWRDPAILPLLAPLLHDASSLVREHAAWAIGRNFDDSSVMLLQQALQTETEPSVRNELQQSLHERSAC

SEQ ID NO: 77277 - protein, 380 aa, Herpetosiphon geysericola
  REGION 1..380: note = tr|A0A0P6YZB8|A0A0P6YZB8_9CHLR Uncharacterized protein OS=Herpetosiphon geysericola OX=70996; GN = SE18_05665 PE=4 SV=1
MTINLAAAVRAQAASLGFNLVGITPARPSPTLAAYQQWVEAGMYGEMGYLARPDRQARRQDLNVIVPNVRSLIIVALDYRTLPIPASLLNDPSRGRIAAYAWGIDYHDLMTPRLQELANWLQAQIPDPVQQRVYVDTGAILERSHAQQAGLGFIGKNTMLISPRRGSFFFLGEILTSYEFTDYDQPAPTTMCGSCSRCLRACPTQAFPKPHVLDARRCISYLTIEYKGSIPRELRPQMANWIVGCDVCQDVCPWQRFGVQSQEAAFFPIDHDRAAPRLASLLTLDAASFSERYGEAAISRLKRDRLVRNACIAAGNWRDPGILPLLAPLLHDASGLVREHAAWAIGRNFDDSAITLLQQALQTESEPSVRSELLQSLHER

SEQ ID NO: 77278 - protein, 363 aa, unidentified
  source 1..363: note = Histidinibacterium lentulum
  REGION 1..363: note = tr|A0A3N2R6J2|A0A3N2R6J2_9RHOB Epoxyqueuosine reductase OS=Histidinibacterium lentulum OX=2480588; GN = queG PE=3 SV=1
MGDLKERLRERALAEGFSAMGVCRPDAIPEAAGRLRAFVEAGRHGQMGWMAERMGWRGDPAALWPEARSVVMLAEVYTPGHDPMAVLDRPERGAVSVYAHGRDYHDLVKKRLKRVGRWLLEEAGSGSGPGERVRLSAKPEVSPEIKVFVDTAPVMEKPLAQAAGLGWQGKHTNLLSRDLGNWFFLGAIFTTIALEPDAPEEEHCGSCRRCLDICPTDAFPAPFQLDARRCISYLTIEHEGPVDAALRPGIGNRIYGCDDCLAVCPWNKFAREARETRYLGDPEPPLLADLAALDDAAFRARYAGSAIKRIGIRRFLRNVLYAIGNSGEVGLAPAAAAHLDHEDATVRDAARWALGRLGNRGGD

SEQ ID NO: 77279 - protein, 344 aa, unidentified
  source 1..344: note = Histidinibacterium sp.
  REGION 1..344: note = tr|A0A5J5GHE5|A0A5J5GHE5_9RHOB tRNA epoxyqueuosine(34) reductase QueG OS=Histidinibacterium sp. 176SS1-4 OX=2613962 GN=queG PE=4 SV=1
MESLKERLRQAALDAGFTKMGVCRPDAIPDAAGRLDRFLEEGRHGQMAWMEARKHWRGDPATLWPEARSVVMLAEAYTPEHDPLEVLDEADRGAISVYAQGRDYHDVVKKRLKRVGRWLLEQEPEHEIKVFVDTAPVMEKPLAEAAGLGWQGKHTNLLGRDLGNWIFLGAIFTTVELEPDARETEHCGSCTRCLDICPTEAFPAPFQLDARRCISYLTIEHDGPVPEELRGKMGNRIYGCDDCLAICPWNKFAQEASDMRYLRTEGPPPLAELAELDDASFRRRFSGSPIKRIGVNRFLRNVLYAIGNSGDPSLLPSAEGLMGSEDATVAEAAAWAAARLRNRP

SEQ ID NO: 77280 - protein, 411 aa, unidentified
  source 1..411: note = Hoeflea halophila
  REGION 1..411: note = tr|A0A286IAF3|A0A286IAF3_9RHIZ Epoxyqueuosine reductase OS=Hoeflea halophila OX=714899 GN=queG PE=3 SV=1
MTGASHTRSVPPAEANPVRTVQQGKRLRAFLAAEAERLGFCACAVAPAVAEPILRQRLSEFVSLGRHGSMEWLPETLGRRADPQVLWPEARSVVVLAMNYGPDDDPLENHARKDRATISVYARNRDYHDVIKGKMKELAAKFASRAGGDVKVFVDTAPVMEKPLAQAAGLGWIGKHTNLVSRSHGSWIFLSSIFTTVDLGIDKAEIDHCGSCRACLDACPTNAFPAPYQIDARRCISYLTIENKGPIPLEFRKPIGNRVYGCDDCLAVCPWNKYAKSANEAKLIAREDLRSPPLADFLAMDDAAFRAFFSGSPVKRIGRDRFLRNVLIAAGNSADQTLVPACEVLLQDASPLVRGAAIWALSQLAEPGHMQQLSGSLGDEPDDQVKAEWQLALTGSGTPEPAKQDNTGLTR

SEQ ID NO: 77281 - protein, 376 aa, Hoeflea marina
  REGION 1..376: note = tr|A0A317PN40|A0A317PN40_9RHIZ Epoxyqueuosine reductase OS=Hoeflea marina OX=274592 GN=DFR52_103674 PE=4; SV = 1
MRAILAAEAEALGFVAFGVAAPDALGAAAQRLRSFVELGRHGSMTWMAETLDRRADPQTLWPEVRSVIMLAMNYGPDIDPRATLEQRDRATISVYARNRDYHDVVKGRLKQLAGRLASLGAAGVKVFVDTAPVMEKPLAALAGLGWQGKHTNLVSRQHGSWLFLGAIFTTAELEPDVAETDHCGSCRACLDVCPTDAFPAPYQIDGRRCISYLTIESKAPIPVEFRKPIGNRIYGCDDCLAACPWNKFATAASEARLSARHDLMAPPLQSFLALDDAGFRAVFSGSPVKRIGRDRFLRNVLIAAGNSGSRALLAPCEALLADPSPLVRGAAVWAVSMLADVRRLAALATEHAGESDLTVSDEWRLACAPAIAKEPE

SEQ ID NO: 77282 - protein, 397 aa, unidentified
  source 1..397: note = Hoeflea olei
  REGION 1..397: note = tr|A0A1C1YRM9|A0A1C1YRM9_9RHIZ Epoxyqueuosine reductase OS=Hoeflea olei OX=1480615 GN=queG PE=3 SV=1
MAGSRPDPTAAGRGTDRLKSFLAGEARALGFSALSVAAPDTDPLLRSRLEQFVALGRHGSMGWIAETSDRRSDPRTLWPEVRSVIMLAMNYGPETDPRAGLACRSNANVSVYARNRDYHDVIKGRLKELAGKFAARAGGDVKVFVDTAPVMEKPLAQAAGLGWIGKHTNLVSRDHGSWLFLGSIFTTVELEPDAQKTDHCGSCSACLASCPTEAFPAPYQIDARRCISYLTIENKGPIPQEFRRAIGNRVYGCDDCLAACPWNKYAVKASEAKLIARPDLQAPPLAQFLAMDDAGFRAFFSGSPVKRIGRDRFLRNVLVAAGNSGDAALVPACRDLIADASPLVRGAAVWALSNLTGLAYMSGLARQAEDETDGSVREEWRLALASGGDRTDGTRPT

SEQ ID NO: 77283 - protein, 403 aa, Hoeflea phototrophica
  REGION 1..403: note = tr|A9CV86|A9CV86_HOEPD Epoxyqueuosine reductase; OS = Hoeflea phototrophica (strain DSM 17068 / NCIMB 14078 / DFL-43) OX=411684 GN=queG PE=3 SV=1
MASDGSPAQDSEGRSARTDAADHLKSFLKKEAAALGFSDLAIAPSDIGAEASDRLARFVELGRHGSMEWLADTRDRRANPKSLWPEVRSVIMLAMNYGPATSPLEGLAQKSRASISVYARNRDYHDIIKGRLKQLAGKFAARAGGDVKVFVDTAPVMEKPLAEAAGLGWIGKHTNLVSRSHGSWLFLGSIFTTVELMPDVAETDHCGSCRACLSACPTDAFPAPYQIDARRCISYLTIENKGPIPHEFRAPMGNRIYGCDDCLAVCPWNKYAQSASEMKLIAREDLQSPRLAEFLALDDAGFRAFFSGSPIKRIGRNRFLRNVLVAAGNSGDQTLVPACETLLSDPSPLVRGASVWALSQLTLPTRMRELAQSRIGVQDGVVLGETDPEVRAEWDLALNRPNA

SEQ ID NO: 77284 - protein, 427 aa, Hoeflea sp.
  REGION 1..427: note = tr|A0A2E2X9L6|A0A2E2X9L6_9RHIZ Epoxyqueuosine reductase OS=Hoeflea sp. OX=1940281 GN=queG PE=3 SV=1
MVPAHQVAPRLPSAAVRSRPRAGARRPLRGSRFLAVGAEADIPARPRTIDPARLNTFLAAEAARLGFSAHGVADPARLTQTGSRLREFLALGRHGSMAWLEDRADERSNPQNLWPEARSVVMLAMNYGPDSDPLELLERKDRAAISVYARNRDYHDIIKGRLKEFAGRLVARFGGDVKVFVDTAPVMEKPLAALAGLGWQGKHTNLVSRDSGSWLFLGAIFSTLDLPADTPEQDHCGSCRACLDICPTNAFPAAYQLDARRCISYLTIEAKEQVRREFREAMGNRIYGCDDCLAVCPWNKFAEKTSEAKLTARHDLQAPPLAELLALDDAAFRSFFSGSPIKRIGRDRFIRNVLIAAGNSGDHALVEPVRAHLADPALLVRGMAVWALSRLLPQAEFATLANAAVGETDPEVVAEWRAGLEYTGLSR

SEQ ID NO: 77285 - protein, 390 aa, Hoeflea sp.
  REGION 1..390: note = tr|A0A0F7PRZ3|A0A0F7PRZ3_9RHIZ Epoxyqueuosine reductase OS=Hoeflea sp. IMCC20628 OX=1620421 GN=queG PE=3; SV = 1
MTGSGPESSMVITDARAARLKTFLRDEARALGFCDLAVTGADADPQLRERLDHFVDLDRHGSMAWIAETVERRSAPRNLWPEARSVIMLAMNYGPESEPLANLERKSSANISVYARNRDYHDLIKGKLKELAGKFASRSGGDVKVFVDTAPVMEKPLAQSAGLGWIGKHTNLVSRTQGSWLFLASIFTTVELPVDDGETDHCGSCRACLDACPTNAFPAPYQIDARRCISYLTIENKGPVPHEFRRAIGNRIYGCDDCLAACPWNKYAVASHEAKLMARNDLLSPPLGDFLKLDDATFRTFFSGSPVKRIGRDRFLRNVLIAAGNSEDQSLVPDCEVLLGDASGLVRGAAVWALSQLTGSDYMQGLQAQAGTETDDDVRAEWRIALTPDP

SEQ ID NO: 77286 - protein, 237 aa, unidentified
  source 1..237: note = Holophagaceae bacterium
  REGION 1..237: note = tr|A0A3D6EIT0|A0A3D6EIT0_9BACT Uncharacterized protein OS=Holophagaceae bacterium OX=2052165; GN = DHV93_04585 PE=4 SV=1
  VARIANT 40: note = Xaa can be any naturally occurring amino acid
  VARIANT 96: note = Xaa can be any naturally occurring amino acid
MNTWIHWRSRPGFAPRPFPPASPPRDSPPAAPSRQRQVAXPGAVPGSLKLSRYLWGPDYHMILKPRLARLLEAAQARWPGLEGRVCVDTAPLLERXLLLSLDLPPDEPFGVQQCGSCTACLEACPSAALEPFRLDPARCLTTYTIETEAEPPPDVAAALADSRWAAGCDACQEACPWNRAPVWGDPALWGGPSPLHVRRAEDLPRGAAQWRKLTRRTALRRVRDRHWRATLTRILGP

SEQ ID NO: 77287 - protein, 351 aa, unidentified
  source 1..351: note = Hormoscilla sp.
  REGION 1..351: note = tr|A0A533NB14|A0A533NB14_9CYAN Epoxyqueuosine reductase OS=Hormoscilla sp. GUM007 OX=2480854 GN=queG; PE = 3 SV=1
MDVSLSSSQVKQKALELGFHKVGIAAVDANIVSKSVERLQVWLGNGYQANMEWMANPKRQDIRQVMPSVQSIITVALNYYTAHQRPEGSQYGKISRYGWGRDYHRVMDKKLKLLANWLRSARGLSFPEHPPMLCAGCDTTGWVLPETTEKSHSCGVEVRYYADTGPVQDKVWAQAAGIGWIAKNGNVITREYGSWVFLGEVLTNIVLTPDGPHTEHCGTCTRCIDACPTGAIAQPFVVDANRCIAYHTIENRVSSLPEEIAGDLEGWVAGCDICQDVCPWNQRFASITDITEFNPYPENVAPKLSELAKISDAEWNRRFRASALRRIKPEMLRRNARANLEADKASAELDK

SEQ ID NO: 77288 - protein, 325 aa, unidentified
  source 1..325: note = Hormoscilla sp.
  REGION 1..325: note = tr|A0A533P1N1|A0A533P1N1_9CYAN Epoxyqueuosine reductase OS=Hormoscilla sp. GUM202 OX=2480853 GN=queG; PE = 3 SV=1
MDVSLSSSQVKQKALELGFHKVGIAAVDANIVSKSVERLQVWLGNGYQANMEWMANPKRQDIRQVMPSVQSIITVALNYYTAPKRPDFSGTVGSQYGKISRYGWGRDYHRVMDKKLKLLANWLRSHSCGVEVRYYADTGPVQDKVWAQAAGIGWIAKNGNVITREYGSWVFLGELLTNLVLTPDRPHTKHCGTCTRCLDACPTGAIVQPFVVDANRCIAYHTIENRADSLPKAIASHLSGWVAGCDICQDVCPWNQRFAKETDVTEFNPYPENVAPKLSELAEISDAEWNRRFRASALRRIKPEMLRRNARANLEADGTSAELDK

SEQ ID NO: 77289 - protein, 350 aa, unidentified
  source 1..350: note = Humitalea rosea
  REGION 1..350: note = tr|A0A2W7I5I5|A0A2W7I5I5_9PROT Epoxyqueuosine reductase OS=Humitalea rosea OX=990373 GN=queG PE=3 SV=1
MAAADPGGVAAQRDIIRAEAFRLGFDAVGFCRAALGPEVRARMADFLAAGMHGQMGWLEDRAEQRAHPQALWPEAVSVVSLGLNYGPEHDPLEVLQARDRAAISVYAQGRDYHDLLKRRLKALARWMIAAFPQDLKVFVDTAPVAEKPLAQTAGIGWQGKHTNLVSREHGSWLFLGEIFTTLDLGADAAEVDHCGSCSRCLDICPTHAFPAPYRLDARRCISYLTIEHRGPIPEEFRAAMGNRIYGCDDCLAVCPWNKFASAHSEPEFAPRAALTAPKLAEFATLDDAGFRALFSGSPIKRIGRDRFIRNLCIAIGNSDIAALLPQVQSLCEDADPVVAEAARWAVERLR

SEQ ID NO: 77290 - protein, 301 aa, unidentified
  source 1..301: note = Hungateiclostridium clariflavum
  REGION 1..301: note = tr|G8LSV6|G8LSV6_HUNCD Uncharacterized Fe-S protein; OS = Hungateiclostridium clariflavum (strain DSM 19732 / NBRC 101661 / EBR45) OX=720554 GN=Clocl_4033 PE=4 SV=1
MKKQLIEFCRSIGIEYVGIVSSEKYNDLKDFLEIRLEKGFSNIFEKGSIEKAIDPKLALEDAESVIVCLFPYYCGNAEDANLSKYAYGLDYHKIIQNKLDAIGIYLKENILGFEYKVFADNGPLNERYLAYKAGLGFLGINGHFITDRYGSYVFIGYIINNYPFETDKPQNRTCYKCFSCVEKCPGQCIMGDFTINPLMCRSYITQKKGELSEKEIEILKKHTLIWGCDVCQDVCPHNKKIQETKLKEFRQNLKYKLEYEELKQISNKEFLRRYRDRAFSWRGKEVLMRNYKLINGLPADD

SEQ ID NO: 77291 - protein, 227 aa, unidentified
  source 1..227: note = Hungateiclostridium saccincola
  REGION 1..227: note = tr|A0A2K9ERR6|A0A2K9ERR6_9FIRM 4Fe-4S ferredoxin; OS = Hungateiclostridium saccincola OX=1677857 GN=queG PE=4; SV = 1
MEFHKELGNKLIEWGASFVGFSNVEKKLPENLKKLKYAITIGVRLSDFIIEQIEDKPTYTYFHHYRTVNTLIDQITLKGQLFIQDRGYKALGVPASQTVNDVEDAYSGIFPHKTAAVMAGLGWIGKSGLFISNQYGPRVRLGTILTDISVPAVNNIQKPLCGSCKECVVNCPAMAITGALWEEGCERSLIIDAKACSDYMKEKFKHIGRGSVCGICIKVCPKGLNYI

SEQ ID NO: 77292 - protein, 350 aa, unidentified
  source 1..350: note = Hwanghaeella grinnelliae
  REGION 1..350: note = tr|A0A3S2Z7Q0|A0A3S2Z7Q0_9PROT Epoxyqueuosine reductase OS=Hwanghaeella grinnelliae OX=2500179 GN=queG; PE = 3 SV=1
MTNLRQAIEDKAREIGFDAVGFAPVHLAEREGARLKQFVANGENGDMGWMAERLEHRSSPQGLWPEVKSVIVLGTNYGPAHDPLTDLENKDRAVISVYARNRDYHDLVKKRLKQLARWLVETNPQSDKTEVKVFVDTAPVMEKPVAAKTAVGWQGKHTNLVSSKYGSWLFLGEVFTTLDLTPDAPHKDQCGSCTACQDICPTNAFPAPYTLDARRCISYLTIEHKGHIPEEFREAIGNRIYGCDDCLAVCPWNKFAQRTEEHAFLPRAELTAPRLADFLDLDDAGFRALFTASPIKRIGRDRFLRNVLIGIGNSGDASVLPKVVPLLEDESELVRAMAVWAAGKLGSASQ

SEQ ID NO: 77293 - protein, 461 aa, Hwanghaeicola aestuarii
  REGION 1..461: note = tr|A0A2W7NKL7|A0A2W7NKL7_9RHOB Epoxyqueuosine reductase OS=Hwanghaeicola aestuarii OX=568105; GN = LX81_03811 PE=4 SV=1
MEGAVPPGAALKAALAREAQAAGFAKMGVCRPDAIPQAAGRLDAFLAAGRHGQMGWMAERAAWRRDPAALWPAARSVVMLAESYTPDHDPLDDVGLAERGAVSVYAQGRDYHDVVKKRLKRLARWLAGVAEAGGFDGPEGWVAVTPVREASGEAPAGRGMGDMREGEAGSREAPARGPGRRGSGLAVSRPGLDPGPRGDMEPGEEGETGDREALPGETGNRVPLSKTQGASSSAHAAKPAVSPVKVFVDTAPVMEKPLAQAAGLGWQGKHTNLLGRDLGNWIFLGAIFTTFDLPPDRAETEHCGSCRKCLDICPTDAFPAPFELDARRCISYLTIEHRGPVDESLRPGIGNRIYGCDDCLAICPWNKFAVAGRDMRLAPAPGRRAPELAALAGLDDAGFRAAFSGSPIKRIGRDRFVRNVCYAIGNSGRPALGAALGPLVSDPDPGVADAARWAKIRLETG

SEQ ID NO: 77294 - protein, 339 aa, Hyalangium minutum
  REGION 1..339: note = tr|A0A085W5V6|A0A085W5V6_9DELT Epoxyqueuosine (OQ) reductase QueG OS=Hyalangium minutum OX=394096; GN = DB31_3128 PE=4 SV=1
MKLLPTAHLRQLSDAVGFDLVGFARAAPIPPEALTEWIAAGYAADMDWMKERAAERLDVTQLLPGAKTVVVFANNYYRDDAETEGSPIARYARGRDYHSTLRDRMKAFRKAVQGEYPGIGTYGSVDSGPLMEKVWAARAGLGYVGKNGCFITERFGSWVLLATVVLDAEVDAYGDGPAADRCGSCRKCLMSCPTGALVGNGRVNARACLSYQTIENRDHEVPESFRVEMNNLVFGCDICQDVCPLNRRPVFAEHPRFAPRAVAGLGVMELAGLTQEQYATFIPGTALARAQYDGLRRNAVYALGATRQENARLLLEKLSEDDSELVRSAAQWALRQLAQ

SEQ ID NO: 77295 - protein, 310 aa, unidentified
  source 1..310: note = Hydrobacter penzbergensis
  REGION 1..310: note = tr|A0A1H3DPT9|A0A1H3DPT9_9BACT Epoxyqueuosine reductase OS=Hydrobacter penzbergensis OX=1235997 GN=queG; PE = 3 SV=1
MSRIEAYSHTVKSVARQLGFDYCGIAKAEKLNDDARRLEQWLHQGMHGSMQYMENHFDMRTDPSLLVPGARSVITLLKNYYPSQQQSAHTPHISKYAFGKDYHEVIRAQLKELLQALNEKIGEIHGRGFVDSAPVLERSWATKSGAGWIGKNGNLITKHSGSFYFIATLIVDITLDYDDPFAKDYCGSCSRCIDACPTGAIEDNKVINGSKCISYYTIELKDALLPEQMKDQFKDWMFGCDICQDVCPWNRFSKPHHEINFTPIPEILNLSTKQWEEMTEESFKNIFRHSPLKRTKFSGIQRNLRFITRA

SEQ ID NO: 77296 - protein, 346 aa, unidentified
  source 1..346: note = Hydrocarboniclastica marina
  REGION 1..346: note = tr|A0A4P7XLA0|A0A4P7XLA0_9ALTE Epoxyqueuosine reductase OS=Hydrocarboniclastica marina OX=2259620; GN = queG PE=3 SV=1
MADAAKTIKEWAAELGFQGIGITDTELEQDGQHLQHWLDNDYHGDMDWMAKHGTKRFRPAELVTGTCRIISVRMDYAPAPDSPAAVLKNREKAYISRYTLGRDYHKLLRKRLAQLAQRIDEMLQGYDYRAFVDSAPVLERAVARKAGLGWTGKNTMLLNRKAGSFFFLGEIFTSAPLPLDEPYNGSHCGSCSKCLDLCPTDAFVGAGTLDARRCISYLTIENSGPIPLEFRKAMGNRVFGCDDCQLVCPWNRFSKPASEPDFQPRHSLDNSDLASLFRWDEQTFLERTAGSAIRRTGFEGWLRNLAVALGNAPSTIPVLEALRSREEDPSALVREHVQWALAQHEN

SEQ ID NO: 77297 - protein, 360 aa, Hydrocarboniphaga daqingensis
  REGION 1..360: note = tr|A0A1M5Q5N7|A0A1M5Q5N7_9GAMM Epoxyqueuosine reductase OS=Hydrocarboniphaga daqingensis OX=490188; GN = queG PE=3 SV=1
MITATALPAGDALVADLRRWALELGFADLGVAHLDLGADLDHLQRWLARGDHGGMAYMARDPSQRAEPQRLRPGTLSVLSVRMDYRIGELDDARRQLADADGAYIARYALGRDYHRTMRSRLLKLGQRIEAAIGPHGYRVLTDSAPALEKALGRNARLGWIGKNTLLMNRHAGSLFFLGEIYTDLLLPPSAADPVPELCGSCSACLDVCPTQAFTAPYQLDARRCISYLTIEHHGAIPVELRAGIGNRIFGCDDCQLVCPWNRYARLSTEPDFAPRHALDSARLIDLFAWTEAQWLTMTEGMALRRAGYPRWRRNLAIALGNAPYSAAVIDALRAREDDDDDIVREHVSWALQQQQQRAV

SEQ ID NO: 77298 - protein, 358 aa, Hydrocarboniphaga effusa
  REGION 1..358: note = tr|I8HXT1|I8HXT1_9GAMM Epoxyqueuosine reductase; OS = Hydrocarboniphaga effusa AP103 OX=1172194 GN=queG PE=3; SV = 1
MIAAAIPTDFVARIRQWALELGFADAEVAHLQLDEDLAHLQRWVAEGRNGGMAYMGRDPELRADPSKLRPGTLSVISLRMDYKPPGIDPRSVLEDGEAAYIARYALGRDYHRTLRARLLKLGRRIEAEVGPHGYRVLTDSAPAFEKALARNAGLGWIGKNTLVLNAEAGSLFFLGEIYTDLPLPLSTRGDAEDRCGRCSACLKICPTQAFIGPRQLDARRCISYLTIEHHGSIPEELRPLMGNRIFGCDDCQLVCPWNRYARISEEPDFAARNGLDAPKLIELFAWSEHEWLQKTEGMALRRAGYSRWKRNLAIALGNAPRSEAAVTSLRARIDDEDETVREHVRWALDRQLRHAGAS

SEQ ID NO: 77299 - protein, 309 aa, Hydrococcus rivularis
  REGION 1..309: note = tr|A0A1U7H9L7|A0A1U7H9L7_9CYAN Epoxyqueuosine reductase OS=Hydrococcus rivularis NIES-593 OX=1921803; GN = queG PE=3 SV=1
MTLDSLQIKEKALSLGFHQVGIAAIANDPDDSAAARLQAWLALGYHADMAWMANPKRFDIRACMSEVQSVICVALNYYTPHQRPEGKEYGKISRYGWGRDYHKVMHKKLKALSQWLEAQAEGIQTRYYADTGPVQDKVWAQRAGIGWIAKNGNVITREYGSWIFLGEILTNIALKADTPHAEHCGTCTRCLEACPTGAIAKPFIVDANRCIAYHTIENRAEELPTSIASHLSGWIAGCDICQDVCPWNQRFAKETNIADFQPYPWNIGPKLRELAEMSDEEWERRFPASALRRIKPAMLRRNARANLNK

SEQ ID NO: 77300 - protein, 308 aa, Hydrocoleum sp.
  REGION 1..308: note = tr|A0A261KQS0|A0A261KQS0_9CYAN Epoxyqueuosine reductase OS=Hydrocoleum sp. CS-953 OX=1671698 GN=queG; PE = 3 SV=1
MKSPIKSSQIKQKALELGFHKVGIASANEIGSEINRLQGWLNKGYQTDLEWMANPKRQDLKRVMPEVQSVICVALNYYTPHQHSENNKIGKISRYGWGRDYHKVVHKKLKALANWLQEQDKEILTRYYVDTGPIMEKALAEQAGLGWIAKNGNLITREYGSWVFLGEVLINLELTSDRSHTAHCGSCTRCLEACPTNAIVEPFVVDANLCIAYHTIENRNPELPAHIKSNLKGWVAGCDICQDVCPWNQRFAQETNIDDFQPYPDNLAPQLTELAEISEEDWNKQFPASALRRIKPEMLQRNARANLQ

SEQ ID NO: 77301 - protein, 448 aa, unidentified
  source 1..448: note = Hydrogenibacillus schlegelii
  REGION 1..448: note = tr|A0A2T5G7V8|A0A2T5G7V8_HYDSH Epoxyqueuosine reductase OS=Hydrogenibacillus schlegelii OX=1484 GN=queG; PE = 3 SV=1
MTAERRPNAPPSAPRPGAPKPFEPPPDDPDRSELRPDETPDRRGRSDRAPEDGAAFKAELKAAARAIGLDAVGVTTADPFHELRPILEEYYGRGYDSGFEKGTIDERVDPRRTMPWAQSIIAAAMAYPSKLKNAPKSVPGARRGFIARSAWGRDYHGVLRERLEALLAWIRERVPSVRGEILVDTGVLSDRAVAARAGIGWIGKNGLLITPDYGSFVYLGELVLDLPLPPDAPMADRCGTCTKCLDACPTSAFIRPGALDSKKCLSYHTQTKGMVPLPYREKLGSRLYGCDTCQVVCPYNRGVDADHHPEFRPDPEVVKPLLMPLIGLSKKAFADTFAKTAAGWRGKRTLERNAIIALAHHRAPEAVPVLAERLALDPRPVIRGTAAWALGKIGGEAAKAALETARARERDPMVREEIEAALARLSGVSGRSGAEEEGRPANDRSGVG

SEQ ID NO: 77302 - protein, 389 aa, unidentified
  source 1..389: note = Hydrogenibacillus schlegelii
  REGION 1..389: note = tr|A0A132N5J0|A0A132N5J0_HYDSH Epoxyqueuosine reductase OS=Hydrogenibacillus schlegelii OX=1484; GN = SA87_03785 PE=4 SV=1
MKAAARAIGLDAVGVTTADPFHELRPILEEYYGRGYDSGFEKGTIDERVDPRRTMPWAQSIIAAAMAYPSKLKNAPKSVPGARRGFIARSAWGRDYHGVLRERLEALLAWIRERVPSVRGEILVDTGVLSDRAVAARAGIGWIGKNGLLITPDYGSFVYLGELVLDLPLPPDAPMEDRCGSCTKCLDACPTSAFIRPGALDSKKCLSYHTQTKGMVPLPYREKLGSRLYGCDTCQVVCPYNRGVDADHHPEFRPDPEVVKPLIMPLIGLSKKAFVETFAKTAAGWRGKRTLERNAIIALAHHRAPEAVPVLAERLALDPRPVIRGTAAWALGKIGGEAAKSALEAARARERDPMVREEIEAALARLSGASGRSGAEEERRPANDRSGIG

SEQ ID NO: 77303 - protein, 305 aa, unidentified
  source 1..305: note = Hydrogenispora ethanolica
  REGION 1..305: note = tr|A0A4R1RX19|A0A4R1RX19_9FIRM Epoxyqueuosine reductase OS=Hydrogenispora ethanolica OX=1082276; GN = EDC14_100937 PE=4 SV=1
MNQDEERIVAMLAEEGYPGRMVAIEHLEELRQEIAARRAAGLLDETLIQRYLSDWQFDYTKQLPEARSILVVAAAQPLMQLEFEWRGSFHPVLVPPTYIAEDDGRVAATVAHALQSKGYHGVQARLPQKLLAVRSGLSRYGRNNISYIEGMGSFYTIMAFFTDLPLSEDSWQEASKMPECEACRVCLRNCPTGCIDPERFLIHAERCLTYLNENSGEFPDWVNAHDHHALVGCMKCQTVCPQNRERLRTVVMKETFHEAETAAILSGVALEQLPGVTQQTLKRLGMTDYCQDRILARNLGVLLAS

SEQ ID NO: 77304 - protein, 309 aa, unidentified
  source 1..309: note = Hydrogenispora ethanolica
  REGION 1..309: note = tr|A0A4R1R2U3|A0A4R1R2U3_9FIRM Epoxyqueuosine reductase OS=Hydrogenispora ethanolica OX=1082276; GN = EDC14_10389 PE=4 SV=1
MIELLSQEILSHGDKSRILPLERLADLQKDIAEFEERQDLNGFQKWIAGSLYQFDSPAADFGSRSLLIIASPNPAYAKVIFHWQGQKVPLICLARSEMGKKAAPARTKQYLTRFLKPLGYHIQAAPRLPLKRLAVRSGLAAYGRNNICYVEGMGSFFTLVAYFSDIPCDAGDWHELRVMEHCQSCNACLKNCPTGAILPERFLIDNERCLSYFNESPGDFPDWLPRSVHHCLYDCLMCQRICPQNRERIDHVTGPVEFDEAETALLLSGKTLPEFPPALRRKVRFLGMDEWLGAMPRNIRVLLENHQSA

SEQ ID NO: 77305 - protein, 244 aa, Hydrogenoanaerobacterium saccharovorans
  REGION 1..244: note = tr|A0A1H8AD79|A0A1H8AD79_9FIRM Epoxyqueuosine reductase QueG (Queuosine biosynthesis); OS = Hydrogenoanaerobacterium saccharovorans OX=474960; GN = SAMN05216180_1214 PE=4SV=1
MNCRAGQRLPAGAKSILVCLFPYYVGDYPNRNLSRYAIVDDYHTITRKLLNKAVDILRKEFPEHSFESFIDSSPVREVYAGYLAGLGFIGKNGQLITEDYGSYCFIGEIVSTLELPAAIPSVKTCGACSLCINACPNGAIGKKGRINTAECRSQITQKKGELSAFEQQSIVQGGFAWGCDICTDVCPFNRNPKSTPINDFYCNIVPILTLDNYSELYKTRAYGWRGASMLERNLRLISGHSQVR

SEQ ID NO: 77306 - protein, 364 aa, unidentified
  source 1..364: note = Hydrogenophaga crassostreae
  REGION 1..364: note = tr|A0A162N155|A0A162N155_9BURK Epoxyqueuosine reductase OS=Hydrogenophaga crassostreae OX=1763535; GN = queG PE=3 SV=1
MGTTKEPAAERAAAETLVAQIQQWGRALSFSEIGVAGVDLSSAEPGLQAWLAQGFHGDMGYMASHGLKRARPAELIPGTVSVITARMDYLPKDTPDDWQANELARLERPGEAIVSVYARGRDYHKVLRARLQKLADRIAEAVGPLGHRVFTDSAPVLEAELASRSGQGWRGKHTLILNREGGSMFFLGEIYLDLALPPSAPVSSHCGACTACIDICPTQAIVAPHKLDARRCISYLTIEHAGPIPEDLRPLLGNRIYGCDDCQLACPWNKFAQRSPLADFDPREGLAGASLIELFAWSEDAFLSRTEGSPIRRIGHERWLRNIAVAMGNALRNEDAADIRAALAQRAQHPSDLVRAHVEWALAQ

SEQ ID NO: 77307 - protein, 307 aa, Hydrogenophaga intermedia
  REGION 1..307: note = tr|A0A1L1PMC1|A0A1L1PMC1_HYDIT Putative iron-sulfur cluster binding protein OS=Hydrogenophaga intermedia; OX = 65786 GN=BN948_02529 PE=4 SV=1
MAYMAAHGLKRARPAELVPGTLSVITARMDYLPRDTPADWVDQEWARLQRPGEAIVSVYARGRDYHKVLRARLQQLSDRIAEAIGPFGHRVFTDSAPVLEVELASRSGIGWRGKHTLTLHREAGSMFFLGEIYVDLALPPSAPVSDHCGSCSACIDVCPTQAITGPQRVDARRCISYLTIEHAGPIPVELRPAMANRIYGCDDCQLVCPWNKFAQRATLPDFDARQGMSGATLVELFAWSEVEFLRRTEGSAIRRIGHERWLRNLAVGLGNALRATGDGAVRQALQARADDPSELVREHVAWALAQG

SEQ ID NO: 77308 - protein, 306 aa, Hydrogenophaga pseudoflava
  REGION 1..306: note = tr|A0A4V1ABF8|A0A4V1ABF8_HYDPS Epoxyqueuosine reductase OS=Hydrogenophaga pseudoflava OX=47421 GN=queG; PE = 4 SV=1
MDYMARHGMKRARPAELVPGTVSVITARMDYLPRYTPEDWTEQELARLQRPGEAIVSVYARGRDYHKVLRSRLQQLAERIGAAVGPLGHRVFTDSAPVLEAELARRSGQGWRGKHTLILSREGGSMAFLGEIYLDLALPPTAAVSDHCGSCSACMAVCPTQAIVAPYRLDARRCISYLTIEHDGPIPESLRPLIGNRIYGCDDCQLVCPWNKFAQRSPLPDFDPREGLTGATLVELFGWSEEEFLRRTEGSPIRRIGHARWLRNIAVAMGNALRQADEPVTRAALAAHTAHPDPVVREAVAWALSA

SEQ ID NO: 77309 - protein, 374 aa, Hydrogenophaga sp.
  REGION 1..374: note = tr|A0A358BBM7|A0A358BBM7_9BURK Epoxyqueuosine reductase OS=Hydrogenophaga sp. OX=1904254 GN=queG PE=3; SV = 1
MKTGFVAAQLVSQIQAWGQELAFSQIGVTGVDLSAAEPGLNAWLQAGFHGDMGYMVSHGLKRARPAELVPGTVSVITARMDYLPRETPEGWQAIEFSRLQRPGEAVVSLYARGRDYHKVLRYRLQKLAERIAIEVGPLGHRVFTDSAPVLEAELASRSGQGWRGKHTLVLNREGGSMFFLGEIYVDLALPASEPVSEHCGACTACIDVCPTQAILGPQRLDARRCISYLTIEHAGPIPEDLRPLIGNRIYGCDDCQLVCPWNKFAQRSSLPDFDPREGLTGATLIELFSWSEEEFLRRTEGSPIRRIGHERWLRNIAVAMGNALSAVVGEEGDVLRQALVTRSAQPSALVREHVAWALERGGRENRFREGTAGS

SEQ ID NO: 77310 - protein, 365 aa, Hydrogenophaga sp.
  REGION 1..365: note = tr|A0A0T2YG79|A0A0T2YG79_9BURK Epoxyqueuosine reductase OS=Hydrogenophaga sp. Root209 OX=1736490 GN=queG; PE = 3 SV=1
MNVVLDAAQLVSRIQAWGQELAFSQIGVAGVDLSAAEPGLLAWLSAGCHGDMAYMAAHGLKRARPTELVPGTLSVITARMDYLPRATPEGWQSIEFERLDRPQEAVISMYARGRDYHKVLRNRLQTLSERIAATIGPFGHRVFTDSAPVLEVELASRSGIGWRGKHTLALHREAGSMFFLGEICVDLALPPTEATSEHCGNCTACIDVCPTQAITGAQRVDARRCISYLTIEHAGAIPLELRPLMGNRIYGCDDCQLICPWNKFAQRSPLPDFDERAGLSGAALVELFSWSEAEFLRRTEGNAIRRIGHERWLRNIAVALGNALRARHDERALRALQARADHPSKLVREHVAWALSQTHNPLRSP

SEQ ID NO: 77311 - protein, 352 aa, unidentified
  source 1..352: note = Hydrogenophilaceae bacterium
  REGION 1..352: note = tr|A0A1J4YS92|A0A1J4YS92_9PROT Epoxyqueuosine reductase OS=Hydrogenophilaceae bacterium CG1_02_62_390; OX = 1805218 GN=queG PE=3 SV=1
MHDGALQNTQQLKQAIRLWGREMGLSAIAFAAPELGAAGAGLADWLAQGLHGEMDYMARNTEKREHPTELVAGTQSIIVTRLDYLPPDLPDGGPDSARISRYAMGRDYHKTVRQRLQRLAERIESAVGPFGYRAFADSAPVMEVELARLAGLGWRGKHTLLLSRSGSWFFLGELFTTLPLPPDAPLEGHCGHCDACLKSCPTAAFIGPYLLDARRCISYLTIEHAGPIPKELRPMLGARIYGCDDCQLACPWNRFARPGELPDFLPRNGLDHSRLADLFAWTESEFNDRLAGSPIRRIGHERWLRNIAVALGNTPPNPQAVAALEARREHASAIVREHVAWAIERHRAAATA

SEQ ID NO: 77312 - protein, 357 aa, unidentified
  source 1..357: note = Hydrogenophilales bacterium
  REGION 1..357: note = tr|A0A257Y3J3|A0A257Y3J3_9PROT Epoxyqueuosine reductase OS=Hydrogenophilales bacterium 12-61-10; OX = 1970515 GN=queG PE=3 SV=1
MHETDSAQPGLIQLAQHIKQWGRALGFAGVGITDCDLSAAETGLLAWLDQGFHGEMNYMAAHGVKRSRPADLVPGTLRIISVRLDYFPPAAADPHAVMADPHAAYLARYALGRDYHKVLRNRLQSLAEKISAEVGAHHFRVFTDSAPVLEVALAEKSGLGWRGKHTLLLNRQHGSWFFLGEIYTDLLLPVDAPESNHCGTCQACIDICPTQAIVAPYSLDARRCISYLTIELKGSIPPELRPLMGNRIYGCDDCQLVCPWNRFAQTAALADFEVRNGLDSAQLLDLFAWSEADFNERLAGSPIRRIGHERWLRNIAVALGNAPSSPAIQIALRTQMNHPSALVREHVAWALSRQTDI

SEQ ID NO: 77313 - protein, 358 aa, unidentified
  source 1..358: note = Hydrogenophilales bacterium
  REGION 1..358: note = tr|A0A5C7EWT0|A0A5C7EWT0_9PROT Epoxyqueuosine reductase OS=Hydrogenophilales bacterium SM250 OX=2602750; GN = queG PE=3 SV=1
MQGDSLCCARLEGAALVQAIKRWGRELGFQRVGVTHADLGDAEARLLDWLAHGYHGDMDYMARHGVKRSRPSALVPGTVSVICARMNYLPPQARASRSVLDDPERAFVSRYALGRDYHKVVRSRLAQLARRIARHVEGFAWRAFADSAPVMEVELASRAGVGWRGKHTLLLARDAGSWFFLGEIYTNLSLPADPPEADHCGTCTRCIDACPTQAIIAPYRIDARRCISYLTIEHKGEIPEALRPLMGNRIYGCDDCQLVCPWTRFAKTSREPDFAVRNGLDDASLVALFGWSEQQFLERFAGSPIRRLGYERWLRNIAVALGNAPSTPAVVAALEARRDHPSALVRVHVAWALARHGR

SEQ ID NO: 77314 - protein, 363 aa, Hydrogenophilus thermoluteolus
  REGION 1..363: note = tr|A0A2Z6DVY0|A0A2Z6DVY0_HYDTE Epoxyqueuosine reductase OS=Hydrogenophilus thermoluteolus OX=297 GN=queG; PE = 3 SV=1
MAGTVRDWAQIKAALWRAAESLGFAAMAVSDVDLSAEEPKLLAWLREGYHGEMDYMAKWGTLRARPAALVPGAQRVVSLRFPYWPEQAAPAEAVLSDPSRAYISRYALGRDYHKVVRARLAKLENVLKTLAPEHQGRVFVDSAPIWEVALAARAGLGWRGKHTLLLTREGSYFFLGELVTNLPLPVDAPQRAHCGRCVRCLTACPTQAIVAPYTVDARRCISYLTIEHPGSIPESLRPLVGNRIYGCDDCQLVCPWNRFATPSQCSDFQPRHGLDAPRLVELFAWREHEFLDRFAGSPIRRIGYPRWLRNLAVALGNAPTTPDVVAALRQRADDPSPLVREHVQWALARHRGQGGTVQSVPFA

SEQ ID NO: 77315 - protein, 403 aa, unidentified
  source 1..403: note = Hydrogenovibrio crunogenus
  REGION 1..403: note = tr|A0A4P7P1I3|A0A4P7P1I3_9GAMM Epoxyqueuosine reductase OS=Hydrogenovibrio crunogenus OX=39765 GN=queG; PE = 3 SV=1
MPKNAPTTLKNSTDSALYQLAEKIKQWGLSLGFADVGITDIDLGQYESSYFEWLEKRFHADMEYMVKHGTKRTRPEELEPGTRRVISVRMNYFDTEAYSPIPQLQASDHAYISRYALHKDYHKLMRKRLQQLAEKINQTIENDFHYRAFCDSAPVLERPLAEKAGLGFIGKNSLIIHPRAGSWFFLGELYTNLPLPIDPPFEKQGCGPCTACIQECPTQAIVADGVVDSRRCISYLTIENKGSIPASLREKMGNRIYGCDDCQLVCPWNKFTQDTNETAFKANSLLDASTLLELFNWSEKDFLKQLEGSPIRRIGFEQWQRNLCVAIGNALENSTLSEEIIHALESHQSDSDLVNEHKHWALQRQRHFLKAPEEITRPGHFSSPSKPHKAKKYYLPKTIAVRK

SEQ ID NO: 77316 - protein, 404 aa, unidentified
  source 1..404: note = Hydrogenovibrio crunogenus
  REGION 1..404: note = tr|Q31GP7|Q31GP7_HYDCU Epoxyqueuosine reductase; OS = Hydrogenovibrio crunogenus (strain XCL-2) OX=317025; GN = queG PE=3 SV=1
MQKSTPTTIKKPTDSELYQLADKIKQWGISLGFADVGITDIDLSQYESSYFEWLEKRFHADMDYMVKHGTKRTRPEELEPGTRRVISVRMNYFDTKAYSPITQLQASDHAYISRYALHKDYHKLMRKRLQQLAEKINQAVENDFHYRAFCDSAPVLERPLAEKAGLGFIGKNSLIIHPRAGSWFFLGELYTNLPLPIDPPFEKHGCGPCTACIQECPTQAIVADGVVDSRRCISYLTIENKGIIPESLREKMGNRIYGCDDCQLVCPWNKFTQDTNETAFKANSLLDASSLLELFNWPEKQFLNQLEGSPIRRIGFEQWQRNLCVALGNALETPELSQKIIHALENHQSDSDLVNEHKRWALQRQQHFMKAPEEMARPGHFSSPSKPHKAKKYYLPKTIAIRKQ

SEQ ID NO: 77317 - protein, 392 aa, Hydrogenovibrio marinus
  REGION 1..392: note = tr|A0A066ZMI5|A0A066ZMI5_HYDMR Epoxyqueuosine reductase OS=Hydrogenovibrio marinus OX=28885 GN=queG PE=3; SV = 1
MQNTTHAQLVTKIKGWGKALGFADVGISSTDLSDYEAAYFNWLGESYHGEMQYMAAHGTKRTRPPELVPGTQSIISVRMNYYDADAHSPIEQLQTSDKAYVSRYALNKDYHKLMRKRLQQLASKIQQEVPDFTYRAFADSAPVLERPIAQQAGLGFIGKNSLIIHPRAGSWFFLGELYCNIDLPADPPFGKQGCGPCTACIDECPTQAILPNNQVDARRCISYLTIEHQGSIDEALRPLIGNRIYGCDDCQLVCPWNKFTDSTTEEAFKAKQIKAKHPLDATTLLALLSWSEEEFLNNFEGSPIRRIGFTLWQRNLCIAIGNDDYRPQNIEALTGLKTDSELVQEHREWAITQQTQKKQQQAQTQKSARLGGFTQLGKPAVAPKYYLPKKPR

SEQ ID NO: 77318 - protein, 405 aa, Hydrogenovibrio sp.
  REGION 1..405: note = tr|A0A2I2A6A2|A0A2I2A6A2_9GAMM Epoxyqueuosine reductase OS=Hydrogenovibrio sp. SC-1 OX=2065820 GN=queG; PE = 3 SV=1
MDEAVLYQLTQQIKQWGRSLGFADIGISDIDLSHYEPLFEDWLSHQYHGEMDYMAKHGRKRSRPEQLEPGTLSLISVRMNYFDGDAHSAVSQLQSPDKAYISRYALHKDYHKLMRKRLAQLAQKIETAVEEISPLATSPFHYRAFSDSAPVLERPVAEKAGLGFIGKNSLLIHPRAGSWFFLGELYTNLSLPADPPFTRQGCGPCTACMDECPTQAIVDNAVVDARRCISYLTIEYDGVIEEALRPLIGNRIYGCDDCQLVCPWNRFTESTQESAFKAKAPLDEIDLLTLLQWDEAQFLTEMAGSPIRRIGYLKWLRNLCIAIGNDEYRAENISALSELQTDSDLVNIHRLWALNVQKQKQKKPPKTTRPGHFSTPNRPAVAAKYYLPKSLKAIPIHQIRSKIEP

SEQ ID NO: 77319 - protein, 389 aa, unidentified
  source 1..389: note = Hydrogenovibrio thermophilus
  REGION 1..389: note = tr|A0A410H2U7|A0A410H2U7_9GAMM Epoxyqueuosine reductase OS=Hydrogenovibrio thermophilus OX=265883; GN = queG PE=3 SV=1
MPEAPLYQLAEKIKHWGQALGFADVGITDTDLSAYEADYFNWLGEHYHGDMEYMARHGTKRTRPAELEPGTVSVISVRLNYFDPDAHSPVEQLQANGQAYVSRYALHKDYHKLMRKRLQQLAAKIEAELVEKAESFHYRAFVDSAPVLERPLAEKAGLGFIGKNSLIIHPRAGSWFFLGELYTNLPLPSDPPFDKQGCGPCTACIDECPTQAIVDNAVVDARRCISYLTIEYKGVIAPELREKMGNRIYGCDDCQLVCPWNKFTEATEETAFKPKHALDAASLLELLDWNETDFLTQFEGSPIRRIGFEQWQRNLCIALGNALEDTDLSQRIVQVLENLSSDSELVLEHRDWALQRQTDALSLSGKTTRPGRFPKPLKPAVAKKYYLPK

SEQ ID NO: 77320 - protein, 368 aa, unidentified
  source 1..368: note = Hydromonas duriensis
  REGION 1..368: note = tr|A0A4R6Y7G1|A0A4R6Y7G1_9BURK Epoxyqueuosine reductase OS=Hydromonas duriensis OX=1527608 GN=queG PE=3; SV = 1
MTTPKNSPHCNAAAELSAWIKAQALALGFAHVGISQPDLRSAKQAHLAWLEAQFQGEMDYMSRNIEARFQPDVLVPHTLSIISVALPYLATDLPDDWRADAWQNINNQNKAYVSRYALGRDYHKVVRNTLQKLASALAAHLANMTEQVLIYRAFADSAPVPEVEIAQQTALGWRGKHTLLLNRAHGSMFFLGELYVNLDLATDAPSSAHCGQCTACIDICPTRAIVAPYRVDARRCISYLTIEHKGEIPHEFRQAIGNRIYGCDDCQLVCPWNKFAQKSALSDFAVRHALDCSDLLALLQWDEATFKHNMAGSAAYRIGHAQWQRNVLLALGNAPTTPDVLTALQTFTTHHNPVVAEQARWSLAQHPK

SEQ ID NO: 77321 - protein, 385 aa, unidentified
  source 1..385: note = Hydromonas sp.
  REGION 1..385: note = tr|A0A345D935|A0A345D935_9BURK Epoxyqueuosine reductase OS=Hydromonas sp. F02 OX=2268024 GN=queG PE=3; SV = 1
MPAQNHHCTAAADLSTWIKAEARTLGFAHVGISQPDLSTAKAGHLAWLADQFHGTMDYMTRNIDARFSPELLVPGTLSIISVAMPYLATGLSDEWQKEAWQTIDNGDQAYVSRYALGRDYHKVVRNTLQKLATAIEAKIAPTPLTYRAFSDSAPVPEVEIAQQTALGWRGKHTLLLNRTHGSMFFLGELYVNLDLAIDQPTTAHCGQCTACIDICPTQAIVAPYRVDARRCISYLTIEHKGEIPHEFRKAIGNRIYGCDDCQLACPWNKFAQKSALSDFAARHSLNDVDLLTLLHWDEATFKSNMAGSAAYRIGHAQWQRNILLALGNADPRPTHLAALQAFTSHDNPILAEQASWSLAQLTQIDFQCTQHVDFETDLFKNKLDE

SEQ ID NO: 77322 - protein, 315 aa, unidentified
  source 1..315: note = Hydrotalea sandarakina
  REGION 1..315: note = tr|A0A2W7RTL8|A0A2W7RTL8_9BACT Epoxyqueuosine reductase OS=Hydrotalea sandarakina OX=1004304 GN=queG; PE = 3 SV=1
MSTFSQKNTQIVKQTAKQLGFDYCGIAKAEFLADDAKKLENWLKKGMHGKMQYMENYFDLRTDPRKLFPGAKSVITLLKNYFPAQQQNIDAPKIARYAYGQDYHEVIKQQLNTFLNHLTSYIGHVAGRGFVDSAPVLERAWAQKSGLGWIGKNGNLIHPKAGSFYFIATLITDLTLEYDNPLAKDYCGTCTRCIDACPTQAILPNKTINGSQCIAYFTIELKDLLIPDEQKGKFKNWMFGCDICQEVCPWNRFSKPTNEPAFTPIPEILELSTKEWLQLNEESFKKIFKHSPLKRSKFKGIQRNLKFILHDEAIN

SEQ ID NO: 77323 - protein, 320 aa, Hydrotalea sp.
  REGION 1..320: note = tr|A0A4Q0B2G4|A0A4Q0B2G4_9BACT Epoxyqueuosine reductase OS=Hydrotalea sp. AMD OX=2501297 GN=queG PE=3; SV = 1
MSHLTDRNTSIVKQTAQKLWFDYCGIAKAEQLEEDAKKLEAWLNKGMHGTMQYMENYFDMRTDPRKLVPGAKSVITLLKNYFPAQQQKNNTPKIARYAYGKDYHLVIKQQLNEFLASISNTIGAIAGRGFVDSAPVLERAWAQKSGLGWIGKNGNLIHPKAGSFYFIATLITDLELNYDNPLTKDYCGTCTKCLDACPTDAILPNKTINGSQCISYFTIELKEMMIPETQKGKFNNWMFGCDICQEVCPWNRFSQPHNEPAFSPIPEILELSTQEWMHLSEAAFNQIFKHSPLKRSKYKGIQRNLRFIQSDTVIDDTNIP

SEQ ID NO: 77324 - protein, 320 aa, unidentified
  source 1..320: note = Hyella patelloides
  REGION 1..320: note = tr|A0A563VQP5|A0A563VQP5_9CYAN Epoxyqueuosine reductase OS=Hyella patelloides LEGE 07179 OX=945734; GN = queG PE=3 SV=1
MLRSKQIKTQAQAIGFHKVGIAKVDRSENHNQAVQHLQSWLALGYHADMAWMANPQRQDVRSLMPEARSLICVALNYYTPHQHSEHPEDGKISRYGWGRDYHKVMGQKLKALSSWLQEQQSDIRTRYYVDTAPIQDKVWAQQAGIGWIAKNGNVITTEYGSWVFLGEILTNLDLEPDRPHSQHCGTCTRCLDACPTQAIAKPFVVDANRCIAYHTIENRSSELPPEIAGKLSGWVAGCDICQDVCPWNQRFAQETNIADFQPYPPNIRPKLQYLAQIEETAWDRQFRASALRRIKPKMLRRNARANLIARENSTDEKGIS

SEQ ID NO: 77325 - protein, 403 aa, Hylemonella gracilis
  REGION 1..403: note = tr|A0A4P6ULA4|A0A4P6ULA4_9BURK Epoxyqueuosine reductase OS=Hylemonella gracilis OX=80880 GN=queG PE=3; SV = 1
MQVNSHIDKGQFVSQVRVWARELGFSQIGVHNVDLSSAEAGLKAWLSHGFHGEMAYMAAHGMKRARPAELVPGTVSVVTARMDYLPRDTPEGWQAAELARVQSPDRPREGVISLYARGRDYHKVLRSRLKKLADRMEQHLREQGTAFADGRGDEASQVDQAAREAFQYRVFTDSAPVLEAELAAGSGLGWRGKHTLVLDREAGSMFFLGEIFLNLALPPTEPVSPHCGNCNACITACPTQAILGPGRLDARRCISYLTIEHPGAIPEALRPLMGQRIYGCDDCQLVCPWNKYAQRSTLPDFDAREGMANGDLLVLLAWDEAEFLRRTEGSAIRRIGHARWRRNILVALGNALRDGALGAMDSAAIRAALQPFADSEADPLLCEHARWALAASDVTGGRPSAVF

SEQ ID NO: 77326 - protein, 392 aa, Hylemonella gracilis
  REGION 1..392: note = tr|A0A016XKE2|A0A016XKE2_9BURK Epoxyqueuosine reductase OS=Hylemonella gracilis str. Niagara R; OX = 1458275 GN=queG PE=3 SV=1
MQVNSHIDKGQFISQVRVWARELGFSQIGVHNVDLSSAEAGLKAWLSHGFHGEMAYMAAHGMKRARPAELVPGTVSVVTARMDYLPRDTPEGWQAVELARVQSTQRPREGVISLYARGRDYHKVLRSRLQKLAERMEQHLRDQVLAPVDGSGRDTAFQYRVFTDSAPVLEAELAAGSGLGWRGKHTLVLDRDAGSMFFLGEIFLNLDLPPTEPVSPHCGSCSACITVCPTQAILGPGRLDARRCISYLTIEHPGAIPEELRPLMGQRIYGCDDCQLVCPWNKYARRSTLPDFDARADMARGDLLTLLAWDEAEFLRRTEGSAIRRIGHARWRRNILVALGNALRGGTVDAEDSAAIRAALQIYADPGADPLLREHALWALAAPAASGGSEVF

SEQ ID NO: 77327 - protein, 311 aa, Hymenobacter actinosclerus
  REGION 1..311: note = tr|A0A1I0H605|A0A1I0H605_9BACT Epoxyqueuosine reductase OS=Hymenobacter actinosclerus OX=82805 GN=queG; PE = 3 SV=1
MLPTAHYTAFIKRRAAELGFMYCGISEAGFLEEEAPRLENWLNKNMHGQMAYMANHFDKRLDPRLLVDGAKSVISLLLNYYPPEETQQPDDTLKVSKYAYGRDYHFVIKDKLKELLHDMQQEIGEVGGRCFVDSAPVMDKAWAKKSGLGWVGKNANLITPGTGSFYFIAELIVDVPLDYDGPIKDYCGTCTKCVDACPTQAITEPYVVDGSKCISYFTIELKDQIPREVAGQFGNWVFGCDICQDVCPWNRFAKPHQEPQFNPHPALKDLTRGDWQEITHELFSELFRQSAVKRTGYAGLQRNIRFVTGGE

SEQ ID NO: 77328 - protein, 313 aa, unidentified
  source 1..313: note = Hymenobacter amundsenii
  REGION 1..313: note = tr|A0A246FJH7|A0A246FJH7_9BACT Epoxyqueuosine reductase OS=Hymenobacter amundsenii OX=2006685 GN=queG; PE = 3 SV=1
MLPTAQYTAFIKRRAAELGFMYCGISKAGFLEEEAPRLENWLNQNMHGQMAYMANHFDKRLDPRLLVDGAKSVISLLLNYYPPEETQQPEDTLKVSKYAYGRDYHFVIKDKLKELLHDMQAEIGEVGGRCFVDSAPVMDKAWAKKSGLGWVGKNSNLITPGVGSFYFIAELIVDVPLDYDGPIKDYCGTCTKCVDACPTQAITEPYVVDGSKCISYFTIELKDQIPREVDGQFGNWVFGCDICQDVCPWNRFAKPHQEPQFNPHPGLKDLSRGDWQEITHELFSELFRQSAVKRTGYAGLQRNIRFVTGEQDR

SEQ ID NO: 77329 - protein, 319 aa, unidentified
  source 1..319: note = Hymenobacter aquaticus
  REGION 1..319: note = tr|A0A4Z0PW72|A0A4Z0PW72_9BACT Epoxyqueuosine reductase OS=Hymenobacter aquaticus OX=1867101 GN=queG; PE = 3 SV=1
MLPTAQYTAFIKRRAAELGFMYCGISRAEFLEEEAPRLENWLNQQMNGKMAYMANHFDKRLDPRLLVDGAKSVISLLLNYYPAPEDQQPDDTLKISKYAYGRDYHFVIKDKLKTLLADMQQEIGEVGGRVFVDSAPVMDKVWAKKSGLGWVGKNSNLITPGVGSFYFIAELIVDLELDYDGPIKDYCGTCTKCVDACPTDAITNPYVVDGSKCISYFTIELKDQIPTEMAGKFGNWMFGCDICQDVCPWNRFARPHQEPQFRPHAQLPHLKANDWQEITHELFAELFRQSAVKRTGYEGLKRNIRFVTNEPDAIGNTEE

SEQ ID NO: 77330 - protein, 318 aa, Hymenobacter chitinivorans
  REGION 1..318: note = tr|A0A2M9BA32|A0A2M9BA32_9BACT Epoxyqueuosine reductase OS=Hymenobacter chitinivorans DSM 11115; OX = 1121954 GN=queG PE=3 SV=1
MLPTAQYTAFIKRRAAELGFMYCGISKADFLEEEAPRLESWLNQNMNGKMSYMANHFDKRLDPRLLVDGAKSVISLLLNYYPAPEDQQAADEETLKISKYAYGRDYHFVIKDKLKELLADMQTEIGEVGGRVFVDSAPVMDKVWAKKSGLGWVGKNSNLITPGVGSFYFIAELIVDVELDYDGPIKDYCGTCTKCVDACPTDAITNPYVVDGSKCISYFTIELKDQIPQEVAGKFGNWVFGCDICQDVCPWNRFAKPHQEPQFRPHAQLPHLKANDWREITHELFTELFRQSAVKRTGYAGLTRNIRFVTNEPDALMG

SEQ ID NO: 77331 - protein, 311 aa, unidentified
  source 1..311: note = Hymenobacter coccineus
  REGION 1..311: note = tr|A0A1G1ST92|A0A1G1ST92_9BACT Epoxyqueuosine reductase OS=Hymenobacter coccineus OX=1908235 GN=queG; PE = 3 SV=1
MLLRAEWTPFIKRRAAELGFMACGISKAEFLEEEAPRLENWLKRSMNGRMGYMENHFDKRLDPRLLVDGARSVISLLLNYYPPKEEQQPDDTLKISKYAYGRDYHFVIKDKLKTLLADMQAEIGKIGGRCFVDSAPVLDKAWAKKSGLGWVGKNSNLITPGSGSFYFIAELIVDVDLDYDGAIRDYCGTCTKCLDACPTQAITEPYVVDGSKCISYFTIELKDQIPTEVGGKFGNWVFGCDICQDVCPWNRFAKPHQEPQFQAHPELKNLSASDWREITHELFTELFRQSAVKRTGYAGLVRNIQFVSPEA

SEQ ID NO: 77332 - protein, 314 aa, Hymenobacter daecheongensis
  REGION 1..314: note = tr|A0A1M6CZC0|A0A1M6CZC0_9BACT Epoxyqueuosine reductase OS=Hymenobacter daecheongensis DSM 21074; OX = 1121955 GN=queG PE=3 SV=1
MLPTAAYTAFIKRRAAELGFMYCGISKADFLEEEAPRLENWLNRNMHGQMAYMANHFDKRLDPRLLVDGAKSVISLLLNYYPAEEDQQRDDTLKISKYAYGRDYHFVIKDKLKTLLQDIQQEIGEVGGRCFVDSAPVLDKAWAKKSGLGWVGKNANLITPGTGSFYFIAELIVDLELDYDGPIKDYCGTCTKCLDACPTGAITEPYVVDGSKCISYFTIELKDQIPTEVAGKFGNWVFGCDICQDVCPWNRFAKPHTESQFKPNPQLPHLSTTDWQEITHELFSELFRQSAVKRTGYAGLTRNIRFVTGEDAGK

SEQ ID NO: 77333 - protein, 319 aa, Hymenobacter elongatus
  REGION 1..319: note = tr|A0A4Z0PQ05|A0A4Z0PQ05_9BACT Epoxyqueuosine reductase OS=Hymenobacter elongatus OX=877208 GN=queG PE=3; SV = 1
MLPTAQYTAFIKRRATELGFMYCGISKAGFLEEEAPRLEKWLSRQMNGQMGYMANHFDKRLDPRLLVDGAKSVISLLLNYYPAPEDQQPDDTLKISKYAYGRDYHFVIKDKLKILLADIQAEIGEVGGRAFVDSAPVLDKAWAKKSGLGWVGKNSNLITPGVGSFYFIAELIVDLELDYDGPIKDYCGTCTKCMDACPTDAITEPYVVDGSKCISYFTIELKDQIPRDVAGKFGNWVFGCDICQDVCPWNRFAKPHTEPQFQAHPQLPQLNAVDWQEITHELFTELFRQSALKRTGYAGLTRNIRFVSETEGPAGFEEE

SEQ ID NO: 77334 - protein, 317 aa, Hymenobacter gelipurpurascens
  REGION 1..317: note = tr|A0A212UB39|A0A212UB39_9BACT Epoxyqueuosine reductase OS=Hymenobacter gelipurpurascens OX=89968; GN = queG PE=3 SV=1
MLPTAHYTAFIKRRAAELGFMYCGISKADFLEEEAPRLENWLNGQMHGQMAYMANHFDKRLDPRLLVDGAKSVISLLLNYYPPEETQQPDDTLKVSKYAYGRDYHFVIKDKLKTLLHDMQEEIGEVGGRCFVDSAPVMDKAWAKKSGLGWVGKNSNLIRPGVGSFFFIAELIVDVELAYDGPIKDYCGTCTKCMDACPTQAITEPYVVDGSKCISYFTIELKDQIPREVEGKFGNWVFGCDICQDVCPWNRFSKPHQEPQFNAHPGLKDLTAGDWREITHELFSELFRQSAVKRTGYAGLTRNIKFVTGEDVPDRTL

SEQ ID NO: 77335 - protein, 311 aa, unidentified
  source 1..311: note = Hymenobacter glacialis
  REGION 1..311: note = tr|A0A1G1ST44|A0A1G1ST44_9BACT Epoxyqueuosine reductase OS=Hymenobacter glacialis OX=1908236 GN=queG; PE = 3 SV=1
MLLQSQWAPFIKRRAAELGFMACGISKAEFLEEEAPRLETWLTRRMNGKMGYMENHFDKRLDPRLLVDGAQSVISLLLNYYPAPEDQQPDDTLKISKYAYGRDYHFVIKDKLKVLLADMEAEIGQIGGRCFVDSAPVLDKAWAKKSGLGWVGKNSNLITPGTGSFYFIAELIVDVALPADGPIRDYCGTCTKCVDACPTQAITEPYVVDGSKCISYFTIELKDQIPTEVAGQFGNWVFGCDICQDVCPWNRFSKPHEEPQFQAHPSLKDLTPGDWREITHELFTELFRQSAVKRTGYEGLKRNIKFVLEGE

SEQ ID NO: 77336 - protein, 330 aa, unidentified
  source 1..330: note = Hymenobacter gummosus
  REGION 1..330: note = tr|A0A431U221|A0A431U221_9BACT Epoxyqueuosine reductase OS=Hymenobacter gummosus OX=1776032 GN=queG PE=3; SV = 1
MLASDLTRAEWTAFIKRRAAELGFMACGISRAEFLEEEAPRLEQWLAKGMQGQMRWMENHFDKRLDPRRLVDGAKSVISLLLNYYPAPEDQQPDDTLKVSKYAYGRDYHHVIKDKLKHLMWDLQAHIGEVGGRAFVDSAPVLDKAWAKKSGLGWVGKNSNLITPGAGSFYFIAELIVDVELSCDGPIRDYCGSCTRCLDACPTQAITEPYVVDGSKCISYFTIELKDQLPASVQGQFGNWIFGCDICQDVCPWNRFAKPTQEAQFQAHPGLKDMRETDWEEITQEVFQTLFRHSAVKRTGYAGLRRNIAFVTGQPHTTETPAQGPASDTE

SEQ ID NO: 77337 - protein, 311 aa, unidentified
  source 1..311: note = Hymenobacter lapidarius
  REGION 1..311: note = tr|A0A1G1T6M1|A0A1G1T6M1_9BACT Epoxyqueuosine reductase OS=Hymenobacter lapidarius OX=1908237 GN=queG; PE = 3 SV=1
MLLQSQWAPFIKRRAAELGFMACGISKAEFLEEEAPRLETWLTRRMNGKMGYMENHFDKRLDPRLLVDGAQSVISLLLNYYPAPEDQQADDTLKISKYAYGRDYHFVIKDKLKLLLADMEAEIGQIGGRCFVDSAPVLDKAWAKKSGLGWVGKNSNLITPGAGSFYFIAELIVDVVLPADGPIRDYCGTCTKCVDACPTQAITEPYVVDGSKCISYFTIELKDQIPTEVAGQFGNWVFGCDICQDVCPWNRFSKPHNEPQFQAHPILKDLTPGDWREITHELFTELFRQSAVKRTGYEGLKRNIKFVLEGE

SEQ ID NO: 77338 - protein, 327 aa, unidentified
  source 1..327: note = Hymenobacter mucosus
  REGION 1..327: note = tr|A0A238WCY4|A0A238WCY4_9BACT Epoxyqueuosine reductase OS=Hymenobacter mucosus OX=1411120 GN=queG PE=3; SV = 1
MLPTAHYTAFIKRRAAELGFMYCGISKAEFLEEEAPRLENWLNRQMNGKMAYMANHFDKRLDPRLLVDGAKSVISLLLNYYPPEEAQQPDDTLKISKYAYGRDYHFVIKDKLKTLLQDMQEEIGEVGGRCFVDSAPVMDKAWAKKSGLGWVGKNTNLIRPGTGSFFFIAELIVDLELDYDGPIKDYCGTCTKCVDACPTQAITEPYVVDGSKCISYFTIELKDQIPREVNGQFGNWIFGCDICQDVCPWNRFSKPHQEPQFKAHPGLKDLTPGDWQEITHELFSELFRQSAVKRTGYVGLQRNIRFVLGEEPPPPAEAGGPTEEPRM

SEQ ID NO: 77339 - protein, 311 aa, unidentified
  source 1..311: note = Hymenobacter nivis
  REGION 1..311: note = tr|A0A2Z3GP47|A0A2Z3GP47_9BACT Epoxyqueuosine reductase OS=Hymenobacter nivis OX=1850093 GN=queG PE=3; SV = 1
MLLRADWTSFIKRRAVELGFMACGISKAEFLEDEAPRLENWLKHGMNGRMAYMENHFDKRLDPRLLVDGAKSVISLLLNYYPPKEEQQPDDTLKISKYAYGRDYHFVIKDKLKMLLADMQAEIGEIGGRCFVDSAPVLDKAWAKKSGLGWVGKNSNLITPGSGSFYFIAELIVDVDLEYDGAIRDYCGTCTKCLDACPTQAITEPYVVDGSKCISYFTIELKDQIPTEVGGKFGNWVFGCDICQDVCPWNRFAKPHQEPQFQAHPDLKNLTPGDWREITHELFTELFRQSAVKRTGYAGLTRNIKFVLPEA

SEQ ID NO: 77340 - protein, 311 aa, unidentified
  source 1..311: note = Hymenobacter nivis
  REGION 1..311: note = tr|A0A502H1M4|A0A502H1M4_9BACT Epoxyqueuosine reductase OS=Hymenobacter nivis OX=1850093 GN=queG PE=3; SV = 1
MLLRAEWTPFIKRRAAELGFMACGISKAEFLEEEAPRLENWLKRSMNGRMGYMENHFDKRLDPRLLVDGARSVISLLLNYYPPKEEQQPDDTLKISKYAYGRDYHFVIKDKLKKLLADMQAEIGEIGGRCFVDSAPVLDKAWAKKSGLGWVGKNSNLITPGSGSFYFIAELIVDVDLDYDGAIRDYCGTCTKCLDACPTQAITEPYVVDGSKCISYFTIELKDQIPTEVAGKFGNWVFGCDICQDVCPWNRFAKPHQEPHFQAHPELKNLSASDWREITHELFTELFRQSAVKRTGYAGLTRNIQFVSPEA

SEQ ID NO: 77341 - protein, 326 aa, Hymenobacter perfusus
  REGION 1..326: note = tr|A0A3R9P0H4|A0A3R9P0H4_9BACT Epoxyqueuosine reductase OS=Hymenobacter perfusus OX=1236770 GN=queG PE=3; SV = 1
MLPTAHYTAFIKRRAAELGFMYCGISKAGFLEEEAPRLENWLNRNMHGQMAYMANHFDKRLDPRLLVDGAKSVISLLLNYYPPEEEQQPEDTLKVSKYAYGRDYHFVIKDKLKTLLQDMQQEIGEVGGRCFVDSAPVMDKAWAQKSGLGWMGKNTNIIRPGTGSFFFIAELIVDVELDYDGPIKDYCGTCTKCVDACPTQAITEPYVVDGSKCISYFTIELKDQIPREVEGKFGNWVFGCDICQDVCPWNRFSKPHQEPQFTAHPALKDLTRGDWQEITHELFSELFRQSAVKRTGYAGLQRNIRFVLGEEAPALPPAPDSNEPRM

SEQ ID NO: 77342 - protein, 313 aa, Hymenobacter psychrophilus
  REGION 1..313: note = tr|A0A1H3MCZ7|A0A1H3MCZ7_9BACT Epoxyqueuosine reductase OS=Hymenobacter psychrophilus OX=651662 GN=queG; PE = 3 SV=1
MLPTAHYTAFIKRRAAELGFMYCGISEAGFLEEEAPRLENWLNKNMHGQMAYMANHFDKRLDPRLLVDGARSVISLLLNYYPPAETQQPDDTLKVSKYAYGRDYHFVIKDKLKELLHDMQAEIGEVGGRCFVDSAPVMDKAWAKKSGLGWVGKNSNLITPGVGSFYFIAELIVDVPLDYDGPIKDYCGTCTKCVDACPTQAITEPYVVDGSKCISYFTIELKDQIPREVEGKFGNWVFGCDICQDVCPWNRFAKPHQEPQFSPHPALKDLTRGDWQEITHELFSELFRQSAVKRTGYAGLQRNIRFITDEPQT

SEQ ID NO: 77343 - protein, 310 aa, Hymenobacter psychrotolerans
  REGION 1..310: note = tr|A0A1M6RV05|A0A1M6RV05_9BACT Epoxyqueuosine reductase OS=Hymenobacter psychrotolerans DSM 18569; OX = 1121959 GN=queG PE=3 SV=1
MLPTALYTAFIKQRAAELGFMYCGISRAEFLEEEAPRLENWLSRNMHGQMGYMANHFDKRLDPRLLVDGAKSVISLLLNYYPPQETQQPDDTLKVSKYAYGRDYHFVIKDKLKTLLAAMQEEIGEVGGRVFVDSAPVMDKAWAKRSGAGWMGKNTNLITPGAGSFYFIAELIVDVELDYDGPIKDYCGTCTKCLDACPTGAITEPYVVDGSKCISYFTIELKDQIPREVEGKFGNWVFGCDICQDVCPWNRFVKPHQEPQFNPHPGLKDLKASDWQEITHELFSELFRQSAVKRTGYVGLQRNIRFVTGE

SEQ ID NO: 77344 - protein, 326 aa, Hymenobacter rigui
  REGION 1..326: note = tr|A0A428KWX9|A0A428KWX9_9BACT Epoxyqueuosine reductase OS=Hymenobacter rigui OX=334424 GN=queG PE=3 SV=1
MLPTAHYTAFIKRRAAELGFMYCGISKAGFLEEEAPRLENWLNRNMNGQMAYMANHFDKRLDPRLLVDGAKSVISLLLNYYPPEDQQQPDDTLKVSKYAYGRDYHFVIKDKLKTLLQDMQQEIGEVGGRCFVDSAPVMDKAWASKSGLGWVGKNSNLIRPGTGSFFFIAELIVDLELDYDGPIKDYCGTCTKCVDACPTQAITEPYMVDGSKCISYFTIELKDQIPREVNGQFGNWVFGCDICQDVCPWNRFAKPHQEPQFTAHPALKNLTPGDWREITHELFSELFRQSAVKRTGYAGLQRNIRFVLGEETRAAPETGATEEPRM

SEQ ID NO: 77345 - protein, 348 aa, Hymenobacter roseosalivarius
  REGION 1..348: note = tr|A0A1W1VTH7|A0A1W1VTH7_9BACT Epoxyqueuosine reductase OS=Hymenobacter roseosalivarius DSM 11622; OX = 645990 GN=queG PE=3 SV=1
MVAALSYHLTVSSGILANSVTVDESIQSRNAAFIKCRAAELGFMYCGISKAEFLEEEAYRLENWLNRQMHGQMGYMANHFDKRLDPRLLVEGAKSVISLLLNYFPAEEDQQPADTLHISKYAYGRDYHFVIKDKLKTLLADIQQEIGEVGGRVFVDSAPVMDKVWAKKSGLGWVGKNSNLITPGVGSFYFIAELIVDLDLAPDGPIKDYCGTCRKCMDACPTDAIAEPYVVDGSKCISYFTIELKDQIPSEVGGKLGNWVFGCDICQDVCPWNRFSKPHQEPQFRAHPQLKEMSPTDWQEITHELFTELFRQSAVKRTGYAGLTRTIQFVSEPQISVVYKEKAPREDA

SEQ ID NO: 77346 - protein, 312 aa, unidentified
  source 1..312: note = Hymenobacter rubripertinctus
  REGION 1..312: note = tr|A0A418QH35|A0A418QH35_9BACT Epoxyqueuosine reductase OS=Hymenobacter rubripertinctus OX=2029981; GN = queG PE=3 SV=1
MLPTAHYTAFIKRRAAELGFMYCGISEAGFLEEEAPRLEKWLNQNMHGQMAYMANHFDKRLDPRLLVDGAKSVISLLLNYYPPAETQQPADTLQISKYAYGRDYHFVIKDKLKELLHDMQQEIGEVGGRCFVDSAPVMDKAWAKKSGLGWVGKNANLITPGVGSFYFIAELIVDVPLDYDGPIKDYCGTCTKCVDACPTQAITEPYVVDGSKCISYFTIELKDQIPREVDGQFGNWVFGCDICQDVCPWNRFAKPHQEPQFNPHPGLKDLSRTDWQEITHELFSELFRQSAVKRTGYAGLQRNIRFVTGEEE

SEQ ID NO: 77347 - protein, 311 aa, unidentified
  source 1..311: note = Hymenobacter sedentarius
  REGION 1..311: note = tr|A0A0U4A994|A0A0U4A994_9BACT Epoxyqueuosine reductase OS=Hymenobacter sedentarius OX=1411621 GN=queG; PE = 3 SV=1
MLPQSEWAPFIKRRAAELGFMACGISKAEFLEEEAPRLETWLTKRMNGKMGYMENHFDKRLDPRLLVDGAKSVISLLLNYYPAPEDQQPDETLKISKYAYGRDYHFVIKDKLKTLLADMEAEIGAIGGRCFVDSAPVLDKAWAKKSGLGWVGKNSNLITPGTGSFYFIAELIVDVELPADGPIRDYCGTCTKCLDACPTQAITEPYVVDGSKCISYFTIELKDQIPTEVAGQFGNWVFGCDICQDVCPWNRFSKPHQEPQFNPAPGLKDLTPGDWREITHELFTELFRQSAVKRTGYEGLKRNIKFVVDGE

SEQ ID NO: 77348 - protein, 318 aa, Hymenobacter sp.
  REGION 1..318: note = tr|A0A519T9D4|A0A519T9D4_9BACT Epoxyqueuosine reductase OS=Hymenobacter sp. OX=1898978 GN=queG PE=3 SV=1
MLLHAEWTPYIKRRAAELGFMACGISKAEFLEEEAPRLENWLKKGMNGKMAWMENHFDKRLDPRLLVDGAKSVISLLLNYYPPVEDQQPDDTLKISKYAYGRDYHFVIKDKLKTLLADMQANIGEVGGRCFVDSAPVMDKAWAKKSGLGWVGKNSNLISPKSGSFYFIAELIVDVELDYDGAIRDYCGTCTKCLDACPTQAITEPYVVDGSKCISYFTIELKDQLIPQDVAGQFGNWVFGCDICQDVCPWNRFSKPTQEAQFQPNAELNKLSVSDWQEITHEVFQALFKQSPLKRTGYEGLKRNIRFVTGQSQLVTGS

SEQ ID NO: 77349 - protein, 319 aa, Hymenobacter sp.
  REGION 1..319: note = tr|A0A495VFG5|A0A495VFG5_9BACT Epoxyqueuosine reductase OS=Hymenobacter sp. YR204 OX=2135668 GN=queG; PE = 3 SV=1
MLPTAHYTAFIKRRAAELGFMYCGISKAEFLEEEAPRLENWLNRQMNGQMGYMANHFDKRLDPRLLVDGAKSVISLLLNYYPAEEDQQPDDTLKVSKYAYGRDYHFVIKDKLKTLLQDMQEQIGEVGGRVFVDSAPVMDKVWAKKSGLGWVGKNSNLITSGVGSFYFIAELIVDVELDYDGPIKDYCGTCTKCVDACPTQAITEPYVVDGSKCISYFTIELKDQIPREVEGKFGNWVFGCDICQDVCPWNRFAKPHQEPQFNPHPGLKDLRATDWQEITHELFSELFRQSAMKRTGYAGLTRNIRFVTGEENNAAETAG

SEQ ID NO: 77350 - protein, 326 aa, unidentified
  source 1..326: note = Hymenobacter swuensis
  REGION 1..326: note = tr|W8F4W0|W8F4W0_9BACT Epoxyqueuosine reductase; OS = Hymenobacter swuensis DY53 OX=1227739 GN=queG PE=3 SV=1
MLPTAHYTAFIKRRAAELGFMYCGISKAGFLEEEAPRLENWLNRNMHGQMAYMANHFDKRLDPRLLVDGAKSVISLLLNYYPPEEQQQPEDTLKVSKYAYGRDYHFVIKDKLKTLLHDMQQEIGEVGGRCFVDSAPVMDKAWAQKSGLGWMGKNTNLIRPGTGSFFFIAELIVDVELDYDGPIKDYCGTCTKCVDACPTQAITEPYVVDGSRCISYFTIELKDQIPREVDGKFGNWVFGCDICQDVCPWNRFSKPHQEPQFTAHPALKDLTRGDWREITHELFSELFRQSAVKRTGYAGLQRNIRFVLGEEAPTGPVLPSSNEPRM

SEQ ID NO: 77351 - protein, 318 aa, unidentified
  source 1..318: note = Hymenobacter wooponensis
  REGION 1..318: note = tr|A0A4Z0MPG1|A0A4Z0MPG1_9BACT Epoxyqueuosine reductase OS=Hymenobacter wooponensis OX=1525360 GN=queG; PE = 3 SV=1
MLPTAHYTAFIKRRAAELGFMYCGISKADFLEEEAPRLENWLNRQMHGQMAYMANHFDKRLDPRLLVDGAKSVISLLLNYYPPEETQQPDDTLKVSKYAYGRDYHFVIKDKLKTLLQDMQAEIGEVGGRCFVDSAPVLDKAWAKKSGLGWVGKNSNLIRPGVGSFFFIAELIVDVELAYDGPIKDYCGTCTKCMDACPTGAITEPYVVDGSKCISYFTIELKDQIPREVEGKFGNWVFGCDICQDVCPWNRFSKPHQEPQFNAHPGLKDLTAGDWREITHELFSELFKQSAVKRTGYAGLTRNIRFVTGEDTPFIPEQ

SEQ ID NO: 77352 - protein, 380 aa, unidentified; identical to SEQ ID NO: 76731
  source 1..380: note = Hyphomicrobiaceae bacterium
  REGION 1..380: note = tr|A0A424M8M0|A0A424M8M0_9RHIZ Epoxyqueuosine reductase OS=Hyphomicrobiaceae bacterium TMED74 OX=1986774; GN = queG PE=3 SV=1

SEQ ID NO: 77353 - protein, 383 aa, Hyphomicrobium denitrificans
  REGION 1..383: note = tr|D8JRI5|D8JRI5_HYPDA Epoxyqueuosine reductase; OS = Hyphomicrobium denitrificans (strain ATCC 51888 / DSM 1869 / NCIB 11706 / TK 0415) OX=582899 GN=queG PE=3 SV=1
MLDSVTAATDLNVMLRDEARKLGLDAIGIARLDASGELAERLDYFLKHGRHGDMDWMEENADRRGDPNRLWPEAKSAIMIGQSYAPPDNPLDALAERDRGVISVYAKGRDYHDVVKKKIKSLARTFAAKSGADVKVFVDTAPLMEKPLAMRAGLGWQGKHTVLVSREHGDWLFLGAILTTAALAPDAEEVSRCGSCTRCLDICPTKAFPAPYQLDARRCLAYLSIEHKGHIPLEFREPMGNRVFGCDDCLAVCPWNKFASAATEIRFAAQPATDNPPLTDLLALDDAAFRQRFAGTPVKRTGRNRIIRNTLIAAGNSGDRSLLRLITPLFEDESPLVRAMAIWSAKRLMREEEFAPFKSRYEAREADPDVAREWAQPLEGHSA

SEQ ID NO: 77354 - protein, 390 aa, Hyphomicrobium denitrificans
  REGION 1..390: note = tr|N0B959|N0B959_9RHIZ Epoxyqueuosine reductase; OS = Hyphomicrobium denitrificans 1NES1 OX=670307 GN=queG; PE = 3 SV=1
MTLAPLTVLDTVTATADLNALLRDEARKLGLDAIGFARLGSSGELAERLDYFLKHGRHGDMDWMEENADRRGDPNRLWPEAKSAIMVGQSYAPPSNPLDALAERDRGIVSVYAKGRDYHDVVKKKIKALARTFAAKSGADVKVFVDTAPLMEKPLAMKAGLGWQGKHTVLVSREHGDWLFLGAILTTADLDPDAEEVDHCGSCSRCLDICPTKAFPAPYQLDARRCLAYLSVEHKGHIPPEFRVPMGNRVFGCDDCLAVCPWNKFAAAATEMRFAAQPATDNPPLAELLALDDAEFRVRFAGTPVKRTGRNRIVRNALIAAGNSGDKSLLRLITPLLEDASPLVRAMAIWSARRLTSDTELAPLKSRYEPGETDPEVAREWAMPVEGHSI

SEQ ID NO: 77355 - protein, 382 aa, Hyphomicrobium facile
  REGION 1..382: note = tr|A0A1I7MUA4|A0A1I7MUA4_9RHIZ Epoxyqueuosine reductase OS=Hyphomicrobium facile OX=51670 GN=queG PE=3; SV = 1
MSEAQNSGSALGGMIRAEAAKLGLDAVGIARLADDAELTARLAHFLSENRHGDMDWMETHADRRAGPLRLWPDAKSAIIFGQSYAPPANPLDALRDRSNAAISVYAKGRDYHDVLKKKIKSLARSFSERSGAEVKVFVDTAPLMEKPLAAKAGLGWQGKHTILVSREHGNWLFLGAILTTAELEPDAGTEDHCGSCRRCLDVCPTNAFPAPYQLDARRCIAYLTIEHKGHIAPEFRGPIGNRVFGCDDCAAVCPWNKFASAATEIRYAARPETDNPPLAELLALDDAAFRLRFAGTPIKRTGRDRVVRNTLIASGNSGDRSLLPLIEPLMEDNSALVRAMAIWASRRLASDAEIDALRKRYEAREHDAEVAAEWNLPIEELR

SEQ ID NO: 77356 - protein, 395 aa, unidentified
  source 1..395: note = Hyphomicrobium nitrativorans
  REGION 1..395: note = tr|V5SAZ5|V5SAZ5_9RHIZ Epoxyqueuosine reductase; OS = Hyphomicrobium nitrativorans NL23 OX=1029756 GN=queG; PE = 3 SV=1
MRANPTSETQDTRPAATARAGAPRDVKAVLAKRAHALGFEIVRVTRPDAIPLSGERLKTFLAEGRHGSMDWMETTVDRRADPNSLWPDARSVVMLAMSYAPETDPMEALAEPLNGVVSAYAKRRDYHDVMKGKLKELASYLAQQTDKPVKVFVDTAPLMEKPLAEAAGIGWQGKHTNLVSRHGGSWFFLGAILSAAEIAPDEPERNHCGTCSRCLDVCPTKAFPAPFQLDARRCIAYLTIEHKGHIAEEFRAAIGNRVYGCDDCLAVCPWNKYARETREVRLAQLDELDNPLLSELLALDDAAFRERFRGTPVKRTGRDRVVRNGLIAAGNSKDASLLPHVTPLLADPSPLVRAMAVWAFRRLASADEIAATRSRHLARETDGDVRSEWTSGRDA

SEQ ID NO: 77357 - protein, 371 aa, Hyphomicrobium sp.
  REGION 1..371: note = tr|A0A3S0TQ14|A0A3S0TQ14_HYPSQ tRNA epoxyqueuosine(34) reductase QueG OS=Hyphomicrobium sp.; OX = 82 GN=queG PE=4 SV=1
MIRAEASKLGLDAVGIARLADDTELTARLAHFLSEKRHGDMDWMETHADRRSGPLKLWPDAKSAIIFGQSYAPPSNPLDALRDRSNAAISVYAKGRDYHDVLKKKIKSLARSFAERSGADVKVFVDTAPLMEKPLAAKAGLGWQGKHTILVSRDHGNWLFLGAVLTTAELEPDAGTENHCGSCRRCLDICPTNAFPAPYQLDARRCIAYLTIEHKGHIAPEFRVPIGNRVFGCDDCAAVCPWNKFASAATEIRYAARPETDNPPLAELLALDDAAFRSRFAGTPIKRTGRDRVVRNALIASGNSGDRSLLRQIEPLMEDSSALVRAMAIWASRRLANPGEIEALQKQYQDRERDPEVAAEWTLPMEGTRGA

SEQ ID NO: 77358 - protein, 385 aa, Hyphomicrobium sp.
  REGION 1..385: note = tr|A0A218PSR4|A0A218PSR4_9RHIZ Epoxyqueuosine reductase OS=Hyphomicrobium sp. GJ21 OX=113574 GN=queG; PE = 3 SV=1
MTVLDSVTAATDLNVMLRDEARKLGLDAIGIARLDASGELAERLDYFLKHGRHGDMDWMEENADRRGDPNRLWPEAKSAIMIGQSYAPPDNPLDALAEHDRGVISVYAKGRDYHDVVKKKIKSLARAFAAKSGADVKVFVDTAPLMEKPLAMKAGLGWQGKHTVLVSREHGDWLFLGAILTTAALAPDAEEVSRCGSCTRCLDICPTKAFPAPYQLDARRCLAYLSIEHKGHIPLEFREPMGNRVFGCDDCLAVCPWNKFASAATEIRFAAQPATDNPPLADLLVLDDAAFRQRFAGTPVKRTGRNRILRNTLIAAGNSGDRSLLRLITPLFEDESPLVRAMAIWSAKRLMREEEFAPFKSRYEAREADPEVAREWAEPLEGHSA

SEQ ID NO: 77359 - protein, 379 aa, Hyphomicrobium sulfonivorans
  REGION 1..379: note = tr|A0A120CX89|A0A120CX89_HYPSL Epoxyqueuosine reductase OS=Hyphomicrobium sulfonivorans OX=121290; GN = queG PE=3 SV=1
MTDSAQKLKDKLFAHARELGFDAVRVTTPDAIAAAPERLAEYLRKGHHGDMGWMEAHADRRANPLQLWPDVQSIIMLGMSYAPDENPMDLLDEPDRGIISVYARGKDYHDILKGKLKQLAGAFAAQAGADVKVFVDTAPVMEKPLAAAAGLGWQGKNTMLVSRQHGSWLFLGSIFTSAPLPPDEPEPDHCGSCRRCVTACPTSAFPAPYQLDARRCLAYLSIEHKGHIPAEFRRPMANRIFGCDDCLAVCPWNKFAQSAREARFAARAETDNPPLDELLLLDDATFRLRFAGTPIKRTGRDRFIRNVLIAAGNSGDRNLIARVEPLLGDASPLVRAMAVWALRELTRDDVGETLRHRHLAREHDSDVRAEWRHMEEHAQ

SEQ ID NO: 77360 - protein, 365 aa, unidentified
  source 1..365: note = Hyphomonadaceae bacterium
  REGION 1..365: note = tr|A0A3D3Z5Z6|A0A3D3Z5Z6_9RHOB tRNA epoxyqueuosine(34) reductase QueG OS=Hyphomonadaceae bacterium OX=2026748 GN=queG PE=4 SV=1
MVKQLARAHGFDACGLADARAAWEADTRLREFVAAGFHGAMGWMEETLDRRSHPTAMWEDAKTAIMLGVNYGPDTDPMAKLAHPDLANISVYAGGDDYHDVIKKQLKAFAGLLHRQSGAQVKVFVDTAPLMEKPLAARAGLGWQGKHTNLVSTDFGSWLFLGCILIAQDFAADVPTRDHCGSCTACLDACPTKAFPAPYQLDARRCISYLTIEHAGPIPLEFRAAMGNRIYGCDDCLAVCPWNKFAQTARETKLHVRDALKQVSLLELAYFDDTHFRALFAKNPVKRIGVDRFLRNVAIGLGNRGAAEAVPAARHLSQHESPLVRGAGIWALKQLMPPEDFSALAETSMAYETDALVRAEWEQPL

SEQ ID NO: 77361 - protein, 371 aa, unidentified
  source 1..371: note = Hyphomonadaceae bacterium
  REGION 1..371: note = tr|A0A1Z9YC96|A0A1Z9YC96_9RHOB Epoxyqueuosine reductase OS=Hyphomonadaceae bacterium TMED5 OX=1986776; GN = queG PE=3 SV=1
MPIWTSEEARAHALSVGFDVCHVTSVEEGWAASDRLRSFVEAGFHGDMQWMEDTLERRVHPQAMWSGAKSAIVVGVNYGPDHNPLGILEQTDRAAISVYAKGKDYHDLLKKRLKQLARDFVAATGCEVKVFVDTAPLMEKPLAAKSGLGWQGKHTNLVSREFGSWLFLGVMLTEAELSPDEPGEDKCGSCRACLDICPTNAFPGPYQLDARKCISYLTIEHDGPIPLDLREPMGNRIYGCDDCLAVCPWNKFAQLSSEAKFAAGVMTDAPALSELLALDDEAFREAYRGSPIKRIKRRRFLRNVLIATGNSGDTSLIPTVKNLLSDEEPLVRGMAVWALSRLDLAGARAAKAEHLASEADAQVQSEWHLIN

SEQ ID NO: 77362 - protein, 377 aa, Hyphomonas adhaerens
  REGION 1..377: note = tr|A0A3B9H315|A0A3B9H315_9RHOB Epoxyqueuosine reductase OS=Hyphomonas adhaerens OX=81029 GN=queG PE=3; SV = 1
MPTLISDPADRATFARQHALSLGFDAVGIARADEAWAASDRLEAFVAAGHHGTMEWMETTLERRRTPVSMWAGAKSAVTVALNYGPDHDPMETLQQREAGNISVYARGKDYHDTLKSRLKQLAREFVAKTGAEVKVFVDTAPLMEKPLAAKAGLGWQGKHTNLVSRELGSWFFLGVMLTDAELPPDTPETDHCGSCRNCLDICPTKAFPAPYQLDARRCISYLTIEHKGPIPEEFRTAMGNRIYGCDDCLAVCPWNKFASAAREAAFHARAELKLPGLDELAALDDAAFREVFSGSPIKRIGRDRFVRNVCIAIGNSDAPRFVPLLEGLTRDTSALVRGAAAWALLQLDAERFSLARSQNASGESDPDVLREWNRGA

SEQ ID NO: 77363 - protein, 374 aa, Hyphomonas adhaerens
  REGION 1..374: note = tr|A0A069E5M8|A0A069E5M8_9RHOB Epoxyqueuosine reductase OS=Hyphomonas adhaerens MHS-3 OX=1280949 GN=queG; PE = 3 SV=1
MISDPADRATFARQHALSLGFDAVGIARADEAWAASERLEAFVAAGHHGTMEWMETTLERRRTPVSMWVGAKSAVTVALNYGPDHDPMETLKQREAGNISVYARGKDYHDTLKSRLKQFAREFVAKTGAEVKVFVDTAPLMEKPLAAKAGLGWQGKHTNLVSRELGSWFFLGVMLTDAELPPDTPETDHCGSCRNCLDICPTRAFPAPYQLDARRCISYLTIEHKGPIPEEFRTAMGNRIYGCDDCLAVCPWNKFASAAREAAFHARAELKLPGLDELAALDDAAFREVFSGSPIKRIGRDRFVRNVCIAIGNSDAPRFVPLLEGLTRDTSALVRGAAAWALLQLDAERFSLARSQNASGETDPDVLREWNRGA

SEQ ID NO: 77364 - protein, 370 aa, unidentified
  source 1..370: note = Hyphomonas atlantica
  REGION 1..370: note = tr|A0A059EBS5|A0A059EBS5_9RHOB Epoxyqueuosine reductase OS=Hyphomonas atlantica OX=1280948 GN=queG PE=3; SV = 1
MPDPLHIRVKHLARSLGFDGVAIARADEPWQAGERLEAFVDAGHHGSMEWMETTLARRKAPTAMWPDAKSAVVVALNYGPDHDPLDTLQNTTLGNISVYARGRDYHDTLKKRLKQLARDFVAETGAEVKVFVDTAPLMEKPLAHKAGLGWQGKHTNLVSRELGSWFFLGVMLTAAELEPDTPEPDHCGSCRLCQEICPTNAFPAPYKLDARRCISYLTIEHAGPIPEEFRAAMGNRIYGCDDCLAICPWNKFAETAKESAFHARAELKAPGLDELAALDDAGFREVFSGSPIKRIGRDRFVRNVCIAIGNSGDPGLIASLLPLLDDPAPVVRGMAVWALARLDGARFAKEKAARMEPETDPSVLAEWMTG

SEQ ID NO: 77365 - protein, 128 aa, unidentified
  source 1..128: note = Hyphomonas atlantica
  REGION 1..128: note = tr|A0A356W392|A0A356W392_9RHOB Epoxyqueuosine reductase (Fragment) OS=Hyphomonas atlantica OX=1280948; GN = DD728_04255 PE=4 SV=1
CLAICPWNKFAETAKESAFHARAELKAPGLDELAALDDAGFREVFSGSPIKRIGRDRFVRNVCIAIGNSGDPGLIANLLPLLDDPAPVVRGMAVWALARLDGARFAKEKAARMEPETDPGVLAEWMTG

SEQ ID NO: 77366 - protein, 370 aa, unidentified
  source 1..370: note = Hyphomonas beringensis
  REGION 1..370: note = tr|A0A062U7T0|A0A062U7T0_9RHOB Epoxyqueuosine reductase OS=Hyphomonas beringensis OX=1280946 GN=queG; PE = 3 SV=1
MPDPLHILVKDLARSLGFDAVAITRADEPWQAGERLEAFVDAGHHGSMEWMETTLERRKAPTAMWADAKSAVVVALNYGPDHDPLLTLQHKTVGNISVYARGKDYHDTLKKRLKQLAREFVDESGAEVKVFVDTAPLMEKPLAHKAGLGWQGKHTNLVSRELGSWFFLGVMLTAAELEPDTPETDHCGSCRACQDICPTNAFPAPYTLDARRCISYLTIEHAGPIPQEFRAAMGNRIYGCDDCLAICPWNKFAGAANEAAFHARAELKVPGLDELAALDDQGFRDVFSGSPIKRIGRDRFVRNVCIAIGNSGEAQLISSLLPLLQDDVPVVRGAAVWALGRLDAARFAEQKAALMDRETDPDVLAEWMMD

SEQ ID NO: 77367 - protein, 379 aa, unidentified
  source 1..379: note = Hyphomonas chukchiensis
  REGION 1..379: note = tr|A0A062UKR1|A0A062UKR1_9RHOB Epoxyqueuosine reductase OS=Hyphomonas chukchiensis OX=1280947 GN=queG; PE = 3 SV=1
MPISTSDPLARSPEAFLKDTARSIGFDSVRITRADEPWAAGERLEAFVADGRHGQMEWMETTLERRKAPTAMWAGAKSAVVVALNYGPGIDPMELLAERSVGNISVYARGRDYHDLVKSRLKQLARAFVAETGAEVKVFVDTAPLMEKPLAAKAGMGWQGKHTNLVSRELGSWFFLGVMLTAAELRPDATETDHCGSCRACLDVCPTQAFPAPYQLDARRCISYLTIEHAGPIPREFRAAMGNRIYGCDDCLAVCPWNKFAEAASEAALHARAELKTPGLDELAALDDATFREVFSGSPIKRSGRTRFVRNVCVAIGNSGDARLVPSLLSLLDDEAADIRGAAIWALARLDPDRFEAEKAARMVEETDPCVMAEWEGAA

SEQ ID NO: 77368 - protein, 375 aa, Hyphomonas hirschiana
  REGION 1..375: note = tr|A0A059FGY8|A0A059FGY8_9RHOB Epoxyqueuosine reductase OS=Hyphomonas hirschiana VP5 OX=1280951 GN=queG; PE = 3 SV=1
MQSSISDPAARLKERALALGFDAAGIARADEAWPAAERLKAFVELGRHGDMAWMETTLARRAAPTAMWPEARSALVVAMNYGPDHNPLDTLAQRQTGNISVYARGRDYHDLIKSRLKQLAGEVAQITGADVKVFVDTAPLMEKPLAQKAGLGWQGRHTNLVSRDLGSWFFLGTVLTSAALTPDAPEPDHCGSCRACLDICPTNAFPAPYQLDARRCISYLTIESAGPIPAEFRPAMGNRIYGCDDCLAACPWNKFASSASEAALFARAELKGPGLDELAALDDAAFRDVFSGSPVKRSGRDRFVRNVAIAIGNSGEPRLAASLLPLLQDPAPIVRGAAIWALARLDPARFAEEKARLRPSEHDMSVQAEWDERPA

SEQ ID NO: 77369 - protein, 374 aa, Hyphomonas jannaschiana
  REGION 1..374: note = tr|A0A059F669|A0A059F669_9RHOB Epoxyqueuosine reductase OS=Hyphomonas jannaschiana VP2 OX=1280952; GN = queG PE=3 SV=1
MISDPADRAEFARQHALTLGFDAVGIARAYEAWAASERLEAFVEAGRHGTMDWMETTLERRRTPTSMWAGAKSAITVALNYGPDHDPMDTLQQREAGNISVYARGRDYHDTLKSRLKQLAREFVAKTGAEVKVFVDTAPLMEKPLAAKAGLGWQGKHTNLVSRDLGSWFFLGVMLTDAELVPDTPEADHCGSCRNCLDICPTKAFPAPYQLDARRCISYLTIEHKGPIPEEFRASMGNRIYGCDDCLAVCPWNKFASAASEAAFHARAELKLPGLDELAALDDAAFREVFSGSPIKRIGRDRFVRNVCIAIGNSGAARFVPQLEGLVTDASALVRGAAAWALLQLDAERFSFARSQNVAGETDPDVLREWNRSA

SEQ ID NO: 77370 - protein, 379 aa, Hyphomonas johnsonii
  REGION 1..379: note = tr|A0A059FPT3|A0A059FPT3_9RHOB Epoxyqueuosine reductase OS=Hyphomonas johnsonii MHS-2 OX=1280950 GN=queG; PE = 3 SV=1
MPISTSDPVAGSPEAFLKTTARAIGFDGVRIARADAPWHAGERLEAFVADGRHGQMAWMETTLERRKAPTAMWAGAKSAVVVALNYGPGLDPMEMLAETRLGNISVYARGKDYHDLLKSRLKQLARAFVAETGAEVKVFVDTAPLMEKPLAAKAGMGWQGKHTNLVSRDLGSWFFLGVMLTDAELTPDAAEADHCGSCQACLDVCPTKAFPAPYQLDARRCISYLTIELAGPIPHEFRAAMGNRIYGCDDCLAVCPWNKFAAAASEAALHARAELKAPELDELAALDDATFREVFSGSPVKRSGRNRFVRNVCIAIGNSADPTLVASLLPLLGDAAPEVRGAAIWALARLDPARFAAEKSARRDREADPGVVAEWDQTA

SEQ ID NO: 77371 - protein, 375 aa, Hyphomonas neptunium; identical to SEQ ID NO: 77368
  REGION 1..375: note = tr|Q0BXL4|Q0BXL4_HYPNA Epoxyqueuosine reductase; OS = Hyphomonas neptunium (strain ATCC 15444) OX=228405; GN = queG PE=3 SV=1

SEQ ID NO: 77372 - protein, 379 aa, Hyphomonas oceanitis
  REGION 1..379: note = tr|A0A059G7G7|A0A059G7G7_9RHOB Epoxyqueuosine reductase OS=Hyphomonas oceanitis SCH89 OX=1280953 GN=queG; PE = 3 SV=1
MPISTSDPLASSPEAFLKDTARSIGFDSVRITRADEPWAAGERLEVFVADGRHGQMEWMETTLERRKAPTAMWAGAKSAVVVALNYGPGIDPMELLAERSVGNISVYARGRDYHDLVKSRLKQLARAFVAETGSEVKVFVDTAPLMEKPLAAKAGMGWQGKHTNLVSRELGSWFFLGVMLTAAELQPDATETDHCGSCRACLDACPTKAFPAPYQLDARRCISYLTIEHAGPIPREFRAAMGNRIYGCDDCLAVCPWNKFAEAASEAALHARAELKTPGLDELAALDDATFREVFSGSPIKRSGRTRFVRNVCVAIGNSGDVRLVPSLLSLLGDEAADIRGAAIWALARLDPDRFEAEKAARMAEETDPGVLAEWEGAA

SEQ ID NO: 77373 - protein, 375 aa, Hyphomonas polymorpha
  REGION 1..375: note = tr|A0A062VMW2|A0A062VMW2_9RHOB Epoxyqueuosine reductase OS=Hyphomonas polymorpha PS728 OX=1280954; GN = queG PE=3 SV=1
MQSSISDPEARLKERALALGFDAAGIARADEAWPAGERLKTFVELGRHGDMAWMETTLERRSAPTAMWPEARSALVVALNYGPDHNPLDTLSETATGNISVYARGRDYHDVIKSRLKQLAGEVAEVTGADVKVFVDTAPLMEKPLAQRAGLGWQGRHTNLVSRQLGSWFFLGTVLTSADLTPDAPEADHCGSCRACLDICPTAAFPAPYQLDARRCISYLTIEYGGPIPAAFRPAMGNRIYGCDDCLAACPWNKFASSASEAALYARAELKGPGLDELAALDDAAFREVFSGSPVKRSGRDRFVRNVAVAIGNSGEPRLTASLLALLQDDAPIVRGAAIWALARLDPARFAEEKARRRPSEHDRTVIAEWDETPA

SEQ ID NO: 77374 - protein, 366 aa, Hyphomonas sp.
  REGION 1..366: note = tr|A0A2D8W2X1|A0A2D8W2X1_9RHOB Epoxyqueuosine reductase OS=Hyphomonas sp. OX=87 GN=queG PE=3 SV=1
MHIRVKDLARSLGFDAVAITRADEPWQAGERLEAFVGAGHHGSMEWMETTLERRKAPTAMWPDAKSAVVVALNYGPDHDPLDTLQHKTLGNISVYARGRDYHDTLKKRLKQLAREFVAESGAEVKVFVDTAPLMEKPLAHKAGLGWQGKHTNLVSRELGSWFFLGVMLTAAKLEPDTPETDHCGSCRACQDICPTNAFPAPYTLDARRCISYLTIEHSGPIPQEFRAAMGNRIYGCDDCLAICPWNKFAEAASEAAFHARAELKVPGLDELAALEDTDFREVFSGSPIKRIGRDRFVRNVCIAIGNSGEGRLISSLLPLLQDEAPVVRGAAVWALARLDAARFAEEKAAWMDRETDPGVLAEWMMD

SEQ ID NO: 77375 - protein, 376 aa, Hyphomonas sp.
  REGION 1..376: note = tr|A0A1Z9Y0E9|A0A1Z9Y0E9_9RHOB Epoxyqueuosine reductase OS=Hyphomonas sp. TMED17 OX=1986605 GN=queG PE=3; SV = 1
MADDLAAWLDTEARRLGFDVVGLARADETWAASERLEAFVEAGYHGSMTWIQETLERRKMPTSMWPEAKSAIVVGMNYGPDIDPLAVLDRPDLAGVSVYAKGSDYHDVLKKRLKHLARGFVEQSGQQVKVFVDTAPLMEKPLAAKAGLGWQGKHTNLVSRAFGSWLFLGVMLTDAVLPADAEEIDHCGSCRACLDICPTDAFPGPYRLDARRCIAYLTIEHHGPIPHEFRHQIGNRIYGCDDCLAVCPWNKFAVQSREQALWARLELQYLKLADLLELDDAAFRTLFSGSPIKRIGRNRFVRNVLIGIGNSGDRQFLNETFFACLTDPDATVRATAIWALRCLDENRFGLEKRKHMPHETDPVVIAEWRSAAGPEK

SEQ ID NO: 77376 - protein, 308 aa, Hyunsoonleella jejuensis
  REGION 1..308: note = tr|A0A1H9ADC6|A0A1H9ADC6_9FLAO Epoxyqueuosine reductase OS=Hyunsoonleella jejuensis OX=419940 GN=queG; PE = 3 SV=1
MMIETKIKYTKLIKTEAKRLGFLSCGISKAEFLEEEAPRLEQWLNQNMHGGMRYMENHFDKRLDPTKLVEDSKSVVSLLLNYFPSEVQNSESYKISKYAYGTDYHFVIKDKLKSLLHFIQEEIGEVNGRAFVDSAPVLDKAWAAKSGLGWIGKHSNLLTQQVGSFYFIAELIIDLELEYDTPVTDHCGTCTACIDACPTEAITEPYVVDGSKCISYFTIELKENIPSEFKGEFDDWMFGCDVCQDVCPWNRFSKAHNEPLFNPHPELLSMSKKDWQEITEETFRKVFKKSAVKRTKYSGLKRNIEFLQ

SEQ ID NO: 77377 - protein, 313 aa, unidentified
  source 1..313: note = Hyunsoonleella pacifica
  REGION 1..313: note = tr|A0A4V2JB41|A0A4V2JB41_9FLAO Epoxyqueuosine reductase OS=Hyunsoonleella pacifica OX=1080224 GN=queG; PE = 3 SV=1
MSSLSPRERARERASIIKTEAKRLGFLSCGISKAEFLEEEAPRLERWLNQNMHGEMRYMENHFDKRLDPTKLVEDSKSVVSLLLNYFPSETQNTESYKLSKYAYGTDYHFVIKDKLKSLLHFIQDEIGEVNGRAFVDSAPVLDKAWAAKSGLGWIGKHSNLLTQQIGSFYFIAELIIDLELEYDTPVTDHCGTCTACIDACPTEAIVEPYVVDGSKCISYFTIELKDNIPTEFKGKFDDWMFGCDVCQDVCPWNRFSKSHSEPLFNPHPELLSMSKKDWEDITEETFRKVFKKSAVKRTKFSGLNRNINFLKD

SEQ ID NO: 77378 - protein, 307 aa, Hyunsoonleella sp.
  REGION 1..307: note = tr|A0A4Q9FCX7|A0A4Q9FCX7_9FLAO Epoxyqueuosine reductase OS=Hyunsoonleella sp. T58 OX=2527939 GN=queG; PE = 3 SV=1
MIEAKSKYTKLIKTEAKRLGFLSCGISKAEFLEEEAPRLEKWLNQNKHGDMRYMENHFDKRLDPTKLVEDSKSVVSLLLNYFPSEVQNSESYKISKYAYGTDYHFVIKDKLKSLLHFIKEEIGEVSGRAFVDSAPVLDKAWAAKSGLGWIGKHSNLLTQQVGSFYFIAELIIDLELEYDTPVTDHCGTCTACIDACPTEAITEPYVVDGSKCISYFTIELKENIPSEFKGKFDDWIFGCDVCQDVCPWNRFSKAHSEPLFNPHPELLSMSKKDWEEITEETFRKVFKKSAVKRTKYSGLKRNIEFLQ

SEQ ID NO: 77379 - protein, 308 aa, unidentified
  source 1..308: note = Ichthyenterobacterium magnum
  REGION 1..308: note = tr|A0A420DY08|A0A420DY08_9FLAO Epoxyqueuosine reductase OS=Ichthyenterobacterium magnum OX=1230530; GN = queG PE=3 SV=1
MINSKSKHTRLIKQEAKRLGFLSCGISKAEFLEIEAPRLENWLNKNMHGEMRYMENHFDKRLDPTKLVEGSKSVVSLLLNYFPNQKQTANSYKLSKYAYGTDYHFIIKDKLKSLLHVIQDEIGEVGGRAFVDSAPVLDKAWAAKSGLGWIGKHSNLLTQQAGSFYFIAELIIDLELDYDTITTDHCGTCTACIDACPTEAITEPYVVDGSKCISYFTIELKENIPTEFKGQFNDWMFGCDVCQDVCPWNRFSKAHNEPLFNPHPELLEMTKKDWDEITEDTFRKVFKKSAVKRTKFSGLTRNIKFLKD

SEQ ID NO: 77380 - protein, 393 aa, unidentified
  source 1..393: note = Ideonella sakaiensis
  REGION 1..393: note = tr|A0A0K8P6L1|A0A0K8P6L1_IDESA Epoxyqueuosine reductase OS=Ideonella sakaiensis (strain NBRC 110686 / TISTR 2288 / 201-F6) OX=1547922 GN=queG PE=3 SV=1
MNDRQVDAAWVMQCLRREAAALGFSQIGVAPVDLTEAEPGLLAWLAAGCHGDMDYMARHGLRRARPAELVPGTLSVITARMDYLPRAVSGAGASGDGPGVRDPGDPADQADQADQADRAADWRAVEWARLARPEAATVSLYARGRDYHKVLRRRLQRLAERLQAEVGPFGHRVFTDSAPLLEVELAVRSGLGWRGRHTLVLDRQGSMGFLGEICIDLALPPTPPVQAHCGQCRACLDVCPTGAIVAPYRLDARRCLSYLTIEHEGAIPVEWRPALGNRIYGCDDCQLACPWNKFAQRSPLPDFDPREDLADPTLLALWAWDEAAFLHRTEGSAIRRIGYRRWRRNLAVALGNLLRAPAVPAALRAAVQAALAAARDAADPLLREHLDWALAAG

SEQ ID NO: 77381 - protein, 347 aa, Ideonella sp.
  REGION 1..347: note = tr|A0A437RFS5|A0A437RFS5_9BURK Epoxyqueuosine reductase OS=Ideonella sp. KYPY4 OX=1862385 GN=queG PE=3; SV = 1
MRGWGRELGFSQIAIADIDLTTAEAGLLAWLEAGFHGGMGYMAAHGLKRARPAELVPGTVRVITARMDYLPRDTPPDWQQAEQQALSDPQRAVVSVYARGRDYHKVLRQRLQRLAERLAHDVGPLGHRVFTDSAPVLEVELATRAGLGWRGKHTLALHREAGSMFFLGEIYIDLPLPIDAPVSAHCGSCEACLTACPTQAIVAPYRLDARRCISYLTIEHEGAIAPELRPLIGNRIYGCDDCQLACPWNKYAQRATLPDFDTRAPLGNATLLQLWAWDEAEFLRRTEGSAVRRIGLARWRRNLAVALGNAWRETGDPALALALQAALPAASDLLAEHIRWALSQRRA

SEQ ID NO: 77382 - protein, 371 aa, Idiomarina aestuarii
  REGION 1..371: note = tr|A0A2T4CNR0|A0A2T4CNR0_9GAMM Epoxyqueuosine reductase OS=Idiomarina aestuarii OX=624146 GN=queG PE=3; SV = 1
MDFHQLAADIKQWGAELGFQKVGITDLDLAAEQEALQRWLDAGMHGEMDYMERHRELRANPDQLHPGAVRAISVRMNYLPAEAGFARTLKNPRLGYISRYALGRDYHKVMRKRLKQLGERIQAACADLDFRPFVDSAPIMERPLAVKAGLGWTGKHTLVLDENGGSWFFLGELLVNLPLPVDQPVEEKCGTCKACMTICPTQAIVEPYVLDARRCISYLTIELKNSIPEEFRPLIGNRIYGCDDCQLICPWNRYAHLTDENDFSPRANLLAPELLELWQWDEATFLKQTEGSPIRRIGFERWSRNLAVALGNAPADDDIIQALEARRSEASEMVQEHIDWALERQRKAEHKTEKQVLRLVRAVERGLPRDA

SEQ ID NO: 77383 - protein, 379 aa, unidentified
  source 1..379: note = Idiomarina aquatica
  REGION 1..379: note = tr|A0A4R6NYI1|A0A4R6NYI1_9GAMM Epoxyqueuosine reductase OS=Idiomarina aquatica OX=1327752 GN=queG PE=3; SV = 1
MPDTPLSEPQLQQLASDIKRWGHELGFQKVGIADLDLSRHEASLQEWLDKGYHGEMGFMERHGMLRARPAELHPGSVRAISVRMNYLPVEAGFAKTLNDSNKAFISRYALGRDYHKLLRKRLKQLGDKIKAQFDDTDFRPFVDSAPIMERPLAEKAGLGWTGKHTLILDRDSGSWFFLGELLINLPLPVDQPVEEGCGSCTACMTICPTQAIVGPYELDARRCISYLTIELRGSIPEELRPLMGNRIYGCDDCQLICPWNRYAQLTDEADFNPRQYLHSPQLLALWQWDEETFKTRLEGSPIRRIGFECWLRNLAVALGNADADADIIAALEWRSGEVSDMVQEHIDWALERHRSGAAKVTQQLKRLVRVVEKGLPRDA

SEQ ID NO: 77384 - protein, 371 aa, unidentified
  source 1..371: note = Idiomarina aquimaris
  REGION 1..371: note = tr|A0A432XNP0|A0A432XNP0_9GAMM Epoxyqueuosine reductase OS=Idiomarina aquimaris OX=641841 GN=queG PE=3; SV = 1
MDFQQLALDIKKWGQELGFQKVGITDLDLSSERAALQQWLDAGMHGEMDYMERHAELRTRPDQLHEGSVRAISVRMNYLPAEAGFAKTLKNPRLGYISRYALGRDYHKLMRKRLKQLGERIKAACADLDYRPFVDSAPILERPLAVKAGLGWTGKHTLVLDEQGGSWFFLGELLVNLPLPVDEPVEEKCGSCKACITICPTQAIVEPYKLDARRCISYLTIELKSAIPEEYRPLMGNRIYGCDDCQLICPWNRYSQLTAEDDFAPRKDLHAPELLELWSWDEETFLKRTEGSPIRRIGFASWQRNLAVALGNAPHDPTIIEALQMQRGNVNDMVDEHIDWALQRQHNKAATTTKQLLRLTRAIEKGLPRDA

SEQ ID NO: 77385 - protein, 371 aa, unidentified
  source 1..371: note = Idiomarina atlantica
  REGION 1..371: note = tr|A0A094L096|A0A094L096_9GAMM Epoxyqueuosine reductase OS=Idiomarina atlantica OX=1517416 GN=queG PE=3; SV = 1
MDFQQLAADIKRWGNELGFQKVGITDLDLSTERAALQRWLDAGMHGEMEYMARHAELRSRPEQLHEGSVRAISVRMNYLPAEAGFARTLKNPRLGYISRYALGRDYHKLMRKRLKQLGERIKAACAELDYRPFVDSAPIMERPLAVKAGLGWTGKHTLVLDEQGGSWFFLGELLVNLPLPVDQPVAEKCGSCTACITICPTQAIVEPYRVDARRCISYLTIELKSAIPEQFRPLMGNRIYGCDDCQLICPWNRYAQLTDEADFAPRKDLHAPELLELWQWDEATFLQKTEGSPIRRIGFACWQRNLAVALGNAPYDPAIISALKAQRGKVNAMVDEHIDWALQRQHDRAAGVTKQVLRLTRAVEKGLPRDA

SEQ ID NO: 77386 - protein, 378 aa, Idiomarina baltica
  REGION 1..378: note = tr|A0A348WQ47|A0A348WQ47_9GAMM Epoxyqueuosine reductase OS=Idiomarina baltica OX=190892 GN=queG PE=3 SV=1
MYSSLSYTELEQLAQKIKQWGRELGFQKVGIADLDLQKHEATLQNWLDKGYHGEMGFMERHGMLRARPAELHPGSVRAISVRMNYLPAEAGFAKTLNNDRLGYISRYALGRDYHKLLRKRLKQLGDKIKAEFADTDFRPFVDSAPIMERPLAEKAGLGWTGKHTLILDKDSGSWFFLGELLINLPLPTDSPVEEACGSCSACMTICPTQAIVAPYELDARRCISYLTIELKGSIPEDLRPLMGNRIYGCDDCQLICPWNRYAQLTDEADFNPRHYLHTPELLALWQWDEETFDQRLQGSPIRRIGHECWLRNIAVALGNAQANADVIEALEWRSGQVSEMVQEHIDWALDRQRSGAAQVTQQLKRLVRAVSKGLPRDA

SEQ ID NO: 77387 - protein, 371 aa, Idiomarina donghaiensis
  REGION 1..371: note = tr|A0A432XK18|A0A432XK18_9GAMM Epoxyqueuosine reductase OS=Idiomarina donghaiensis OX=519452 GN=queG; PE = 3 SV=1
MDYHQLAADIKRWGAELGFQKVGITDIDLSAERDYLQKWLASGMHGTMEWMARHADLRTRPDQLHPGTVRAISVRMNYLPAEAGFAKTLKNPRLGYISRYALGRDYHKLMRKRLKQLGDRIQEACSDLDFRPFVDSAPIMEKPLAIKAGLGWRGKHTLVLDEGSGSWFFLGELLINLPLPTDQPVEEKCGSCSACITICPTQAIVEPYVLDARKCISYLTIELRDSIPEPLRPLIGNRIYGCDDCQLICPWNRYAQLTDENDFSPRANLHAPELLELWAWDEETFLKQTEGSPIRRIGYDCWLRNLAVAMGNAPTDTDIIHALEQRREHCTAMVQEHIDWALQRQRSEAVKVEKQVVRLVRAIEKGLPRDA

SEQ ID NO: 77388 - protein, 378 aa, Idiomarina fontislapidosi
  REGION 1..378: note = tr|A0A432XU02|A0A432XU02_9GAMM Epoxyqueuosine reductase OS=Idiomarina fontislapidosi OX=263723 GN=queG; PE = 3 SV=1
MHSKLSQSELEQLAQKIKQWGQELGFQKVGITDLDLQKHEATLQKWLDKGYHGEMGFMERHGMLRARPAELHPGSVRAISVRMNYLPAEAGFAKTLNNDRLGYISRYALGRDYHKLLRKRLKQLGDRIKAEFDDADFRPFVDSAPILERPLAEKAGLGWTGKHTLILDKDSGSWFFLGELLINLPLPTDKPVQEACGSCSACMTICPTQAIVAPYELDARRCISYLTIELKGSIPEDLRPLMGNRIYGCDDCQLICPWNRYAQLTDEADFNPRHYLHTPELLSLWQWDEDTFNERLQGSPIRRIGHECWLRNIAVALGNAQADATVIEALEWRSGEVSAMVQEHIDWALERQRSGAAQVTQQLKRLVRAVSKGLPRDA

SEQ ID NO: 77389 - protein, 371 aa, unidentified
  source 1..371: note = Idiomarina halophila
  REGION 1..371: note = tr|A0A432XW44|A0A432XW44_9GAMM Epoxyqueuosine reductase OS=Idiomarina halophila OX=1449799 GN=queG PE=3; SV = 1
MDFHQLAEDIKRWGQELGFQKVGITDLDLSAERDALAQWLADGMHGEMDYMERHAELRTRPEQLHQGSVRAISVRMNYLPAEAGFAKTLKNPRLGYISRYALGRDYHKLMRKRLKQLGEKIKTACADLDYRPFVDSAPILERPLAVKAGLGWTGKHTLVLDEQGGSWFFLGELLVNLPLPVDQPVTEKCGSCKACITICPTQAIVEPYKLDARRCISYLTIELKSAIPEEFRPLIGNRIYGCDDCQLICPWNRYSQLTSEDDFAPRKDLHAPELLELWGWDETTFLKTTEGSPIRRIGFAAWQRNLAVALGNAPHDPAIIDALEAQRGAVNEMVDEHIDWALTRQRNKDATTSKQVLRLTRAVEKGLPRDA

SEQ ID NO: 77390 - protein, 371 aa, Idiomarina homiensis
  REGION 1..371: note = tr|A0A432Y6A2|A0A432Y6A2_9GAMM Epoxyqueuosine reductase OS=Idiomarina homiensis OX=364198 GN=queG PE=3; SV = 1
MDFQQLALDIKKWGQELGFQKVGITDLDLSSERAALQQWLAEGMHGEMDYMERHAELRTRPDQLHEGSVRAISVRMNYLPAEAGFAKTLKNPRLGYISRYALGRDYHKLMRKRLKQLGERIKEACAELDYRPFVDSAPILERPLAVKAGLGWTGKHTLVLDEQGGSWFFLGELLVNLPLPVDQPVEEKCGSCKACITICPTQAIVEPYKLDARRCISYLTIELKSAIPEELRPLMGNRIYGCDDCQLICPWNRYSQLTAEDDFAPRKDLHTPELLELWAWDEATFLKRTEGSPIRRIGFASWQRNLAVALGNAPHDETIISALKAQRGQVNAMVDEHIDWALQRQHNKAADTSKQVLRLTRAIEKGLPRDA

SEQ ID NO: 77391 - protein, 371 aa, Idiomarina insulisalsae
  REGION 1..371: note = tr|A0A432YPH4|A0A432YPH4_9GAMM Epoxyqueuosine reductase OS=Idiomarina insulisalsae OX=575789 GN=queG; PE = 3 SV=1
MDLQQLAADIKRWGHELGFQKVGITDLDLSSERAALQQWLAEGMHGEMAYMERHADLRTRPDELHPGSVRAISVRMNYLPAEAGFAKTLKNPRLGYISRYALGRDYHKLMRKRLKQLGERIKQACAELDFRPFVDSAPILERPLAVKAGLGWTGKHTLVLDEQGGSWFFLGELLINLPLPVDAPVEEKCGSCKACITICPTQAIVEPYKLDARRCISYLTIELKSAIPEELRPLMGNRIYGCDDCQLICPWNRYSQLTAEDDFAPRKDLHAPELLTLWEWDEATFLKRTEGSPIRRIGFACWQRNLAVALGNAPHDPAIIAALEARRGSVNDMVDEHIDWALTRQHNKSASTSKQVLRLTRAVEKGLPRDA

SEQ ID NO: 77392 - protein, 371 aa, Idiomarina marina
  REGION 1..371: note = tr|A0A432YFZ0|A0A432YFZ0_9GAMM Epoxyqueuosine reductase OS=Idiomarina marina OX=502366 GN=queG PE=3 SV=1
MDYHQLAEDIKRWGAELGFQKVGITDVDLSTEREHLRRWLEQGMHGDMEWMARHEALRTRPDQLHEGAVRAISVRMNYLPAEAGFAKTLKNPRLGYISRYALGRDYHKLMRKRLKQLGEKIQEACAELDFRPFVDSAPIMEKPLAIKAGLGWRGKHTLVLDEGSGSWFFLGELLVNLPLPTDSEVEEKCGTCSACITICPTQAIVEPYVLDARRCISYLTIELRDSIPEEYRPLMGNRIYGCDDCQLICPWNRYAQLTDEGDFSPRQELHAPELLELWQWDEETFLKRTEGSPIRRIGYDCWLRNLAVAMGNAPTDTDIIKALEKRRPDVSEMVAEHIDWALERQRSGAVKVEKQVVRLVRAVEKGLPRDA

SEQ ID NO: 77393 - protein, 371 aa, Idiomarina maritima
  REGION 1..371: note = tr|A0A317Q2U4|A0A317Q2U4_9GAMM Epoxyqueuosine reductase OS=Idiomarina maritima OX=519453 GN=queG PE=3; SV = 1
MDYHQLAADIKQWGRDLGFQKVGITDVDLSTEQQHLERWLAAGMHGDMEWMARHAELRTRPDQLHPGAVRAISVRMNYLPAEAGFAKTLKNPRLGYISRYALGRDYHKLMRKRLKQLGDKIQAACAELDFRPFVDSAPIMEKPLAIKAGLGWRGKHTLVLDEAHGSWFFLGELLVNLPLPMDSPVAEKCGSCSACMTICPTQAIVEPYVLDARRCISYLTIELKQSIPEEFRPLIGNRIYGCDDCQLICPWNRYAHLTDEADFSPRQHLHAPELLQLWAWDEDTFLRQTEGSPIRRIGHECWQRNIAVALGNAPADAAIIDALQQRRDSASAMVQEHIDWALARQQAGLGKVEKQVLRLVRAVEKGMPRDA

SEQ ID NO: 77394 - protein, 371 aa, Idiomarina maritima
  REGION 1..371: note = tr|A0A1I6HG45|A0A1I6HG45_9GAMM Epoxyqueuosine reductase OS=Idiomarina maritima OX=519453 GN=queG PE=3; SV = 1
MDYHQLAEDIKRWGAELGFQKVGITDVDLSTEREHLRRWLEQGMHGDMEWMARHEELRTSPDQLHEGSVRAISVRMNYLPAEAGFAKTLNNPRLGYISRYALGRDYHKLMRKRLKQLGDRIQEACAELDFRPFVDSAPIMEKPLAIKAGLGWRGKHTLVLDEGSGSWFFLGELLVNLPLPTDREVEEKCGSCSACITICPTQAIVEPYVLDARRCISYLTIELRDSIPEEYRPLMGNRIYGCDDCQLICPWNRYAQLTDEGDFSPRKDLHAPELLELWQWDEETFLKRTEGSPIRRIGYDCWLRNLAVAMGNAPTDTDIIVALEQRRSAVSAMVAEHIDWALERQRSGTVKVEKQVIRLVRAVKKGLPRDA

SEQ ID NO: 77395 - protein, 375 aa, unidentified
  source 1..375: note = Idiomarina piscisalsi
  REGION 1..375: note = tr|A0A432YHH3|A0A432YHH3_9GAMM Epoxyqueuosine reductase OS=Idiomarina piscisalsi OX=1096243 GN=queG PE=3; SV = 1
MSNSINYQQLADDIKRWGAELGFQKVGITDLDLSKHEATLQQWLDNGYHGEMDFMERHGMLRARPAELHPGSVRAISVRMNYLPVEAGFAKTLKDGSKGYISRYALGRDYHKLMRKRLKQLGDRIQSEFDGTDFRPFVDSAPIMERPLAEKAGLGWTGKHTLILDKDSGSWFFLGELLINLPLPVDEPVEEGCGSCTACMTICPTQAIVAPYELDARRCISYLTIELRGAIPEEFRPLIGNRIYGCDDCQLICPWNRYAQLTDENDFSPRQELHSPQLLELWTWTEQQFLDNLQGSPIRRIGYECWLRNLAVALGNAPSDAAIIEALENKTEGVTDMVREHIDWALERQRTGVAEVTKQLKRLVRAVEKGLPRDA

SEQ ID NO: 77396 - protein, 371 aa, Idiomarina salinarum
  REGION 1..371: note = tr|A0A094ITN0|A0A094ITN0_9GAMM Epoxyqueuosine reductase OS=Idiomarina salinarum OX=435908 GN=queG PE=3; SV = 1
MDFHQLAADIKRWGAELGFQKVGIADLDLSAEQEHLQRWLAAGMHGEMDYMERHGDLRAHPEQLHPGSVRAISVRMNYLPAEAGFAKTLKNPRLGYISRYALGRDYHKLMRKRLKQLGDRIKEACAELEFRPFVDSAPIMERPLAVKAGLGWTGKHSLVLDEQGGSWFFLGELLVNLPLPVDKPVAEKCGTCNACITICPTQAIVEPYILDARRCISYLTIELKTAIPEPLRPLIGNRVYGCDDCQLICPWNRYAQLTDEADFSPRQHLHAPELLDLWAWDEETFLARTEGSPIRRIGFERWTRNLAVGLGNAPTDPEIISALESRRDQVSDMVREHIDWALERQRSGAVQPAKQVLRLVRAVERGLPRDA

SEQ ID NO: 77397 - protein, 383 aa, Idiomarina seosinensis
  REGION 1..383: note = tr|A0A432ZDM9|A0A432ZDM9_9GAMM Epoxyqueuosine reductase OS=Idiomarina seosinensis OX=281739 GN=queG PE=3; SV = 1
MSDQRFTPSLSEHQLQALADDIKRWGAELGFQKVGITDLDLSQHEATLQQWLDKGYHGEMSFMERHGMLRARPAELHPGSVRAISVRMNYLPVEAGFAKTLNDSKLGFISRYALGRDYHKLMRKRLKQLGDKIKAAFEDTDFRPFVDSAPIMERPLAEKAGLGWTGKHTLILDRDGGSWFFLGELLINLPLPVDQPVTEGCGSCTACMTICPTNAIVGPYELDARRCISYLTIELKGSIPEELRPLMGNRIYGCDDCQLICPWNRYAQLTEEADFNPRQYLHSPQLIELWQWSEEQFMQRLEGSPIRRIGFDCWLRNLAVALGNAEPDAEIITALEQRSGQVNAMVQEHIDWALDRQRQGTATVTKQLKRLVRAVEKGLPRDA

SEQ ID NO: 77398 - protein, 379 aa, Idiomarina sp.
  REGION 1..379: note = tr|A0A2E9H3P5|A0A2E9H3P5_9GAMM Epoxyqueuosine reductase OS=Idiomarina sp. OX=1874361 GN=queG PE=3 SV=1
MPDTPLSEPQLQQLASDIKRWGHELGFQKVGIADLDLSRHEASLQEWLDKGYHGEMGFMERHGMLRARPAELHPGSVRAISVRMNYLPVEAGFAKTLNDSNKAFISRYALGRDYHKLLRKRLKQLGDKIKAQFDDTDFRPFVDSAPIMERPLAEKAGLGWTGKHTLILDRDSGSWFFLGELLINLPLPVDQPVEEGCGSCTACMTICPTQAIVGPYELDARRCISYLTIELRGSIPEELRPLMGNRIYGCDDCQLICPWNRYAQLTDEADFNPRQYLHSPQLLALWQWDEETFKSRLEGSPIRRIGFECWLRNLAVALGNADADAEIIAALEWRSGEVSDMVQEHIDWALERQRSGAAKVTQQLKRLVRVVEKGLPRDA

SEQ ID NO: 77399 - protein, 378 aa, Idiomarina sp.
  REGION 1..378: note = tr|A0A139C166|A0A139C166_9GAMM Epoxyqueuosine reductase OS=Idiomarina sp. T82-3 OX=1794809 GN=queG PE=3; SV = 1
MYSSLSYTELEQLAQKIKQWGRELGFQKVGIADLDLQEHEATLQNWLDKGYHGEMGFMERHGMLRARPAELHPGSVRAISVRMNYLPAEAGFAKTLNNDRLGYISRYSLGRDYHKLLRKRLKQLGDKIKSEFADTDFRPFVDSAPIMERPLAEKAGLGWTGKHTLILDKDSGSWFFLGELLINLPLPIDSPVEEACGSCSACMTICPTQAIVAPYELDARRCISYLTIELKGSIPEDLRPLMGNRIYGCDDCQLICPWNRYAQLTDEADFNPRHYLHTPELLALWQWDEETFDQRLQGSPIRRIGHECWLRNIAVALGNAQADAEVIEALEWRSGQVSEMVQEHIDWALDRQRSGAAQVTQQLKRLVRAVSKGLPRDA

SEQ ID NO: 77400 - protein, 371 aa, Idiomarina tainanensis; identical to SEQ ID NO: 77393
  REGION 1..371: note = tr|A0A368ULQ7|A0A368ULQ7_9GAMM Epoxyqueuosine reductase OS=Idiomarina tainanensis OX=502365 GN=queG PE=3; SV = 1

SEQ ID NO: 77401 - protein, 375 aa, Idiomarina taiwanensis
  REGION 1..375: note = tr|A0A432ZLF7|A0A432ZLF7_9GAMM Epoxyqueuosine reductase OS=Idiomarina taiwanensis OX=337250 GN=queG PE=3; SV = 1
MTTTVDFEQLAQDIKRWGLELGFQHVGITDLDLSAEQAALDRWLEAGMHGEMGFMERHRELRADPAKLHQGSVRAISVRMNYLPAEAGFAKTLNNPRLGYISRYALGRDYHKLLRKRLKDLGERIKLACADLDYRPFVDSAPIMERPLAVKAGLGWTGKHSLVLAEDSGSWFFLGELLVNLPLPIDQPKQDKCGSCTACITICPTKAIVEPYVVDARRCISYLTIEHKTAIPEEFRPLLGNRIYGCDDCQLICPWNRFAQLTNEDDFSPRQSLHAPKLLELWQWDEATFLKQTEGSAIRRIGFERWQRNLAVALGNADPAPEILSALEQGKGRVSALVDEHIEWAIARQHEGLAKPNQQVRRLVRAIEKGLPRDA

SEQ ID NO: 77402 - protein, 376 aa, unidentified
  source 1..376: note = Idiomarina tyrosinivorans
  REGION 1..376: note = tr|A0A432ZQL1|A0A432ZQL1_9GAMM Epoxyqueuosine reductase OS=Idiomarina tyrosinivorans OX=1445662 GN=queG; PE = 3 SV=1
MSNNTYDYQQLAADIKRWGKELGFQKVGITDVDLSAHEQALQDWLDKGYHGEMEYMARHGMLRARPAELHPGSVRAISVRMNYLPAEAGFAKTLKNPRLGYISRYALGRDYHKVLRKRLKQLGDKIKAAFDDTDFRPFVDTAPILERPLAEKAGLGWTGKHSLILDRDSGSWFFLGELLINLPLPVDQPVEEGCGSCTACMTICPTQAIVEPYVIDARRCISYLTIELRGSIPEEFRPLMGNRIYGCDDCQLICPWNRYAQLTDENDFSPRKDLLAPELISLWQWTEEQFNSQLQGSPIRRIGFDCWLRNIAVALGNADPDVSVINALAQRSGQVSEMVQEHIDWALERQQRGVAKTTQQLKRLVRAVEKGLPRDA

SEQ ID NO: 77403 - protein, 371 aa, unidentified
  source 1..371: note = Idiomarina woesei
  REGION 1..371: note = tr|A0A0K6HAV1|A0A0K6HAV1_9GAMM Epoxyqueuosine reductase OS=Idiomarina woesei OX=1381080 GN=queG PE=3 SV=1
MDYHQLAADIKRWGAELGFQKVGITDIDLSAERDYLQKWLASGMHGTMEWMARHADLRTRPDQLHPGAIRAISVRMNYLPAEAGFAKTLKNPRLGYISRYALGRDYHKLMRKRLKQLGERIQEACADLDFRPFVDSAPIMEKPLAIKAGLGWRGKHTLVLDEGGGSWFFLGELLINLPLPTDQPVAEKCGSCSACITICPTQAIVEPYVLDARKCISYLTIELRDSIPESLRPLIGNRIYGCDDCQLICPWNRYAQLTDEHDFSPRANLHAPELLALWAWDEETFLKQTEGSPIRRIGYECWLRNLAVAMGNAPTDTDIIRALEQRRESCSAMVQEHIDWALERQRSEAVKVEKQVVRLVRAIEKGLPRDA

SEQ ID NO: 77404 - protein, 375 aa, Idiomarina zobellii
  REGION 1..375: note = tr|A0A1G7MXZ9|A0A1G7MXZ9_9GAMM Epoxyqueuosine reductase OS=Idiomarina zobellii OX=86103 GN=queG PE=3 SV=1
MSNSINYQQLADDIKRWGAELGFQKVGITDLDLSKHEATLQQWLDNGYHGEMDFMERHGMLRARPAELHPGSVRAISVRMNYLPVEAGFAKTLKDGSKGYISRYALGRDYHKLMRKRLKQLGDRIQSEFDGADFRPFVDSAPIMERPLAEKAGLGWTGKHTLILDKDSGSWFFLGELLINLPLPVDEPVEEGCGSCTACMTICPTQAIVAPYELDARRCISYLTIELRGAIPEEFRPLIGNRIYGCDDCQLICPWNRYAQLTDEDDFSPRQELHSPQLLELWAWTEQQFLDNLQGSPIRRIGYECWLRNLAVALGNAPSDAAIIEALENKTEGVTDMVREHIDWALERQRTGVAEVTKQLKRLVRAVEKGLPRDA

SEQ ID NO: 77405 - protein, 379 aa, unidentified
  source 1..379: note = Idiomarinaceae bacterium
  REGION 1..379: note = tr|A0A2D7YS99|A0A2D7YS99_9GAMM Epoxyqueuosine reductase OS=Idiomarinaceae bacterium OX=1898113 GN=queG; PE = 3 SV=1
MPDTPLSEPQLQQLASDIKRWGHELGFQKVGIADLDLSRHEASLQEWLDKGYHGEMGFMERHGMLRARPAELHPGSVRAISVRMNYLPVEAGFAKTLNDSNKAFISRYALGRDYHKLLRKRLKQLGDKIKAQFDDTDFRPFVDSAPIMERPLAEKAGLGWTGKHTLILDRDSGSWFFLGELLINLPLPVDQPVEEGCGSCTACMTICPTQAIVGPYELDARRCISYLTIELRGSIPEELRPLMGNRIYGCDDCQLICPWNRYAQLTDEADFNPRQYLHSPQLLALWQWDEETFKTRLEGSPIRRIGFECWLRNLAVALGNADADAEIIAALEWRSGEVSDMVQEHIDWALERQRSGAAKVTQQLKRLVRVVEKGLPRDA

SEQ ID NO: 77406 - protein, 375 aa, unidentified
  source 1..375: note = Idiomarinaceae bacterium
  REGION 1..375: note = tr|A0A0N8KBM3|A0A0N8KBM3_9GAMM Epoxyqueuosine reductase OS=Idiomarinaceae bacterium HL-53 OX=1298881; GN = queG PE=3 SV=1
MSESIDYQQLAEKIKAWGEELGFQQVGIADLDLSKHEAALQDWLDKQYHGDMDYMERHGMLRARPAELHPGSLRAISVRMDYLPKNAKFGSVLRQKDLAYVSRYALGRDYHKVMRKRLKQLGDKIKAYCEHTDFRPFVDSAPILERPLAEKAGLGWTGKHSLLLDSKDGSWFFLGELLINLPLPIDKPQAEQCGSCTACMTICPTQAIVEPYVVDARKCISYLTIEHPGVIDEKYRKAMGNRIYGCDDCQLICPWNRYATPTPEADFLPRHALHAPKLLDLWAWNEETFMKQTEGSPIRRIGFEKWQRNLAIALGNAPHELAIIDALEEKLEHVTAMVREHVSWAIEQQKEKQERTSRQEQRLIRAIEKGLPRDF

SEQ ID NO: 77407 - protein, 356 aa, unidentified
  source 1..356: note = Ignatzschineria cameli
  REGION 1..356: note = tr|A0A2U2AQN4|A0A2U2AQN4_9GAMM Epoxyqueuosine reductase OS=Ignatzschineria cameli OX=2182793 GN=queG; PE = 3 SV=1
MSSNDTYNSPQFIAKLQAKAREIGINELSSSDIDPGKNRDYFIEWLGEGFHGELDYMYKHGEKRYHPDQLVPGTVSMLTAQLHYFNPEIDAQARLEDPNHAYVAEYALGRDYHKVLRNMLTKLGKWLQTEIPDLEFRAFVDSAPVLERAFSQKSGLGFFGKNTMIIHPKRGSFFFLGELLLSKRIEIPSEPITNHCGQCTRCIKACPTDAIVSPFKIDARKCISYLTIEHFGPIPEEYRTAMGNRIFGCDDCQIVCPWNRFAIDLTTEDFFPRHQLDSSTLLQLFNWSEAEFLRKTEGSPIRRLGYARWLRNIAIGIGNSPYAEANIEALKAKLEFEDEAVREHVKWALKEQNEKK

SEQ ID NO: 77408 - protein, 365 aa, Ignatzschineria indica
  REGION 1..365: note = tr|A0A2U2AJ22|A0A2U2AJ22_9GAMM Epoxyqueuosine reductase OS=Ignatzschineria indica OX=472583 GN=queG PE=3; SV = 1
MRHETAHDTDYNSPQFIAKLKAKAAELGINELSSADIDPGKNRDYFIEWLGEGFHGDLDYMYKHGEKRYHPDLLVPGTVSMLTAQLHYFNPEIDAKARLEDPNHAYVAEYALGRDYHKVLRNMLTKLGKWLQEEIPGLEFRAFVDSAPVLERAFSQKSGLGFFGKNTMIIHPKRGSFFFLGELLLSKRIDIPSEPITNHCGQCTRCIKACPTDAIVSPFKIDARKCISYLTIEHFGPIPEEYRSAMGNRIFGCDDCQIVCPWNRFAIDLTTQDFFPRHKLDSSTLLELFSWTEAEFLRKTEGSPIRRLGYARWLRNIAIGIGNSPYSEENIEALKAKENFEDEAVREHVKWALEEQNEKNNRSIS

SEQ ID NO: 77409 - protein, 365 aa, Ignatzschineria sp.
  REGION 1..365: note = tr|A0A256CR20|A0A256CR20_9GAMM Epoxyqueuosine reductase OS=Ignatzschineria sp. F8392 OX=1980117 GN=queG; PE = 3 SV=1
MRHETAHDTDYNSPQFIAKLQAKAREIGINELSSADIDPGKNRDYFIEWLGEGFHGDLDYMYKHGEKRYHPDLLVPGTVSMLTAQLHYFNPEIDAKARLEDPNHAYVAEYALGRDYHKVLRNMLTKLGKWLQEEIPGLEFRAFVDSAPVLERAFSQKSGLGFFGKNTMIIHPKRGSFFFLGELLLSKRIEIPSEPITNHCGQCTRCIKACPTDAIVSPFKIDARKCISYLTIEHFGPIPEEYRTAMGNRIFGCDDCQIVCPWNRFAIDLTTEDFFPRHQLDSSTLLQLFNWSEAEFLRKTEGSPIRRLGYARWLRNIAIGIGNSPYSEENISALKAKENFEDEAVREHIKWALEEQNEKNNSSIS

SEQ ID NO: 77410 - protein, 359 aa, Ignatzschineria ureiclastica
  REGION 1..359: note = tr|A0A2U2AHC1|A0A2U2AHC1_9GAMM Epoxyqueuosine reductase OS=Ignatzschineria ureiclastica OX=472582; GN = queG PE=3 SV=1
MNAPIQSPEFISRLLAKAEELGISELSSSDIDPGINRDYFIEWLGKGYHADLDYMEKHGEKRYHPDQLVPGTVSLLTAQLHYFNPEIDAKARLEDPHHAYVAEYALGRDYHKVLRNMLTKLGKWLQEEIPGLEFRAFVDSAPVLERAFSQKSGLGFFGKNTMIIHPKRGSFFFLGELLLSRRIEIPSEPITNHCGQCTRCIKACPTDAIVAPFQIDAGKCISYLTIEHFGVIPIEYRAAMGNRIFGCDDCQIVCPWNRFAVPLNTEDFLPRHQLDSSTLLELFAWSEAEFLRKTEGSPIRRLGYQRWLRNIAIGIGNSPYSEANMIALQQRLTITDEMVQEHIQWALNEQSAKQFVSVS

SEQ ID NO: 77411 - protein, 306 aa, unidentified
  source 1..306: note = Ignavibacteria bacterium
  REGION 1..306: note = tr|A0A3M0WSW4|A0A3M0WSW4_9BACT Epoxyqueuosine reductase OS=Ignavibacteria bacterium OX=2053306 GN=queG; PE = 3 SV=1
MAISNDEVIHIAKEKGFDLVGFSKADKLTKEVQKLNKWLAEGFHAGMEYMSRNVEKREDVSLILPGAKSVISLGMNYYLDFNPEIKDGEGKVSRYAWGKDYHLIIWEKLEEIIVELKSKDEDFEAKAYVDTGPVMDKAWAVRSGLGWMGKHSNIINREFGSWFFIANLICNKEFDYSEIKTDHCGTCTACIDSCPTGAIVEDFVIDSNKCISYLTIENKGDIPEKLKDNFGNWAFGCDVCQDVCPWNEKFSQPSRVEDFFDTPNTKLNLEEIEGLSNSKFNRKFATSPIKRARLKGIKRNLNYIGK

SEQ ID NO: 77412 - protein, 311 aa, unidentified
  source 1..311: note = Ignavibacteria bacterium
  REGION 1..311: note = tr|A0A1G0XDS1|A0A1G0XDS1_9BACT Epoxyqueuosine reductase OS=Ignavibacteria bacterium RIFOXYD12_FULL_36_8; OX = 1798454 GN=queG PE=3 SV=1
MPVNNQTVIELAKKYGFDLIGFAEAKVLDKEIERLTEWLDRGYHARMSYMQRNLNKRKDIKEILSFARSVISLGMNYYSPEKHSEDKAKGKVSRYAWGKDYHFVIWEKLDKIIDHLKQKEPSFEAISYIDTGPVMDKAWAVRSGLGWMGKHTNVINKEIGSWFFIANMITNWEFEYSDPLEDFCGSCTACIDACPTNAIVNEYVLDSNKCISYLTIENKKNIPEEFKGQFENWIFGCDICQDVCPWNLKFSKATSIKEFYPEKGNKELQLDEIFSLTKKEFDKRFAVSPIKRAKLSGLKRNAEFLLAKNGC

SEQ ID NO: 77413 - protein, 319 aa, unidentified
  source 1..319: note = Ignavibacteriae bacterium
  REGION 1..319: note = tr|A0A3N5JZY3|A0A3N5JZY3_9BACT Epoxyqueuosine reductase OS=Ignavibacteriae bacterium OX=2026749 GN=queG; PE = 3 SV=1
MEYSRSGRIKKKAAEIGFSSIGIARAEIIHDEEKHMREWLDRGFQASMQWMERDAGKRSDVATVLPQAKSVICVALNYYAPVPHTHSPAVGKISRYAWGDDYHEVMRDRLELLSEFLMSEIPGAATKYYVDTGPVMDKAWAVRAGIGWLGKHSNVITRKFGSWVFLGEILIDVELEYDNPALDLCGSCTACLDACPTQAIVQPYVVDSNKCISYLTIEHRGDLPKERVTKFENWIYGCDICQDVCPWNRFQKETDEPAFHPREENRAPELTELAGMSQEEFSRRFKNSPIKRTKHSGLTRNAKAIIESFPDKTHLMKKK

SEQ ID NO: 77414 - protein, 311 aa, unidentified
  source 1..311: note = Ignavibacteriae bacterium
  REGION 1..311: note = tr|A0A2N1V9V9|A0A2N1V9V9_9BACT tRNA epoxyqueuosine(34) reductase QueG OS=Ignavibacteriae bacterium HGW-Ignavibacteriae-4 OX=2013811 GN=queG PE=4; SV = 1
MISQIEKDDIIKLCEGENFSQINIAKYEILTSEIEKYNEWLAKGYNADMDWMKNYLDKRQDVRLIQENTKSIIVLAYNYNQTTKHEYGINKISRYAWGDDYHNYIPKKLKRICKELKTTYPNEEFKYYIDTGAILEKQWGVKSGLGWQGKNSLLLNKKLGSYFFIAIIFSTLEIESDELVKDYCGKCTKCIDACPTDAIIADKIIDSTKCISYWTIESKSEKFPSEISDNLEGWAFGCDICQEVCPWNNHRVPIQIEDFVNPRFGETILDKKTIFNYTEDEFKERYIKSPLKRPKHNGIKRNILELEKNSK

SEQ ID NO: 77415 - protein, 311 aa, unidentified
  source 1..311: note = Ignavibacteriales bacterium
  REGION 1..311: note = tr|A0A419H5R4|A0A419H5R4_9BACT Epoxyqueuosine reductase OS=Ignavibacteriales bacterium OX=2049428; GN = queG PE=3 SV=1
MKISNEIVIHKAHELGFDLVGFSRSEILSEESSHLQMWLDNGFNASMEYMKRNFEKRQDVKQILPSAKSVISLALNYYTPNQHSTDSNTGKISRYAWGRDYHLVIWDKLSLLEEYLSSLDENFESKSYVDTGPVMDKAWAVRSGIGWLGKNSNVINKEIGSWFFIANIITNCEFNYSEPIADLCGSCTACLDACPTNAIVQPYIVDANRCISFLTIENKGEISNEFKGKFDNWIFGCDVCQDVCPWNKKFSEPTMLQEFQPKGTNLVLDEVINMNEEEFKAKLETSPIKRAKLSGLKRNAAFLFGESLPQE

SEQ ID NO: 77416 - protein, 312 aa, unidentified
  source 1..312: note = Ignavibacteriales bacterium
  REGION 1..312: note = tr|A0A2H0FNI0|A0A2H0FNI0_9BACT tRNA epoxyqueuosine(34) reductase QueG OS=Ignavibacteriales bacterium CG18_big_fil_WC_8_21_14_2_50_31_20 OX=1974047; GN = queG PE=4 SV=1
MKITNKIVIETAQKFGFDLVGFADSTTLNEEVSNLKNWLINGFNSKMSYMERNIEKRLDVKEILPSAKSVISLALNYYVKGEFSNNYQNGKISRYAWGTDYHYIIWEKLGQLISELKVIDNNFEAKSYVDTGPVMDKAWAVRSGIGWQGKNSNILNKQIGSWFFIATIVTNYNFSVSKIVTDHCGKCMACIDACPTNAIVEPYIIDANKCISNLTIENKDEIPIEFKGKFKGWIFGCDICQDVCPWNQKFSTATKIPEFLIGENREIDLQSVSKLTNSEFKKKYVSSPIYRAKAKGLKRNAKFLLEDNLETD

SEQ ID NO: 77417 - protein, 306 aa, Ignavibacterium album
  REGION 1..306: note = tr|I0ALW3|I0ALW3_IGNAJ Fe-S protein; OS = Ignavibacterium album (strain DSM 19864 / JCM 16511 / NBRC 101810 / Mat9-16) OX=945713 GN=IALB_2267 PE=4 SV=1
MKKLTNEVVISKAKSLGFDLVGFAQAVELTDEIEKLNLWLDKKFHAGMNYMGRNIHKRRNPKEILPEAKSIISLALVYNTPFSHSNDIDFGKISRYAWGKDYHLIIWEKLDQLENELKAIDSNFNSISYVDTGPVMDKVWAVKAGLGWMGKHTNIINREIGSWFFIANIICNYEFEYSEQLPDFCGECTACIDACPTDAIVQPYVVDSNKCISYQTIENKNEIDDELKGKFENWLFGCDICQEVCPWNKKFSITTSLKDFYPRNKELTYSEIMQMDEKTFKEKFSDSPIKRTRLSGLKRNAKFLFE

SEQ ID NO: 77418 - protein, 395 aa, Ignavigranum ruoffiae
  REGION 1..395: note = tr|A0A1H9E1K5|A0A1H9E1K5_9LACT Epoxyqueuosine reductase OS=Ignavigranum ruoffiae OX=89093; GN = SAMN04488558_10657 PE=4 SV=1
MDRQSIKDKVIAYAKSIGIDKIGFASSQPFDDLRESLIEQKAKGHTTGFEHPIIEERLYPDRILPGAQSIISIGLAYPSRIRQEVPKDKLNKRGQFARASWGLDYHHVLRNKLQQLDQFLKELCPQAQTEMMVDTGALIDVAVAARAGLGFIGRNGLLISKEFGSWLYLGEMITNINFEPDTEVAYDCGQCFRCIRACPTQALLGDGRMNAQKCLSYQTQTKSIMPEDYRRKISSVIYGCDICQLVCPYNQGIDYHLHEEMEPIVDQVQPQLKPLLTLSNREFKAQFGHLAGSWRGKKPIQRNAIIALANMGDKSAMPELIRVMEDDPRPDIRAIAAWALSQIEKFYNPVLLEAVIAQADSETDSAALTEFDQAIQHLKQKRPARTTHRKRDDLS

SEQ ID NO: 77419 - protein, 344 aa, unidentified
  source 1..344: note = Ilumatobacter coccineus
  REGION 1..344: note = tr|A0A2G6KBI4|A0A2G6KBI4_9ACTN tRNA epoxyqueuosine(34) reductase QueG OS=Ilumatobacter coccineus OX=467094 GN=queG PE=4 SV=1
MSRRHPLPTWDEIVDLAADAGITRLGVAPAEILTDARHTLHARKADGLHAGMAFTYRNPDRSTDPFRTLDDARSIIVAARPYQATEEPDRPDGVQGRVGRYAWTDHYTPLRLGLRSIVRRIKAAGYRAVAFADDNSVVDREVAYRGGIGWYGKNSNILVPGAGSYFVLGSIITNADYPVSEPEPNRCGKCHRCLDGCPTAAIVAPGVIDANRCLAWLVQQPGDFPEEFRAALGDRIYGCDECQEVCPPSIRFGDHHRVTVDAPEAWIDLLDLLEGDDDAILARHWYIAQRDPVWVRRNALIVVGNTADPGDRRARAIVERYRAHSVLGEIARWADDQLDKRQAI

SEQ ID NO: 77420 - protein, 364 aa, Ilumatobacter fluminis
  REGION 1..364: note = tr|A0A4R7HXV3|A0A4R7HXV3_9ACTN Epoxyqueuosine reductase OS=Ilumatobacter fluminis OX=467091; GN = BDK89_1492 PE=4 SV=1
MRRTEPLPTWDELVALASEHDIHHVGVAPADVLERARIALVERKEAGLHAGMEFTYRNPDRSTDPSRAVEGARSVLVFAKPYLAEHEPERPPGVQGRVGRYAWVDHYGPLRTSLQEIARRIRRSGHRATAFTDDNSIVDREVAYRGGLGWFGKNANLLLPGAGSFFVLGSIITTAHYEPNEPVKDGCGSCRRCLDGCPTGAIVAPGVVDANRCLAWLVQQPGTFPHEYREALGDRFYGCDDCQEVCPPTVRLGGRHEVDIVELARHPRGQHPPDGGVQAWVDMLDVLEMSDDDLVAHFGRWYLAGRDPIWWRRNALVVLGNVGDAADERTRRVLDHYRAHDSELLREHADWAAGRLGLQSSERP

SEQ ID NO: 77421 - protein, 364 aa, unidentified
  source 1..364: note = Imhoffiella purpurea
  REGION 1..364: note = tr|W9W1I5|W9W1I5_9GAMM Epoxyqueuosine reductase; OS = Imhoffiella purpurea OX=1249627 GN=queG PE=3 SV=1
MNHPPNIVRSDSSPAHPNRWLADRIRDWGRELGFQQVGITDTDLSTAEGRLMEWLADGRHGDMEYMARHGTKRSRPAELVPGTLRVISVRMDYLPETPDRTRGILADPATAFISRYALGRDYHKLIRKRLQRMAERIQAAVAPAACRVFVDSAPVLEKPLAEKAGLGWIGKHTNLIDPQAGSWFFLGEIYTDLSLPIDHPGVSHCGRCQNCIDICPTRAIVAPYQLDARRCISYLTIEHQGSIPEALRTPIGNRIYGCDDCQLVCPWNRFARRTREADFLPRAGLDTATLIELFGWDETTFLERTQGSAIRRIGHVRWLRNIAVALGNADSAPEVETALRTHAEHPSEMVREHVAWALERQGSA

SEQ ID NO: 77422 - protein, 357 aa, unidentified
  source 1..357: note = Immundisolibacter cernigliae
  REGION 1..357: note = tr|A0A1B1YT81|A0A1B1YT81_9GAMM Epoxyqueuosine reductase OS=Immundisolibacter cernigliae OX=1810504; GN = queG PE=3 SV=1
MNPAPAAPDPTALAATLRTLATELGFTGLGIGGVDLAVAEQHLTDWLARGYHGDMAWMARHGAKRSRPAELVPGTLRVISVRMDYWPHGAAAPWPVLESPTLGYVSRYALGRDYHKRVRQRLQSLADGIAALIGPFGYRVFCDSAPVLEKPLAQQAGLGWIGKHTCLIDARGGSWFFLGEIYTDLPLPLDAPAGGHCGTCRACIDVCPTGAIVAPYVLDARRCISYLTIEHPGPIPEPLRPLLGNRIYGCDDCQLVCPWNKFARPTGEADFAPRHGLDAPRLIDLMDWTADQFDTRLAGSAIRRIGHQRWQRNIAVALGNAPAGDADTVACLRRHGDSASPLVAEHVAWALQRHGAG

SEQ ID NO: 77423 - protein, 310 aa, unidentified
  source 1..310: note = Imperialibacter sp.
  REGION 1..310: note = tr|A0A5E8AXL6|A0A5E8AXL6_9BACT Epoxyqueuosine reductase OS=Imperialibacter sp. EC-SDR9 OX=2038371; GN = queG PE=3 SV=1
MPTHTVSKNTQIIKAIASELGFSFCGIAKAEFLAEEAPKLEEWLNRGYQGKMSYLENHFDMRLDPTKLVPGARSVVSLVYNYYPKAKHESENNFKIAKYAYGQDYHLVVKEKLKEFFSSIQKQIGAVEGRVFVDSAPVHERAWAAKSGLGWVGKNSLLLNKQMGSFFFLAELIIDLELEADGPMKDYCGTCTACQDACPTKAIPEPYVVDGSRCISYLTIELKESIPDEFSGKMENWAFGCDICQDVCPWNRFSKPHREAAFSPQGWEGFSKSEWEEMTEETFGRVFKKSAVKRAKFAGLKRNIQFAGKK

SEQ ID NO: 77424 - protein, 310 aa, unidentified
  source 1..310: note = Imtechella halotolerans
  REGION 1..310: note = tr|I0WI25|I0WI25_9FLAO Epoxyqueuosine reductase; OS = Imtechella halotolerans K1 OX=946077 GN=queG PE=3 SV=1
MEIKALHTQKIKSEAKRLGFLSCGVSKAGFLEQEAPRLEQWLRNGYHGEMQYMENHFDKRLDPRLLVDGAQSVISLLLNYYPTDIQNSSDTLKISKYAYGTDYHYVIKDKLKQLLHFIENEIGEVSGRAFVDSAPVLDKAWAAKSGLGWIGKHSNLLTKQTGSFYFIAELIIDLPLMYDGPTTDHCGSCSACIDSCPTEAIIAPYVVDGSKCISYATIELKNEIPAYFSGKMDDWMFGCDVCQDVCPWNRFSKPHSEPEFNPHEKLLDLTRKEWEEITIEVFQEIFKKSAVKRTKYEGLRRNITFLSKKD

SEQ ID NO: 77425 - protein, 309 aa, Indibacter alkaliphilus
  REGION 1..309: note = tr|S2E383|S2E383_9BACT Epoxyqueuosine reductase; OS = Indibacter alkaliphilus LW1 OX=1189612 GN=queG PE=3 SV=1
MKKDKYAQIIKSQARLLGFDFCGIAKAEFLEEEAPKLENWLKQNYHGKMAYLANHFDKRLDPTQLVEGAKSVVSLIYNYYPEKKLPEAKDDFKLAKYAYGKDYHFVVKDKLKSFLANLQLEIGDFGGRVFVDSAPVMERQWAQKAGLGWLGKNSLLLNREMGSFFFLAELIIDLEVSPDAPLQKDYCGTCTKCIDACPTDAIVKNGVVDASKCISYLTIELKDAIPEDFRGKMENWVFGCDICQDVCPWNRFSQNHSEPEFLPNPELLGFGKSDWQEMTAETFGKVFKKSALKRTKFEGLKRNIKFLEG

SEQ ID NO: 77426 - protein, 365 aa, Inhella sp.
  REGION 1..365: note = tr|A0A3S2UHI5|A0A3S2UHI5_9BURK Epoxyqueuosine reductase OS=Inhella sp. CCP-18 OX=2499851 GN=queG PE=3; SV = 1
MTQATDLDPVLPGAALVAQVQAWGRAAGFSQIGIAPIDLRDAEPGLLAWLAAGFHGEMDYMARHGLKRARPAELVPGTASVISVRMDYLPGATPEGWQAVEWAGLQRAQQAQVSLYARGRDYHKVLRQRLQGLADRIAAHLGPFGHRCFTDSAPVLEVELAQRAGLGWRGKHTLLLHREAGSTFFLGEIYVDLALPRSEPTSSHCGQCTACLDACPTQAIVAPYRLDARRCISYLTIEHEGDIPLEFRRALGNRIYGCDDCQLACPWNKFAQRSPLPDFDPREGMQGAHLLSLWAWDEASFLRRTEGSAIRRIGYERWRRNLAVALGNALRADPEDQTLRAALRAARPHASARVARHIDWALDEG

SEQ ID NO: 77427 - protein, 357 aa, unidentified
  source 1..357: note = Inmirania thermothiophila
  REGION 1..357: note = tr|A0A3N1XZK0|A0A3N1XZK0_9GAMM Epoxyqueuosine reductase OS=Inmirania thermothiophila OX=1750597 GN=queG; PE = 3 SV=1
MDPHRLAEDIRRWARELGFAGAGFARAPRPADLARLDAWLAAGRHGAMEWMARHRALRADPAALHPGTRTIISVRMHYTPPTAAPAQAVLADPRRGYISRYALGRDYHKVLRGRLRALARRIEAAAGRFGHRAFVDSAPVLEKPLAREAGLGWIGRHSNLVHPREGSLFVLGELYTDLELPADPPFARDHCGRCTACIDACPTGAIVAPYQVDARRCISYLTIELRGPIPEPLRRPLGNRIFGCDDCQLVCPWNRFARTAAVADFDPRHGLDAPALTALFAWDEATFLARTEGSALRRTGYEGWLRNVAVALGNAPPDPAVAAALRARADHPSALVREHVAWALREQARRRGAPPAG

SEQ ID NO: 77428 - protein, 376 aa, Inquilinus limosus
  REGION 1..376: note = tr|A0A211ZRS2|A0A211ZRS2_9PROT Epoxyqueuosine reductase OS=Inquilinus limosus OX=171674 GN=queG PE=3 SV=1
MSGAAEIKDRIRAEAFALGFDSAGFAAATPDPRLRERLELFLGEGQHGDMGWLEANADRRADPQILWPDALTVLSLGLNYGPAEDPLPLLDQRERGVISVYAQGRDYHDVVKKKLKALGGWIHRSFKTELKVFVDTAPVMEKPLAMRAGIGWQGKHTNLVSRDWGSWLFLGEIYLAIALPPDEPERDRCGSCRSCLDICPTAAFPAPYRLDARRCISYLTIEHKGPIPREMRPLIGNRIYGCDDCLAVCPWNKFAAVGREAALAPWPELNGPALASLLGFDDAGFRAAFSGSPIKRIGRDRFLRNVLVALGNSADPALARDVEPLLDDASPLVRGAAVWALARLLGPGGLGRLASARADDPEAEVREEWQAGLQAA

SEQ ID NO: 77429 - protein, 377 aa, Inquilinus limosus
  REGION 1..377: note = tr|A0A0A0D060|A0A0A0D060_9PROT Epoxyqueuosine reductase OS=Inquilinus limosus MP06 OX=1398085 GN=queG; PE = 3 SV=1
MTGPADIKDRIRAEAFALGFDSAGFAAATPDPRLRERLELFLGEGQHGDMGWLEANADRRADPQTLWPDALTVLSLGLNYGPAEDPLPLLEQRERGVISVYAQGRDYHDVVKKKLKALGGWIHRTFKSELKVFVDTAPVMEKPLAMRAGIGWQGKHTNLVSRDWGSWLFLGEIYLAIALPPDAPERDRCGSCHACLDICPTAAFPAPYRLDARRCISYLTIEHKGPIPRELRPLLGNRIYGCDDCLAVCPWNKFAAAGREAALAPRPELNGPALASLLGFDDAGFRAAFSGSPIKRIGRDRFLRNVLVAIGNSGDPTLAPAVEPLLDDASPMVRGAAVWALGRLLGPEGLRRLAAPRAEDPEAEVREEWQAGLQAAA

SEQ ID NO: 77430 - protein, 312 aa, Inquilinus sp.
  REGION 1..312: note = tr|A0A554SL76|A0A554SL76_9PROT Epoxyqueuosine reductase OS=Inquilinus sp. KBS0705 OX=2578108 GN=queG; PE = 3 SV=1
MQQNLSAYSQLIKTEAKNLGFLFCGIAKAGFLEEEAPRLEAWLNKGMHGEMQYMENHFDKRLDPRLLVDGAKSVISLGLNYYTNQTQLDPFAPKLSKYAYGTDYHFVIKDKLKQLLAIINQKIGEVGGRAFVDSAPVLDKAWAKKAGLGWVGKNTNLISKKAGSFFFLAELIVDIELQYDLEPTADHCGDCTRCIDACPTDAIVGPYIVDGSRCISYLTIELKNEIPQEFKGKMDNWMFGCDICQDVCPWNRFSVLHNQPAFQPHPDLHGLKKQDWEDITTDVFNKVFKNSAVKRTKLDGLKRNIEFLRNTE

SEQ ID NO: 77431 - protein, 412 aa, Insolitispirillum peregrinum
  REGION 1..412: note = tr|A0A1N7PWN6|A0A1N7PWN6_9PROT Epoxyqueuosine reductase OS=Insolitispirillum peregrinum OX=80876 GN=queG; PE = 3 SV=1
MAKRPALPTDPEALKQAIRAEALTIGFDTVGFAHASLPPSVGEDLRGYLAADSHGTMSWMAETADRRADPRVLWPEVVSVIALGVSYAPGDDPFALHAHRDHGVISVYARNRDYHDLLKKRLKQLARWLHEASGEGVKVFVDTAPVMEKPLAVAAGLGWQGKHTNLVSRQHGSWLFLGEVFTTLRLDPDRVQRDHCGSCSACLDSCPTQALWITADGQRRIDGRRCIAYLTIEHQGPIARELRPMLGNRVYGCDDCVGVCPWNRFASPTRLDEFLPRVELLAPELRDLVALDDAAFREVFSGSPIKRIGRGRMVRNALVALGNSGQPALAAAVVPLLDDDDPTVRGCAVWALGRLAPQQLAERAPAALACEQDPLVREEWSHALCDSAEAVPAGARAAAGAPAGRDVGGTGC

SEQ ID NO: 77432 - protein, 303 aa, unidentified
  source 1..303: note = Intestinibacter bartlettii
  REGION 1..303: note = tr|W1UIC5|W1UIC5_9FIRM Uncharacterized protein; OS = Intestinibacter bartlettii DORA_8_9 OX=1403940; GN = Q606_CBAC00336G0004 PE=4 SV=1
MHKDRLKQICENKKIDIMGVAPIGPYFELEKILNDRKQKEHLTGMEEEDINKRINPRLIMDDAKSVIVCAFPYYIGEYRDSNISKYCYGEDYHIVTKQILTDICLEIEKEIPDFKYEIFADNGPLVDRYLAYLSGIGYFGINNNIITDKYGSYIFIAYVVNNYEFEPDKPSEKSCLKCNKCVKYCPGNAILGNFEIDPRKCLSYITQKKEELSESEIQLLKENGKVFGCDICQDVCPHNKDIQTTKICEFNNELITKINQEEIDEISNKEFKRRYKNRAFSWRGRKIIKRNLDIISDKNKMDF

SEQ ID NO: 77433 - protein, 303 aa, unidentified; identical to SEQ ID NO: 77432
  source 1..303: note = Intestinibacter bartlettii
  REGION 1..303: note = tr|A0A1T4V3E9|A0A1T4V3E9_9FIRM Epoxyqueuosine reductase OS=Intestinibacter bartlettii DSM 16795; OX = 445973 GN=SAMN02745147_2304 PE=4 SV=1

SEQ ID NO: 77434 - protein, 283 aa, unidentified
  source 1..283: note = Intestinimonas butyriciproducens
  REGION 1..283: note = tr|A0A0S2W062|A0A0S2W062_9FIRM Epoxyqueuosine (OQ) reductase QueG OS=Intestinimonas butyriciproducens; OX = 1297617 GN=IB211_00227c PE=4 SV=1
MTGPDAWFAAAGAAAWGTCAYEDVRPHMDAPALARAEALCPAPAGIYVAAFPYFPGEAPGNLSLYARGEDYHAAVARRLDQVCAALRPAHPGRCFAPLVDNSPLPEQLCAALAGLGLRGRNTLTILPPWGTWLFLGAILTDLPLESAPVPAPACMDCGKCTAACPAGALGPNGLDPDRCLSALTQKKGALTAEEEARLRGHGLVWGCDACQRACPYNRDVPLSPLPEFRTNLIHTLGTTDVDHLTRRQFQEKYPLRAFTWRGPGVLLRNLRLKEREGRNGPSV

SEQ ID NO: 77435 - protein, 283 aa, unidentified
  source 1..283: note = Intestinimonas butyriciproducens
  REGION 1..283: note = tr|A0A2U1CGD5|A0A2U1CGD5_9FIRM Uncharacterized protein DUF1730 OS=Intestinimonas butyriciproducens; OX = 1297617 GN=C7373_101488 PE=4 SV=1
MTGPDAWFAAAGAAAWGTCAYEDVRPHMDAPALARAEALCPAPAGIYVAAFPYFPGEAPGNLSLYARGEDYHAAVARRLDQVCAALRPAHPGRCFAPLVDNSPLPEQLCAALAGLGLRGRNTLTILPPWGTWLFLGAILTDLPLESAPVPAPACMDCGKCTAACPTGALGPNGLDPDRCLSALTQKKGALTAEEEARLRGHGLVWGCDACQRACPYNRDVPLSPLPEFRTNLIHTLGTTDVDHLTRRQFQEKYPLRAFTWRGPGVLLRNLRLKEREGRNGPSV

SEQ ID NO: 77436 - protein, 357 aa, Iodobacter fluviatilis
  REGION 1..357: note = tr|A0A377Q2Z8|A0A377Q2Z8_9NEIS Epoxyqueuosine reductase OS=Iodobacter fluviatilis OX=537 GN=queG PE=3; SV = 1
MTTSLQQLDYQKLAQQIKGWAQELGFARAGITGIDLSHAEAGLQEWLDAGFHGDMDYMARHGMKRARPAELHPGTISLISVFLPYLPPAAANSEEILANGSKAYLSRYALGRDYHKVLKGRLQQLADRLAAEIGPFGHRVFVDSAPVLEVEIAQQAGQGWRGKHTLLINREYGSYFFIGELFTDLPLPPDPPQQEEHCGRCTRCITVCPTGAIVAPYKVDARRCISYLTIELKGSIPLEFRPMLGNRVYGCDDCQMVCPWNRFAVDTNEADFHVRHGLDDVTLVELFAWSEADFKQKMAGSAIYRIGYEQWLRNMAVGLGNAPKSAGVIAALAARADDPSELVREHVQWALAQHGMV

SEQ ID NO: 77437 - protein, 357 aa, Iodobacter sp.
  REGION 1..357: note = tr|A0A2G3JD92|A0A2G3JD92_9NEIS Epoxyqueuosine reductase OS=Iodobacter sp. BJB302 OX=1506510 GN=queG PE=3; SV = 1
MHTSLPLSDYQKLAQQIKGWALELGFARAGISGVDLSHAEAGLQEWLDAGFHGEMDYMARHGMKRARPAELHPGTISLISVFLPYLPPAAANSEEILADGSKAYLSRYALGRDYHKVLKGRLQQLADRLAAEIGPFGHRVFVDSAPVLEVEIAQQAGQGWRGKHTLLINREYGSYFFIGELFTDLPLPPDPPQQEEHCGRCTRCITACPTGAIVAPYKVDARRCISYLTIELKGSIPLEFRPMLGNRVYGCDDCQMVCPWNRFAVDTKEADFHVRHGLDDVTLVELFAWSEADFKQKMAGSAIYRIGYEQWLRNMAVGLGNAPKSAGVIAALAARADDPSELVREHVQWALAQHGMV

SEQ ID NO: 77438 - protein, 368 aa, Iodobacter sp.
  REGION 1..368: note = tr|A0A3S8ZP68|A0A3S8ZP68_9NEIS Epoxyqueuosine reductase OS=Iodobacter sp. H11R3 OX=2496266 GN=queG PE=3; SV = 1
MHTSPPSLDYQKLARQIKGWAQELGFARAGVTSIDLSHAEAGLQEWLDAGFHGEMDYMARHGMKRARPHELHAGTISLISVFLPYLPLAAANSEEILANGSKAYLSRYALGRDYHKVLKGRLQQLADRLVKEIGPFGHRVFVDSAPVLEVEIATQAGQGWRGKHTLLINREYGSYFFIGELFTDLPLPADPQQQEEHCGRCARCMTACPTGAIVAPYQVDARRCISYLTIELKGSIPLPFRSMLGNRVYGCDDCQMVCPWNRFAVNTKEADFHVRHGLDDVTLVELFAWSEADFKQKMAGSAIFRIGYEQWLRNIAVGLGNAPASPGVITALMARAGDPSEIVREHVLWALGQHGVYDTDLRPGLLLF

SEQ ID NO: 77439 - protein, 384 aa, Isobaculum melis
  REGION 1..384: note = tr|A0A1H9U5T8|A0A1H9U5T8_9LACT Epoxyqueuosine reductase OS=Isobaculum melis OX=142588; GN = SAMN04488559_12154 PE=4 SV=1
MITLKQQIIAESKRLGIDKIGFASAEPFYELEDSLREQRERGFHSGFEHQVIEERIYPEKTFKHPKTIISIALAYPTKIKEDIPKDEKRGMFARASWGIDYHEVLKDRLTKLIAYIQSLATEKEISKDWRFAPQVDTGELVDVAVAQRAGLGFIGRNGLLITEEFGSFVYLGEIITNIDFEIDEPVPFGCGDCTRCVTACPTKALLGNGQMNAQRCLSYQTQTKGMMPEEYRKKIRNVIYGCDICQMVCPYNKGKDFHFHQEMEPEVDTVYPKLKPMLSLSNKAFKEEFGHLSGAWRGKKPLQRNALIALANVGDRSALPDILLCAKEDVRPVIRGTAAWAIGRLGSREADKWLAALNELLQQETEEEVIVELEQAVKQLSKKK

SEQ ID NO: 77440 - protein, 391 aa, Isosphaera pallida
  REGION 1..391: note = tr|E8R5X0|E8R5X0_ISOPI 4Fe-4S ferredoxin-type domain-containing protein OS=Isosphaera pallida (strain ATCC 43644 / DSM 9630 / IS1B) OX=575540 GN=Isop_3310 PE=4; SV = 1
MSVDDHNLSALATELKAQALGLGFDLAGIAPAVAAPGHDRLLDWLARGRAAGMTYLERHAQARGHPRSVLPEVRSILMVAASYRPRDEAAAPRTPLGSPAQPTDPPRSDASPTGRVARYARGRDYHQVIWKRLDRLAQWLKNRVPGAAARGVADTAPLPERDFARLAGLGWIGKNTMLINTRWGSYTFLGALLTNLDLPPDQPHETDHCGRCTRCLEACPTGAFPEPGVLDARRCIAYWTIEHKGPWLPDGDLEPVAPHGWLFGCDICQEVCPWNRKAPGGTLDELQPLPEWTAPVDLRELVALPPAELARRLKPTAMTRAKRSGLVRNAIHLIAEACQHIQGRAEDHLPSALADDPDPMVSATARALLAAANGVRPSTAPTEDQGRSSPA

SEQ ID NO: 77441 - protein, 360 aa, unidentified
  source 1..360: note = Isosphaeraceae bacterium
  REGION 1..360: note = tr|A0A432MPS0|A0A432MPS0_9BACT tRNA epoxyqueuosine(34) reductase QueG OS=Isosphaeraceae bacterium GM2012 OX=2080755 GN=queG PE=4 SV=1
MSPIDRSRTVRRLAVALGFDLVGIAPAVSPPGYDHFLDWLAEGFAAGMGYLHRHAEARRHPEHVLPGVRSVVMVGLSYKPAEADPPESPRSGKVARYARGRDYHQVLWKRLGTLADRVGDAFPGSHCRAVADSAPLLERDFARLAGLGWIGKNTMLIHKQIGSYTVLGALLTDLDLEPDLPFGADHCGTCTRCLDACPTDAFAGPYRLDAGRCISYATIEHRGDLPDDLADSLHGWLFGCDICQEVCPWNRKAPPGRDPELAADPARAAPDLIDLLEADDEAIARLIRGSAMTRAKRSGMLRNAAALLAERGLSEALPALADRLEDEDPVVRAACARAMARIGNGKRAQSLGDEEGKAKQ

SEQ ID NO: 77442 - protein, 379 aa, unidentified
  source 1..379: note = Izhakiella australiensis
  REGION 1..379: note = tr|A0A1S8YRU0|A0A1S8YRU0_9ENTR Epoxyqueuosine reductase OS=Izhakiella australiensis OX=1926881 GN=queG; PE = 3 SV=1
MSHPLDLAQLAQQIKRWGLELGFQQVGICDTDLTPEEPRLQAWLDKQYHGEMAWMARHGMMRARPQELLPGTLRVISVRMNYLPANAAFARVLKDPQLGYVSRYALGRDYHKVLRNRLKKLGEMIQQQCEKVSFRPFVDSAPLLERPLAAKAGLGWTGKHSLILNRQAGSWFFLGELLINLPLPVDKPVEENCGRCIACMTICPTGAIVEPYTVDARRCISYLTIELEGAIPVELRPLIGNRIYGCDDCQLICPWNRYGQLSDEADFSPRARLHAPALIELFRWDEATFLRVTEGSAIRRIGHLRWLRNIAVALGNAPWDQGNLLALETRLGENPLLDEHINWAIEQQIARRSEVRIEVQRSQKQRLVRAIEKGLTRDA

SEQ ID NO: 77443 - protein, 248 aa, unidentified
  source 1..248: note = Izhakiella capsodis
  REGION 1..248: note = tr|A0A1I4VSF1|A0A1I4VSF1_9ENTR Epoxyqueuosine reductase OS=Izhakiella capsodis OX=1367852; GN = SAMN05216516_10240 PE=4 SV=1
MCFRPFVDSAPVLERPLAVKAGLGWTGKHSLILNREAGSWFFLGELLINLPLPVDQPAGENCGRCVACMTICPTGAIVEPYTVDARRCISYLTIELEGAIPVELRSLIGNRIYGCDDCQLICPWNRYGQLGDETGFSPRHKLHAPSLTALFRWDEATFLSVTEGSAIRRIGHLRWLRNVAVALENAPWNENNLLVQKSRLGENPLLDEHILWAIEQQITRRSENRIDVQHSQQQRLVRAIEKGLMRDV

SEQ ID NO: 77444 - protein, 380 aa, unidentified
  source 1..380: note = Izhakiella sp.
  REGION 1..380: note = tr|A0A4P8YG30|A0A4P8YG30_9ENTR Epoxyqueuosine reductase OS=Izhakiella sp. KSNA2 OX=2579935 GN=queG PE=3; SV = 1
MSQPLDLNQLAQDIKQWGKALGFQHVGITDTDLSASEPALQAWLDKQYHGEMEWMARHGMMRARPHELLPGTLRVISVRMNYLPAKAGFASTLKNPSLGYVSRYALGRDYHKLLRNRLKKLGETIRGHCTSLNFRPFVDSAPLLERPLAEKAGLGWTGKHSLILSRDAGSFFFLGELLIDLPLPIDRPVKEECGRCVACITTCPTGAIVEPYVVDARRCISYLTIELEGAIPEEFRPLMGNRIYGCDDCQLICPWNRFSHLTDEADFSPRQALHAPQLVELFAWSEEKFLKVTEGSAIRRIGHLRWLRNIAVALGNAPWDPDCLAALQQRQGEHPLLDEHIDWAIARQLEKRSADAVEVRSAKQQQRLVRAIEKGLPRDA

SEQ ID NO: 77445 - protein, 328 aa, unidentified
  source 1..328: note = Jannaschia aquimarina
  REGION 1..328: note = tr|A0A0D1EBK3|A0A0D1EBK3_9RHOB QueG protein; OS = Jannaschia aquimarina OX=935700 GN=queG PE=4 SV=1
MGICGPDAIPDAAPRLARFLEDGRHGQMGWMGDRQAWRGDPRALWPDCRSVIMLAMSYAPDHDPLEDLALRDRGAISVYAAGRDYHDVIKKALKRLGRWLIDAGADLTEAGPPEIKVFVDTAPVMEKPLAQAAGLGWQGKHTNLLGRDFGNWVFLGAIFTTLDLPRDTPEAEHCGSCTRCLDICPTDAFPAPFQLDARRCISYLTIEHRGPVDKNLRPGIGNRIYGCDDCLAICPWNKFAVAAGDMRLHGPHRAPPLADLASLDDSGFRARYQGSPVKRIGRDRMVRNVSYAIGNSGDGRMIPAVQALCDDADAAVADAARWAVERLR

SEQ ID NO: 77446 - protein, 338 aa, Jannaschia donghaensis
  REGION 1..338: note = tr|A0A0M6YIV8|A0A0M6YIV8_9RHOB Epoxyqueuosine reductase OS=Jannaschia donghaensis OX=420998 GN=queG PE=4; SV = 1
MSLRDRLDAEARAAGFVSVGVCRPGAIADAPARLKTFLDQGHHGQMAWMAERTAWRGDPTALWPAARSVVMLAHSYAPEHDPLDDLEKPAHGALSVYAQGRDYHDVVKKALKRVARWMVAEADCEVKVFVDTAPVMEKPLAQAAGIGWQGKHTNLLSRDFGNWVFLGAIFTTLDLPPDAAEGEHCGSCRKCLDVCPTDAFPAPFRLDARRCISYLTIEHRGPVDPELRGKMGNRIYGCDDCLAVCPWNKFAVQASDIRYHGPHRAPALADLAVLNDADFRTVFAGSPIKRIGRDRMVRNVCYAIGNSGQERLRPVVQDLCEDADEAVADAARWAVERL

SEQ ID NO: 77447 - protein, 338 aa, unidentified
  source 1..338: note = Jannaschia faecimaris
  REGION 1..338: note = tr|A0A1H3JEI5|A0A1H3JEI5_9RHOB Epoxyqueuosine reductase OS=Jannaschia faecimaris OX=1244108; GN = SAMN05444004_101290 PE=4 SV=1
MTFRGRLEAEARAAGFVSLGVCRPDAIPEAPDSLARFLEAGHHGQMGWMGERTAWRGDPASLWPEARSVVMLAHSYAPEHDPLEDLERPEHGAISVYAQGRDYHDVVKKALKRVARWMVTDAKCEVKVFVDTAPVMEKPLAQAAGLGWQGKHTNLLSRDFGNWVFLGAIFTTLDLAPDVAEGEHCGSCRKCLDICPTDAFPAPFQLDARRCISYLTIEHSGPVDMDLRARMGNRIYGCDDCLAVCPWNKFAVAASDLRYHGPHRAPDLAGLAVLDDAAFRARFSGSPIKRIGRDRMVRNVCYAIGNSGEARLKPVVQGLFDDADAAVADAARWAVGRL

SEQ ID NO: 77448 - protein, 338 aa, Jannaschia helgolandensis
  REGION 1..338: note = tr|A0A1H7GQQ9|A0A1H7GQQ9_9RHOB Epoxyqueuosine reductase OS=Jannaschia helgolandensis OX=188906; GN = SAMN04488526_0476 PE=4 SV=1
MSFRVRLEAEARAAGFVSVGVCAPDAIPKAPGQLASFLDAEYHGQMTWMGERSTWRGNPAALWPEARSVVMLAHSYSPGHDPLNDLNRPEHGAISVYAQGRDYHDVVKKALKRVARWMVAEGDCEVKVFVDTAPVMEKPLAQAAGLGWQGKHTNLLSRDFGNWVFLGAIFTTLNMEPDAPEAEHCGSCRKCLDICPTDAFPAPFQLDARRCISYLTIEHRGPVDEGLRPALGNRIYGCDDCLAVCPWNKFAVEASDLRYHGPHRTPDLDELAMLDDTAFRARFSGSPIKRIGRDRMVRNVCYAIGNSRSDRLKTFVQGLCEDPDAGVSNAARWAVERI

SEQ ID NO: 77449 - protein, 338 aa, Jannaschia pohangensis
  REGION 1..338: note = tr|A0A1I3TB47|A0A1I3TB47_9RHOB Epoxyqueuosine reductase OS=Jannaschia pohangensis OX=390807; GN = SAMN04488095_3369 PE=4 SV=1
MSFRARLEAEAQAAGFVALGVCRPDAIPEAPARLAAFLDAGHHGQMGWMGERTAWRGDPGALWPEARSVVMLAQSYAPEHDPLTDLERPEHGAVSVYAQGRDYHDVVKKALKRVARWMVSVADCEVKVFVDTAPVMEKPLAQAAGLGWQGKHTNLLSREFGNWVFLGAIFTTLDLEPDAPEGEHCGTCRKCLDVCPTDAFPAPFQLDARRCISYLTIEHRGPVDEGLRAAMGNRIYGCDDCLAVCPWNKFAVAASDIRYHGPHRAPPLADLAVLDDAAFRVRFSGSPIKRIGRDRMVRNVCYAIGNSGENPLKPIVQSLCDDADDAVADAARWAVGRL

SEQ ID NO: 77450 - protein, 338 aa, Jannaschia rubra
  REGION 1..338: note = tr|A0A0M6XQY2|A0A0M6XQY2_9RHOB Epoxyqueuosine reductase OS=Jannaschia rubra OX=282197 GN=queG PE=4 SV=1
MSLRARLEAEAREAGFVRMGVCRPDAIPDAPGRLHRFLDDGSHGQMAWMDERVAWRGDPASLWPEARSVVMLAHSYAPDHDPLDDLTRPDRGAVSVYAQGRDYHDIVKKALKRLARWMVAEAGCEVKVFVDTAPVMEKPLAQAAGLGWQGKHTNLLSRDFGNWVFLGAIFTTEVLEPDAAEGEHCGSCTKCLDICPTDAFPAPFRLDARRCISYLTIEHRGPVDATLRPALGNRIYGCDDCLAICPWNKFAVGASDMRYHGPHRAPPLEELARLDDAAFRDRFSGSPIKRIGRDRMVRNVCYAIGNSGLARLKPVAQALCDDADVAVADAARWAVDRL

SEQ ID NO: 77451 - protein, 343 aa, Jannaschia seohaensis
  REGION 1..343: note = tr|A0A2Y9C824|A0A2Y9C824_9RHOB Epoxyqueuosine reductase OS=Jannaschia seohaensis OX=475081; GN = BCF38_106108 PE=4 SV=1
MKARLQAEARAAGFVAMGVCRPDAVPEAAGRLDRFLAAGRHGQMTWMGERVAWRGSAAALWPEARSVVMLAHSYAPEHDPLDDLRDPGRGAVSVYAQGRDYHDVVKKALKRVGRWLMAEAAAEDPEIKVFVDTAPVMEKPLAQAAGLGWQGKHTNLLSRDFGNWVFLGAIFTTLELEPDAPEGEHCGSCTRCLDVCPTDAFPAPFQLDARRCISYLTIEHRGPVDPDLRVGLGNRIYGCDDCLAVCPWNKFAVAASDLRYHGPHRAPDLAELAGLDDAAFRSRFAGSPIKRIGRDRMVRNVCYAIGNSGREELKPVVQALCEDEDAAVADAARWAVERLWRSS

SEQ ID NO: 77452 - protein, 339 aa, Jannaschia seosinensis
  REGION 1..339: note = tr|A0A0M7B966|A0A0M7B966_9RHOB Epoxyqueuosine reductase OS=Jannaschia seosinensis OX=313367 GN=queG PE=4; SV = 1
MTIRARLDAEAREAGFVSVGVCRPDAIPDAGVRLRQYLADGNHGGMSWMGERVAWRGDPSALWPEARSVVMLAHSYAPEHNPMTDLSRPDRGTVSAYAQGRDYHEIVKKALKRVARWMVAEADCEVKVFVDTAPVMEKPLAQAAGIGWQGKHTNLLSREFGNWVFLGAIFTTLELAPDAAEGEHCGSCTRCLDICPTDAFPAPFQLNARRCISYLTIEHHGPVDESLRPHLGNRIYGCDDCLAVCPWNKFAVAASDLRYRGPHRAPDLADLAGLDDAGFRARFSGSPIKRIGRNRMTRNVCYAIGNSGEKRLGPVAQRLCDDADPVVADAARWAVDRLS

SEQ ID NO: 77453 - protein, 343 aa, Jannaschia sp.
  REGION 1..343: note = tr|Q28VS1|Q28VS1_JANSC Epoxyqueuosine reductase; OS = Jannaschia sp. (strain CCS1) OX=290400 GN=queG PE=3 SV=1
MTDLKDALRTEALDAGFAKMGVCSPNAVPETAARLKAFVDAGFHGQMGWMAERMHWRGDASALWPEAKSVVMLAEPYTPDSDPLDALARKDRATISVYAQGRDYHDLVKKRLKRVGRWLLAQCPGEQIKVFVDTAPVMEKPLAQAAGLGWQGKHTNLLARDLGNWVFLGAIFTTVELPIDEPEAEHCGSCTACLDICPTNAFPAPFQLDARKCISYLTIEHKGPVDLALRAKLGNRIYGCDDCLAVCPWNKFAQTARDIRYAPRDDLRSPLLADLAALDDAGFRARFSGSPIKRIGRDRFVRNILYAIGNSGQAKLVDAARPLTDDPDVAVADAARWAMERLL

SEQ ID NO: 77454 - protein, 324 aa, Jannaschia sp.
  REGION 1..324: note = tr|A0A1B6Z0V1|A0A1B6Z0V1_9RHOB tRNA epoxyqueuosine(34) reductase QueG OS=Jannaschia sp. EhC01; OX = 1849359 GN=A8B78_11260 PE=4 SV=1
MGVCRPDAVPETAARLKAFVDAGHHGQMGWMAERMHWRGDASALWPEARSVVMLAEPYTPTVDPLDALEARDRATISVYAQGRDYHDLVKKRLKRVGRWLLEQAPEEQIKVFVDTAPVMEKPLAQAAGLGWQGKHTNLLARDLGNWFFLGAIFTTVDLPSDEAGKENCGSCTACLDICPTDAFPAPFQLDARKCISYLTIEHKGPVDAALRAKMGNRIYGCDDCLAVCPWNKFAQAARDIRYAPREELQSPRLADLVRLDDAGFRALFSGSPIKRIGRDRFVRNVLYAIGNSGEPALAEAARPLADDPDPAIADAARWAVERLR

SEQ ID NO: 77455 - protein, 363 aa, Janthinobacterium agaricidamnosum
  REGION 1..363: note = tr|A0A3G2EE46|A0A3G2EE46_9BURK Epoxyqueuosine reductase OS=Janthinobacterium agaricidamnosum OX=55508; GN = queG PE=3 SV=1
MSATTTDLAVLARTIKEWGRELGFAEVRIADVDLSHMEAPLQAWLDAGYHGEMDYMASHGMKRARPAELVPGTVRAISARMNYLPPALGPDWRAHEAARDADPAAAVISVYARGRDYHKVMRSRLQQLAERIKGEIGDFGYRVFSDSAPVMEVELAQKGGLGWRGKHTLLINRQGGSFFFLGEILIDVPLPVDPPETPRCGQCSACITVCPTQAILGPYQLDARRCISYLTIELKGAIPVEMRPLIGNKVYGCDDCQTVCPWNKFAQRAVVPDFDERHSLGSAGMVELFAWTEEEFNRRMEGSAIRRIGHERWLRNLAVGMGNAAAKARGQADIVAALLSRRAHPSAIVREHVEWALALHGIA

SEQ ID NO: 77456 - protein, 368 aa, Janthinobacterium agaricidamnosum
  REGION 1..368: note = tr|W0V0W3|W0V0W3_9BURK Epoxyqueuosine reductase; OS = Janthinobacterium agaricidamnosum NBRC 102515 = DSM 9628 OX=1349767 GN=queG PE=3 SV=1
MSTTEPDLIELARTIKSWGRELGFAEVRIADIDLSHQEAGLQAWLDAGYHGQMDYMASHGMKRARPAELVPGTVRVISARMNYLPPALGPDWRRDEAARQDDPAAAVISVYARGRDYHKVMRSRLQQLAERIEGEIGAFGFRVFSDSAPVMEVALAEKAGLGWRGKHTLLINRQGGSFFFLGEILVDLPLPVDSPETPRCGQCSACIAVCPTQAILGPQQLDARRCISYLTIELKGSIPLEMRPLIGNRVYGCDDCQTICPWNKFAQRAVVADFDERNGLGGSSMVALFGWTEEQFNRCMEGSAIRRIGHERWLRNLAVGMGNAAVKAKGAPDIVAALTARLDHPSEIVREHVAWALALHRSCAAGST

SEQ ID NO: 77457 - protein, 363 aa, Janthinobacterium lividum
  REGION 1..363: note = tr|A0A1E8PT14|A0A1E8PT14_9BURK Epoxyqueuosine reductase OS=Janthinobacterium lividum OX=29581 GN=queG; PE = 3 SV=1
MSATVTDLAALARTIKEWGRELGFAEVRIADVDLSHMEAPLQAWLAAGYHGEMDYMASHGMKRARPAELVPGTVRAISARMNYLPPALGQDWRAHEAARDADPTAAVISVYARGRDYHKVMRSRLQQLAERIKGEIGDFGYRVFSDSAPVMEVELAQKGGLGWRGKHTLLINRQGGSFFFLGEILIDVPLPVDPPETPRCGQCSACITVCPTQAILGPHQLDARRCISYLTIELKGAIPVEMRPLIGNKVYGCDDCQTVCPWNKFAQRAVVPDFDERHSLGSAGMLELFAWTEEQFNRRMEGSAIRRIGHERWLRNLAVGMGNAAAKAKGQEDIVAALLSRREHPSAIVREHVEWALALHGIA

SEQ ID NO: 77458 - protein, 203 aa, Janthinobacterium lividum
  REGION 1..203: note = tr|A0A377RRE3|A0A377RRE3_9BURK Epoxyqueuosine reductase OS=Janthinobacterium lividum OX=29581 GN=queG_2; PE = 4 SV=1
MGWRGKHTLLINRQGGSFFFLGEILIDVPLPVDPPETPRCGQCSACITVCPTQAILGPYQLDARRCISYLTIELKGAIPVEMRPLIGNKVYGCDDCQTVCPWNKFAQRAVVPDFDERHSLGSAGMVELFAWTEEEFNRRMEGSAIRRIGHERWLRNLAVGMGNAAAKAKGQADIVAALLSRREHPSAIVREHVEWALALHGIA

SEQ ID NO: 77459 - protein, 361 aa, Janthinobacterium sp.
  REGION 1..361: note = tr|A0A349KV74|A0A349KV74_9BURK Epoxyqueuosine reductase OS=Janthinobacterium sp. OX=1871054 GN=queG PE=3; SV = 1
MPSTEPDLAALARTIKSWGAELGFAGVGIADVDLARLEPGLRAWLDAGFHGQMDYMASHGMKRARPAELVPGTVRVISARMNYLPPATLDSWRAGEAARLADPGAAVVSVYARGRDYHKVMRSRLQQLAERIRGAVGEFGFRVFSDSAPVMEVALAEKAGLGWRGKHTLLLSREAGSMFFLGEILVDLALPVDAPASPHCGQCQACITVCPTQAILGPQRLDARRCISYLTIELKGAIPEELRPLIGNRVYGCDDCQTACPWNKFAQRAPLADFDERNGLGGATMVELFAWSEDEFQRRMEGSAIRRIGHERWLRNLAVGLGNAADGDRGAPAIVAALEARRLDPSEIVREHVAWALQRHR

SEQ ID NO: 77460 - protein, 363 aa, Janthinobacterium sp.
  REGION 1..363: note = tr|A0A1G8AHM4|A0A1G8AHM4_9BURK Epoxyqueuosine reductase OS=Janthinobacterium sp. YR213 OX=1881027; GN = queG PE=3 SV=1
MSATVTDLAALAHTIKEWGRELGFAEVRIADVDLSHMEAPLQAWLDAGYHGEMDYMASHGMKRARPAELVPGTVRAISARMNYLPSALGPDWREHEAARDADPAAAVISVYARGRDYHKVMRSRLQQLAERIKGEIGDFGYRVFSDSAPVMEVELAQKGGLGWRGKHTLLINRQGGSFFFLGEILIDVPLPVDPPETPRCGQCSACITVCPTQAILGPYKLDARRCISYLTIELKGAIPVEMRPLIGNKVYGCDDCQTVCPWNKFAQRAVVPDFDERHSLGSAGMVELFAWTEEEFNRRMEGSAIRRIGHERWLRNLAVGMGNAATKARGQADIVAALLSRREHPSAIVREHVEWALALHGIA

SEQ ID NO: 77461 - protein, 363 aa, unidentified
  source 1..363: note = Janthinobacterium svalbardensis
  REGION 1..363: note = tr|A0A290X2F2|A0A290X2F2_9BURK Epoxyqueuosine reductase OS=Janthinobacterium svalbardensis OX=368607; GN = queG PE=3 SV=1
MSATVTDLAVLARTIKEWGRELGFAEVRIADVDLSHMEAPLQAWLDAGYHGEMDYMASHGMKRARPAELVPGTVRAISARMNYLPPALGPDWRTHEAARDADPSAAVISVYARGRDYHKVMRSRLQQLAERIKGEIGDFGYRVFSDSAPVMEVELAQKGGLGWRGKHTLLINRQGGSFFFLGEILIDVPLPVDPPETPRCGQCSACITVCPTQAILGPYQLDARRCISYLTIELKGAIPVEMRPLIGNKVYGCDDCQTVCPWNKFAQRAVVPDFDERHSLGSAGMVELFAWTEEEFNRRMEGSAIRRIGHERWLRNLAVGMGNAAAKARGQADIVAALLSRREHPSAIVREHVEWALALHGVA

SEQ ID NO: 77462 - protein, 308 aa, Jejuia pallidilutea
  REGION 1..308: note = tr|A0A362WZX6|A0A362WZX6_9FLAO Epoxyqueuosine reductase OS=Jejuia pallidilutea OX=504487 GN=queG PE=3; SV = 1
MINNTAKYALKIKNEAKRLGFLSCGISRAAFLEDEAPRLEKWLNQNMHGEMRYMENHFDKRLDPTKLVEGSKSVVSLLLNYFPSEVQNSESYKISKYAYGTDYHFVIKDKLKSLLHFIQEEIGEVNGRAFVDSAPVLDKAWAAKSGLGWIGKHSNLLTQQVGSFYFIAELIIDLELEYDTPVTDHCGTCTACIDSCPTEAITEPYVVDGSKCISYFTIELKENIPSEFKGQFNDWMFGCDICQDVCPWNRFSKSHAEPLFNPHPELLALTKKDWEEITEDTFKKVFKKSAVKRTKFSGLKRNIKFLKE

SEQ ID NO: 77463 - protein, 308 aa, Jejuia pallidilutea
  REGION 1..308: note = tr|A0A090VPK9|A0A090VPK9_9FLAO Epoxyqueuosine reductase OS=Jejuia pallidilutea OX=504487 GN=queG PE=3; SV = 1
MINNTAKYTLKIKNEAKRLGFLSCGISRAAFLEDEAPRLEKWLNQNMHGEMRYMENHFDKRLDPTKLVEGSKSVVSLLLNYFPSEVQNSESYKISKYAYGTDYHFVIKDKLKSLLHFIQEEIGEVNGRAFVDSAPVLDKAWAAKSGLGWIGKHSNLLTQQVGSFYFIAELIIDLELEYDTPVTDHCGTCTACIDACPTEAITEPYVVDGSKCISYFTIELKENIPSEFKGQFNDWMFGCDICQDVCPWNRFSKSHAEPLFNPHPELLAMTKKDWEEITEDTFKKVFKKSAVKRTKFSGLKRNIKFLKE

SEQ ID NO: 77464 - protein, 360 aa, Jeongeupia sp.
  REGION 1..360: note = tr|A0A1D9BDQ1|A0A1D9BDQ1_9NEIS Epoxyqueuosine reductase OS=Jeongeupia sp. USM3 OX=1906741 GN=queG PE=3; SV = 1
MDLDKGLDVRELAASIKAWGQALGFARVAITGTDLSHAEPGLQAWLDAGFHGEMDYMARHGLKRARPAELVPGTKTVVSVFLPYRPPGVSSSEAVLADGEKAHVSRYALGRDYHKVLRNRLQKLADRIGAEIGPFGHRVFVDSAPVLEVELATQAGLGWRGKHTLLINRDYGSYFFLGELFTDLALPLDPPEENEHCGRCTKCLVACPTQAIVAPYTVDARRCISYLTIELHGAIPEEFRPMIGNRVYGCDDCQLCCPWNRFAVDTAEPDFHVRHGLDDVTLVELFAWTEDDFREKLAGSPIYRIGYARWLRNLAVGLGNAPSSPAVLAALASRADDGNALVREHVGWALSRHAALQNGP

SEQ ID NO: 77465 - protein, 383 aa, unidentified
  source 1..383: note = Jeotgalibaca dankookensis
  REGION 1..383: note = tr|A0A1S6IMD4|A0A1S6IMD4_9LACT Epoxyqueuosine reductase OS=Jeotgalibaca dankookensis OX=708126 GN=queG; PE = 4 SV=1
MVEMTLKEEVIAACKEIGIDKIGFTTAEPFDDLKESLLEQQSNGHSSGFEHQVLDERLYPELIFDQPKSIISIALAYPSKPLVKAEREKGVRRGSFARASWGIDYHTILRNRLDQLVAFMSEKVPTASFKAMVDTGELMDTVVAQRAGIGFIGRNGLLITEEFGSYVYLGEIITDIEFEPDQPGVFGCGDCTRCVTACPTGALLGDGRLNAQVCLSYQTQTKGSMPLEFRRKIGSVIYGCDICQQACPYNRGIDFHHHPEMEPVPGRETPILQPMLSLSNREFKETFGVLAGSWRGKKPLQRNAIIALANYRDRTAVPELLRVMEEEVRPVIRGTAAWAIGQIVRDVNPELLAFFQEKVENEEDDEARVEMEMALAKLEGDTK

SEQ ID NO: 77466 - protein, 384 aa, unidentified
  source 1..384: note = Jeotgalibaca sp.
  REGION 1..384: note = tr|A0A3Q9BL82|A0A3Q9BL82_9LACT tRNA epoxyqueuosine(34) reductase QueG OS=Jeotgalibaca sp. H21T32 OX=2496265 GN=queG PE=4 SV=1
MTNAVLKREILEACKEIGIDKIGFTTAEPFDYMKEPLLEQHAKGHTSGFEHQVLDERLYPELIFDNPKSILAIGLAYPSKPLEKPERVKGERRGSFARASWGTDYHFILRDKMDQLITFIQERVPDARFKPMVDTGELIDTVVAQRAGLGFIGRNGLLITEEFGTYVYLGEIITDIPFEPDAPGVFGCGDCMRCVTACPTGALLGNGQLNPKVCLSFQTQTKGSMPEEFRKKMGHVIYGCDICQQACPYNRGIDSHFHPEMEPEPDRETPVLQPMLTISNRDFKARFGVLAGSWRGKKPLQRNAIIALANYRDRSAVPQLLQLMEQDPRPVIRGTAAWAIGQILRDANADILDFFKERMEAEEDEEARAEMEMALVKLEELADK

SEQ ID NO: 77467 - protein, 376 aa, Jeotgalibacillus alimentarius
  REGION 1..376: note = tr|A0A0C2W0C8|A0A0C2W0C8_9BACL Epoxyqueuosine reductase OS=Jeotgalibacillus alimentarius OX=135826; GN = queG PE=3 SV=1
MNYDALKQEIIDHADELGIDKIGFTSADFFSDLKGRLIRQEALNYQSGFEEKDIDKRVTPSLLMHEPKSIISIALAYPSKMKDAPRSKKGERRGVFARASWGEDYHTVLRKALERLEQFIQERVPDARMKSMVDTGELVDRAVAERAGVGWSAKNCSIITPEFGSYVYLGEMITNIPFSPNEPMEDQCGDCNLCVDVCPTGALVQGGQLDAKKCIAFLTQTKDFLPDEYRTKIGNRLYGCDTCQTVCPKNKGIDMHKHPEFEPDPEIAKPLLEPLLTISNREFKESYGHVSGSWRGKKPIQRNALIALAHFKEASALPSIFEVMQHDVRPVMRGTAAWAAGKIGGEEAEKMLLKQKELEQDEEVLKEIEKGLSLCK

SEQ ID NO: 77468 - protein, 377 aa, Jeotgalibacillus campisalis
  REGION 1..377: note = tr|A0A0C2VS42|A0A0C2VS42_9BACL Epoxyqueuosine reductase OS=Jeotgalibacillus campisalis OX=220754 GN=queG; PE = 3 SV=1
MNYRLLKQEIKDHADSLGIDKIGFTTADVFTEMKNHLIRQEQLDYQSGFEEKDINKRVDPSLIFSEPRSIIAIALAYPSKMKDSPRSVKGERRGIFARASWGTDYHEVLRDRLNKLEAFIKERVPEARFRSMVDTGELVDRAVAERAGIGWSAKNCAVITPEFGSYVYLGEMITNLPFEPDEPMNDQCGSCNKCVDVCPTGALVQGGQLDAKKCIAFLTQTKGFLPEQYRSKIGNRIYGCDTCQTVCPKNKGKDFHFHLEMEPDPEIAKPLLEPLLTISNRDFKETYGHVSGSWRGKKPIQRNAIIALAHFKEESALPSLISVMQEDVRPVIRGTAAWAVGKIGGEEAHQALLAFKDQEEDEEVLIEIQKGLSFLNN

SEQ ID NO: 77469 - protein, 376 aa, unidentified
  source 1..376: note = Jeotgalibacillus malaysiensis
  REGION 1..376: note = tr|A0A0B5AKL9|A0A0B5AKL9_9BACL Epoxyqueuosine reductase OS=Jeotgalibacillus malaysiensis OX=1508404; GN = queG PE=3 SV=1
MNYDALKQEIIDHADELGIDKIGFTSADFFSDLKGRLMRQEALNYQSGFEEKDIDKRVTPSLLMHEPKSIISIALAYPSKMKDAPRSKKGERRGIFARASWGEDYHTVLRKALERLEQFIQERVPDARMKSMVDTGELVDRAVAERAGVGWSAKNCSIITPEFGSYVYLGEMITNIPFSPDEPMEDQCGDCNLCVDVCPTGALVQGGQLDAKKCIAFLTQTKDFLPDEYRSKIGNRLYGCDTCQTVCPKNKGIDMHIHPEFEPDPEIAKPLLEPLLSISNREFKEQYGHVSGSWRGKKPIQRNALIALAHFKEASALPSIFEVMQHDVRPVMRGTAAWAAGKIGGKEAEEMLLKQKEIELDEEVLKEIDKGLSLCK

SEQ ID NO: 77470 - protein, 386 aa, Jeotgalibacillus marinus
  REGION 1..386: note = tr|A0A0M0KZY8|A0A0M0KZY8_9BACL Epoxyqueuosine reductase OS=Jeotgalibacillus marinus OX=86667 GN=queG; PE = 3 SV=1
MNVYQLKEELIEYAKSIGVDKIGFTTADTFDSLKDRLVLQESLGYLSGFEEPDIEKRVTPKLLLPKAKSIVAIALAYPSRMKDAPRSTRTERRGIFCRASWGKDYHDVLREKLDLLEEFLRSKHEDIRTKSMVDTGELSDRAVAERAGIGFSAKNCMITTPEYGSYVYLAEMITNIPFEPDVPIEDMCGSCTKCLDACPTGALVNPGQLNAQRCISFLTQTKGFLPDEFRTKIGNRLYGCDTCQTVCPLNKGKDFHLHPEMEPDPEIAKPLLKPLLTISNREFKEKFGHVSGSWRGKKPIQRNAILALAHFKDASALPELTELMHKDPRPVIRGTAAWAIGKIGDHAYAEELEKALEKEKDEEAKLEIEKGIELLKASGMTKQGLS

SEQ ID NO: 77471 - protein, 377 aa, unidentified
  source 1..377: note = Jeotgalibacillus proteolyticus
  REGION 1..377: note = tr|A0A2S5GHR2|A0A2S5GHR2_9BACL Epoxyqueuosine reductase OS=Jeotgalibacillus proteolyticus OX=2082395; GN = queG PE=3 SV=1
MDYRLLKQEIIDHANSLGIDKIGFTTADVFTEMKNHLIRQEQLGYQSGFEEKDIEKRVDPSLIFSEPRSIIAIALAYPSRMKNPPKSVKGARRGIFARASWGTDYHTVLRDRLSKLEAFIQERVPEARFRSMVDTGELADRAVAERAGIGWSAKNCAVITPEFGSYVYLGEMITNLPFEPDEPMQDQCGSCNKCVDACPTGALVQGGQLNAQKCIAFLTQTKGFLPDEYRSKIGNRIYGCDTCQTVCPKNKGKDFHFHREMEPDGEIAKPLLEPLLMMSNREFKETFGHISGSWRGKKPIQRNAIIALAHFKEEQSLPVLIEVMNNDPRPVIRGTAAWAVGKIGGSKAKDALLEFKEKEKEGDVLQEIEKGLSFLNN

SEQ ID NO: 77472 - protein, 376 aa, Jeotgalibacillus salarius
  REGION 1..376: note = tr|A0A4Y8L4X8|A0A4Y8L4X8_9BACL Epoxyqueuosine reductase OS=Jeotgalibacillus salarius OX=546023 GN=queG; PE = 3 SV=1
MNYDVLKQEIIDHAEELGIDKIGFTSADFFSDLKSRLIRQEALNYQSGFEEKDINKRVTPSLLMNEPKSIISIALAYPSKMNGAPRSKKGERRGVFARASWGEDYHTVLRNALERLEDFIKERVPDARFKSMVDTGELADRAVAERAGVGWSAKNCSIITPEFGSYVYLGEVITNLPFSPDESMEDQCGECNLCVDVCPTGALVQGGQLDAKRCIAFLTQTKDFLPDEYRSKIGNRLYGCDTCQTVCPKNKGIDMHTHPEFEPDPEIAKPLLEPLLTISNREFKEKYGHVSGSWRGKKPIQRNALIALAHFKEESALPSIFEVMQNDVRPVLRGTAAWAAGKIGGKEAEEMLLKQKDIEKDEEVLIEIEKGLSLCK

SEQ ID NO: 77473 - protein, 375 aa, Jeotgalibacillus soli
  REGION 1..375: note = tr|A0A0C2VCR1|A0A0C2VCR1_9BACL Epoxyqueuosine reductase OS=Jeotgalibacillus soli OX=889306 GN=queG PE=3; SV = 1
MDYTTLKQEIIDHSKSLGIDKIGFTTANLFTELKNHLIRQEQLGYQSGFEEKDINKRIDPSLIFDHPRSIISIALAYPSKMKDAPRSVKGARRGIFARASWGTDYHTVLRDRLTRLEAFIKERVPEARFKSMVDTGELSDRAVAERAGIGWSAKNCAVITPEFGSYVYLGEMISNLPFEPDEPMEDQCGSCNKCVDACPTGALVQGGQLNSQKCIAFLTQTKGFLPDQYREKLGNRIYGCDTCQTVCPKNKGKDFHFHLEMEPDGEIAKPLLEPLLTMSNKEFNETFGHVSGSWRGKKPIQRNAIIALAHFKEESAVPTLIDIMKNDVRPVIRGTAAWAIGKIGGAEASDALIVQHRHEKDEEVLEEIKKGLAFF

SEQ ID NO: 77474 - protein, 379 aa, Jeotgalibacillus sp.
  REGION 1..379: note = tr|A0A4Y8KS79|A0A4Y8KS79_9BACL Epoxyqueuosine reductase OS=Jeotgalibacillus sp. R-1-5s-1 OX=2555897; GN = queG PE=3 SV=1
MNYDVLKQEILDHAKSLGIDKIGFTSAGYFSELKNRLIRQQELDYQSGFEEPDVDKRTDPSLLLSEPRSIISIALAYPSKMKDAPRSKAGERRGIFARASWGEDYHTVLRDRLERLEHFIKERVPHARFKSMVDTGELVDRAVAERAGIGWSAKNCSIITPEYGSYVYLGEMITNLPFTSDQPMEDQCGTCNICVDVCPTGALVQGGQLDSKKCIAFLTQTKGFLPDEYRTKIGNRLYGCDTCQTVCPKNKGIDLHLHEEFEPEPELTKPLLEPLLTISNRDFKEKYGHMSGSWRGKKPIQRNALIALAHFKETSALPAILTVLNEDVRPVMRGTAAWAAGKIGGVEAEEALLKQKTVEKDQDVLNEIEKGLQLLKKES

SEQ ID NO: 77475 - protein, 377 aa, Jeotgalibacillus sp.
  REGION 1..377: note = tr|A0A4R5XUM2|A0A4R5XUM2_9BACL Epoxyqueuosine reductase OS=Jeotgalibacillus sp. S-D1 OX=2552189 GN=queG; PE = 3 SV=1
MDYRLLKQEIIEHAASLGIDKIGFTTADVFTEMKNHLIRQEQLGYQSGFEEKDINKRVDPSLTFSEPRSIIAIALAYPSKMKDAPKSIKGARRGIFARASWGTDYHTVLRDRLSKLEAFIQKRVPKARFRSMVDTGELADRAVAERAGIGWSAKNCAVITPEFGSYVYLGEMITNLPFEPDEPMQDQCGTCNKCVDACPTGALVQGGQLNAQKCIAFLTQTKGFLPDEYRNKIGNRIYGCDTCQTVCPKNKGKDFHFHREMEPDGEIAKPLLEPLLTISNREFKEKFGHVSGSWRGKKPIQRNAIIALAHFKEESALPALIGVMSEDVRPVIRGTAAWAAGKIGGDQAKEALLKRRLEEKDEEVLAEIEKGLSFLKN

SEQ ID NO: 77476 - protein, 376 aa, Jeotgalicoccus halophilus
  REGION 1..376: note = tr|A0A1G9CRC0|A0A1G9CRC0_9STAP Epoxyqueuosine reductase OS=Jeotgalicoccus halophilus OX=586411; GN = SAMN05216187_11030 PE=4 SV=1
MDRREFKNRIIEYAHSIGIDDIGFTTAEPFTEFKAKLIDYYKNGYESGFETGTIEERTNPKASLPNAKSIISIAVGYPNKLRNAPKSKQGERRGIFARASWGMDYHTLLRSRLEKLEAYIKQLDPDIDCKSMVDTGVLSDREVARRSGLGFVGKNGFVINPKLGTYSYLGEMIVSYPFPADEELLDSCGDCNICVDRCPTGALVGDGQLDSKKCISFLTQTKGFMPVEYRSKIGNRLYGCDTCQQVCPRNRGINTEHHEDIVLEPEILKPELTSLLQISNRDFKETYGHLAGVWRGKKPIQRNAIIALAHFKERSALDILKSVAETDMRPVIKGTAYWAIGQIAGDEALDYIHERYGIETDDDVKKEMLLGIQEVS

SEQ ID NO: 77477 - protein, 376 aa, Jeotgalicoccus halotolerans
  REGION 1..376: note = tr|A0A3E0B2U3|A0A3E0B2U3_9STAP Epoxyqueuosine reductase OS=Jeotgalicoccus halotolerans OX=157227; GN = DFR63_0212 PE=4 SV=1
MDRHEFKERVIEYAHTIGIDDIGFTTAEPFTEFKAKLIDYYKNGYESGFETGTIEERTNPKASLANAESIVSIAVGYPNKLRNAPKSKQGERRGIFARASWGMDYHTLLRTRLEKLEAFIKELDPSIDCKSMVDTGVLSDREVARRSGLGFAGKNGFIINPKLGTYSYLGEMIVSYPFPADEELLDSCGDCNICVDRCPTGALVGNGQVDSKKCISFLTQTKGFMPVEYRSKIGNRLYGCDTCQQVCPRNRGINTEHHEDIVLEPEILKPELTSLLQISNREFNETYGHLAGVWRGKKPIQRNAIIALAHFKETAAIDILKQVAETDVRPVIKGTAYWAIGQISGDEALDYIYERYGIETDDDVKKEMLMGIQEAS

SEQ ID NO: 77478 - protein, 376 aa, Jeotgalicoccus nanhaiensis
  REGION 1..376: note = tr|A0A4Y9HJ54|A0A4Y9HJ54_9STAP tRNA epoxyqueuosine(34) reductase QueG OS=Jeotgalicoccus nanhaiensis OX=568603 GN=queG PE=4 SV=1
MDRHEFKKRVIEYAHTIGIDDIGFTTAEPFTEFKAKLIDYYKNGYESGFETGTIEERTNPKASLANAKSIVSIAVGYPNKLRNAPKSKQGERRGIFARASWGMDYHTLLRTRLEKLEAFIRELDPSIDCKSMVDTGVLSDREVARRSGLGFSGKNGFIINPKLGTYSYLGEMIVSYPFPADEELLDSCGDCNICVDRCPTGALVGNGQVDSKKCISFLTQTKGFMPMEYRSKIGNRLYGCDTCQQVCPRNKGINTEHHEDIVLEPEILKPELTSLLQISNREFNKTYGHLAGVWRGKKPIQRNAIIALAHFKETAAIDILKQVAETDVRPVIKGTAYWAIGQISGDEALDYIYERYGIETDDDVKKEMLMGIQEAS

SEQ ID NO: 77479 - protein, 376 aa, unidentified
  source 1..376: note = Jeotgalicoccus saudimassiliensis
  REGION 1..376: note = tr|A0A078M4P9|A0A078M4P9_9STAP Epoxyqueuosine reductase OS=Jeotgalicoccus saudimassiliensis OX=1461582; GN = queG PE=4 SV=1
MDRHEFKRRVIEYAETIGIDDIGFTTAEPFTEFKAKLIDYYKNGYESGFETGTIEERTNPKASLPNAQSIISIAVGYPNKLRNAPKSKKGERRGIFARASWGTDYHTLLRKRLEKLEAFIKELDPSVDCKSMVDTGVLSDREVARRSGLGFTGKNGFVINPKLGTYSYLGEMIVSYPFPADEELLDSCGDCNICVDRCPTGALVGNGQVDSQKCISFLTQTKGFMPVEYRSKMGNRLYGCDTCQQVCPRNKGINTEHHEDIVLEPEILKPELTGLLQISNKEFKETYGHLAGVWRGKKPIQRNAIIALAHFKEEGAVDILKTVAETDVRPVIKGTAYWAIGQIAGDGALEYIYERYGIETDADVKKEMLMGIQEAG

SEQ ID NO: 77480 - protein, 376 aa, Jeotgalicoccus sp.
  REGION 1..376: note = tr|A0A358JTM5|A0A358JTM5_9STAP tRNA epoxyqueuosine(34) reductase QueG OS=Jeotgalicoccus sp.; OX = 1871619 GN=queG PE=4 SV=1
MDRHEFKKRIIEYAHSIGIDDIGFTTAEPFTEFKAKLIDYYKNGYESGFETGTIEERTNPKASLPNAKSIISIAVGYPNKLRNAPKSKQGERRGIFARASWGMDYHTLLRSRLQKLETFINELDPSVDCKSMVDTGVLSDREVARRSGLGFAGKNGFIINPKLGTYSYLGEMIVSYPFPADEELLDSCGDCNICVDRCPTGALVGDGQLDSKKCISFLTQTKGFMPMEYRSKIGNRLYGCDTCQQVCPRNKGINTEHHEDIVLEPEILKPELTGLLQISNKEFKETYGHLAGVWRGKKPIQRNAIIALAHFKETAAIDILKTVAETDVRPVIKGTAYWAIGQISGDAALDYIYERYAIETDDDVKKEMLTGIQEAS

SEQ ID NO: 77481 - protein, 343 aa, Jhaorihella thermophila
  REGION 1..343: note = tr|A0A1H5XKL2|A0A1H5XKL2_9RHOB Epoxyqueuosine reductase OS=Jhaorihella thermophila OX=488547 GN=queG; PE = 3 SV=1
MDELKKRLVARALEEGFVDVGICRPWAVPEVAERLAAFVAAGRHGQMRWMAERMAWRGNPAALWPEARSVIMLAESYTPAEDPMAVVGRPGRGAISVYARNRDYHDIVKKRLKRLARWLIAEAGGEVKVFVDTAPVPEKPLGQAAGIGWQGKHTNLVSRRWGNWAFLGAVFTTLELPVDPPEQDHCGSCRACLAACPTDAFPAPYQLDARRCISYLTIEHDGPVGEPLREKLGNRIYGCDDCLAACPWNKFAVTASDMRYAARDALRAPRLRELAALDDVGFRAMFSGSPIKRIRRGRFVRNVLYAIGNSGDPELRSAAQALVGDDDPVVADAARWAVKRLSG

SEQ ID NO: 77482 - protein, 385 aa, unidentified
  source 1..385: note = Jiella sp.
  REGION 1..385: note = tr|A0A4Y8RPW5|A0A4Y8RPW5_9RHIZ Epoxyqueuosine reductase OS=Jiella sp. CBS5Q-3 OX=2558362 GN=queG PE=3; SV = 1
MTAAALATLKDFAREDAARLGFAALGVADASGNLLASGRLEEFVEKGRHGTMGWMPETLDRRRSPMDLWPGVRSILVLAMNYGPDEDPLEILERPDRGAISVYARHRDYHDVIKGRLKELAGRLVARARQSGLGEHDAKVFVDTAPIMEKPLGELAGLGWQGKHTNLLSRDFGSWLFLGSIFTTLDLPPDEAGDDRCGSCRACLDACPTDAFPAPYQLDARRCISYLTIETKAVIPREFRTAMGNRIYGCDDCLAVCPWNKFAQAASEAKLVAREELKAPKLDQLLGLDDAAFRALFSGSPIKRIGRDKFVSNCLIAAGNSGLSALLAPVVARLGDAAPLVRAMAVWALWRLDRGEALRLSSAALDNEKDETVRSEWHALEEGKV

SEQ ID NO: 77483 - protein, 310 aa, unidentified
  source 1..310: note = Jiulongibacter sediminis
  REGION 1..310: note = tr|A0A0P7CA09|A0A0P7CA09_9BACT Epoxyqueuosine reductase OS=Jiulongibacter sediminis OX=1605367 GN=queG; PE = 3 SV=1
MSRASQYSKLIKAKAKELGFDFCGISKADFLEEQAPRLEDWLKRNYHGEMAWMANHFDKRLDPTKLVPGAKSVISVMLNYYPSKRLPEGGEDFKISKYAYGTDYHFVVKDKLKQLFTFIHKEIGAVEGRIFTDSAPVMDKVWAEKSGLGWIGKHSNLLNRQSGSFFFLGEIICDLELEPDGPVKDYCGTCTACLDACPTDAITGPYVVDGSKCISYYTIELKDAIPEEAKGKMENWIFGCDICQDVCPWNRFSKPHQIEEFELKDGLVEMSKKDWEEITEEVFKELFKKSPIKRTKLQGLKRNIEFVKKA

SEQ ID NO: 77484 - protein, 309 aa, Joostella marina
  REGION 1..309: note = tr|I3C524|I3C524_9FLAO Epoxyqueuosine reductase; OS = Joostella marina DSM 19592 OX=926559 GN=queG PE=3 SV=1
MTVKEKHTALIKTEAKRLGFLSCGISKADFLEEEAPRLEKWLKNNMHGEMQYMENHFDKRLDPRLLVEGSKSVISLLLNYFPSQTQQDPEAPKISKYAYGTDYHFVIKDKLKQLLTFIETEIGEVGGRAFVDSAPVLDKAWAAKSGLGWVGKNSNLLSKQVGSFFFIAELIVDLELEYDAPVTDHCGSCTACIDACPTEAITEPYVVDGSKCISYFTIELKDQIPTEFSGKFDDWMFGCDVCQDVCPWNRFSKPHNEPLFNPNPELLSMSKKDWEEITQEVFSEIFKKSPVKRTKFAGLKRNIEFLKDK

SEQ ID NO: 77485 - protein, 378 aa, unidentified
  source 1..378: note = Kaistia algarum
  REGION 1..378: note = tr|A0A2S5TWY3|A0A2S5TWY3_9RHIZ Epoxyqueuosine reductase OS=Kaistia algarum OX=2083279 GN=queG PE=3 SV=1
MSEADALRQKDLLVQDALSEGFSVVRVTTPDAIPFAAERLHRALEDGHHATMGWMTDHEDRRGNPRVLWPDVRSIVMLGMNYGPDEDPRALLERADRGAISVYARNRDYHDVIKGRLKLIAGRLAARTGAEVKVFVDTAPVMEKPLAEAAGLGWQGKHTNLVSREFGSWLFLGSIFTALELPPDEAEADHCGSCRACLAACPTDAFPAPYRLDARRCISYLTIEHAGPIPQEFRAAMGNRIYGCDDCLAACPWNKFAQSASEMKLKARDDLLAPELAELAGLDDAAFRTRFAGSPVKRIGRDRFVRNVLIAIGNSERLELVKVVLARLDDASPLVRGAAVWALGRLALERWEVERDARVDAETHVSVRAEWARAQPVT

SEQ ID NO: 77486 - protein, 398 aa, Kaistia soli
  REGION 1..398: note = tr|A0A1M5D3L2|A0A1M5D3L2_9RHIZ Epoxyqueuosine reductase OS=Kaistia soli DSM 19436 OX=1122133 GN=queG; PE = 3 SV=1
MNEAGLLAEKARLVADAAGEGFDALRITTPDAIPEAAGRLSTFLADGHHASMDWMAETEARRADPRILWPDVRAVIMLGLNYGPESDPRAILEQRDRGAISVYAQNRDYHDVIKGKLKLLAGRLAARTGAEVKVFVDTAPLMEKPLAARAGLGWQGKHTNLVSREFGSWLFLGAILTALPLPPDSSERDHCGSCRACLDACPTSAFPAPYRLDARRCISYLTIEHAGPIPEEFRAAMGNRIYGCDDCLAACPWNKFARAGAEMKLKARPDLQAPRLADLAALDDQAFRALFSGSPVKRIGRDRFVRNVLIAIGNSADSSLAPAVLARLDDEAAVVRGAAVWALGRLSPERAREEWMTRKGRERDAAVIDEWIALSRLAADDATEQERHDQDPAPPRSS

SEQ ID NO: 77487 - protein, 379 aa, Kaistia sp.
  REGION 1..379: note = tr|A0A1E4BJ41|A0A1E4BJ41_9RHIZ Epoxyqueuosine reductase OS=Kaistia sp. SCN 65-12 OX=1660103 GN=queG PE=3; SV = 1
MTPKQLAAEKARLVADARAEGFDAVRIAAPDAIPLAPERLAAFLAEGHHGSMAWMEETAERRADPRVLWADVRSVVMLGMNYGPETDPRALLGERDRGNISVYARNRDYHDIIKGKLKLLAGRLASRTGAEVKVFVDTAPVMEKPLAAASGLGWQGKHTNLVSREYGSWLFLGSIFTALDLPLDAPERDHCGTCRACLDACPTKAFPAPYRIDARRCISYLTIENAGPIPREFRAAMGNRIYGCDDCLAACPWNKFARAASEMKLQPRPELERPALADLAALDDSGFRAFFAGSPVKRIGRDRFVRNVLVAIGNSHDPALLPAVRTLLQDPAPVVRGAAVWALSRLAPDEFEALRPGSTLREPDEAVKEEWRAQGPAIG

SEQ ID NO: 77488 - protein, 387 aa, Kaistia sp.
  REGION 1..387: note = tr|A0A1E4CSZ9|A0A1E4CSZ9_9RHIZ Epoxyqueuosine reductase OS=Kaistia sp. SCN 65-12 OX=1660103 GN=queG PE=3; SV = 1
MRTSISDPLKLRALIDREAESSGFDVVAVTTPDAIPLAPARLAEFVDAGFHGSMGWIAETLERRSSPSALWPEVRSIVVLAMNYAPDHDPREILARKASGAISVYARNRDYHDVMKGRLKEIAGKIVARAGGDVKVFVDTAPVMEKPLAGAAGLGWQGKHTNLVSRQHGSWLFLGSIFTTAELVPDVPESDHCGSCRACLDACPTNAFPAPYKLDARRCISYLTIENKGPIPHEFRQAIGNRIYGCDDCLSACPWNKFAHTAHEAKLAAREDLRDPPLAELLSLDDAAFRGFFSGSPVKRIGRDRFLRNVLIAAGNSGDGLLAGRVRELAADPAPLVRGAAVWALSQLLPSRQFADLAGEMLPGESDEDVRGEWRAAMSGIETEASA

SEQ ID NO: 77489 - protein, 379 aa, unidentified
  source 1..379: note = Kalamiella piersonii
  REGION 1..379: note = tr|A0A3A9IQD8|A0A3A9IQD8_9GAMM Epoxyqueuosine reductase OS=Kalamiella piersonii OX=2364647 GN=queG PE=3; SV = 1
MSYPLDLHQLAQQIKQWGKDLGFQQVGITDTDLSAEEPRLQAWLDKQYHGEMEWMARHGMMRARPHELLPGTLRVISVRMNYLPAKAAFASTLKNPQLGYVSRYALGRDYHKVLRNRLKKLGEMIQEKCGELNFRPFVDSAPVLERPLAAKAGLGWTGKHSLILNREAGSWFFLGELLIDLPLPIDAPQEEQCGRCVACMTICPTNAIVEPYVVDARRCISYLTIELEGAIPEALRPLMGNRIYGCDDCQLICPWNRYGQLSDETDFSPRAALHAPELMTLFQWDEKTFLRVTEGSAIRRIGHLRWLRNIAVALGNAPWRAEIAEVLKKRLGENPLLDEHIEWALVQQQEKRQALSIDVQPAQQKRLVRAIEKGLPRDA

SEQ ID NO: 77490 - protein, 390 aa, Kangiella koreensis
  REGION 1..390: note = tr|C7R9Q7|C7R9Q7_KANKD Epoxyqueuosine reductase; OS = Kangiella koreensis (strain DSM 16069 / KCTC 12182 / SW-125) OX=523791 GN=queG PE=3 SV=1
MVNSKPPEMPLTDQQLEQIKQTAVKLAKQHGFQDLRVSDTNTSGYFERFKQWVDDGYHGCMSFLERNQELRQNPAELHPNSCRVLSLRFDYLNDNASFTTPLKDKSIANISRYALGRDYHKLMRKRLQQVIEELKSTLNDELDIDYRVFVDSAPVLETAFAEKSGLGWKGKHTLIINKDAGSWFFLGEIFINLPLPVDEPGEDMCGGCTSCITLCPTNAILDDRKIDARRCISYLTIENQGAIPEELRPLMGNRIYGCDDCQLACPWNRYSKQTQIDDFSPRHNLHTISLETLWGWDEQEFLDNFQGSPIRRIGYQNWLRNLAVAIGNSKQPAMIEPLKAKYEDANEMVQEHIDWAIDQLSNPYKTDTSTIDKKTQKLIHCVTVMLPRDA

SEQ ID NO: 77491 - protein, 382 aa, unidentified
  source 1..382: note = Kangiella profundi
  REGION 1..382: note = tr|A0A2K9AQK2|A0A2K9AQK2_9GAMM Epoxyqueuosine reductase OS=Kangiella profundi OX=1561924 GN=queG PE=3; SV = 1
MPLTDLQLEQIKHTAVKLAKQHGFQDLRVSDTDTGGYFERFKQWVDDGYHGCMSFLERNQELRQNPAELHPNTCRVLSLRFDYLNNNASFTTPLKDKTLANISRYALGRDYHKLMRKRLQMVIEDLKSKLNDEPNLDYRVFVDSAPVLETAFAEKAGLGWKGKHTLILNKDAGSWFFLGEIFINLPLPVDEPVEDLCGSCSSCINLCPTDAIIDNKKIDARRCISYLTIENQDAIPEELRPLMGNRIYGCDDCQLACPYNRFANHTNIDDFSPRHNLHNISLATLWEWDEQTFLENFQGSPIRRIGYQNWLRNLAVAIGNSKQSDMIEPLKAKYKVANEMVREHIDWAIEQLNNLEDNETSIIDKKTQKLINCVTVMLPQDA

SEQ ID NO: 77492 - protein, 380 aa, Kangiella sp.
  REGION 1..380: note = tr|A0A2G2LB26|A0A2G2LB26_9GAMM Epoxyqueuosine reductase OS=Kangiella sp. OX=1920245 GN=queG PE=3 SV=1
MIDLTDIKISLLDEINKEGFQQAGISTTDTSPYFESFAKWVSEGFNGQMDYLNRNQDLREFPAKLHANTCRVISLRYDYLPENPRFNQVLEDQNLANISRYALGRDYHKLIRKKLSRLCKRLSNICNSENNIELDYRVFVDSAPVLETSFAEKSGLGWKGKHTLVINKDAGSWFFLGEIFINLPLPIDESVENLCKDCVACLSICPTQAIIAPYKVDARRCISYLTIENKGAIPVEFREMIGNRVYGCDDCQLICPWNRYAISNVNNDFESRNNLDSSSLLSLLAWDEKNFLSNFEGSPIRRIGYQSWLRNLAVAIGNSPASKANIDALLYKQKDANEMASEHFDWAINLQNTHLIDDKREHKRNRKLIRTIKKLMPNHV

SEQ ID NO: 77493 - protein, 374 aa, unidentified
  source 1..374: note = Keratinibaculum paraultunense
  REGION 1..374: note = tr|A0A4R3KZ37|A0A4R3KZ37_9CLOT Epoxyqueuosine reductase OS=Keratinibaculum paraultunense OX=1278232; GN = EDD65_10370 PE=4 SV=1
MNLKQFIIDKAKELNIDLIGFTDCEPLDDLKDYLIMRKLKNMEIEFEEKDIEKRINPKLILPSCKTIIVIAMSYNNDFNYVSEYELKGKVSRSSWGLDYHVVLEDRLEKLIMEIKKNKEFNYKYYVDTGPLIERELARKAGIGYYGKNCSIINDEYGSFIFIGYILTDIDIPINSPILGSKCGDCNLCIKACPTGALERPFRFNPKKCISYLTQTKMDIPYELREKMGTSIYGCDICQLACPKNKGVKKPNHKEFLPNKGYIDIKELLSMSNREFKKEYGSMAGAWRGKNILKRNAIIALGNIKNKNTLDLLIPLLEDASPMIREYVAWAILNIDFEFGRELVEKQLKKEENQLMKRKMENILNYYLTRIDNNY

SEQ ID NO: 77494 - protein, 382 aa, unidentified
  source 1..382: note = Ketobacter alkanivorans
  REGION 1..382: note = tr|A0A2K9LNB4|A0A2K9LNB4_9GAMM Epoxyqueuosine reductase OS=Ketobacter alkanivorans OX=1917421 GN=queG; PE = 3 SV=1
MGGSLHYFCVLSESLLIPQAHTLSYDAGCNLNYQELANNIKQWGQELGFQQIAIADVALNEHEEHLQNWLAAGFHGEMNYMARHGTKRSRPDELQPGTVRVISARMDYLPPDTQIVEVLNDASKAFISRYTLGRDYHKLIRKRLTQLGKRVEDAIGHYGYRAFVDSAPVLEKALAEKAGLGWIGKHTLLLDRSAGSWFFLGEIYVDIPLPVDEPVSAHCGKCSACIDICPTQAIVAPYRLDSRKCISYLTIELHGPIPEALRKPMGNRVFGCDDCQLVCPWNRFAKFTQEDDFKPRHQLQDRTLVELFMWDEETYLRNTEGSAIRRIGYQRWLRNLAVGLGNAPSTPDVIAALQARAHHESELVREHVCWALTQHTGAAKTE

SEQ ID NO: 77495 - protein, 366 aa, unidentified
  source 1..366: note = Ketobacter sp.
  REGION 1..366: note = tr|A0A3L8B821|A0A3L8B821_9GAMM Epoxyqueuosine reductase OS=Ketobacter sp. OX=2083498 GN=queG PE=3 SV=1
MTRISPLDLQALAQQIKDWGQALGFQQIAIADVHLGEHEAHLQRWLAAGFQGEMDYMARHGHKRSRPAELQPGTVRVITARMDYLPPDTAIVDVLQDASKAFISRYTLGRDYHKLIRKRLTQLGRQIEEQIGPFGYRAFVDSAPVLEKALAEKSGLGWIGKHTLLLDRSAGSWFFLGEIFVDIPLPVDPPVRGHCGTCNACMEVCPTQAIVAPYQLDARKCISYLTIELHGPIPEPLRAPMGNRVFGCDDCQLVCPWNRFARYTQEADFLPRHQLQDRSLVELFLWDEATYLQKTEGSAIRRIGYPRWLRNLAVGLGNAPSSEAVIKALWSRAQHPSELVREHVHWALARHGQVPESAAPDPNDQG

SEQ ID NO: 77496 - protein, 348 aa, unidentified
  source 1..348: note = Ketobacter sp.
  REGION 1..348: note = tr|A0A3F2V777|A0A3F2V777_9GAMM Epoxyqueuosine reductase OS=Ketobacter sp. OX=2083498 GN=queG PE=3 SV=1
MDYQQLVNNIKLWGSELGFQKTAIADIRLDQHEHYFQKWLDQGFHGEMEYMARHGTKRSRPHELQPDTIRVISARMDYLAADTELLQILEDPDKAYISRYALGRDYHKLMRKRLTRLGKRIEEEIGPYGYRAFVDSAPVLEKALAEKAGLGWIGKHTLLLDRSAGSWFFLGEIYTDLPLPVDQPVTQHCGSCSACIDVCPTQAIVAPYQLDARKCISYLTIELHGPIPEAYRKPMGNRVFGCDDCQLVCPWNRFAQFTAEDDFNPRHRLQNSDLVELFCWDEQTYLARTEGSPIRRIGYERWLRNLAIGLGNAPTSEAVLKALRTRTNYPSALVQEHVQWALQQHRAH

SEQ ID NO: 77497 - protein, 347 aa, Ketogulonicigenium robustum
  REGION 1..347: note = tr|A0A1W6P155|A0A1W6P155_9RHOB Epoxyqueuosine reductase OS=Ketogulonicigenium robustum OX=92947 GN=queG; PE = 3 SV=1
MPTSTSETLKQRLHAEALSAGFVAMGICRPDSVRKDGEGLRAFVAEGLHGEMQWLEDRIDWRADPTALWPEARSVIMLAESYAPTYNPLSALEDPTRGAISVYAQGKDYHDLVKKRLKRVGRWLIEQAPGSEIKVFVDTAPVMERPLAREAGLGWTGKHGCILSRNFGNWVFLGCIFTTLELEPDAPVRPSCGSCTSCLDICPTQAFIGPGRLDPRKCVSYLTIESSQPVPLELRSKMGNRIYGCDDCLAICPWNKFAVAASDARYHGDVGNPPLAELAQLDDTSFRARFSGSPIKRIGVNKFLRNVMYAIGNSARPELIPSAQAHVLADDPVLRDAAQWAVARLRG

SEQ ID NO: 77498 - protein, 338 aa, Ketogulonicigenium vulgare
  REGION 1..338: note = tr|F9YA50|F9YA50_KETVW Methionine sulfoxide reductase A OS=Ketogulonicigenium vulgare (strain WSH-001); OX = 759362 GN=KVU_1622 PE=4 SV=1
MKARLKAAALDAGFVAMGICRPDSIRKDGDGLRAFVADGMHGEMQWLEDRIDWRADPTALWPQARSVIMLAESYAPTYNPLDALEDPARGAISVYAQGKDYHDLVKKRLKRVGRWLIEQAPGSEIKVFVDTAPVMERPLAREAGLGWTGKHGCILSRDFGNWVFLGCIFTTLDLEPDQPVRPSCGSCTACLDICPTQAFIGPGRLDPRKCVSYLTIEHSGPVPLDLRGKLGNRIYGCDDCLAICPWNKFAVEASDIRYHGDVGNPPLDELAGLDDTSFRARFSGNPIKRIGVNRLLRNVMYAIGNSGKPHLRASAQRHLNAEDPVLRDAAEWAVARLS

SEQ ID NO: 77499 - protein, 338 aa, Ketogulonicigenium vulgare; identical to SEQ ID NO: 77498
  REGION 1..338: note = tr|E3F1W4|E3F1W4_KETVY 4Fe-4S ferredoxin, iron-sulfur cluster binding protein OS=Ketogulonicigenium vulgare (strain Y25) OX=880591 GN=EIO_2056 PE=4 SV=1

SEQ ID NO: 77500 - protein, 379 aa, unidentified
  source 1..379: note = Kiloniella litopenaei
  REGION 1..379: note = tr|A0A0M2REH6|A0A0M2REH6_9PROT Epoxyqueuosine reductase OS=Kiloniella litopenaei OX=1549748 GN=queG PE=3; SV = 1
MSKKSKQSSASLLDPASAIREKALELKFNTVGFSPAKINEKNQKNLRTFLDLGYHGDMAWMENRIEWREDPTAMWEDAKSIIVLGVNYGPAEPALANLDFDDRGNISVYARNKDYHDFIKKRLKALARWMVENLGCQVKVFVDTAPVLEKVAAAQSGIGWQGKNTHLVSREYGSWLFLGEIYTDLDLKTDRHEEDHCGSCNKCLSICPTDAFPSPYVLDAKRCISYLTIEYHGHIAEEFRAPMGNRIYGCDDCIAICPWNKFAEVTTEEHVFPRIELTAPRLADLAELDDATFRQVFSGSPVKRIGRDRFIRNVLIGIGNCGDKSIVKRITPLLKDSSPYVRAMAVWAMKRLLDKQEFEDLKLEYKDDEPDADVLVEWL

SEQ ID NO: 77501 - protein, 379 aa, unidentified
  source 1..379: note = Kiloniella spongiae
  REGION 1..379: note = tr|A0A0H2MHL9|A0A0H2MHL9_9PROT Epoxyqueuosine reductase OS=Kiloniella spongiae OX=1489064 GN=queG PE=3; SV = 1
MSKKSNKSSTSLLDPALAIRQKALELKFDTVGFSPAKINEKNQQNLRTFLDLGYHGDMEWMENRIEWREDPTAMWEDAKSIIVLGVNYGPAEPALANLQFDDRGNISVYARNKDYHDFIKKRLKALARWMVENLECQVKVFVDTAPVLEKVAAAQSGIGWQGKNTHLVSREYGSWLFLGEIYTDLDLKTDRHEEDHCGSCNKCLSICPTDAFPSPYVLDAKRCISYLTIEYHGHIAEEFRAPMGNRIYGCDDCIAICPWNKFAEVTSEEHVFPRIELTAPRLADLAELDDATFRQVFSGSPVKRIGRDRFIRNVLIGIGNSGDKSIAKRIMPLLKDTSPYVRAMAVWAMRRLLDKQEFEDLKLEHKNDEPDVNVLDEWQ

SEQ ID NO: 77502 - protein, 365 aa, Kinneretia asaccharophila
  REGION 1..365: note = tr|A0A4R6N3A3|A0A4R6N3A3_9BURK Epoxyqueuosine reductase OS=Kinneretia asaccharophila OX=582607 GN=queG; PE = 3 SV=1
MQQLRAWARELGFSQIGVADIDLASAEPGLLAWLEAGFHGEMHYMAAHGLKRARPAELVPGTLRVLTARMDYRPANSPEDWQAIEWQGLGTPRRAQVSLYARGRDYHKVLRARLQLLADKLAQAIGPFGHRVFTDSAPVLEVELASRSGIGWRGKHTLTLHREHGSMFFLGEIYLDLPLPLSEPVSAHCGQCSACLDICPTQAIVAPYRVDARRCISYLTIEHDGPIPLELRPALGNRIYGCDDCQLACPWNKFAQRSLLPDFEVRQPWREADLLTLWAWDEAEFLRRTEGTAIRRIGHARWRRNIAVALGNALRARSDGDIRAALESQRPLADALLAEHIDWALAQALPQPQPDGQAEHAHQGG

SEQ ID NO: 77503 - protein, 343 aa, unidentified
  source 1..343: note = Kiritimatiellaceae bacterium
  REGION 1..343: note = tr|A0A2E1U4S3|A0A2E1U4S3_9BACT 4Fe-4S ferredoxin-type domain-containing protein; OS = Kiritimatiellaceae bacterium OX=2026752 GN=CMF27_06635; PE = 4 SV=1
MREAEEFATWLSEAAERIGAHSACCIRLDHPDLPVALAENHARVEAWLADGKQGEMEYLERMLPQKSDPWTTFPHAQAVIVLTFTNGWGDPEAVHPFPIPEMGAPIGYVSSYAREIDYHARGQAMLAELHTLLGREVEAEAAVDTKPVYERMFATLGGLGIIGANNLLRVPDRTNVRVFIGTLFVNADLPNVIHDVKMPFGCEDCLACIINCPTDAIRPGKPIDAPRCISYLTIEKRSVLSRVEAEMMGDWIFGCDECSNVCPPKEKIDSRIPVDLAWLLKQPAGEIRRTIKGNATAYAGVTQLRRNAVAMLKLREDPVAKELLGWTARQSGSALIQEQLRAW

SEQ ID NO: 77504 - protein, 342 aa, unidentified
  source 1..342: note = Kiritimatiellaceae bacterium
  REGION 1..342: note = tr|A0A1Z9TD95|A0A1Z9TD95_9BACT 4Fe-4S ferredoxin-type domain-containing protein; OS = Kiritimatiellaceae bacterium TMED266 OX=1987167; GN = CBE26_00355 PE=4 SV=1
MQEDDFKQWLAAAAERVGAHSACCVRLDHPELPEAVAANEARVRKWLAEGKQGEMSYLERMLPEKADPWGTFPGAKAVIALAFTNGWGDAEAVHPFPTPREGALVGYVSSYAREIDYHARGQAMLQELHGLLGREVKAVAAVDTKPVFERLFATFGGLGIMGANNLLRVPDRTNVRVFIGTLFVDADLPNVIHEVAMPFGCEDCLACISNCPTGAIQPGEPIDAPRCISYLTIEKRSVLSRAEAEMMGSWIFGCDDCSNVCPPKEQVDSRIAVDLNWLLQTPAGEVRRTIAGNATAYAGVTQLRRNAVALLKLSEDSAAKELLKWTAQHSGSALIQEQLRAW

SEQ ID NO: 77505 - protein, 379 aa, unidentified
  source 1..379: note = Klebsiella aerogenes
  REGION 1..379: note = tr|A0A0M3HAP7|A0A0M3HAP7_KLEAE Epoxyqueuosine reductase OS=Klebsiella aerogenes OX=548 GN=queG PE=3 SV=1
MSQPLDLNHLAQQIKQWGTELGFQQVGITDTDLSASEPKLQAWLDKQYHGEMEWMARHGMMRARPHELLPGTLRVISVRMNYLPANAAFASTLKDPTLGYVSRYALGRDYHKLLRNRLKKLGEMIQEQCASLNFRPFVDSAPILERPIAEKAGLGWTGKHSLILSREAGSFFFLGELLIDLPLPVDQPVAEECGRCVACMTICPTGAIVEPYTVDARRCISYLTIELEGAIPEEFRPLIGNRIYGCDDCQLICPWNRFSQLTDEEDFSPRKALHAPQLIELFAWSEAWFLKVTEGSAIRRIGHLRWLRNIAVALGNAPWNEANLVALESRRGEHPLLDEHIEWAVAQQIEKRNANVIEVQLPQKLRLVRVVEKGLPRDA

SEQ ID NO: 77506 - protein, 379 aa, unidentified
  source 1..379: note = Klebsiella aerogenes
  REGION 1..379: note = tr|A0A0H3FVC7|A0A0H3FVC7_KLEAK Epoxyqueuosine reductase OS=Klebsiella aerogenes (strain ATCC 13048 / DSM 30053 / JCM 1235 / KCTC 2190 / NBRC 13534 / NCIMB 10102 / NC TC 10006) OX=1028307 GN=queG PE=3 SV=1
MSQPLDLNQLAQQIKQWGTELGFQQVGITDTDLSASEPKLQAWLDKQYHGEMEWMARHGMMRARPHELLPGTLRVISVRMNYLPANAAFASTLKDPTLGYVSRYALGRDYHKLLRNRLKKLGEMIQEQCASLNFRPFVDSAPILERPIAEKAGLGWTGKHSLILSRDAGSFFFLGELLIDLPLPIDQPVAEECGRCVACMTICPTGAIVEPYTVDARRCISYLTIELEGAIPEEFRPLIGNRIYGCDDCQLICPWNRFSQLTDEEDFSPRKALHAPQLIELFAWSEAWFLKVTEGSAIRRIGHLRWLRNIAVALGNAPWNEANLVALESRRGEHPLLDEHIEWAVAQQIEKRNANVVEVQLPQKLRLVRVVEKGLPRDA

SEQ ID NO: 77507 - protein, 379 aa, unidentified
  source 1..379: note = Klebsiella grimontii
  REGION 1..379: note = tr|A0A5A8XWV2|A0A5A8XWV2_9ENTR Epoxyqueuosine reductase OS=Klebsiella grimontii OX=2058152 GN=queG PE=3; SV = 1
MSQPLDLNHLAQQIKQWGTELGFQQVGITDTDLSTSEPKLQAWLDKQYHGEMEWMARHGMMRARPHELQPGTLRVISVRMNYLPANAAFARTLKDPARGYVSRYALGRDYHKLLRHRLKKLGEMIQAQCASLNFRPFVDSAPILERPLAEKAGLGWTGKHSLILSRDAGSFFFLGELLIDLPLPIDQPVEEECGRCVACMTICPTGAIVEPYTVDARRCISYLTIELEGAIPEEFRPLIGNRIYGCDDCQLICPWNRFAQLTDEDDFSPRKALHAPELLELFTWSESYFLKVTEGSAIRRIGHLRWLRNIAVALGNAPWDEANLKALESRRGEHPLLDEHIEWAMTQQMAKRNANVVEVQLPKKLRLVRVVEKGLPRDA

SEQ ID NO: 77508 - protein, 379 aa, unidentified
  source 1..379: note = Klebsiella grimontii
  REGION 1..379: note = tr|A0A285AWL6|A0A285AWL6_9ENTR Epoxyqueuosine reductase OS=Klebsiella grimontii OX=2058152 GN=yjeS PE=3; SV = 1
MSQPLDLNHLAQQIKQWGTELGFQQVGITDTDLSASEPKLQAWLDKQYHGEMEWMARHGMMRARPHELQPGTLRVISVRMNYLPANAAFARTLKDPARGYVSRYALGRDYHKLLRHRLKKLGEMIQAQCASLNFRPFVDSAPILERPLAEKAGLGWTGKHSLILSRDAGSFFFLGELLIDLPLPIDQPVEEECGRCVACMTICPTGAIVEPYTVDARRCISYLTIELEGAIPEEFRPLIGNRIYGCDDCQLICPWNRFAQLTDEDDFSPRKALHAPELLELFTWSESYFLKVTEGSAIRRIGHLRWLRNIAVALGNAPWDEANLKALESRRGEHPLLDEHIEWAMTQQMAKRNANVVEVQLPKKLRLVRVVEKGLPRDA

SEQ ID NO: 77509 - protein, 379 aa, unidentified
  source 1..379: note = Klebsiella michiganensis
  REGION 1..379: note = tr|A0A0J2H1A1|A0A0J2H1A1_9ENTR Epoxyqueuosine reductase OS=Klebsiella michiganensis OX=1134687 GN=queG; PE = 3 SV=1
MSQPLDLNQLAQQIKQWGTELGFQQVGITDTDLSASEPKLQAWLDKQYHGEMAWMARHGMMRARPHELQPGTLRVISVRMNYLPANAAFARTLKDPAVGYVSRYALGRDYHKLLRHRLKKLGEMIQGQCASLNFRPFVDSAPILERPLAEKAGLGWTGKHSLILSRDAGSFFFLGELLIDLPLPIDQPVKEECGRCVACMTICPTGAIVEPYTVDARRCISYLTIELEGAIPEEFRPLIGNRIYGCDDCQLICPWNRFAQLTDEEDFSPRKALHAPALIELFAWSEPWFLKVTEGSAIRRIGHLRWLRNIAVALGNAPWDEANLKALESRRGEHPLLDEHIEWAMAQQIEKRNANVVEVQLPKKLRLVRVVEKGLPRDA

SEQ ID NO: 77510 - protein, 379 aa, unidentified
  source 1..379: note = Klebsiella michiganensis
  REGION 1..379: note = tr|A0A5D1EQ66|A0A5D1EQ66_9ENTR Epoxyqueuosine reductase OS=Klebsiella michiganensis OX=1134687 GN=queG; PE = 3 SV=1
MSQPLDLNQLAQQIKQWGTELGFQQVGITDTDLSASEPKLQAWLDKQYHGEMAWMARHGMMRARPHELQPGTLRVISVRMNYLPANAAFARTLKDPAVGYVSRYALGRDYHKLLRHRLKKLGEMIQGQCASLNFRPFVDSAPILERPLAEKAGLGWTGKHSLILSRDAGSFFFLGELLIDLPLPIDQPVKEECGRCVACMTICPTGAIVEPYTVDARRCISYLTIELEGAIPEEFRPLIGNRIYGCDDCQLICPWNRFAQLTDEEDFSPRKALHAPALIELFAWSEPWFLKVTEGSAIRRIGHLRWLRNIAVALGNSPWDEANLKALESRRGEHPLLDEHIEWAMAQQIEKRNANVVEVQLPKKLRLVRVVEKGLPRDA

SEQ ID NO: 77511 - protein, 379 aa, Klebsiella oxytoca; identical to SEQ ID NO: 77508
  REGION 1..379: note = tr|A0A3E1SR66|A0A3E1SR66_KLEOX Epoxyqueuosine reductase OS=Klebsiella oxytoca OX=571 GN=queG PE=3 SV=1

SEQ ID NO: 77512 - protein, 379 aa, Klebsiella oxytoca; identical to SEQ ID NO: 77509
  REGION 1..379: note = tr|A0A0H3H4S6|A0A0H3H4S6_KLEOK Epoxyqueuosine reductase OS=Klebsiella oxytoca (strain ATCC 8724 / DSM 4798 / JCM 20051 / NBRC 3318 / NRRL B-199 / KCTC 1686); OX = 10065 51 GN=queG PE=3 SV=1

SEQ ID NO: 77513 - protein, 379 aa, Klebsiella pneumoniae
  REGION 1..379: note = tr|A0A486EKR0|A0A486EKR0_KLEPN Epoxyqueuosine reductase OS=Klebsiella pneumoniae OX=573 GN=queG PE=3 SV=1
MSQPLDLVQLAQQIKQWGTELGFQQVGIADTDLSASEPKLQAWLDKQYHGEMEWMTRHGMMRARPHELLPGTLRVISVRMNYLPANAAFARTLKDPTLGYVSRYALGRDYHKLLRNRLKKLGEKIQEQCASLNFRPFVDSAPILERPIAEKAGLGWTGKHSLILSRDAGSFFFLGELLIDLPLPVDSPVAEECGRCVACMTICPTGAIVEPYTVDARRCISYLTIELEGAIPEEFRPLIGNRIYGCDDCQLICPWNRFSQLTDEEDFSPRKALHAPPLVELFAWSEAWFLKVTEGSAIRRIGHLRWLRNIAVALGNAPWDEAHLRALESRRGEHPLLDEHIEWAIAQQLKKRNADAVEVQLPKKLRLVRVVEKGLPRDA

SEQ ID NO: 77514 - protein, 379 aa, Klebsiella pneumoniae
  REGION 1..379: note = tr|R4YAQ3|R4YAQ3_KLEPR Epoxyqueuosine reductase; OS = Klebsiella pneumoniae subsp. rhinoscleromatis SB3432; OX = 861365 GN=yjeS PE=3 SV=1
MSQPLDLVQLAQQIKQWGTELGFQQVGIADTDLSASEPKLQAWLDKQYHGEMEWMARHGMMRARPHELLPGTLRVISVRMNYLPANAAFARTLKDPTLGYVSRYALGRDYHKLLRNRLKKLGEKIQEQCASLNFRPFVDSAPILERPIAEKAGLGWTGKHSLILSRDAGSFFFLGELLIDLPLPVDSPVAEECGRCVACMTICPTGAIVEPYTVDARRCISYLTIELEGAIPEEFRPLIGNRIYGCDDCQLICPWNRFSQLTDEEDFSPRKALHAPPLVELFAWSEAWFLKVTEGSAIRRIGHLRWLRNIAVALGNAPWDEAHLRALASRRGEHPLLDEHIEWAIAQQLKKRNADAVEVQLPKKLRLVRVVEKGLPRDA

SEQ ID NO: 77515 - protein, 379 aa, unidentified
  source 1..379: note = Klebsiella quasipneumoniae
  REGION 1..379: note = tr|A0A2N4W557|A0A2N4W557_9ENTR Epoxyqueuosine reductase OS=Klebsiella quasipneumoniae OX=1463165 GN=queG; PE = 3 SV=1
MSQPLDLVQLAQQIKQWGTELGFQQVGIADTDLSASEPKLQAWLDKQYHGEMEWMARHGMMRARPHELLPGTLRVISVRMNYLPANAAFARTLKDPALGYVSRYALGRDYHKLLRNRLKKLGEKIQEQCASLNFRPFVDSAPILERPIAEKAGLGWTGKHSLILSRDAGSFFFLGELLIDLPLPVDSPVAEECGRCVACMTICPTGAIVEPYTVDARRCISYLTIELEGAIPEEFRPLIGNRIYGCDDCQLICPWNRFSQLTDEEDFSPRQALHAPPLVELFAWSESWFLKVTEGSAIRRIGHLRWLRNIAVALGNAPWDEAHLRALESRLGEHPLLDEHIEWAMAQQLKKRSADAVEVQLPKKLRLVRVVEKGLPRDA

SEQ ID NO: 77516 - protein, 379 aa, unidentified
  source 1..379: note = Klebsiella quasipneumoniae
  REGION 1..379: note = tr|A0A5C6I9F7|A0A5C6I9F7_9ENTR Epoxyqueuosine reductase OS=Klebsiella quasipneumoniae subsp. similipneumoniae OX=1463164 GN=queG PE=3 SV=1
MSQPLDLVQLAQQIKQWGTELGFQQVGIADTDLSASEPKLQAWLDKQYHGEMEWMARHGMMRARPHELLPGTLRVISVRMNYLPANAAFARTLKDPALGYVSRYALGRDYHKLLRNRLKKLGEKIQEQCASLNFRPFVDSAPILERPIAEKAGLGWTGKHSLILSRDAGSFFFLGELLIDLPLPVDSPVAEECGRCVACMTICPTGAIVEPYTVDARRCISYLTIELEGAIPEEFRPLIGNRIYGCDDCQLICPWNRFSQLTDEEDFSPRQALHAPPLVELFAWSEAWFLKVTEGSAIRRIGHLRWLRNIAVALGNAPWDEAHLRALESRLGEHPLLDEHIEWAIAQQLKKRSVDAVEVQLPKKLRLVRVVEKGLPRDA

SEQ ID NO: 77517 - protein, 379 aa, unidentified
  source 1..379: note = Klebsiella quasivariicola
  REGION 1..379: note = tr|A0A223UH42|A0A223UH42_9ENTR Epoxyqueuosine reductase OS=Klebsiella quasivariicola OX=2026240 GN=queG; PE = 3 SV=1
MSQPLDLVQLAQQIKQWGTELGFQQVGIADTDLSASEPKLQAWLDKQYHGEMEWMARHGMMRARPHELLPGTLRVISVRMNYLPANAAFARTLKDPALGYVSRYALGRDYHKLLRNRLKKLGEKIQEQCASLNFRPFVDSAPILERPIAEKAGLGWTGKHSLILSRDAGSFFFLGELLIDLPLPVDSPVAEECGRCVACMTICPTGAIVEPYTVDARRCISYLTIELEGAIPEEFRPLIGNRIYGCDDCQLICPWNRFSQLTDEEDFSPRKALHAPPLVELFAWSEAWFLKVTEGSAIRRIGHLRWLRNIAVALGNAPWDEAHLRALESRRGEHPLLDEHIEWAIAQQMKKRSADAVEVQLPKKLRLVRVVEKGLPRDA

SEQ ID NO: 77518 - protein, 379 aa, unidentified
  source 1..379: note = Klebsiella quasivariicola
  REGION 1..379: note = tr|A0A556VGC6|A0A556VGC6_9ENTR Epoxyqueuosine reductase OS=Klebsiella quasivariicola OX=2026240 GN=queG; PE = 3 SV=1
MSQPLDLVQLAQQIKQWGTELGFQQVGIADTDLSASEPKLQAWLDKQYHGEMEWMARHGMMRARPHELLPGTLRVISVRMNYLPANAAFARTLKDPALGYVSRYALGRDYHKLLRNRLKKLGEKIQEQCASLNFRPFVDSAPILERPIAEKAGLGWTGKHSLILSRDAGSFFFLGELLIDLPLPVDSPVAEECGRCVACMTICPTGAIVEPYTVDARRCISYLTIELEGTIPEEFRPLIGNRIYGCDDCQLICPWNRFSQLTDEEDFSPRKALHAPPLVELFAWSEAWFLKVTEGSAIRRIGHLRWLRNIAVALGNAPWDEAHLRALESRRGEHPLLDEHIEWAIAQQMKKRSADAVEVQLPKKLRLVRVVEKGLPRDA

SEQ ID NO: 77519 - protein, 379 aa, Klebsiella sp.
  REGION 1..379: note = tr|A0A1F2M5F1|A0A1F2M5F1_9ENTR Epoxyqueuosine reductase OS=Klebsiella sp. HMSC16C06 OX=1581110 GN=queG; PE = 3 SV=1
MSQPLDLVQLAQQIKQWGTELGFQQVGIADTDLSASEPKLQAWLDKQYHGEMEWMARHGMMRARPHELLPGTLRVISVRMNYLPANAAFARTLKDPALGYVSRYALGRDYHKLLRNRLKKLGEKIQEQCALLNFRPFVDSAPILERPIAEKAGLGWTGKHSLILSRDAGSFFFLGELLIDLPLPVDSPVAEECGRCVACMTICPTGAIVEPYTVDARRCISYLTIELEGAIPEEFRPLIGNRIYGCDDCQLICPWNRFSQLTDEEDFSPRKALHAPPLVELFAWSEAWFLKVTEGSAIRRIGHLRWLRNIAVALGNAPWDEAHLRALESRRGEHPLLDEHIEWAIAEQINKRNADAVEVQLPKKLRLVRVVEKGLPRDA

SEQ ID NO: 77520 - protein, 379 aa, Klebsiella sp.
  REGION 1..379: note = tr|A0A4S5DNY1|A0A4S5DNY1_9ENTR Epoxyqueuosine reductase OS=Klebsiella sp. Z2 OX=2561928 GN=queG PE=3 SV=1
MSQPLDLNELAQKIKQWGAELGFQKVGITDTDLSASEPKLQAWLDKQYHGEMEWMARHGMMRARPHELLPGTLRVISVRMNYLPANAAFARTLKNPSLGYVSRYALGRDYHKLLRNRLKKLGETIQQHCVSLNFRPFVDSAPILERPIAEKAGLGWTGKHSLILSRDAGSFFFLGELLIDLPLPVDSPVEEGCGRCVACMTICPTGAIVEPYTVDARRCISYLTIELEGAIPEEFRPLIGNRIYGCDDCQLICPWNRYSQLTDEEDFSPRKALHAPQLIELFAWSEAWFLKVTEGSAIRRIGHLRWLRNVAVALGNAPWDEANLQALESRRGEHPLLDEHIEWAIAQQIEKRNAGVVEVQLPKKQRLVRVIEKGLPRDV

SEQ ID NO: 77521 - protein, 379 aa, Klebsiella variicola
  REGION 1..379: note = tr|A0A4S4HGD9|A0A4S4HGD9_KLEVA Epoxyqueuosine reductase OS=Klebsiella variicola OX=244366 GN=queG PE=3; SV = 1
MSQPLDLVQLAQQIKQWGTELGFQQVGIADTDLSASEPKLQAWLDKQYHGEMEWMARHGMMRARPHELLPGTLRVISVRMNYLPANAAFARTLKDPALGYVSRYALGRDYHKLLRNRLKKLGEKIQEQCASLNSRPFVDSAPILERPIAEKAGLGWTGKHSLILSRDAGSFFFLGELLIDLPLPVDSPVAEECGRCVACMTICPTGAIVEPYTVDARRCISYLTIELEGAIPEEFRPLIGNRIYGCDDCQLICPWNRFSQLTDEEDFSPRKALHAPPLVELFAWSEAWFLKVTEGSAIRRIGHLRWLRNIAVALGNAPWDEAHLRALESRRGEHPLLDEHIEWAIAEQINKRNADAVEVQLPKKLRLVRVVEKGLPRDA

SEQ ID NO: 77522 - protein, 379 aa, Klebsiella variicola
  REGION 1..379: note = tr|A0A2V3KLD6|A0A2V3KLD6_KLEVA Epoxyqueuosine reductase OS=Klebsiella variicola OX=244366 GN=queG PE=3; SV = 1
MSQPLDLVQLAQQIKQWGTELGFQQVGIADTDLSASEPKLQAWLDKQYHGEMEWMARHGMMRARPHELLPGTLRVISVRMNYLPANAAFARTLKDPALGYVSRYALGRDYHKLLRNRLKKLGEKIQEQCASLNFRPFVDSAPILERPIAEKAGLGWTGKHSLILSRDAGSFFFLGELLIDLPLPVDSPVAEECGRCVACMTICPTGAIVEPYTVDARRCISYLTIELEGAIPEEFRPLIGNRIYGCDDCQLICPWNRFSQLTDEEDFSPRKALHAPPLVELFAWSEAWFLKVTEGSAIRRIGHLRWLRNIAVALGNAPWDEAHLRALESRRGEHPLLDEHIEWAIAEQINKRNADAVEVQLPKKLRLVRVVEKGLPRDA

SEQ ID NO: 77523 - protein, 379 aa, Kluyvera ascorbata
  REGION 1..379: note = tr|A0A378GPK7|A0A378GPK7_9ENTR Epoxyqueuosine reductase OS=Kluyvera ascorbata OX=51288 GN=queG PE=3 SV=1
MSQPLDLNQLAQQIKQWGAELGFQQVGITDTDLSASEPKLQAWLDKQYHGEMEWMARHGMMRARPHELQPGTLRVLSVRMNYLPANAAFASTLKNPELGYVSRYALGRDYHKLLRNRLKKLGEMIQEQCVSLNFRPFVDSAPILERPLAEKAGIGWTGKHSLILNRDAGSFFFLGELLVDIPLPIDQPVAEECGRCVACMTICPTGAIVEPYTVDARRCISYLTIELEGAIPEEFRPLLGNRIYGCDDCQLICPWNRFSQLTDEADFSPRKALHAPELIELFAWNEAHFLKVTEGSAIRRIGHLRWLRNIAVALGNAPWSDATLNALESRRGEHPLLDEHIEWAIAQQITRRNEHVVEVQLPKKQRLVRVVEKGLPRDA

SEQ ID NO: 77524 - protein, 379 aa, Kluyvera ascorbata
  REGION 1..379: note = tr|A0A3N2S573|A0A3N2S573_9ENTR Epoxyqueuosine reductase OS=Kluyvera ascorbata OX=51288 GN=queG PE=3 SV=1
MSQPLDLNQLAQQIKQWGTELGFQQVGITDTDLSASEPKLQAWLDKQYHGEMEWMARHGMMRARPHELQPGTLRVISVRMNYLPANAAFASTLKNPELGYVSRYALGRDYHKLLRNRLKKLGEMIQEQCVSLNFRPFVDSAPILERPLAEKAGIGWTGKHSLILNRDAGSFFFLGELLVDIPLPIDQPVAEECGRCVACMTICPTGAIVEPYTVDARRCISYLTIELEGAIPEEFRPLLGNRIYGCDDCQLICPWNRFSQLTDEADFSPRKALHAPELIELFAWSEAHFLKVTEGSAIRRIGHLRWLRNIAVALGNAPWSDATLNALESRRGEHPLLDEHIEWAIAQQITRRNEHVVEVQLPKKQRLVRVVEKGLPRDA

SEQ ID NO: 77525 - protein, 379 aa, Kluyvera cryocrescens
  REGION 1..379: note = tr|A0A2X3DST9|A0A2X3DST9_KLUCR Epoxyqueuosine reductase OS=Kluyvera cryocrescens OX=580 GN=queG PE=3 SV=1
MSQPLDLNQLAQQIKQWGTELGFQQVGITDTDLSEAEPKLQAWLDKQYHGEMDWMARHGMMRARPHELQPGTLRVISVRMNYLPANAAFARTLKNPELGYVSRYALGRDYHKLLRNRLKKLGEMIQEQCVSLNFRPFVDSAPILERPLAEKAGIGWTGKHSLILNRDAGSFFFLGELLVDIPLPIDRPVAEGCGRCVACMTICPTGAIVEPYTVDARRCISYLTIELEGAIPEEFRPLIGNRIYGCDDCQLICPWNRFSQLTDEEDFSPRKALHSPELIELFAWTEAWFLKVTEGSAIRRIGHLRWLRNIAVALGNAPWSEGVLNALESRRGEHPLLDEHIEWAVAQQIARRNEGAIEVQLPKKQRLVRVVEKGLPRDA

SEQ ID NO: 77526 - protein, 172 aa, Kluyvera cryocrescens
  REGION 1..172: note = tr|A0A485BCX1|A0A485BCX1_KLUCR Epoxyqueuosine reductase OS=Kluyvera cryocrescens OX=580 GN=queG PE=4 SV=1
MSNPYTVDARRCISYLTIELEGAIPEEFRPLIGNRIYGCDDCQLICPWNRFSQLTDEEDFSPRKAWHSPELIELFAWTEAWFLKVTEGSAIRRIGHLRWLRNIAVALGNAPWSEGVLNALESRRGEHPLLDEHIEWAVAQQIARRNEGAIEVQLPKKQRLVRVVEKGLPRDA

SEQ ID NO: 77527 - protein, 379 aa, Kluyvera georgiana
  REGION 1..379: note = tr|A0A248KLM7|A0A248KLM7_9ENTR Epoxyqueuosine reductase OS=Kluyvera georgiana OX=73098 GN=queG PE=3 SV=1
MSQPLDLNQLAQQIKLWGTELGFQQVGITDTDLSASEPKLQAWLDKQYHGEMEWMARHGMMRARPHELQPGTLRVISVRMNYLPANAAFARTLKNPELGYVSRYALGRDYHKLLRNRLKKLGEMIQEQCVSLNFRPFVDSAPVLERPLAEKAGIGWTGKHSLILNRDAGSFFFLGELLVDIPLPVDQPVAEECGRCVACMTICPTGAIVEPYTVDARRCISYLTIELEGAIPEEFRPLLGNRIYGCDDCQLICPWNRFSQLTDEADFSPRKALHAPELVELFAWSEAHFLKVTEGSAIRRIGHLRWLRNIAVALGNAPWSEAALNALESRRGEHPLLDEHITWAIAQQIARRNEGAIEVQLPKKQRLVRVVEKGLPRDA

SEQ ID NO: 77528 - protein, 379 aa, Kluyvera georgiana
  REGION 1..379: note = tr|A0A1B7JQ27|A0A1B7JQ27_9ENTR Epoxyqueuosine reductase OS=Kluyvera georgiana ATCC 51603 OX=1354264; GN = queG PE=3 SV=1
MSQPLDLNQLAQQIKLWGTELGFQQVGITDTDLSASEPKLQAWLDKQYHGEMEWMARHGMMRARPHELQPGTLRVISVRMNYLPANAAFARTLKNPELGYVSRYALGRDYHKLLRNRLKKLGEMIQERCVSLNFRPFVDSAPILERPLAEKAGIGWTGKHSLTLNRDAGSFFFLGELLVDIPLPVDQPVAEECGRCVACMTICPTGAIVEPYTVDARRCISYLTIELEGAIPEEFRPLLGNRIYGCDDCQLICPWNRFSQLTDEADFSPRKALHAPELIELFAWSEAHFLKVTEGSAIRRIGHLRWLRNIAVALGNAPWSEAALNALESRQGEHPLLDEHITWAIAQQIARRNEGAVEVQLPKKQRLVRVVEKGLPRDA

SEQ ID NO: 77529 - protein, 379 aa, Kluyvera intermedia
  REGION 1..379: note = tr|A0A3S4GLH0|A0A3S4GLH0_KLUIN Epoxyqueuosine reductase OS=Kluyvera intermedia OX=61648 GN=queG PE=3 SV=1
MSQPLDLNQLAQQIKQWGTELGFQQVGITDTDLSEAEPKLQAWLDKQYHGEMDWMARHGMMRARPHELQPGTLRVISVRMNYLPANAAFARTLKNPELGYVSRYALGRDYHKLLRNRLKKLGEMIQEQCVSLNFRPFVDSAPILERPLAEKAGIGWTGKHSLILNRDAGSFFFLGELLVDIPLPIDQPVVEECGRCVACMTICPTGAIVEPYTVDARRCISYLTIELEGAIPEEFRPLIGNRIYGCDDCQLICPWNRFSQLTDEADFSPRKALHSPELIELFAWSEAWFLKVTEGSAIRRIGHLRWLRNIAVALGNAPWSEAAIHALESRRGEYPLLDEHIDWAIAQQIERRNACVVEVQLPKKQRLVRVVEKGLPRDA

SEQ ID NO: 77530 - protein, 395 aa, Kluyvera intermedia
  REGION 1..395: note = tr|A0A1X0XGR4|A0A1X0XGR4_KLUIN Epoxyqueuosine reductase OS=Kluyvera intermedia OX=61648 GN=queG PE=3 SV=1
MECGILTAYFFIVWSVMSEPLDLNQLAHSIKQWGTELGFQQVGIADTDLSASEPKLQAWLDKQYHGEMEWMARHGMMRARPHELLPGTLRVISVRMNYLPANAAFASTLKNPTLGYVSRYALGRDYHKLLRNRLKQLGEKIQQHCASLNFRPFVDSAPILERPLAEKAGLGWVGKHSLILNRHAGSFFFLGELLIDLPLPVDQPIEENCGRCVACLTICPTGAIVEPYTVDARRCISYLTIELEGAIPEEFRPLIGNRIYGCDDCQLICPWNRFSQLTDEADFSPRKALHAPELIELFAWSESWFLKVTEGSAIRRIGHLRWLRNIAVALGNAPWDEANIRALEQRRGEHPLLDEHIEWAIAQQVEKRNACVVEVQTPKKQRLVRVIEKGLIRDA

SEQ ID NO: 77531 - protein, 384 aa, Kluyvera sp.
  REGION 1..384: note = tr|A0A2T3XD69|A0A2T3XD69_9ENTR Epoxyqueuosine reductase OS=Kluyvera sp. Nf5 OX=2116543 GN=queG PE=3 SV=1
MVWSVMSEPLDLNQLAHSIKQWGSELGFQQVGIADTDLSASEPKLQAWLDKQYHGEMEWMARHGMMRARPHELLPGTLRVISVRMNYLPANAAFASTLKNPALGYVSRYALGRDYHKLLRNRLKQLGEKIQQHCASLNFRPFVDSAPILERPLAEKAGLGWVGKHSLILNRQAGSFFFLGELLIDLPLPVDQPVEEDCGRCVACLTICPTGAIVEPYTVDARRCISYLTIELEGAIPEEFRPLIGNRIYGCDDCQLICPWNRFSQLTDEADFSPRKALHSPELIELFAWSESWFLKVTEGSAIRRIGHLRWLRNIAVALGNAPWDEANIRALEQRRGEHPLLDEHIEWAIAQQVEKRNACVVEVQTPKKQRLVRVIEKGLIRDA

SEQ ID NO: 77532 - protein, 365 aa, unidentified
  source 1..365: note = Komagataeibacter cocois
  REGION 1..365: note = tr|A0A365YXF3|A0A365YXF3_9PROT Epoxyqueuosine reductase OS=Komagataeibacter cocois OX=1747507 GN=queG; PE = 3 SV=1
MARVRPVTHPPGAQGTLARLICERALAVGFDAVGFAPATLDDATRLRLHEFVETGRHGAMDWMAQRMSWRGDPRALWPEVRSVISLGLSYAPDGDALATLRDPTAGNISVYARHRDYHDVVKGMLKQVAQFIVAEGRRQAGGDMPPPGVKVFVDTAPVMEKPLAASAGLGWQGKHTNLVSRQHGSWLFLGEIYTTLDLPPSAPSGGGCGTCTRCLDICPTAAFPAPGRIDARRCISYQTIENPDPIPHELRPLMGNRIYGCDDCLAVCPWNRFARATRQMKLQARPDLVAPALRDLAMLDDAGFRRLFSGSPVKRIGRARFVRNVLIAIGNSGRAELRPVAQGLCDDAAPVVADAARWATERLPA

SEQ ID NO: 77533 - protein, 358 aa, unidentified
  source 1..358: note = Komagataeibacter europaeus
  REGION 1..358: note = tr|A0A0M0EGA2|A0A0M0EGA2_KOMEU Epoxyqueuosine reductase OS=Komagataeibacter europaeus OX=33995 GN=queG; PE = 3 SV=1
MAAAPPGPDPARMAARIAGHARDLGFDAVGFAPARLDDATRTRLAMFVENGFAGSMGWMAQRMEQRGDPRMLWPEVRSVIALGLNYAPEGDALATTRVPDAGNISVYARNRDYHDVVKGMLKHLAQFVVNEGRRQGMDDAQVKVFVDTAPVMEKPLARNAGLGWQGKHTSLVSRRHGSWLFLGEVYTTLDLPQSAPSGGGCGSCTRCLVACPTDAFPAPGVMDARRCISYLTIENRDPIPEALRPAMGNRIYGCDDCLAVCPWNRFAAATNHMKLAARDDLRAPALRDLAALDDAGFRARFSGSPIKRIGRGRFVRNVAVAIGNSAQPALRPSVAALCGDADPVVADAARWATLRLPR

SEQ ID NO: 77534 - protein, 358 aa, unidentified
  source 1..358: note = Komagataeibacter europaeus
  REGION 1..358: note = tr|A0A0D6Q148|A0A0D6Q148_KOMEU Epoxyqueuosine reductase OS=Komagataeibacter europaeus NBRC 3261; OX = 1234669 GN=queG PE=3 SV=1
MAAAPPGPDPARMAARIAGHARDLGFDAVGFAPARLDDATRTRLAMFVENGFAGSMGWMAQRMEQRGDPRMLWPEVRSVIALGLNYAPEGDALAATRVPDAGNISVYARNRDYHDVVKGMLKHLAQFVVNEGRRQGMDDAQVKVFVDTAPVMEKPLARNAGLGWQGKHTSLVSRRHGSWLFLGEVYTTLDLPQSAPSGGGCGSCTRCLVACPTDAFPAPGVMDARRCISYLTIENRDPIPEALRPAMGNRIYGCDDCLAVCPWNRFAAATNHMKLAARDDLRAPALRDLAALDDAGFRARFSGSPVKRIGRGRFVRNVAVAIGNSAQPALRPSVAALCGDADPVVADAARWATLRLPR

SEQ ID NO: 77535 - protein, 366 aa, unidentified
  source 1..366: note = Komagataeibacter hansenii
  REGION 1..366: note = tr|A0A318PZ91|A0A318PZ91_KOMHA Epoxyqueuosine reductase OS=Komagataeibacter hansenii OX=436 GN=queG PE=3; SV = 1
MAARAQPVACPPGAPGGLARRIHDRAVAIGFDAVGFAPAMLDDAARARLHEFVRTGRHGAMDWMAQRMAWRGDPRALWPDVRSVISLGLSYAPDGDALATLRNPMAGNISVYARHRDYHDVVKGMLKQVAQFIVAQGRRQPGGEASPPGVKVFVDTAPVMEKPLAANAGLGWQGKHTNLVSRTHGSWLFLGEIYTTLDLPHSAPSGGGCGTCTRCLDICPTSAFPAPGQIDARRCISYQTIENPDPIPHELRPLIGNHIYGCDDCLAVCPWNRFAQATRQMKLRARPDLVAPALRDLAVLDDAGFRTLFSGSPIKRIGRARFVRNVLIAIGNSARADLCDVAQGLCDDPAPVVADAARWAVERLMS

SEQ ID NO: 77536 - protein, 366 aa, unidentified
  source 1..366: note = Komagataeibacter hansenii
  REGION 1..366: note = tr|D5QBB9|D5QBB9_KOMHA Epoxyqueuosine reductase; OS = Komagataeibacter hansenii ATCC 23769 OX=714995 GN=queG; PE = 3 SV=1
MAARAQPVACPPGAPGGLARRIHDRAVAIGFDAVGFAPAMLDDAACARLHEFVRTGRHGAMDWMAQRMAWRGDPRALWPDVRSVISLGLSYAPDGDALATLRNPMAGNISVYARHRDYHDVVKGMLKQVAQFIVAQGRRQPGGEASPPGVKVFVDTAPVMEKPLAANAGLGWQGKHTNLVSRTHGSWLFLGEIYTTLDLPHSAPSGGGCGTCTRCLDICPTSAFPAPGQIDARRCISYQTIENPDPIPHELRPLMGNHIYGCDDCLAVCPWNRFAQATRQMKLRARPDLVAPALRDLAVLDDAGFRTLFSGSPIKRIGRARFVRNVLIAIGNSARADLCDVAQGLCDDPAPVVADAARWAVERLMS

SEQ ID NO: 77537 - protein, 358 aa, unidentified
  source 1..358: note = Komagataeibacter intermedius
  REGION 1..358: note = tr|A0A0N1N6S7|A0A0N1N6S7_9PROT Epoxyqueuosine reductase OS=Komagataeibacter intermedius AF2 OX=1458464; GN = queG PE=3 SV=1
MAAAPSGPDPVRMAARIADHARDLGFDAVGFAPARLDDAARARLAMFVENGFAGSMGWMAQRMEQRGDPRMLWPEVRSVIALGLNYAPGGDALATTRMPDAGNISVYARNRDYHDVVKGMLKHLAQFVVNEGRRQGMDGTQVKVFVDTAPVMEKPLAQNAGLGWQGKHTSLVSRRHGSWLFLGEIYTTLDLPQSVPSGGGCGSCTRCLVACPTDAFPAPGVMDARRCISYLTIENRDPIPEGLRPAMGNRIYGCDDCLAVCPWNRFATATHHMKLAARDDLRAPALQDLATLDDAGFRARFSGSPVKRIGRGRFVRNVAVAIGNSGQAVLRPSVAALCADADPVVADAARWATLRLPR

SEQ ID NO: 77538 - protein, 365 aa, unidentified
  source 1..365: note = Komagataeibacter maltaceti
  REGION 1..365: note = tr|A0A2S3W2N9|A0A2S3W2N9_9PROT Epoxyqueuosine reductase OS=Komagataeibacter maltaceti OX=1203393 GN=queG; PE = 3 SV=1
MARARSVTYPSDARGVLARRIHDRALAVGFDAVGFAPAMLDDATRARLREFVAAGHHGAMEWMAQRMAWRGDPRALWPEVRSVISLGLSYAPEGDALATLRDPTAGNISVYARHRDYHDVVKGMLKQVAQFVVAEGRRQHGGDAPPPGVKVFVDTAPVMEKPLAAGAGLGWQGKHTNLVSRTQGSWLFLGEIYTTLDLPHSAPSGGGCGTCTRCLDVCPTSAFPAPGQIDARRCISYQTIENPGPIPHDLRPLMGNHIYGCDDCLAVCPWNRFAQATRQMKLRARPDLVAPALRDLALLDDAGFRALFSGSPVKRIGRARFVRNVLIAIGNSARADLRGVAQALCDDPAPVVADAARWAVGRLPS

SEQ ID NO: 77539 - protein, 356 aa, unidentified
  source 1..356: note = Komagataeibacter medellinensis
  REGION 1..356: note = tr|G2I0K6|G2I0K6_KOMMN Epoxyqueuosine reductase; OS = Komagataeibacter medellinensis (strain NBRC 3288 / BCRC 11682 / LMG 1693 / Kondo 51) OX=634177 GN=queG PE=3 SV=1
MARAAAGPAALAARIAEHARTLGFDAVGFAPARLDDGARARLAAFVENGFAGSMGWMAQRMEQRGDPRGLWPEVRSVIALGLNYAPEGDPLATTRVPDAGNISVYARNRDYHDVVKGMLKHLAQFVVNAGRRQGYDGAEVKVFVDTAPVMEKPLAQNAGLGWQGKHTSLVSRQHGSWLFLGEIYTTLDLPQSAPSGGGCGTCTRCLVACPTDAFPAPGVMDARRCLSYLTIENRGPIPHAFRPAMGNRIYGCDDCLAACPWNRFAQATRHMKLAAREDLRAPALHELAALDDRGFRSRFSGSPVKRIGRDRFVRNVAVAIGNSGQAALRPAAAALCADPDPVVAEAAQWAVARLPR

SEQ ID NO: 77540 - protein, 355 aa, unidentified
  source 1..355: note = Komagataeibacter nataicola
  REGION 1..355: note = tr|A0A1U9RKM1|A0A1U9RKM1_9PROT Epoxyqueuosine reductase OS=Komagataeibacter nataicola OX=265960 GN=queG; PE = 3 SV=1
MAGAPPDPARLAARIAAHARMLGFDAVGFAPARLDEATRARLATFVERGFAGSMGWMAERMAQRGDPATLWPEVRSVIALGLNYAPQGDALATTQVPDAGNISVYARNRDYHDVVKGMLKHLAQFVVNEGRRAGLEAQVKVFVDTAPVMEKPLAQNAGLGWQGKHTSLVSRQHGSWLFLGEVYTTLDLPQSAPSGGGCGTCTRCLDACPTDAFPAPGVMDARRCISYLTIENRDPIPEALRPAMGNRIYGCDDCLAVCPWNRFAQATRHMKLAARDDLHAPALRELAVLDDAAFRARFSGSPIKRIGRNRFVRNVAVAIGNSGQASLRPVVSGLCHDPDPVVAEAARWATLRLPA

SEQ ID NO: 77541 - protein, 358 aa, unidentified
  source 1..358: note = Komagataeibacter oboediens
  REGION 1..358: note = tr|A0A318R024|A0A318R024_9PROT Epoxyqueuosine reductase OS=Komagataeibacter oboediens OX=65958 GN=queG; PE = 3 SV=1
MAGASSGPDPVRMAARIADHARDLGFDAVGFAPARLDEAARARLAMFVENGFAGSMGWMAQRMEQRGDPRMLWPEVRSVIALGLNYAPEGDALATTRMPDAGNISVYARNRDYHDVVKGMLKHLAQFVVNEGRRQGMDGTQVKVFVDTAPVMEKPLAQNAGLGWQGKHTSLVSRRHGSWLFLGEVYTTLDLPQSASSGGGCGSCTRCLVACPTDAFPAPGVMDARRCISYLTIENRDPIPEALRPAMGNRIYGCDDCLAVCPWNRFATATHHMKLAARDDLRAPALRELATLDDARFRARFSGSPVKRIGRGRFVRNVAVAIGNSGQAALRPSVAALCADPDPVVADAARWATLRLPQ

SEQ ID NO: 77542 - protein, 361 aa, unidentified
  source 1..361: note = Komagataeibacter pomaceti
  REGION 1..361: note = tr|A0A318Q9Q8|A0A318Q9Q8_9PROT Epoxyqueuosine reductase OS=Komagataeibacter pomaceti OX=2021998 GN=queG; PE = 3 SV=1
MARVPSPGAQGALARRIYDRALAVGFDAVGFAPAMLDDATRLRLREFVEEGRHGAMEWMAQRMSWRGDPRALWPEVRSVISLGLSYAPDGDALATLRDPVAGNISVYARHRDYHDVVKGMLKQVAQFVVAEGRRQANGDTPPPGVKVFVDTAPVMEKSLAASAGLGWQGKHTNLVSRQHGSWLFLGEIYTTLDLPPSAPSGGGCGTCTRCLDICPTAAFPAPGRIDARRCISYQTIENPDPIPLELRPLMGNRIYGCDDCLAVCPWNRFARATRQMKLRARADLVAPALRDLAVLDDAGFRRLFSGSPVKRIGRARFVRNVLIAIGNSGRAELRPVAQGLCDDAAPVVADAARWAVGRLPA

SEQ ID NO: 77543 - protein, 357 aa, unidentified
  source 1..357: note = Komagataeibacter rhaeticus
  REGION 1..357: note = tr|A0A181C6Z0|A0A181C6Z0_9PROT Epoxyqueuosine reductase OS=Komagataeibacter rhaeticus OX=215221 GN=queG; PE = 3 SV=1
MARAACAHDPAALAARIADHARRLGFDAVGFTPARLDDGTRARLAAFVENGFAGSMGWMAQRMEQRGDPRGLWPEVRSVIALGVSYTPDGDPLATTRVPDAGNISVYARNRDYHDVVKGMLKHLAQFVVNEGRRQGSDTEVKVFVDTAPVMEKPLARDAGLGWQGKHTSLVSRQHGSWLFLGEVYTTLDLPQSAPSGGGCGTCTRCLVACPTDAFPAPGVMDARRCLSYLTIENRGPIPHALRPAMGNRIYGCDDCLAACPWNRFAQATRHMKLAARDDLRAPALRELAALDDGGFRRRFSGSPIKRIGRERFVRNVAVAIGNSGQPALRPAAMALCSDPDPVVAEAARWAVARLPR

SEQ ID NO: 77544 - protein, 357 aa, unidentified; identical to SEQ ID NO: 77543
  source 1..357: note = Komagataeibacter rhaeticus
  REGION 1..357: note = tr|A0A070A9U3|A0A070A9U3_9PROT Epoxyqueuosine reductase OS=Komagataeibacter rhaeticus AF1 OX=1432055; GN = queG PE=3 SV=1

SEQ ID NO: 77545 - protein, 361 aa, unidentified
  source 1..361: note = Komagataeibacter saccharivorans
  REGION 1..361: note = tr|A0A347W9W2|A0A347W9W2_9PROT Epoxyqueuosine reductase OS=Komagataeibacter saccharivorans OX=265959; GN = queG PE=3 SV=1
MAGPCASAMADPVRLAAAIAGHARALGFDAVGFAPAQLDDGVRARLAAFVENGFAGGMEWMAQRMEQRGDPRGLWPEVRSVIALGVSYAPGEDDPLATTRQPEAGNISVYARHRDYHDVVKGMLKHLAQFVVNAGRRQGAGAAEVKVFVDTAPVMEKPLAQNAGLGWQGKHTSLVSRQHGSWLFLGEIYTTLDLPQSVPSGGGCGTCTRCLDACPTGAFPQPGIMDARRCISYLTIENRDPIPHEFRPAMGNRIYGCDDCLAVCPWNRFARATNHMKLAARDDLRAPALRDLAMLDDAGFRARFSGSPVKRIGRNRFVRNVAVAIGNSGRPELRPVVAALCADADPVVAEAAQWATVRLPS

SEQ ID NO: 77546 - protein, 357 aa, unidentified
  source 1..357: note = Komagataeibacter sp.
  REGION 1..357: note = tr|A0A371YWB4|A0A371YWB4_9PROT Epoxyqueuosine reductase OS=Komagataeibacter sp. AV 382 OX=2301223; GN = queG PE=3 SV=1
MRASPPADGARLAAVIAGHARALGFDAVGFAPARLDDTVRARLAAFVDNGFAGGMGWMAQRMEQRGDPRGLWPEVRSVIALGVTYAPEGDALATTRQPDAGNISVYARNRDYHDVVKGMLKHLAQFVVNEGRRQGVDQPEVKVFVDTAPVMEKPLAQQAGLGWQGKHTSLVSRQHGSWLFLGEVYTTLDLPQSAPSGGGCGSCTRCLDACPTGAFPAPGIMDARRCISYLTIENRDPIPVELRPAMGNRIYGCDDCLAVCPWNRFATATHHMKLAARDDLRAPALAELAALDDAGFRARFSGSPIKRIGRGRFVRNVAVAVGNSARAELRPAVAALCADADPVVADAARWAVDRLPA

SEQ ID NO: 77547 - protein, 358 aa, unidentified
  source 1..358: note = Komagataeibacter sp.
  REGION 1..358: note = tr|A0A4P5NRP1|A0A4P5NRP1_9PROT Epoxyqueuosine reductase OS=Komagataeibacter sp. MSKU9 OX=1932662 GN=queG; PE = 3 SV=1
MRAAPPGPDPARMAARIAGHARDLGFDAVGFAPARLDDAVRTRLAMFVEHGFAGSMGWMAQRMDQRGDPRGLWPEVRSVIALGLNYAPESDALATTRVPDAGNISVYARNRDYHDVVKGMLKHLAQFVVNEGRRQGMDDTQVKVFVDTAPVMEKPLAQNAGLGWQGKHTSLVSRQHGSWLFLGEVYTTLDLPQSAPSGGGCGSCTRCLDACPTNAFPAPGVMDARRCISYLTIENRDPIPEALRPAMGNRIYGCDDCLAVCPWNRFAAATNHMKLAARDDLRAPALRTLAGLDDAGFRARFSGSPIKRIGRNRFVRNVAVAIGNSAQPALRPSVAALCDDADPVVADAARWAMLRLPR

SEQ ID NO: 77548 - protein, 355 aa, unidentified
  source 1..355: note = Komagataeibacter sucrofermentans
  REGION 1..355: note = tr|A0A318QFY4|A0A318QFY4_9PROT Epoxyqueuosine reductase OS=Komagataeibacter sucrofermentans OX=1053551; GN = queG PE=3 SV=1
MAQASPDPARLAVRIAEHARGLGFDAVGFAPARLDDATRARLAAFVENGFAGSMGWMAERMAQRGDPRGLWPEVRSVIALGLNYAPQGDALATTRVPDAGNISVYARNRDYHDVVKGMLKHLAQFVVNEGRRAGNEAQVKVFVDTAPVMEKPLAQNAGLGWQGKHTSLVSRQHGSWLFLGEVYTTLDLPQSAPSRGGCGTCTRCLDACPTDAFPAPGVMDARRCISYLTIENRDPIPEALRPAMGNRIYGCDDCLAVCPWNRFAQATSHMKLAARDDLHAPPLAELAALDDAGFRARFSGSPIKRIGRNRFVRNVAVAIGNSGQAALRPVVARLCNDPDPVVAEAARWATLRLPA

SEQ ID NO: 77549 - protein, 358 aa, unidentified
  source 1..358: note = Komagataeibacter swingsii
  REGION 1..358: note = tr|A0A2V4S3Z1|A0A2V4S3Z1_9PROT Epoxyqueuosine reductase OS=Komagataeibacter swingsii OX=215220 GN=queG; PE = 3 SV=1
MPSAPSGPDPVRMAARIAGHARDLGFDAVGFAPARLDDAVRNRLAMFVENGFAGGMGWMAQRMEQRGDPRALWPEVRSVIALGLNYAPEGDALATTRVPDAGNISVYARNRDYHDVVKGMLKHLAQFVVGEGRRQGMDGTQVKVFVDTAPVMEKPLAQNAGLGWQGKHTSLVSRRHGSWLFLGEVYTTLDLPQSAPSGGGCGSCTRCLVACPTDAFPAPGVMDARRCISYLTIENRDPIPEALRPAMGNRIYGCDDCLAVCPWNRFAAATNHMKLAARDDLRAPALQDLAALDDAGFRARFSGSPIKRIGRNRFVRNVAVAIGNSAQPALRPSVAALCDDADPVVADAARWATLRLPR

SEQ ID NO: 77550 - protein, 357 aa, unidentified; identical to SEQ ID NO: 77051
  source 1..357: note = Komagataeibacter xylinus
  REGION 1..357: note = tr|A0A2D3HGP9|A0A2D3HGP9_KOMXY Epoxyqueuosine reductase OS=Komagataeibacter xylinus OX=28448 GN=queG; PE = 3 SV=1

SEQ ID NO: 77551 - protein, 358 aa, unidentified
  source 1..358: note = Komagataeibacter xylinus
  REGION 1..358: note = tr|A0A0D6Q5H8|A0A0D6Q5H8_KOMXY Epoxyqueuosine reductase OS=Komagataeibacter xylinus NBRC 13693; OX = 1234668 GN=queG PE=3 SV=1
MAGASSGPDPVRMAARIADHARDLGFDAVGFAPARLDDAARARLAMFVENGFAGSMGWMAQRMEQRGDPRMLWPEVRSVIALGLNYAPEGDALATTRMPDAGNISVYARNRDYHDVVKGMLKHLAQFVVNEGRRQGMDGTQVKVFVDTAPVMEKPLAQNAGLGWQGKHTSLVSRRHGSWLFLGEVYTTLDLPQSAPSGGGCGSCSRCLVACPTDAFPAPGVMDARRCISYLTIENRDPIPEALRPAMGNRIYGCDDCLAVCPWNRFATATHHMKLAARDDLRAPALRELATLDDAGFRARFSGSPVKRIGRGRFVRNVAVAIGNSGQAALRPSVAALCADPDPVVADAARWATLRLPQ

SEQ ID NO: 77552 - protein, 310 aa, Kordia algicida
  REGION 1..310: note = tr|A9DPF6|A9DPF6_9FLAO Epoxyqueuosine reductase; OS = Kordia algicida OT-1 OX=391587 GN=queG PE=3 SV=1
MKSTQKHTELIKAEAKRLGFLSCGISKSEFLEEEAPRLETWLNKNMHGEMSYMENHFDKRLDPTKLVDDSKSVVSLLLNYYPSETQKDPEAPKISKYAYGTDYHFVIKDKLKQLLNFIQEEIGEVSGRAFVDSAPVLDKAWAAKSGLGWIGKHSNLLTQKVGSFYFIAELIIDLELEYDLPVTDHCGSCTACIDACPTQAIVEPYVVDGSKCISYFTIELKNEIPTHVQGQFDNWMFGCDVCQDVCPWNRFSKPHNEPLFNPHPELLSMSKKEWEEITQEVFSEIFKKSAVKRTKYTGLMRNIQFLKTEN

SEQ ID NO: 77553 - protein, 313 aa, Kordia periserrulae
  REGION 1..313: note = tr|A0A2T6C6A4|A0A2T6C6A4_9FLAO Epoxyqueuosine reductase OS=Kordia periserrulae OX=701523 GN=queG PE=3; SV = 1
MNSKEKHTNLIKAEAKRLGFLSCGISKAAFLEEEAPRLEAWLNQNMHGEMQYMENHFDKRLDPTKLVEGSKSVVSLLLNYYPSETQKDSEAPKISKYAYGMDYHFVIKDKLKQLLHFIQEEIGEVSGRAFVDSAPVLDKAWAAKSGLGWIGKHSNLLTQKVGSFYFIAELIIDLELEYDAPVTDHCGSCTACIDACPTQAIVEPYVVDGSKCISYFTIELKNEIPTHVQGQFDNWMFGCDVCQDVCPWNRFSKPHNEPLFNPHPELLSMSKKEWEEITQEVFSEIFKKSAVKRTKYTGLVRNIKFLKTEKGLE

SEQ ID NO: 77554 - protein, 307 aa, Kordia sp.
  REGION 1..307: note = tr|A0A2G2KJY3|A0A2G2KJY3_9FLAO Epoxyqueuosine reductase OS=Kordia sp. OX=1965332 GN=queG PE=3 SV=1
MNLKEKYTQMIKTEALRLGFLSCGISKATFLEEEAPKLESWLKNDFHGEMKYMENHFDKRLDPRLLVEDAKSVISLSYNYYPEQLQREDSYKIAKYAYGQDYHHVIKAKLKELSVFVQEQVGDVQGRAFVDSAPVMERAWAKKSGLGWEGKHSLILQKKQGSFFFLSELVIDLELDYDTPMTDHCGTCTKCIDACPTEAILPNNTVDGSKCISYFTIELKENIANEFKGQFDDWMFGCDICQDVCPWNRFSKPHNEPLFTPKSELLNMTKKDWEDITEDVFGKVFQKSAVKRTKFAGLQRNISFLKK

SEQ ID NO: 77555 - protein, 310 aa, Kordia sp.
  REGION 1..310: note = tr|A0A501HKK4|A0A501HKK4_9FLAO Epoxyqueuosine reductase OS=Kordia sp. TARA_039_SRF OX=2530203 GN=queG; PE = 3 SV=1
MKSTEKHTQLIKAEAKRLGFLSCGISKAEFLEEEAPRLEAWLNQNMHGEMHYMENHFDKRLDPTKLVEGSKSVVSLLLNYYPSETQKDSEAPKISKYAYGMDYHFVIKDKLKQLLHFIQEEIGDVHGRAFVDSAPVLDKAWAAKSGLGWIGKHSNLLTQKVGSFYFIAELIIDLELEYDTPVTDHCGSCTACIDACPTNAIVEPYVVDGSKCISYFTIELKNEIPTHVQGQFDNWMFGCDVCQDVCPWNRFSKPHNEPLFNPHPELLSMTKKEWEEITQEVFSEIFKKSAVKRTKYAGLVRNIKFLKTEK

SEQ ID NO: 77556 - protein, 348 aa, unidentified
  source 1..348: note = Kordiimonadales bacterium
  REGION 1..348: note = tr|A0A2A4VUN7|A0A2A4VUN7_9PROT Epoxyqueuosine reductase OS=Kordiimonadales bacterium OX=2030814 GN=queG; PE = 3 SV=1
MSAAGGDIRAAIEAKAFELGFDQMGITRATTSEKVIEGFRSFIKLERHASMEWLADRMHQREHPQNLWPEAKSVIMLGVNYGPKDDPRLLLDHKEMANISVYARGKDYHDLIKKRLKAFARWLVPEYGCDLKVFVDTAPVPEKPLAVSAGLGWQGKHTNMVSREYGSWLFLGAIYTDMELPADTPHEDKCGSCTACIDACPTNAFPAPYEIDAGRCISYLTIEHKGPIPEEFRRPMGNRIYGCDDCLAACPWNKFAQVSAEAAFHARVELGAPALKDLVTLDDASFRQIFSGSPIKRIGRNRFIRNILYAIGNTGDADHMGAVNKLCDDPDEAVKDAAKWAKEQILSS

SEQ ID NO: 77557 - protein, 397 aa, unidentified
  source 1..397: note = Kordiimonadales bacterium
  REGION 1..397: note = tr|A0A5A7N2N4|A0A5A7N2N4_9PROT Epoxyqueuosine reductase OS=Kordiimonadales bacterium JCM 17846; OX = 1236968 GN=queG PE=4 SV=1
MGIADPDGVEKAGVHLLRFVALGRHGEMGWMAEKADRRRHPKALWPEVRSVIMLGLNYGPAHDPLDQLGWPDQGTISVYARNKDYHDLIKTRLRMLARWLVEQTGCALKLFVDTAPVMEKPLAAAAGLGWQGKHTNLISRDLGNWLFLGAIFTDLALPTDGPIKDHCGSCRRCLDICPTKAFPAPYQLDARRCISYLTIEYKGHIDADLRPAMGNRIYGCDDCLAVCPWNKYAHKTNDPAFFPRPELSAPDLADLAELDDAAFRTVFAGSPIKRTGRDCFVRNVLIAIGNSANPAHLPVIHRRLDDPSPLVRAMAIWHWVGWGMSIRSKRPNAPIGPGKRIKMSSGNGRGSIPGLWIRPREARFDGSFSLRALMLCSCIMASGLPPSAYGKQHQHQK

SEQ ID NO: 77558 - protein, 354 aa, Kordiimonas lacus
  REGION 1..354: note = tr|A0A1G6TXU4|A0A1G6TXU4_9PROT Epoxyqueuosine reductase OS=Kordiimonas lacus OX=637679 GN=queG PE=3 SV=1
MPGGPTSGPGDIRAALEAKARELGFDAFGITRAETSDKVVEGLRNFVALDRHGSMAWMKERLHHRESPTNLWPEARSAIMLGVNYGPKDDPRLLLEQKGFGNISVYARGKDYHDIIKKRLKTLARWMVETWGCELKVFVDTAPVPEKPLSAAAGLGWQGKHTNMVSPEFGSWLFLGAIYTTMELPLDGPHRDQCGSCRACLDACPTDAFPAPYEIDARRCISYLTIEHKDPIPEEFRRALGNRIYGCDDCLAACPWNKFAQTSAEAAFHARVELGAPALEDLVALDDATFREVFSGSPIKRIGRDRFVRNVLYAIGNSGDAGYLTKIAALKDDQSHVVRDAAEWAWDTLQNEGE

SEQ ID NO: 77559 - protein, 385 aa, Kordiimonas sp.
  REGION 1..385: note = tr|A0A2E1CUL5|A0A2E1CUL5_9PROT Epoxyqueuosine reductase OS=Kordiimonas sp. OX=1970157 GN=queG PE=3 SV=1
MTNAGIKMTTAAQITADIRDTARRLGFDAVGITHADNLTQNAQWLQDFLNRHHYGDMDWMQEKADRRADPKVLWPDVKSIIMLAMNYGPSHDPRDLLAAKERGNISVYARGKDYHDVIKKRLKQIARHLVQHHHADVKVFVDTAPVMEKPLAANAGLGWQGKHTNMVSRHFGSWLFLGCIYTTLDLPSDDAHRDHCGQCHACLDICPTHAFPAPYKLDARRCISYLTIEHKGHIPREFRNPIGNRIYGCDDCLAVCPWNKYAQTAQDAAYFARAELQAPRLGDLARLDDVAFRQIFAGSPIKRLGRDRFIRNVLIAIGNSQNLDLLPAALSKLRDDSPLVRAMAVWALGKLIPLPQFNALRADHLSREVDPAVRQEWFTPEGPNA

SEQ ID NO: 77560 - protein, 360 aa, unidentified
  source 1..360: note = Koribacter versatilis
  REGION 1..360: note = tr|Q1IIW8|Q1IIW8_KORVE 4Fe-4S ferredoxin, iron-sulfur binding protein OS=Koribacter versatilis (strain Ellin345) OX=204669 GN=Acid345_4182 PE=4 SV=1
MEAPMPSISAISEQVRRLAREHGFDLAGIAGVGPYPESEVFEPWIAEERHGEMSYLASRNDAGALKRAELKNAAPWARSVVVCAMNYNSSAPYSTHAGSNREGWIARYAQGEVDYHDVLLPRLRTLEAAIAALAPNEEPFRSWCYVDTGPVIERVFAKYAGIGWIGKNTCILNEQLGSWLFLGVILTNLALEPDLPATDRCGSCTRCLDACPTNAFVGPHQLDATKCISYLTIEKRGPIPEELRTGIGRHLFGCDICQDVCPWNRKAPVGTVPEFQPKEERVNPPLRELAEMDVDQYREFVQKSPIKRTKWVGFRRNLAVAIGNNGDLELLATAEKLAADEDPLVAEHGRWAVEQLRKIF

SEQ ID NO: 77561 - protein, 379 aa, unidentified
  source 1..379: note = Kosakonia arachidis
  REGION 1..379: note = tr|A0A1I7C2Y8|A0A1I7C2Y8_9ENTR Epoxyqueuosine reductase OS=Kosakonia arachidis OX=551989 GN=queG PE=3; SV = 1
MSQPLNLNDLAQQIKLWGSELGFQQVGIADTDLSASEPKLQAWLDKQYHGEMEWMARHGMMRARPHELLPGTLRVISVRMNYLPAQAAFASTLKNPTLGYVSRYALGRDYHKLLRNRLKKLGELIQQHCASLNFRPFVDSAPILERPLAEKAGLGWTGKHSLILSRDAGSFFFLGELLIDIPLPVDSPIEEGCGRCVACMTICPTGAIVEPYTVDARRCISYLTIELEGAIPEAFRPLIGNRIYGCDDCQLICPWNRYSQLTSEEDFSPRKTLHAPALIELFAWNEAHFLKVTEGSAIRRIGHLRWLRNIAVALGNSPWDEAAIQALQQRLGEHPLLDEHIEWAIAQQIEKRNACVVEVQPAKKQRLVRVVEKGLPRDA

SEQ ID NO: 77562 - protein, 379 aa, unidentified
  source 1..379: note = Kosakonia cowanii
  REGION 1..379: note = tr|A0A410KI43|A0A410KI43_9ENTR Epoxyqueuosine reductase OS=Kosakonia cowanii OX=208223 GN=queG PE=3 SV=1
MSQPLDLNQLAQQIKQWGTELGFQQVGITDTDLTASEPKLQAWLDKQYHGEMEWMARHGMMRARPHELLPGTLRVISVRMNYLPPNAAFASTLKNPALGYVSRYALGRDYHKLLRSRLKKLGELIQQQCASLNFRPFVDSAPILERPLAEKAGLGWTGKHSLILSRDAGSFFFLGELLIDLPLPVDQPVEEACGRCVACMTICPTGAIVEPYTVDARRCISYLTIELEGAIPEEFRPLIGNRIYGCDDCQLICPWNRFSQLTDEADFSPRKALHAPALIELFAWSEAHFLKVTEGSAIRRIGHLRWLRNIAVALGNAPWDEANIVALEQRLGEHPLLDEHITWAIAQQIEKRNACVVEVQLPQKQRLVRVVEKGLPRDA

SEQ ID NO: 77563 - protein, 379 aa, unidentified
  source 1..379: note = Kosakonia oryzae
  REGION 1..379: note = tr|A0A1T5GHD9|A0A1T5GHD9_9ENTR Epoxyqueuosine reductase OS=Kosakonia oryzae OX=497725 GN=queG PE=3 SV=1
MSQPLNLNDLAQQIKQWGSELGFQQVGITDTDLSASEPKLQAWLDKQYHGEMEWMARHGMMRARPHELLPGTLRVISVRMNYLPAQAAFASTLKNPTLGYVSRYALGRDYHKLLRNRLKKLGELIQQHCASLNFRPFVDSAPILERPLAEKAGLGWTGKHSLILSRDAGSFFFLGELLIDLPLPVDSPVEEGCGRCVACMTICPTGAIVEPYTVDARRCISYLTIELEGAIPKAFRPLIGNRIYGCDDCQLICPWNRYSQLTSEEDFSPRKALHAPALIELFSWNEAHFLKVTEGSAIRRIGHLRWLRNIAVALGNAPWDEATIQALRQRLGEHPLLDEHIEWAIAQQIEKRNACVVEVQPPKKQRLVRVVEKGLPRDA

SEQ ID NO: 77564 - protein, 379 aa, unidentified
  source 1..379: note = Kosakonia oryzendophytica
  REGION 1..379: note = tr|A0A1C3ZV79|A0A1C3ZV79_9ENTR Epoxyqueuosine reductase OS=Kosakonia oryzendophytica OX=1005665 GN=queG; PE = 3 SV=1
MSQPLDLNYLAQQIKQWGSELGFQHVGITDTDLSASEPKLQAWLDKQYHGEMEWMARHGMMRARPHELLPGTLRVISVRMNYLPAQAAFASTLKNPTLGYVSRYALGRDYHKLLRNRLKKLGETISQQCASLNFRPFVDSAPVLERPLAEKAGLGWTGKHSLILSRDAGSFFFLGELLIDLPLPVDKPVEEGCGRCVACMTICPTGAIVEPYTVDARRCISYLTIELEGAIPEALRPLIGNRIYGCDDCQLICPWNRYSQLTNEDDFSPRKALHAPALIDLFAWDEAHFLKVTEGSAIRRIGHLRWLRNIAVALGNAPWEEANIQALEQRLGEHPLLDEHIQWAIAQQKEKRNACRVEVQMPKQQRLVRVVEKGLPRDA

SEQ ID NO: 77565 - protein, 379 aa, unidentified
  source 1..379: note = Kosakonia oryziphila
  REGION 1..379: note = tr|A0A1C4EP11|A0A1C4EP11_9ENTR Epoxyqueuosine reductase OS=Kosakonia oryziphila OX=1005667 GN=queG PE=3; SV = 1
MSQPLNLNDLAQQIKLWGSELGFQQVGIADTDLSASEPKLQAWLDKQYHGEMEWMARHGMMRARPHELLPGTLRVISVRMNYLPAQAAFASTLKNPTLGYVSRYALGRDYHKLLRNRLKKLGELIQQHCASLNFRPFVDSAPILERPLAEKAGLGWTGKHSLILSRDAGSFFFLGELLIDLPLPVDSPVEEGCGRCVACMTICPTGAIVEPYTVDARRCISYLTIELEGAIPEAFRPLIGNRIYGCDDCQLICPWNRYSQLTSEEDFSPRKALHASALIELFTWNEAHFLKVTEGSAIRRIGHLRWLRNIAVALGNAPWDEASIQALRQRLGEHPLLDEHIEWAIAQQIEKRNACVVEVQPPKQQRLVRVVEKGLPRDA

SEQ ID NO: 77566 - protein, 379 aa, unidentified; identical to SEQ ID NO: 77563
  source 1..379: note = Kosakonia radicincitans
  REGION 1..379: note = tr|A0A5C1PD90|A0A5C1PD90_9ENTR Epoxyqueuosine reductase OS=Kosakonia radicincitans OX=283686 GN=queG; PE = 3 SV=1

SEQ ID NO: 77567 - protein, 379 aa, unidentified
  source 1..379: note = Kosakonia radicincitans
  REGION 1..379: note = tr|A0A1V0LJY4|A0A1V0LJY4_9ENTR Epoxyqueuosine reductase OS=Kosakonia radicincitans DSM 16656 OX=1177180; GN = queG PE=3 SV=1
MSQPLNLNDLAQQIKQWGSELGFQQVGITDTDLSASEPKLQAWLDKQYHGEMEWMARHGMMRARPHELLPGTLRVISVRMNYLPAQAAFASTLKNPTLGYVSRYALGRDYHKLLRNRLKKLGELIQQHCASLNFRPFVDSAPILERPLAEKAGLGWTGKHSLILSRDAGSFFFLGELLIDLPLPVDSPVEEGCGRCVACMTICPTGAIVEPYTVDARRCISYLTIELEGAIPEAFRPLIGNRIYGCDDCQLICPWNRYSQLTSEEDFSPRKALHAPALIELFSWNEAHFLKVTEGSAIRRIGHLRWLRNIAVALGNAPWDEATIQALRQRLGEHPLLDEHIEWAIAQQIEKRNACVVEVQPPKKQRLVRVVEKGLPRDA

SEQ ID NO: 77568 - protein, 379 aa, unidentified
  source 1..379: note = Kosakonia sp.
  REGION 1..379: note = tr|A0A369A0H6|A0A369A0H6_9ENTR Epoxyqueuosine reductase OS=Kosakonia sp. AG348 OX=2183906 GN=queG PE=3; SV = 1
MSEPLDLNHLAQQIKQWGTELGFQQVGITDTDLSASEPALQAWLDKQYHGEMEWMARHGMMRARPHELLPGTLRVISVRMNYLPAQAAFASTLKNPTLGYVSRYALGRDYHKLLRNRLKKLGELIQQQCASLNFRPFVDSAPILERPLAEKAGLGWTGKHSLILSRDAGSFFFLGELLIDLPLPVDQPVEEGCGRCVACMTICPTGAIVEPYTVDARRCISYLTIEVEGAIPEEFRPLIGNRIYGCDDCQLICPWNRFSQLTEEEDFSPRKALHAPELIELFGWTEAYFLKITEGSAIRRIGHLRWLRNIAVALGNAPWDVANIQALEQRLGEHPLLDEHIQWAIAQQIEKRNAYVVEVQTSKKQRLVRVVEKGLPRDA

SEQ ID NO: 77569 - protein, 379 aa, unidentified
  source 1..379: note = Kosakonia sp.
  REGION 1..379: note = tr|A0A4R0HQG5|A0A4R0HQG5_9ENTR Epoxyqueuosine reductase OS=Kosakonia sp. WCHEs120001 OX=2529380 GN=queG; PE = 3 SV=1
MSEPLDLNHLAQQIKQWGTELGFQQVGITDTDLSASEPALQAWLDKQYHGEMEWMARHGMMRARPHELLPGTLRVISVRMNYLPAQAAFASTLKNPALGYVSRYALGRDYHKLLRNRLKKLGEMIQQQCASLNFRPFVDSAPILERPLAEKAGLGWTGKHSLILSRDAGSFFFLGELLVDLPLPIDQPVEEGCGRCVACMTICPTGAIVEPYTVDARRCISYLTIELEGAIPEEFRPLIGNRIYGCDDCQLICPWNRFSQLTDEEDFSPRKALHAPELIELFSWTEAYFLKVTEGSAIRRIGHLRWLRNIAVALGNAPWDAANIQALEQRNGEHPLLDEHIQWAIAQQIEKRNACKVEVQTSKKQRLVRVVEKGLPRDA

SEQ ID NO: 77570 - protein, 311 aa, Kosmotoga sp.
  REGION 1..311: note = tr|A0A5D0RPB4|A0A5D0RPB4_9BACT Epoxyqueuosine reductase OS=Kosmotoga sp. OX=1955248 GN=FXF54_13805 PE=4; SV = 1
MNGVKRSELMKLNEMISEKLNELGYSVGFASIEAVNDLENEIKSRVDKADIDRDLYEHRMSWFNFNPYEVLAGNKTIIIVSVPQNAISVSYLWKGKNRKFILPPTYIFSPIGENLLEIIRKTLEPFGFTAENAALPEKLLATRTGLAKYGRNNITYVEGSGSYHRLFAFFTDMPCENPSWRKPELLEQCEFCSNCVDNCPTKCIKEEKFIINAERCLTHFNESRKPFPDWIKDHWHNAIIGCLKCQTICPANPKLIVEESHISFSEFEVKQIINQTPKEDLQKETWNKLKELCLHMCYSFIGRNLKVLIPD

SEQ ID NO: 77571 - protein, 143 aa, unidentified
  source 1..143: note = Kosmotogaceae bacterium
  REGION 1..143: note = tr|A0A3B8N7H7|A0A3B8N7H7_9BACT 4Fe-4S ferredoxin-type domain-containing protein OS=Kosmotogaceae bacterium OX=2053567 GN=DCE14_01985 PE=4 SV=1
MMNLVTGVMDSEGFSVGRAALPEKLLAARTGLAGYGRNNITYVPKAGSYHRLVALYTDMPCEDYEWQSPSRLDECKNCSACIRSCPTGCIVEERFLINASRCLTYFNESRRPFPSWVNSKWHNAIIGCLKCQMICPANPELTI

SEQ ID NO: 77572 - protein, 351 aa, Kozakia baliensis
  REGION 1..351: note = tr|A0A1D8UVC8|A0A1D8UVC8_9PROT Epoxyqueuosine reductase OS=Kozakia baliensis OX=153496 GN=queG PE=3 SV=1
MKKSVEDRIAEHARHLGFDAVGFCRAELPDEARARLREFVEAGRHGTMGWMEQRLDQRGEPKTLWPEVRSVIVLGMSYAPAADPLATLRQPDRGNISVYARHRDYHDVIKGLLKHLAQFIVKQGDGVEVKVFVDTAPVLEKPLAEAAQLGWQGKHTNLVSRDEGSWLLLGEIYTTLELTPSEPRAGSCGSCTRCLTACPTDAFPAPYQLDARRCISYLTIEHTGPIPNEFRPLMGNHIYGCDDCLAACPWNRFAQASRQTKLTARPDLIAPKLEELARLDDPAFRALFSGSPIKRIGRNRFVRNVLIAIGNSADPALSPVAMELTQDSDPVVAEAAQWAVQKLGEKATCLQ

SEQ ID NO: 77573 - protein, 306 aa, Kriegella aquimaris
  REGION 1..306: note = tr|A0A1G9THV0|A0A1G9THV0_9FLAO Epoxyqueuosine reductase OS=Kriegella aquimaris OX=192904 GN=queG PE=3; SV = 1
MLGKPEYAKAIKTEAKRLGFLSCGISKAEFLEEEAPRLEQWLENNMHGEMAYMANHFDKRLDPTKLVEGSKSVISLLLNYYPEETQKNDSYKLSKYAYGHDYHHVIKSKLKLLQEFISEEIGDVNGRAFVDSAPVLDKAWAAKSGLGWIGKHSNLLTQQVGSFYFIAELIVDLELEYDLPVTDHCGTCTACIDACPTEAIVEPYVVDGSKCISYFTIELKNEIPNEFHGKFDDWMFGCDVCQDVCPWNRFSKPHNEPLFNPHPELLSMTKKDWQEITEDVFKKVFQKSAVKRTKFSGLQRNIEFLK

SEQ ID NO: 77574 - protein, 388 aa, Kroppenstedtia eburnea
  REGION 1..388: note = tr|A0A1N7MF17|A0A1N7MF17_9BACL Epoxyqueuosine reductase OS=Kroppenstedtia eburnea OX=714067; GN = SAMN05421790_10648 PE=4 SV=1
MDTEQIKEELKREAKRLHIDKIGFASAEPFTELKERLIQHRKAGYESGFEEPDLEKRTDPRKSLPEARSIIAIALAYPTRMENPPESRAGALRGVFCRASWGEDYHRVLKNKLEGLKAKLSELVPGAAAKVMVDTGALSDRAVAERAGIGWSGKNTSIITQEFGSWVYLGEMITDVQLPPDEPITQACGDCTACLDACPTGALTEPGRLNSQACLAYLTQTKGYLPEEYRSKLGGSLYGYETCQLVCPYNRGKNFTHHREFTPEPDQVKPLLKPLLQMSNREFRERFGSMAGSWRGKKPIQRNAIIALGRYRDRTAVPDLIHLLETDIRPVIRGTAAWALGRIGGAEAETALRQSKDREQDEEVLQEIASALQACHSEEKAEHRYREA

SEQ ID NO: 77575 - protein, 413 aa, Ktedonobacter racemifer
  REGION 1..413: note = tr|D6TMU1|D6TMU1_9CHLR 4Fe-4S ferredoxin-type domain-containing protein OS=Ktedonobacter racemifer DSM 44963 OX=485913 GN=Krac_8415 PE=4 SV=1
MLETQVVKEYAYELGFDTVRITTAEAFTEAKGIIKERISRGLMDGLPWYTSERADVSCHPDALLPEAQSIISLGMTYLTEQPGNEEGEGPRGRIARYAWGDDYHDIIKPRLQRFAEWLREYTRSELGSEAEARLFVDTGRMVDRAVAQRAGLGWYGKNTNILTHGWGSWLFLAEIVTNVPLEPDEPLKANCGHCEICLHACPTGALTNPYELDNRLCISFLTIELRGSIPLELRPLIGNYIFGCDICQEVCPVNKVAERRLGLRDQQGQPQFVALEAVNRRSTERQATFQPHQEFLKRPAVGSEPELIPLLALSEEEFRERFRHSPIKRTKRRGLLRNVCVALGNSGNREAVPALIGALHDQEALVRGHAAWALGRLQGLEAYQALQAALMSEEDTEVQQEIHCAIAMFGEDK

SEQ ID NO: 77576 - protein, 109 aa, Ktedonobacter sp.
  REGION 1..109: note = tr|A0A3D2MI65|A0A3D2MI65_9CHLR tRNA epoxyqueuosine(34) reductase QueG (Fragment); OS = Ktedonobacter sp. OX=1932716 GN=DHV65_02150 PE=4 SV=1
MLNPTTIKEYAYALGFDIARITTADALPETERVIKERIAQGLMDGLPWFTAERTEVSCHPDALLSGAQSIITLAMFYLTQQPDEAQDNVPRGRISRYAWGDDYHEIIKP

SEQ ID NO: 77577 - protein, 413 aa, Ktedonobacter sp.
  REGION 1..413: note = tr|A0A1Q6YHP1|A0A1Q6YHP1_9CHLR tRNA epoxyqueuosine(34) reductase QueG OS=Ktedonobacter sp. 13_2_20CM_53_11 OX=1805233 GN=AUH05_12355 PE=4 SV=1
MLNPTTIKEYAYSLGFDTARITSAEALPEAERVIRERIAEGLMEGLPWFTAERAEVSCYPDALLPGAQSIITLAMFYLTEQPDETQDDVPRGRISRYAWGDDYHEIIKPRLQQFAAWLREYARKEISDDIETRLFVDTGRMVDRAVAQRAGLGWYGKNTNILTKGWGSWVFLAEIVTNLPLQADLPLKTSCGSCEICLHACPTKALPAPYVLDNTRCISFLTIELRGSIPLELRPLMGNLIFGCDICQEVCPVNIVAEKRLGLRGSQKTLSSASHEESQQQPEHAKTLPVLPHKEFRPRATVGSSPELIPLLSLTEEQFRERFRHSPIRRAKRRGLLRNVCVALGNCGDQRAVPALIGALQDNEALIRGHAAWALGRIGGEHAKGALHTALATEENQEVQKEIQCALAEIGSL

SEQ ID NO: 77578 - protein, 418 aa, unidentified
  source 1..418: note = Ktedonobacterales bacterium
  REGION 1..418: note = tr|A0A4P6JUN4|A0A4P6JUN4_9CHLR tRNA epoxyqueuosine(34) reductase QueG OS=Ktedonobacterales bacterium SCAWS-G2 OX=2509675 GN=queG PE=4 SV=1
MLETEPIKAYAYELGFDTVRITTAEEFAEARQIIQERIGRGLMDGMSWFTAERAEVSSRPKALLPEAQSIIALGMVYLTEQPDDGEPQDLPRGRISRYAWGDDYHDTIKPKLQQFAGWLREYARAEMGEQLETRLFVDTGRMVDRAVAQRAGLGWYGKNTNILTRGWGSWLFLAEIVTNLSLRPDTPIKANCGSCEICLHACPTAALPNPYELDSTRCISYLTIELRGSIPLELRPLMGNLIFGCDICQEVCPVNKVAEKRLGLRTETGKTQFIALEGIGKNSKEPAHSFRPHPELRPRSGVGSSPELIPLLSLTEEQFRERFRRSPIKRTKRRGLLRNVCVALGNIGDPRAIPALIGALHDQEPLVRGHAAWALGRLGGEEAIHALQSALASEEEAEVQQEIRCALASTTTSPVGEA

SEQ ID NO: 77579 - protein, 376 aa, Kurthia sibirica
  REGION 1..376: note = tr|A0A2U3AH71|A0A2U3AH71_9BACL tRNA epoxyqueuosine(34) reductase QueG OS=Kurthia sibirica; OX = 202750 GN=queG PE=4 SV=1
MNVLTLQQQVRDYAISIGIDKIGFTSAAPFIDLKRLLKQQQELGYQSGFEEADITKRTEPTLLLEQAQSIIAIAVAYPSKMVDAPQGKKGERRGIFCRASWGIDYHTAMRERLALLEQFILEKVPTAKLRSMVDTGELSDRAVAERAGIGWSGKNTNIITPEFGSYVYLAEMITNIPFESDEAIGDQCEDCRLCLDVCPTGALIQGGQLNAQRCIAFLTQTKGDLPDEFRTHLGNRIYGCDTCQTVCPKNKRKHNLIHEELFPDPEIAKPLLKPLLTISNKDFKQQFGHISGAWRGKKPLQRNAIYALAHFKEEEAIPLLEEVMTTDERPVIKGAAAWAIGKINGEQSKAILQRALIDEQDAYVIEEIHKGLLFTQ

SEQ ID NO: 77580 - protein, 377 aa, Kurthia sp.
  REGION 1..377: note = tr|A0A0X1RV87|A0A0X1RV87_9BACL Epoxyqueuosine reductase OS=Kurthia sp. 11kri321 OX=1750719 GN=queG PE=4; SV = 1
MNVLSFQQQVREYAQSIGIDKIGFASATPFIDLKARLIQQQQLNYQSGFEESDVTLRTEPTLLLEDAKSIIAIALAYPSKMLNVPQGKKGARRGIFCRASWGVDYHTVLREKLALLEEFIHTHHPHSRTKSMVDTGELSDRAVAERAGIGWSGKNTNIITPEFGSYVYLGEIITDIPFIADEPIEDECLDCRLCIDVCPTGAIVQAGQLNAQRCIAFLTQTKDTLPDEFRTHLGNRIYGCDTCQTVCPKNKRKHNLIHEEFFPDPEIAKPLLEPLLTMSNKQFKQDFGHVSGSWRGKKPLQRNAIYALAHFKEESAIPTLTEVLQKDTRPIIRGAAAYAIGKIDAPASKAILEQALQKEQDEEVLEEIEKGLSFITK

SEQ ID NO: 77581 - protein, 377 aa, Kurthia sp.
  REGION 1..377: note = tr|A0A433RRF0|A0A433RRF0_9BACL Iron-sulfur cluster-binding protein OS=Kurthia sp. 3B1D OX=1562256; GN = QI30_13735 PE=4 SV=1
MNVLTLQQELRDFAASIGVDKIGFTTAAPFVDLKHLLKQQQELNYQSGFEEENIELRTEPTLLLEEAASIIAIAVAYPSRMENAPTGKKGARRGIFCRASWGTDYHTVLREKLKEIEGFLVERVPGIKFRSMVDTGELVDRAVAERAGIGWSGKNCSIITPEFGSYVYLGEMITNIPFAPDEAIEDQCGECTLCIDVCPTGAIVQGGQLDSNRCVAFQTQTKGFLPDEFREKIGNRIYGCDTCQTVCPKNKGKKNWLHAAFEPEPELAKPLLAPLLSMTNKEFKSQFGHMSGSWRGKKPIQRNAIIALAHFKEEDAMPQLIELLTKDERPMIRGTAAWAIGKIAAAEAEEVLLAALQLEQDPDVLNEIDKGLTLLKN

SEQ ID NO: 77582 - protein, 376 aa, Kurthia zopfii
  REGION 1..376: note = tr|A0A2U3AH32|A0A2U3AH32_9BACL tRNA epoxyqueuosine(34) reductase QueG OS=Kurthia zopfii; OX = 1650 GN=queG PE=4 SV=1
MNVLSFQKQLREYAKTIGIDKIGFASAAPFIDLKQRLIQQQQLNYQSGFEESNVELRTEPTLLLEEAQSIVAIALAYPSKMVDAPQGKKGARRGIFCRASWGVDYHIALRKRLALLEEFIQENFPGGRTKSMVDTGELSDRAVAERAGIGWSGKNTNIITPEFGSYVYLGEIITNIPFEPDEPMEDECLDCRLCLDVCPTGALIQGGQLNAQKCIAFLTQTKGTLPDEFRSHLGNRIYGCDTCQTICPKNKRKHNLIHEEFFPEPEIAKPLLEPLLTISNKQFKNEFGHISGSWRGKKPLQRNAIYALAHFKEESAIPTLEEVLKKDDRPVIRGAAAWAIGKINGEQSLAILQQALQVEKEEEVILEIEKGLAFIH

SEQ ID NO: 77583 - protein, 376 aa, Kurthia zopfii
  REGION 1..376: note = tr|A0A3S4V6I3|A0A3S4V6I3_9BACL Epoxyqueuosine reductase OS=Kurthia zopfii OX=1650 GN=queG PE=4 SV=1
MNVLSFQKQLREYAKTIGIDKIGFASAAPFIDLKQRLIQQQQLNYQSGFEESNVELRTEPTLLLEEAQSIVAIALAYPSKMVDAPQGKKRARRGIFCRASWGVDYHIALRKRLALLEEFIQENFPGGRTKSMVDTGELSDRAVAERAGIGWSGKNTNIITPEFGSYVYLGEIITNIPFEPDEPMEDECLDCRLCLDVCPTGALIQGGQLNAQRCIAFLTQTKGTLPDEFRSHLGNRIYGCDTCQTICPKNKRKHNLIHEEFFPDPEIAKPLLEPLLTISNKQFKNEFGHISGSWRGKKPLQRNAIYALAHFKEESAIPTLEEVLKKDDRPVIRGAAAWAIGKINGEQSLAILQQALQVEKAEEVILEIEKGLAFIH

SEQ ID NO: 77584 - protein, 400 aa, Kushneria avicenniae
  REGION 1..400: note = tr|A0A1I1IF00|A0A1I1IF00_9GAMM Epoxyqueuosine reductase OS=Kushneria avicenniae OX=402385 GN=queG PE=3; SV = 1
MNTVSPHSPEPGNIDDPMPREASRALDPAEMAEKLKIWGRELGFQQLGITDTDLDAHEDYLNRWLEAGYHGEMDYMARHGTRRTRPAELEPGTLRIISVRMDYLPPEIESTRVLGQPERAYVARYALGRDYHKLIRKRLTQLAQKLQKEIGTFGFRAFVDSAPVMERALAQKAGIGWFGKNAMILNPKAGSLFFLGELYTDLPLPVDAPFERDHCGKCTRCQTWCPTGAIVDDKVIDARRCISYLTIEKHGAIPLEYRHAMGNRVFGCDDCQLVCPFTRFTRATREQDFAPRHALDRARLIDLFNWSEPEFLEHTQGSAIRRLGYERWLRNLAVGLGNAPFSDEIVSALKARLSWPSDLVREHVRWALSQQAQKRDATREAASAPLIEAGFKDIIARQST

SEQ ID NO: 77585 - protein, 398 aa, Kushneria indalinina
  REGION 1..398: note = tr|A0A3D9DUI2|A0A3D9DUI2_9GAMM Epoxyqueuosine reductase OS=Kushneria indalinina DSM 14324 OX=1122140; GN = queG PE=3 SV=1
MTTSKTARAENASASASSDAARALDPAEMADKLRIWARELGFQQLGITDTDLDAHEAYLNRWLEAGYHGEMDYMARHGTKRTRPAELEPGTLRIISVRMDYLPPEIESTRVLGQPERAYVARYALGRDYHKLIRKRLTQLAQKLQQEIGDFGFRAFVDSAPVMERALAQKAGIGWFGKNAMILNPQAGSLFFLGELYTDLPLPVDQPFERDHCGKCTRCQTWCPTGAIVDDKVIDARRCISYLTIEKHGPIPLEYRRAMGNRVFGCDDCQLVCPFTRFTRATREPDFAPRHALDRARLVDLFNWSEPEFLEHTQGSAIRRLGYERWLRNLSVGLGNAPFSEEIVAALRARLAWPSDLVREHVRWALSEQYLKRDEGREVSEPPLIEAGYSDIIARAPA

SEQ ID NO: 77586 - protein, 390 aa, unidentified
  source 1..390: note = Kushneria konosiri
  REGION 1..390: note = tr|A0A2Z2H3G4|A0A2Z2H3G4_9GAMM Epoxyqueuosine reductase OS=Kushneria konosiri OX=698828 GN=queG PE=3 SV=1
MALHHDTDAPPAPGTLDPARMAEKLRVWARELGFQQLGITDTDLDAHEDHLHRWLEAGYHGEMDYMARHGTKRTRPAELEPGTLRIISVRMDYLPPEIESTRVLGQPERAYVARYALGRDYHKLIRKRLTQLAQKLQKEIGTFGFRAFVDSAPVMERALAQKAGIGWFGKNAMILNPKAGSLFFLGELYTDLPLPVDEPFEGDHCGKCTRCQTWCPTGAIVDDKVIDARRCISYLTIEKHGSIPLEYRHAMGNRVFGCDDCQLVCPFTRFTRTTREQDFAPRHALDRARLVDLFNWSEPEFLEHTQGSAIRRLGYERWLRNLAVGLGNAPFSEEIVSALKARLAWPSDMVREHVRWALSQQLQKRDDAREAALAPLIEAGFKDIIARQPA

SEQ ID NO: 77587 - protein, 393 aa, Kushneria marisflavi
  REGION 1..393: note = tr|A0A240USR5|A0A240USR5_9GAMM Epoxyqueuosine reductase OS=Kushneria marisflavi OX=157779 GN=queG PE=3; SV = 1
MATGHDADSSTALETTRALDPARMAEKLRVWARELGFQQLGITDTDLGAHEARLEQWLEAGHHGEMDYMARHGTKRTRPAELEPGTLRIISVRMDYLPPEIESTRVLGQPERAYVARYALGRDYHKLIRKRLTQLAQKLQKEIGTFGFRAFVDSAPVMERALAQKAGIGWFGKNAMILNPKAGSLFFLGELYTDLPLPVDEPFEGDHCGKCTRCQTWCPTGAIVDDKVIDARRCISYLTIEKHGAIPLEYRHAMGNRVFGCDDCQLVCPFTRFTRATREKDFAPRHALDRTRLVDLFNWSEPEFLEHTQGSAIRRLGYERWLRNLAVGLGNAPFSEEIVSALKARLAWPSDMVREHVRWALSQQAQKRDATREAASAPLIEAGFKDIIARQPA

SEQ ID NO: 77588 - protein, 414 aa, unidentified
  source 1..414: note = Kushneria phyllosphaerae
  REGION 1..414: note = tr|A0A2R8CNM7|A0A2R8CNM7_9GAMM Epoxyqueuosine reductase OS=Kushneria phyllosphaerae OX=2100822 GN=queG; PE = 3 SV=1
MIPASSDTVSSDTAASNTAASNTARPDDAGPPAADACRALDPAEMAEKLKLWARELGFQQLGITDTDLDAHEARLNRWLEAGYHGDMDYMARHGTKRTRPAELEPGTLRIISVRMDYLPPEVETTRVLAQPERAYVARYALGRDYHKLIRKRLTQLAQKLQKEIGDFGFRAFVDSAPVMERALAQKAGIGWFGKNAMILNPKAGSLFFLGELYTDLPLPVDQPFERDHCGKCTRCQTWCPTGAIVDDKVIDARRCISYLTIEKHGPIPLEYRHAMGNRVFGCDDCQLVCPFTRFTRATREQDFAPRHALDRARLVDLFNWSEPEFLENTQGSAIRRLGYERWLRNLAVGLGNAPFSEEIISALRARLAWPSDMVREHIRWALAEQTRKRDEHQKPVSAPLIEAGFEDIIARQPA

SEQ ID NO: 77589 - protein, 391 aa, Kushneria sinocarnis
  REGION 1..391: note = tr|A0A420WTD4|A0A420WTD4_9GAMM Epoxyqueuosine reductase OS=Kushneria sinocarnis OX=595502 GN=queG PE=3; SV = 1
MTDSVLPAAHHDNGELDFAAIAERLRVWARELGFAQLGITDTDLSNHEAYLERWLAAGYQGEMDYMSRHGTKRTRPAELEPGTLRVISVRMDYLPPEVETTRVLGQPARAYISRYGVGRDYHKLMRKRLTRLARQLEAEIGEFGYRAFVDSAPVMERALAQKAGLGWFGKNAMILHPQAGSFFFLGELYTDLPLPVDEPFESEHCGSCSRCQTWCPTGAIVDDRVIDARRCISYLTIEKHGEIPVEFREAMGNRVFGCDDCQLVCPFTRFTRATREDDFTPRHELDRAELVTLFNWSEEEFLERTQGSPIRRIGYERWLRNLAVGLGNAPHDPAIISALRARLAWPSDMVREHVRWALARQEERAHPDSPTDERPTPNDAGYRDIIAREAH

SEQ ID NO: 77590 - protein, 391 aa, Kushneria sp.
  REGION 1..391: note = tr|A0A1S1NT68|A0A1S1NT68_9GAMM Epoxyqueuosine reductase OS=Kushneria sp. YCWA18 OX=657387 GN=queG PE=3; SV = 1
MTDSALTTALHDHGDPDFAAIAERLKVWARELGFAQLGITDTDLSNHEAYLERWLAAGYQGEMDYMSRHGTKRTRPEELEPGTLRVISVRMDYLPPEVETTRVLSQPNRAYISRYGIGRDYHKLMRKRLTRLARQLAAEIGPFGYRAFVDSAPVMERALAQKAGLGWFGKNAMILHPQAGSLFFLGEIYTDLPLPVDKPFEGEHCGSCNRCQTWCPTGAIVDDRVIDARRCISYLTIEKHGEIPLEFREAMGNRVFGCDDCQLVCPFTRFTRATREQDFTPRHALDRAELVTLFNWSEEEFLARTEGSPIRRIGYERWLRNLAVGLGNAPHDPAIISALRARLAWPSDMVREHVRWALAKQYERARPENPVDARITPVDAGYRDIIAREAR

SEQ ID NO: 77591 - protein, 425 aa, unidentified
  source 1..425: note = Kyrpidia spormannii
  REGION 1..425: note = tr|A0A2K8N8L6|A0A2K8N8L6_9BACL Epoxyqueuosine reductase OS=Kyrpidia spormannii OX=2055160 GN=CVV65_12645; PE = 4 SV=1
MKKDQARAQQACRGEWEISRQQLAGMATDLGLKAAAMPARPLRSLGRILEKRRQAGWMCEFEAENTADRIDPLRSLPGAQSVVAVAMPYRNRRWDTPRPPGLRGALSKYAWGEDYHRVLRRRLGALADRLATTAGREITVRAAVDTGPLVERAFAEAAGLGRVGKNGCLYVEPYGSWVFLGLLLTDLRIEPERTDPPGEVGRWGNEGPRVDGQADPDVFTLCGTCDRCLRACPTQAFEAPGVLNPNRCLSYVTQMKGLLPEEFQAPMGTRIWGCDICQAVCPINRRAACAPEVLEEIGEPGPESDREFLDRAYPDLIELLTMSRRSFERRFGVTAVAWRGVHTLRRNAASALGTWRDPRAVPPLIDRLGDGRPEVRSAAAWALARICTPEGWAALAEAAERETDSRVRARMEALLSQQGLSAKPL

SEQ ID NO: 77592 - protein, 425 aa, unidentified
  source 1..425: note = Kyrpidia tusciae
  REGION 1..425: note = tr|D5WTG8|D5WTG8_KYRT2 4Fe-4S ferredoxin-type domain-containing protein OS=Kyrpidia tusciae (strain DSM 2912 / NBRC 15312 / T2) OX=562970 GN=Btus_2545 PE=4 SV=1
MNKDQARAQEAGPGEWEISRRQLAGMAAELGLKAAAMPALPLRSLGRILEKRRQAGWMCEFEAENTADRIDPLRSLPCAQSVVAVAMPYRNRRWDTPRPPGLRGALSKYAWGEDYHRVLRGRLGALADRLATTAGREITVRAAVDTGPLVERAFAEAAGLGRVGKNGCLYVEPYGSWVFLGLLLTDLRIEPERTDPPGEVGSWRNEGPRVDGQADPDVFALCGTCDRCLRACPTDAFEAPGVLNANRCLSYVTQMKGLLPEEFQAPMGTRIWGCDICQAVCPINRRAACAPEHLEEIGEPGPESDREFLDRAYPDLVELLTMSRRSFERRFGVTAAAWRGVHTLRRNAASALGTWRDPRAVPPLIDRLGDGRPEVRSAAAWALARIGTPEGWAALAKAAEQETDSRVRARMEALLSQQGLPAKPL

SEQ ID NO: 77593 - protein, 372 aa, unidentified
  source 1..372: note = Kyrpidia tusciae
  REGION 1..372: note = tr|D5WR20|D5WR20_KYRT2 4Fe-4S ferredoxin iron-sulfur binding domain protein OS=Kyrpidia tusciae (strain DSM 2912 / NBRC 15312 / T2) OX=562970 GN=Btus_2061 PE=4 SV=1
MFGPVESAAVTLQQDAEARGFLAAWAPVDLPPSVVDRYRAWIADRRQAGMGQLARNVEVRLAPRSRLAWARSVLVLAAPHRFPDPGPPPGGVRIGRVGRIFWMREQDYIQRRVQPHLDELKEICHRLGGRCRDYVEQGPLSFRSYGAGAGLGWIGRNGMLLHPEWGSYMTLAVLLTDFEVEAAPEHPFRCGRCRRCLDRCPTGALLGDGTLDANRCISYWTTQHLDLIPPEVWDGLGSWLFGCDECQEVCPWTPEAERFWEGYEPEPELAHPDLSDFLTLPIHMFAQKYAQSAFERAGRPRMARNALIVLGNTRDSAYLPLIRMGCEDPSPLVRATASWAAVRVGGRQEAERLLRDPEPLVCNEARRALEFS

SEQ ID NO: 77594 - protein, 316 aa, unidentified
  source 1..316: note = Labilibaculum antarcticum
  REGION 1..316: note = tr|A0A1Y1CK03|A0A1Y1CK03_9BACT Epoxyqueuosine reductase OS=Labilibaculum antarcticum OX=1717717 GN=queG; PE = 3 SV=1
MNLTLTAKSNLIKSKALELGLDLCGIAKADFLEDEKENFQSWLDKEYHGEMAYMANNIEKRLDPRLLVENTKSIVVVGLNYFPKQQQEDPEAPVIAKYAYGKDYHFVLKDRLNQLLEYINTEIGEVSGRAFVDSAPILEHAWAKKAGLGWIGKNSLLLNRKIGSFLFLGELLIDMELEYEEEKYQDFCGGCSKCIRACPTGAITEPYVVNGSKCISYFTIELKGEIPEEMKGKFENRAFGCDICQDVCPWNRMAKAHSVPEFEPNPDLLSLSKAEWEQMEAHKFGEIFKNSAVKRTKFKGLKRNLDFITENNDENT

SEQ ID NO: 77595 - protein, 316 aa, unidentified
  source 1..316: note = Labilibaculum filiforme
  REGION 1..316: note = tr|A0A2N3HXD5|A0A2N3HXD5_9BACT Epoxyqueuosine reductase OS=Labilibaculum filiforme OX=1940526 GN=queG; PE = 3 SV=1
MNLTLSIKSKLIKAKALELGLDLCGIAKADFLEDEKENFQSWLEKKYHGEMTYMTNNIEKRLDPRLLVENTKSVVVVGLNYFPKEQQQDPKAPIIAKYAYGKDYHFVLKDRLNQLLEYINTEIGEVSGRAFVDSAPILEHAWAKKAGLGWIGKNSLLLNRKIGSFLFLGELLIDMELEYEDEKYQDFCGGCSKCIRACPTGAITEPYVVNGSKCISYFTIELKGEIPEEMKGKFENRAFGCDICQDVCPWNRMAKAHSVPEFEPNPDVLSLSKLEWEQMDAHKFGELFKNSAVKRTKLKGLKRNIDFLNKANNEND

SEQ ID NO: 77596 - protein, 313 aa, unidentified
  source 1..313: note = Labilibaculum manganireducens
  REGION 1..313: note = tr|A0A2N3I7R0|A0A2N3I7R0_9BACT Epoxyqueuosine reductase OS=Labilibaculum manganireducens OX=1940525; GN = queG PE=3 SV=1
MNLTLSAKSNLIKAKAIELGLDLCGIAKADFLEDEKENLRSWLDQKYHGEMLYMANNIEKRLDPRLLVENTKSIVVVGLNYFPKELQQDSEAPVIAKYAYGKDYHFVLKDRLNQLLEYINTEFGEVSGRAFVDSAPILEHAWAKKAGLGWIGKNSLLLNRKIGSFLFLGELLIDMELEYEEEKYQDFCGGCSKCIRACPTGAITEPYVVNGSKCISYFTIELKGEIPEEMNGKFENRVFGCDICQDVCPWNRMVKSNSVPEFQPNSDLLSLSKAEWEHMDAHKFGEIFKNSAVKRTKFKGLKRNLDFLHKECE

SEQ ID NO: 77597 - protein, 367 aa, unidentified
  source 1..367: note = Labilithrix luteola
  REGION 1..367: note = tr|A0A0K1Q9L1|A0A0K1Q9L1_9DELT Epoxyqueuosine (OQ) reductase QueG OS=Labilithrix luteola OX=1391654; GN = AKJ09_08768 PE=4 SV=1
MPEPILEGDVPLKARVVAEARRLGFEAVGFARADVPLEADFERYEAFVRDGKQGEMGWLAAAAEARRSLDGEHILRGARTVICLARPYARSSVDEAADPEVVQAIARYARGRDYHNGLRKKLRKLAAFVRTLGGEEPVQARPLCDEEPILERAWASRAGLGFVGKNGLLIVPGVGSLVLLGEVVTTLAIEPDATIPERCGSCTRCLDACPTGAFEAPFVLDPRRCVAYLTIEHRAAIPDELHEGVGGHLFGCDDCQTVCPFNASARSARRAGMPIDARFTPDPRWGEVRVRDLLMLDDAGFAALREGSPVGRATRIGLARNAAVVLGNRADPADVEALTRAAEHHDSEIVRKAAFWALARIEKSTAP

SEQ ID NO: 77598 - protein, 380 aa, Labrenzia aggregata
  REGION 1..380: note = tr|A0A0M6Y5C9|A0A0M6Y5C9_9RHOB Epoxyqueuosine reductase OS=Labrenzia aggregata OX=187304 GN=queG PE=3; SV = 1
MDRKTQKLLTAFEEKARALGFDGVKIAAADSIPEAGERLRHFLDKGYEGSMGWMAETADRRYSPQALWPEVRSVIMLAMNYGPGSAPHEHPLAHLADKTSGGISVYARHRDYHDVIKGRLKELASFLVSRSGGDVKVFVDTAPVMEKPLGEAAGLGWQGKHTNLVSRDLGSWFFLGSIFTTLDLPPSGAERDHCGSCRACLDSCPTNAFPAPYQLDARRCISYLTIEHPGPIPGAFRKAIGNRIYGCDDCLAACPWNKFAEAAREAKLIAREEMITPKLADLLSLDDTAFRQLFSGSPVKRIGRGKFLRNVLIAAGNSGETELLGKIEALLDDADALVRGTAVWALGQLSAQEDFQARKTAALRVETDETVRSEWLLAQS

SEQ ID NO: 77599 - protein, 380 aa, Labrenzia aggregata
  REGION 1..380: note = tr|A0NRJ8|A0NRJ8_LABAI Epoxyqueuosine reductase; OS = Labrenzia aggregata (strain ATCC 25650 / DSM 13394 / JCM 20685 / NBRC 16684 / NCIMB 2208 / IAM 12614) OX=384765; GN = queG PE=3 SV=1
MDHKTQKLLTAFEEKAHTLGFDGVKIAAADSIPQAGERLRHFLDKGYEGSMGWMAETADRRSSPQALWPEVRSVIMLAMNYGPGSAPHEHPLAHLADKTTGGISVYARHRDYHDVIKGRLKELASLLVSRSGGDVKVFVDTAPVMEKPLGEAAGLGWQGKHTNLVSRELGSWFFLGAIFTTLDLPPSGAERDHCGSCRACLDSCPTNAFPAPYQLDARRCISYLTIEHPGPIPHDFRKAIGNRIYGCDDCLATCPWNKFAEAAREAKLIARDELINPKLADLLSLDDAAFRTLFSGSPVKRIGRGKFLRNVLIAAGNSGEPALLEKVEALLADDDALVRSTAVWALRQLSAQEDFQDRKTAALRVETDEIVRSEWLHAQI

SEQ ID NO: 77600 - protein, 393 aa, Labrenzia alba
  REGION 1..393: note = tr|A0A0M6ZHB0|A0A0M6ZHB0_9RHOB Epoxyqueuosine reductase OS=Labrenzia alba OX=311410 GN=queG PE=3 SV=1
MDKKTQKLLTALEDKAQTLGFCGLKIAPADSIPGAADRLQAYLDNGYHGTMVWMKETATRRASPRALWPDVRSVLMLAMNYGPDDTPENHPLAHLNDTGTGGLSVYARNRDYHDVIKGRLKELASFLISRAGGGDVKVFVDTAPVMEKPLGEAAGLGWQGKHTNLVSREHGSWFFLGSIFTTLDLPASGRETDHCGSCRACLDSCPTDAFPAPYQLDARRCISYLTIEHPGPIPLEFRKAMGNRIYGCDDCLAACPWNKFASAANEIKLVARKDLNNPLLADLLDLDDADFRKFFAGSPVKRIGRNRFMRNVLIAAGNSGQRGLLPKIDRLMNDPDPVVRGAAVWAFRQLADEGDVSARSATKFDTEADENVRAEWLANTGGLSAPESTSSQE

SEQ ID NO: 77601 - protein, 379 aa, Labrenzia alba
  REGION 1..379: note = tr|A0A0M6YYF6|A0A0M6YYF6_9RHOB Epoxyqueuosine reductase OS=Labrenzia alba OX=311410 GN=queG PE=3 SV=1
MDAKTEKFLKAFTEKAASLGFDDCKIAPADSIPEAESRLRAFLDQGFQGTMNWMADTAERRGSPGSLWPEVNSVIMLAMNYGPDDAPENHPLAHLSDKGTGGISVYARHRDYHDIIKGRLKELASFLVSRAGGDVKVFVDTAPVMEKPLGEAAGLGWQGKHTNLVSKELGSWFFLGSIFTTLALPASGSERDHCGSCRACLDSCPTDAFPAPYQLDARRCISYLTIEHPGPIPAEFRQAMGNRIYGCDDCLAACPWNKFASAAREAKLIAREDLKNPKLTDLLELDDKAFRKLFSGSPVKRIGRNKFIRNVLIAAGNSGDPGLLQKIVQHLGDPDATVRGTAVWAFRQLASAEIFFRQKETDFPAETDELVCAEWGDQT

SEQ ID NO: 77602 - protein, 383 aa, Labrenzia alexandrii
  REGION 1..383: note = tr|A0A0M7AJD1|A0A0M7AJD1_9RHOB Epoxyqueuosine reductase OS=Labrenzia alexandrii OX=388408 GN=queG PE=3; SV = 1
MGPQLDTKTQKLVTALEAKATALGFDALNITAADSIPNAKERLNVFLEKNYHGSMGWMAETAERRAAPKALWSEVNSVIMLAMNYGPDDAPENHPLAHLSDKGAGGISVYARHRDYHDIIKGRLKELASFLISRAGGDVKVFVDTAPVMEKPLGQAAGLGWQGKHTNLVSRELGSWFFLGSIFTTLELPESGAETDHCGSCKACLDACPTDAFPAPYQLDARRCISYLTIEHAGPIPDEFRKPIGNRIYGCDDCLAACPWNKFAQAASEAKLVAREDLKSPRLADLLRLDDPAFRKLFSGSPIKRIGRNRFLRNVLIAAGNSAKPDLVNSVERLLDDPDETVRGTAVWAWRQLVSTDRFKQKSHAALPSETSAEVRTEWQKQR

SEQ ID NO: 77603 - protein, 383 aa, Labrenzia alexandrii
  REGION 1..383: note = tr|A0A5E8GVK0|A0A5E8GVK0_LABAD Epoxyqueuosine reductase OS=Labrenzia alexandrii (strain DSM 17067 / NCIMB 14079 / DFL-11) OX=244592 GN=queG PE=3 SV=1
MGPQLDTKTQKLVTALEAKATALGFDALNITAADSIPNAKERLNAFLEKNYHGSMGWMAETAERRAAPKALWSEVNSVIMLAMNYGPDDAPENHPLAHLSDKGAGGISVYARHRDYHDIIKGRLKELASFLISRAGGDVKVFVDTAPVMEKPLGQAAGLGWQGKHTNLVSRELGSWFFLGSIFTTLELPESGAETDHCGSCKACLDACPTDAFPAPYRLDARRCISYLTIEHAGPIPDEFRKPIGNRIYGCDDCLAACPWNKFAQAASEAKLVAREDLKSPRLADLLRLDDPAFRKLFSGSPIKRIGRNRFLRNVLIAAGNSAKPELVNSVERLLDDPDETVRGTAVWAWRQLVSTDRFKQKSHAALLSETSAEVRTEWQKQG

SEQ ID NO: 77604 - protein, 390 aa, Labrenzia marina
  REGION 1..390: note = tr|A0A2S3V2Y4|A0A2S3V2Y4_9RHOB Epoxyqueuosine reductase OS=Labrenzia marina OX=281252 GN=queG PE=3 SV=1
MTQHALQTVLDKKKRHLLTAFAEKASGLGFDDVRIAPADGIPEAGDRLRRFLDKGYHGTMGWMAETAERRSAPVNLWPEVKSVIMLAMNYGPDAAPENHPLAHLQDRSSGGISVYARHRDYHDIIKGRLKELASFLVSRAGGDVKVFVDTAPVMEKPLGQAAGLGWQGKHTNLVSRDLGSWFFLGAIFTTLDLPPSGAEEDHCGSCRACLDSCPTDAFPAPYQLDARRCISYLTIEHPGPIPGEFREAIGNRIYGCDDCLAACPWNKFASAAREAKLIAREDLKNPKLADLLSLEDAAFRALFSGSPVKRIGRGRFLRNVLIAAGNSGQPVLLDKVRPLLKDADPVVRGAAVWAYRRLAPEQSVLAVRPGEMAQETDETVRAEWLAPHRL

SEQ ID NO: 77605 - protein, 381 aa, Labrenzia sp.
  REGION 1..381: note = tr|A0A2T7HAW4|A0A2T7HAW4_9RHOB Epoxyqueuosine reductase OS=Labrenzia sp. 011 OX=2171494 GN=queG PE=3 SV=1
MDKKTSTLLTAFAERASGLGFDGVRVAPADAIPEAGDRLRRYLDNGFHGTMAWMAETADRRSAPARLWPEVKSVIMLAMTYGPDDAPENHPLAHLQDRSTGGISVYARNRDYHDVVKGRLKELASFLVSRAGGDVKVFVDTAPVMEKPLGQAAGLGWQGKHTNLVSRQLGSWFFLGAIFTTLDLPASGAEKDHCGSCRACLDSCPTDAFPAPYQLDARRCISYLTIEHPGPIPAEFREAIGNRIYGCDDCLAACPWNKFASAAREAKLIAREDLKNPRLEDLLVLDDAAFRRLFSGSPVKRIGRGRFLRNVLIAAGNSGQPALADRIRPLLKDADPVVRGAAVWAFRRLVPDHSVLALKAAEVAGETDESVRREWLAPHPH

SEQ ID NO: 77606 - protein, 380 aa, Labrenzia sp.
  REGION 1..380: note = tr|A0A222FB08|A0A222FB08_9RHOB Epoxyqueuosine reductase OS=Labrenzia sp. VG12 OX=2021862 GN=queG PE=3; SV = 1
MHTKPEKLLKAFQEKAAALGFDGVRVAAADSIPQAGARLKEFLDKGRHGTMGWMAETAERRAAPSSLWPDVRSVIMLAMNYGPDDAPEHHPLAHLDDPGSGGISVYARHRDYHDIIKGRLKELASLLVSRGGGDVKVFVDTAPVMEKPLGEAAGLGWQGKHTNLVSRELGSWFFLGAIFTTLELPPSGAERDHCGSCRACLDACPTDAFPAPYQLDARRCISYLTIEHPGPIPAEFREAIGNRIYGCDDCLAVCPWNKFAETAREAKLIARKDLDLPRLLDLLQLDDAAFRKFFSGSPIKRIGRNRFLRNVLIAAGNSGDTALLDEVRGHLADPDETVRSTAVWAFGKLASEAQFQAEKAKVFPGENNEQVRCEWLAVTS

SEQ ID NO: 77607 - protein, 389 aa, unidentified
  source 1..389: note = Labrenzia suaedae
  REGION 1..389: note = tr|A0A1M6ZM85|A0A1M6ZM85_9RHOB Epoxyqueuosine reductase OS=Labrenzia suaedae OX=735517 GN=queG PE=3 SV=1
MSGTAKQDKKTEKLLQAFVEKAAQLGFDDLKIAAADSIPQAPERLKQFVESGYHGSMGWMEETQERRGDPRVLWPEVRSVIMLAMNYGPDCDPLAHLETPDRAGISVYARNRDYHDIIKGKLKELASFLVSRAGGDVKVFVDTAPVMEKPLAASAGLGWQGKHTNLVSRQLGSWFFLGSIFTSLDLPPSGAERDHCGTCRSCLDSCPTEAFPAPYQLDARRCISYLTIEHAGPIPREFRSQMGNRIYGCDDCLAACPWNKFAQTASEAKLMARSDLISPHLSDLLALDDAAFRSLFSGSPIKRIGRNRFLRNVLIAAGNSGESGLFDDVRTHLDDSDPVVRGAAVWALSRIAPLAQWSELAKQHEISEPHDMVREEWALGCGEDKSSIY

SEQ ID NO: 77608 - protein, 414 aa, Labrys neptuniae
  REGION 1..414: note = tr|A0A5C1WLX4|A0A5C1WLX4_9RHIZ Epoxyqueuosine reductase OS=Labrys neptuniae OX=376174 GN=queG PE=3 SV=1
MPASASAAGATFPGAGWKPAVPGRFAVTPLKTQLLQRAEAEGFDVVRITTPDAIPEAPARLRHFLEEGCHGEMGWMQERADQRGAPSTLWPEVRSIIMLGVNYGPDGDPMAGLADRAGGLISVYAQGDDYHDVIKKRLKSLGRWWGEVTGAPLKVFIDTAPVMEKPLAAAAGLGWQGKHTNLVSRDFGSWLFLGSIFSATEIEADTPERDRCGSCRACLDACPTAAFPAPYRLDARRCISYLTIENKGPISAEFREAIGNRIYGCDDCLAACPWNKFAVAAREHKLQAREDLRAPRLAELARLDDPTFRTLFAKNPVKRIGRDRFIRNVLIAIGNSGDAGLVDAAEELLGDESALVRAMAVWALARLSPIRLAAQSWRRQHETDADVRAEWQAAGQSVLRFGGIAKNRKDASNQ

SEQ ID NO: 77609 - protein, 387 aa, Labrys okinawensis
  REGION 1..387: note = tr|A0A2S9Q419|A0A2S9Q419_9RHIZ Epoxyqueuosine reductase OS=Labrys okinawensis OX=346911 GN=queG PE=3 SV=1
MASRKEVAVSALKTELLQRAEAEGFDVVRVTTPEAIPEAPARLRRFLEEGFHGEMGWMQERAEQRGAPATLWPEVRSIIMLGVNYGPDGDPMAGLSDRSGGLISVYAQGDDYHDVIKKRLKSLGRWWGEVTGAPLKVFVDTAPVMEKPLAAAAGLGWQGKHTNLVSRDFGSWLFLGSIFSATEIEADAPERDRCGSCRACLDACPTAAFPAPYRLDARRCISYLTIENKGPIPAEFREAIGNRIYGCDDCLAACPWNKFAVAAREHKLKAREALQAPRLAELARLDDPTFRALFAKNPVKRIGRDRFIRNVLIAIGNSGDPGLVEEAERLLVDGSALVRAMAVWALARLAPSRLAAQSWRRQQETDADVRAEWRAAGHAAPAPQEAL

SEQ ID NO: 77610 - protein, 378 aa, Laceyella sacchari
  REGION 1..378: note = tr|A0A2I7SQ81|A0A2I7SQ81_LACSH Epoxyqueuosine reductase OS=Laceyella sacchari OX=37482 GN=queG PE=3 SV=1
MNSAELKQKLITKAKEIGIDKIGFTTADPFIALRERLKESQEKGYASGFEEPDIEKRVRPELSLPEAKSIIAIALAYPSKLKNPPRSEAGAYRGIFCRASWGEDYHHVLREKLTLLSTYLQELVPDARTQVMVDTGALSDRAVAERAGIGWSGKNTSIITKEFGSWVYLGEMITDVYFPPDTPATDECGDCTICIDACPTGAIVQAGQLNAQACIAYLTQTKDFLGEEYRSKLGNRLYGCDTCQTVCPKNRKRHFDHHTAFQPDPEMVKPLLKPLLQMSNREFKERFGRMSGAWRGKKPIQRNAIIALAHFKDQTAIPDLVRLLAEDPRPVIRGTAAWALGKIGGKEVLEALLKAQEKEVNQEVLHEIGKALDMAQNA

SEQ ID NO: 77611 - protein, 378 aa, Laceyella sacchari
  REGION 1..378: note = tr|A0A4R4AM27|A0A4R4AM27_LACSH Epoxyqueuosine reductase OS=Laceyella sacchari OX=37482 GN=queG PE=3 SV=1
MNSADLKQKLISKAKEIGIDKIGFTTADPFIALRERLKESQEKGYASGFEEPDIEKRVRPELSLPEAKSIIAIALAYPSKLKNPPRSESGAYRGIFCRASWGEDYHHVLREKLSLLSVYLQELVPDARTQVMVDTGALSDRAVAERAGIGWSGKNTSIITKEFGSWVYLGEMITDVYIPPDTPATDECGDCTICIDACPTGAIVQAGQLNAQACIAYLTQTKGFLAEEYRSKLGNRLYGCDTCQTVCPKNRKRHFDHQTAFQPDPEKVKPLLKPLLQMSNREFKERFGRMSGAWRGKKPIQRNAIIALAHFKDQTAIPDLVRLLAEDPRPVIRGTAAWALGKIGGKEVLEALQKAQEKEGDQEVLHEIGKALDMAQNA

SEQ ID NO: 77612 - protein, 378 aa, Laceyella sediminis
  REGION 1..378: note = tr|A0A2T0YFT0|A0A2T0YFT0_9BACL Epoxyqueuosine reductase OS=Laceyella sediminis OX=573074 GN=queG PE=3; SV = 1
MNSAELKQKLITKAKEIGIDKIGFTTADPFIALRERLKESQEKGYASGFEEPDIEKRVRPELSLPEAKSIIAIALAYPSKLKNPPRSEAGAYRGIFCRASWGEDYHHVLREKLTLLSAYLQELVPDARTQVMVDTGALSDRAVAERAGIGWSGKNTSIITKEFGSWVYLGEMITDVYFPPDTPATDECGDCTICIDACPTGAIVQAGQLNAQACIAYLTQTKGFLAEEYRSKLGNRLYGCDTCQTVCPKNRKRYFDHHTAFQPDPEKVKPLLKPLLQMSNREFKERFGRMSGAWRGKKPIQRNAIIALAHFKDQTAIPDLVRLLAEDPRPVIRGTAAWALGKIGGKEVLEALQKAQEKEGDQEVLHEIGKALDMAQNA

SEQ ID NO: 77613 - protein, 330 aa, unidentified
  source 1..330: note = Lachnoclostridium phytofermentans
  REGION 1..330: note = tr|A0A3D2X3W1|A0A3D2X3W1_9FIRM tRNA epoxyqueuosine(34) reductase QueG OS=Lachnoclostridium phytofermentans OX=66219 GN=queG PE=4 SV=1
MWKQQIEDFCKSLGLDTIGFIRCRRFVELIDFYEKRKEKNLQNEFEEKDIEKRINPNLTMESGKTIISIAFPYYHDEENIENGFSIYTKRMDYHKVVKSYLAKVCEYIESLGGKAEGFVDSNALPERYIAYLAGVGFIGNNNMLITKKYGSYVFLGEIITDLEMELEDVRSYQEIPKHIECGDCKRCYHECPSKSINQNKINPNICLSYLTQKKELSDQEISLLKGNVFGCDYCQLKCPYNEEIETNVLDDFKTLCYMNEDLKIFASMDNKFFKDKISNTSCGWRGKNVIKRNAILRIHKENQDITELRGDSPYINDYIDRLLNKHDRKE

SEQ ID NO: 77614 - protein, 330 aa, unidentified
  source 1..330: note = Lachnoclostridium phytofermentans
  REGION 1..330: note = tr|A9KIG0|A9KIG0_LACP7 DUF1730 domain-containing protein OS=Lachnoclostridium phytofermentans (strain ATCC 700394 / DSM 18823 / ISDg) OX=357809 GN=Cphy_2044 PE=4 SV= 1
MWKQQIEDYCKSLGLDTIGFIRSRRFVELIDFYEQRKEKNLQNEFEEKDIEKRIDPSLTMESGKTIISIAFPYYHDEEYKENGFSIYTKRNDYHKVLKSYLNKVCEYIESLGGKAECFVDSNALPERYIAYLAGVGFIGKNNMLITKKYGSYVFLGEVITDLEMDLEDVRTYHEIPKYIECGDCKLCYHECPTKSINQTKINPNICLSYLTQKKDLSDQEISLLKGNVFGCDYCQLKCPYNEEVETNVLDDFKTLSYMNEDMEIFASMDNKFFKDKISNTSCEWRGKNVIKRNAILRMHRENQDITKLRGDSPYINDYIERLLKKRDVKE

SEQ ID NO: 77615 - protein, 156 aa, unidentified
  source 1..156: note = Lachnoclostridium sp.
  REGION 1..156: note = tr|A0A3D6ACH0|A0A3D6ACH0_9FIRM 4Fe-4S ferredoxin-type domain-containing protein; OS = Lachnoclostridium sp. OX=2028282 GN=DHU73_07245 PE=4; SV = 1
MKGRVAKYYLTDGRRHTDSEGYKTSVAFEKYLADCGLQVATDRDFGITALRWAGMKAGIGIIRKNNFFYTEKGSYQYLEAFLIDEPLQYIVENQIRPCAEKCNLCIRSCPTESLEAPYMMCRNTCVSCLTTWDGWDLRTEPLQNKFEKWIYGCDAC

SEQ ID NO: 77616 - protein, 318 aa, unidentified
  source 1..318: note = Lachnoclostridium sp.
  REGION 1..318: note = tr|A0A1Y4RER7|A0A1Y4RER7_9FIRM Uncharacterized protein OS=Lachnoclostridium sp. An138 OX=1965560; GN = B5E82_15165 PE=4 SV=1
MDSLSQKIYDQALRCGFDKCGIISISALDGFKQLYQQRLNDVPVSQYFYKGVGNLTETKSRFPWSKSIVILVFDYGKYRFPESLQGKYGKAFFLEPEKKSRERFDLERLEVWFYENGIQAKGGEQFGSLSVGPLRYMAMKAGLGIIRKNNFFYTENGSYNNLFAYVIDQECELIHTCSAPPCSEKCDLCRRACKTKALEAPYTMNPFKCVSFLTTFGNSDTPEGLSDEMYEQWVCGCDNCQDACPYNRRHDWKHGLPLNKLEEIAPAILPENYENLTDEFLIKNVIPKTANHLQDKDIPALRKNAARSAINAQRAGAK

SEQ ID NO: 77617 - protein, 376 aa, unidentified
  source 1..376: note = Lachnospiraceae bacterium
  REGION 1..376: note = tr|A0A3C1XG18|A0A3C1XG18_9FIRM PBS lyase; OS = Lachnospiraceae bacterium OX=1898203 GN=DCR27_03145; PE = 4 SV=1
MNKQELTLKIKYKAYELGFARIGIAPADDFSEYEEEFRSRIDDYQFLVGDAIDPLKGSRPKTVMPEGKSIVALVWDYSKTIYPEKLVQSFGRAYLSRTYLPKENSEHGARLRVFTDYMESLGLHIAPGLHMPERNACARAGITNYGKNNFAYAEGCGSYIILRAFLVDQELVYDEPTVECGCPPNCHLCIDSCPTGALYAPGKLKPEKCLLYNQMRGTYNMEVRDKAGMSIHGCDICQAVCPRNKKVAAQANRRDHFLELLAEDFDLEKVLLLTPDYYEKVIYPIAYNYIHKLELFQRNAAIALGNTGDQAHVPALMQALETCKPRVQGAAAWALGKIGGKEAEAALKRQLMQENTDERTKAEILHALEMCAVKAF

SEQ ID NO: 77618 - protein, 268 aa, unidentified
  source 1..268: note = Lachnospiraceae bacterium
  REGION 1..268: note = tr|A0A0D0RID8|A0A0D0RID8_9FIRM TWA4_scaffold00001, whole genome shotgun sequence OS=Lachnospiraceae bacterium TWA4 OX=1392836 GN=P261_02554 PE=4 SV=1
MSRLTKLKKRYPWAKSVVICTEWLGKYRYPEELRGKYAKAFLLSRNTVPNHKIYKDRIRFESFLSESGIRWVGGEANSPVDTIPLREAAVCAGLGIMRKNNFFYGEKGSYYNLEGYLIGEECVLKQTCNLKPCSDKCNLCQNACRTKALCAPYTMSPISCLSLWTTFGKNLTPPHLKSDQFGEWMCGCDDCQDTCPHNRKHDWSEGEEFPGLHEIVELLQPENILKASKEELQKKVVPKTYDHVKPRQTNTFKRGAKRLIRLQEKAKN

SEQ ID NO: 77619 - protein, 310 aa, Lacibacter cauensis
  REGION 1..310: note = tr|A0A562SFV6|A0A562SFV6_9BACT Epoxyqueuosine reductase OS=Lacibacter cauensis OX=510947 GN=queG PE=3; SV = 1
MLPVTAYTTFIKDTAARLGFSFCGISKAVRLDEDAKRLEQWLKQGMHGNMQYMENYFELRVDPAKLVPGAKSVITLMMNYYPAVPQTTDGPKISKYAYGNDYHEVIRSKLKELLFEMNQSIGEVNGRGFVDSAPVLERSWATRSGLGWIGKNGNLINKQQGSFSFLATIICDLELEYDAAFAKDYCGSCTRCIDNCPTDAIQPNKVIDGSKCISYFTIELKDALIDESMKGKFNNWLFGCDVCQDVCPWNRFSKPTTEPAFAPLPQILNLSTKQWEEMTEETFKLVFKHSPIKRTKFSGIQRNLKFIQST

SEQ ID NO: 77620 - protein, 310 aa, Lacibacter sp.
  REGION 1..310: note = tr|A0A4Q1CNM8|A0A4Q1CNM8_9BACT Epoxyqueuosine reductase OS=Lacibacter sp. TTM-7 OX=2508719 GN=queG PE=3; SV = 1
MIPVTAYTSFIKQTATKLGFSFCGISKAVRLDDDARRLEQWLSKGMHGQMQYMENHFELRVDPAKLVPGAKSVITLMMNYYPSAMQTTDGPKISKYAYGNDYHEVIRSKLKELLFEMNSSIGEVNGRGFVDSAPVLERSWAKRSGLGWIGKNGNLINKQQGSFFFLATIICDLELEYDDLFAKDYCGSCTRCIDNCPTDAILPGKVVDGSKCISYFTIELKDALIDESMQGKFNNWLFGCDVCQDVCPWNRFSKQTAEPAFTPLPQILNLSTKQWEEMTEELFKQVFKHSPLKRTKFSGIQRNLKFIQTN

SEQ ID NO: 77621 - protein, 378 aa, unidentified
  source 1..378: note = Lacimicrobium alkaliphilum
  REGION 1..378: note = tr|A0A0U3B8Z1|A0A0U3B8Z1_9ALTE Epoxyqueuosine reductase OS=Lacimicrobium alkaliphilum OX=1526571 GN=queG; PE = 3 SV=1
MAELSPQYLQQLTENIKSWGKALGFQQVGVCDVDLSRHEQALQSWLDKGMHGEMQYMAEHGMKRARPAELQPGTVRIISVRMDYLPPDAGFARNLKDRQLGYISRYALGRDYHKLMRQRLKKLGQKIDQHVSDLAFRPFVDSAPVLEHPVAEKAGLGWTGKHSLTLNREAGSWFFLGELFINLPLPVDEPVEEGCGSCNACMTICPTQAIVEPYVVDARRCISYLTIELKGAIPESFRPLIGNRIYGCDDCQLVCPWNRYAHLTDEADFHPRAQLHGKELLDLFSWDEESFLRNTEGSAIRRIGFERWQRNIAVALGNAPCVPEIIHALEAAYDKSSELVREHIHWALEQQRKKQRAGNERQTQRLIRVVEKGLPRDA

SEQ ID NO: 77622 - protein, 309 aa, Lacinutrix sp.
  REGION 1..309: note = tr|F6GIS7|F6GIS7_LACS5 Epoxyqueuosine reductase; OS = Lacinutrix sp. (strain 5H-3-7-4) OX=983544 GN=queG PE=3; SV = 1
MINNKAKYTNLIKTEAKRLGFLSCGISKAEFLEAEAPRLENWLNNNMNGEMRYMENHFDKRLDPTKLVEDSKSVISLLLNYYPEETQKDSEAPKLSKYAYGNDYHHVIKSKLKTLTHYIQEEIGEVSGRAFVDSAPVLDKAWAAKSGLGWIGKHSNLLTQQVGSFYFIAELIIDLDLEYDTIVSDHCGTCTACIDACPTQAIVEPYVVDGSKCISYFTIELKDQLPNEMKGKFDSWMFGCDVCQDVCPWNKFSKAHNEPLFNPHPELLDMTKKDWEEITEDVFKKVFQKSAVKRTKFSGLTRNIKFLNE

SEQ ID NO: 77623 - protein, 308 aa, Lacinutrix sp.
  REGION 1..308: note = tr|A0A1J5K485|A0A1J5K485_9FLAO Epoxyqueuosine reductase OS=Lacinutrix sp. MedPE-SW OX=1860087 GN=queG; PE = 3 SV=1
MINNKAKYTNLIKTEAKRLGFLSCGISKAEFLEAEAPRLENWLNKNMNGEMRYMENHFDKRLDPTKLVEDSKSVISLLLNYYPEETQKDPEAPKLSKYAYGNDYHHVIKSKLKTLTHYIQEEIGEVSGRAFVDSAPVLDKAWAAKSGLGWIGKHSNLLTQQVGSFYFIAELIIDLDLEYDTIVSDHCGTCTACIDACPTQAIVEPYVVDGSKCISYFTIELKDQLPNEMKGKFDSWMFGCDVCQDVCPWNKFSKPHNEPLFNPHPELLDMTKKDWDEITEDVFKKVFQKSAVKRTKFSGLKRNIEFLK

SEQ ID NO: 77624 - protein, 309 aa, unidentified
  source 1..309: note = Lacinutrix venerupis
  REGION 1..309: note = tr|A0A420ZJN1|A0A420ZJN1_9FLAO Epoxyqueuosine reductase OS=Lacinutrix venerupis OX=1486034 GN=queG PE=3; SV = 1
MINNKAKYTSLIKTEAKRLGFLSCGISKAEFLEDEAPRLENWLNKNMNGQMRYMENHFDKRLDPTKLVEDSKSVISLLLNYYPEETQKDNKAPKLSKYAYGNDYHHVIKSKLKTLTHFIQDTIGEVSGRAFVDSAPVLDKAWAAKSGLGWIGKHSNLLTQQVGSFYFIAELIIDLDLEYDTIVSDHCGTCTACIDACPTQAIVEPYVVDGSKCISYFTIELKNELPNEMKGKFDNWMFGCDVCQDVCPWNRFSKAHNEPLFNPHPELLDMTKKDWDEITEDVFKKVFQKSAIKRTKFSGLTRNIEFLKK

SEQ ID NO: 77625 - protein, 389 aa, Lactobacillus acidipiscis
  REGION 1..389: note = tr|A0A1W7QML7|A0A1W7QML7_9LACO Epoxyqueuosine reductase OS=Lactobacillus acidipiscis OX=89059 GN=queG; PE = 4 SV=1
MSALANAQLKQQIIEASQEIGIDKIGFTTANNFEHLRSSLVAQKAAGHTSGFEHQNLDERLEPGLIFNKPRSIIAIALAYPTKMKKRPPRTKYKRGHFARASWGDDYHAVLRKKMAALIEKIKELSQNAVDFKPMVDTGELIDVAVAQRAGLGFIGKNGLLITEEFGSFVYLGEIITDLEFEPDRPLKSQCGDCTRCIDYCPPNALLGDGRLNAQKCLSYQTQTKGMMPEKYRPMIHNVIYGCDICQLVCPFNRGKDQHFHSDMEPDPEKVSPELVPLLTISNRDFKETFGQMAGSWRGKKPLQRNALIALANLGDRSALPQILAVIDNDPRPVIRATGAYAVGRLVREYNPEIIDFLEDKYTQEMSEGATEECSLEYRTAIQKISDLK

SEQ ID NO: 77626 - protein, 389 aa, Lactobacillus acidipiscis
  REGION 1..389: note = tr|A0A0R2JW83|A0A0R2JW83_9LACO (Fe-S)-binding protein OS=Lactobacillus acidipiscis OX=89059; GN = IV43_GL001954 PE=4 SV=1
MSALANAQLKQQIIEASQEIGIDKIGFTTANNFEHLRSSLVAQKAAGHTSGFEHQNLDERLETGLIFNKPRSIIAIALAYPTKMKKRSPRTKYKRGHFARASWGDDYHAVLRKKMAALIEKIKELSQNAVAFKPMVDTGELIDVAVAQRAGLGFIGKNGLLITEEFGSFVYLGEIITDLEFEPDRPLKSQCGDCTRCIDYCPPNALLGDGRLNAQKCLSYQTQTKGMMPEKYRPMIHNVIYGCDICQLVCPFNRGKDQHFHSDMEPDPEKVSPELVPLLTISNRDFKETFGQMAGSWRGKKPLQRNALIALANLGDRSALPQILAVIDNDPRPVIRATGAYAVGRLVREYNPEIIDFLEDKYTQEMSEGATEEYLLEYRTAIQKISDLK

SEQ ID NO: 77627 - protein, 377 aa, unidentified
  source 1..377: note = Lactobacillus backii
  REGION 1..377: note = tr|A0A2G9VPS4|A0A2G9VPS4_9LACO tRNA epoxyqueuosine(34) reductase QueG OS=Lactobacillus backii; OX = 375175 GN=BSQ39_11985 PE=4 SV=1
MYNDLKRKIIAASDEIGIDQIGFTDAAPFAEMKESLLAQKAAGHTSGFEHQVMAERLYPEKIFDQPKSIIAIALAYPSRMQEKAPRDRTKRRGSFARASWGEDYHFVLRDRMTKLVDFINATVPEENFTFKPMVDTGELSDVAVAQRAGLGFIGRNGLLITEKFGSFVYLGEIITNIPFEPDTPVENQCGTCTRCVDYCPPQALMGDGRLNAQRCLSYQTQTKGVMPEEFRSEIRSVIYGCDICQLVCPFNRGKDFHLHEEMDPRVDEVTPILQPMLTISNREFKEQFGRLAGSWRGKKPLQRNAIIALANMKDRSALPLLLQLIEEDPRPVIRLTAVWAVGQLSRGLNDELHRFFKERLLNETDVDVRAEINKLLE

SEQ ID NO: 77628 - protein, 377 aa, unidentified
  source 1..377: note = Lactobacillus backii
  REGION 1..377: note = tr|A0A192H662|A0A192H662_9LACO Epoxyqueuosine reductase OS=Lactobacillus backii OX=375175 GN=ACX53_09625; PE = 4 SV=1
MYNDLKRKIIAASDEIGIDQIGFTDAAPFAEMKESLLAQKAAGHTSGFEHQVMAERLYPEKIFDQPKSIIAIALAYPSRMQEKAPRDRTKRRGSFARASWGEDYHFVLRDRMTKLVDFINATVPEENFTFKPMVDTGELSDVAVAQRAGLGFIGRNGLLITEKFGSFVYLGEIITNIPFEPDTPVENQCGTCTRCVDYCPPQALMGDGRLNAQRCLSYQTQTKGVMPEEFRSEIRSVIYGCDICQLVCPFNRGKDFHLHEEMEPRVDEVTPILQPMLTISNREFKEQFGRLAGSWRGKKPLQRNAIIALANMKDRSALPLLLQLIEEDPRPVIRLTAVWAVGQLSRGLNDELHRFFKERLLNETDVDVRAEINKLLE

SEQ ID NO: 77629 - protein, 388 aa, Lactobacillus brevis
  REGION 1..388: note = tr|C2D0T0|C2D0T0_LACBR Putative iron-sulfur cluster-binding protein OS=Lactobacillus brevis subsp. gravesensis ATCC 27305 OX=525310 GN=HMPREF0496_1152 PE=4; SV = 1
MSASVTLKQQIITESQKLGIDKIGFTTADDFEELRSSLEAQKAAGHTSGFEHPNIDERLNPTLIFDHPQSIIAIALAYPSRMKQQPKRTGLKRGQFARASWGDDYHHILREKMALLIDRVKDIVGEGNARFEPMVDTGQLIDVAVAHRAGLGFIGKNGLLITEEFGSFVYLGEMITDLKLEPDTPIPCQCGECTRCLDACPVQALLGDGRMNAQRCLSYQTQTKGLMADEFRPKIRNVIYGCDICQVACPFNRGKDFHLHQRMEPDVEKVRPELLPMLKLSNKQFNDRFGQMAGAWRGKKPLQRNAIIALVNLGDVSAVDDLLHVMSQDPRPMIRATAAYAVGRLSRSYETTSRAKVAEQYQKELVSGQEEAFLKEYRRALETIDALK

SEQ ID NO: 77630 - protein, 388 aa, Lactobacillus buchneri
  REGION 1..388: note = tr|C0WPH5|C0WPH5_LACBU Putative iron-sulfur cluster-binding protein OS=Lactobacillus buchneri ATCC 11577 OX=525318 GN=HMPREF0497_1028 PE=4 SV=1
MSASVTLKQQIITESKKLGIDKIGFTTADDFEELRSSLEAQKAAGHTSGFEHPNIDERLNPKLIFDHPQSIIAIALAYPSRMKQRPKRSGLKRGQFARASWGDDYHHILREKMALLIDRIKDIVGEGKARFEPMVDTGQLIDVAVAHRAGLGFIGKNGLLITEEFGSFVYLGEMITDLKLEPDTPIPCQCGECTRCLDACPVQALLGDGRMNAQRCLSYQTQTKGLMADEFRPKIRNVIYGCDICQVACPFNRGKDFHLHQRMEPNVEKVRPELLPMLKLSNKQFNDRFGQMAGAWRGKKPLQRNAIIALANLGDVSAVDDLLHVMSQDPRPMIRATAAYAVGRLSRSYETTSRAKVAEQYQKELASGQEEALLKEYRRALKTIDALK

SEQ ID NO: 77631 - protein, 380 aa, Lactobacillus casei
  REGION 1..380: note = tr|A0A1Q9MMG6|A0A1Q9MMG6_LACCA Epoxyqueuosine reductase OS=Lactobacillus casei OX=1582 GN=AUQ39_05195; PE = 4 SV=1
MDLKETIKSHAKDLGIDKIGFTTADDFAALKPSLLAQKAAGHTTGFEHQNLDERLYPDKIFDQPQSIIAIALAYPSKIHDRPPRTGPKRGRFARASWGIDYHTVLDRKMDALMQFIKDTAATDTAIRFKSMVDTGELIDVAVAQRAGLGFIGKNGLLITPEFGSYVYLGEIITNIKFAPDEPMACQCGTCTRCIDFCPPKALLGDGRMNGQRCLSYQTQTKGYMDPEFRPMIRNVLYGCDICQQVCPFNKGKDFHIHPEMEPDPDTVMPELIPMLTLSNKGFKTRFGKLAGAWRGKKPLQRNAIIALVNLHDRSAVPHLLEVIENDPRPMIRATAAWAISELAAAPTAELTTFLKNAQAKETTEEARTEFQKAIDRIVQR

SEQ ID NO: 77632 - protein, 380 aa, Lactobacillus casei
  REGION 1..380: note = tr|K0NA75|K0NA75_LACCA Epoxyqueuosine reductase; OS = Lactobacillus casei W56 OX=1215914 GN=queG PE=4 SV=1
MDLKMMIKAHAKELGIDKIGFTTADNFAALKPSLLAQKAAGHTTGFEHQNIDERLYPDKIFDQPQSIIAIALAYPAKIHERPPRTGPKRGRFARASWGIDYHTVLDRKMASLIKFIKRTAENDPTLRFKPMVDTGELIDVVVAQRAGLGFIGKNGLLITPEFGSYVYLGEIITNIKFAPDEPMTSQCGDCTRCIDFCPPKALLGDGRMNGQRCLSYQTQTKGYMDPEFRPMIRNVLYGCDICQQVCPFNKGKDFHIHPEMEPDPETVLPELIPMLTLTNKDFKTRFGKLAGAWRGKKPLQRNAIIALVNLHDRSAIPHLLEVIEHDPRPMIRATAAWAVGELQSSSNPEIETFLKTALAKETTPEAQVAFQDALDHLTQH

SEQ ID NO: 77633 - protein, 380 aa, unidentified
  source 1..380: note = Lactobacillus chiayiensis
  REGION 1..380: note = tr|A0A4Q1U7E9|A0A4Q1U7E9_9LACO tRNA epoxyqueuosine(34) reductase QueG OS=Lactobacillus chiayiensis OX=2100821 GN=BVJ53_05160 PE=4 SV=1
MDLKETIKSHAKDLGIDKIGFTTADNFAALKPSLLAQKAAGHTTGFEHQNLDERLYPDKIFDQPQSIIAIALAYPSKIHDRPPRTGPKRGRFARASWGLDYHTVLNRKMAALIQFIKNTAATDTTIRFKPMVDTGELIDVAVAQRAGLGFIGKNGLLITPEFGSYVYLGEIITNIKFAPDEPMACQCGTCTRCIDFCPPKALLGDGRMNGQRCLSYQTQTKGYMDPEFRPMIRNVLYGCDICQQVCPFNKGKDFHIHAEMEPDPNTVLPELIPMLSLSNKGFKTRFGKLAGAWRGKKPLQRNAIIALVNLHDRSAVPHLLEVIENDPRPMIRATAAWAVSELATTPTDELTTFLKNAQAKETTKEARTEFQKAIDRIVQR

SEQ ID NO: 77634 - protein, 407 aa, Lactobacillus composti
  REGION 1..407: note = tr|A0A0R1XYI9|A0A0R1XYI9_9LACO (Fe-S)-binding protein OS=Lactobacillus composti DSM 18527 = JCM 14202; OX = 1423734 GN=FC83_GL002037 PE=4 SV=1
MPGGLLLYNGGLEIIGGGTMADKVDLKAQIIAASQRLGIDKIGFTTAADFEDMRPSLVQQKADGHTTGFEHQNLDERLNPSLIFDQPKSIIAIALAYPSRMTDRPKRTKAKRGQFARASWGRDYHFILRDKMAALVAEIEQLVAPDDTIRFKPMVDTGELMDVVVAQRAGLGFIGKNGLLITEEFGSFVYLGEIITNLELAPDTAMACQCGDCRRCVDYCPPQALMGNGQLNGQRCLSYQTQTKDLLAPEFRPLIKNVIYGCDICQLVCPFNKGKNFHRHGAMEPDPEQVMPELQPMLALSNRDFKARFGMMAGSWRGKKPLQRNAIIALANQKDQSALPHLMQVVTADPRPMIRATAAYAIGQITKFHNEATLDFLKQAYDQEVAQTTPAAYLAEFAQAIAAIAAL

SEQ ID NO: 77635 - protein, 397 aa, Lactobacillus concavus
  REGION 1..397: note = tr|A0A0R1VQK6|A0A0R1VQK6_9LACO Iron-sulfur cluster-binding protein OS=Lactobacillus concavus DSM 17758 OX=1423735 GN=FC15_GL000737 PE=4 SV=1
MTSMRHDQLKQQIIDVSKKIGIDKIGFTTADNFEHLRPSLLAQKAAGHTTGFEHQNLDERLNPDLIFDQPKSIIAIALAYPTRMNQRPERTAYKRGQFARASWGIDYHRILDEKMAALIETIRELISAEPSITFKPMVDTGELIDVAVAQRAGLGFIGRNGLLITEEFGSYVYLGEIITNIDFTPDQPIANQCGTCRRCIEACPPSALLGDGRLNGQRCLSYQTQTKGLMDPEFRPMIRNVIYGCDICQIVCPFNKGKNFHFHPEMEPDPEAVMPELVPMLTMSNKTFKLKFGPMSGSWRGKKPLQRNAIIALVNLRDRSVIPKLLEVIDHDPRPVIRATAAWGVAELSDLQNQELLQFLKNAKAREDSAETDILNEYQQAIDKLVRLPKLPQSPEN

SEQ ID NO: 77636 - protein, 383 aa, Lactobacillus coryniformis
  REGION 1..383: note = tr|A0A5B8TDH1|A0A5B8TDH1_9LACO tRNA epoxyqueuosine(34) reductase QueG OS=Lactobacillus coryniformis OX=1610 GN=queG PE=4 SV=1
MYDDLKQKIIAASADLGIDKIGFTTAAPFAEMAASLKAQKAAGHTSGFEHQVLAERLYPEQIFEQPQSIIAIALAYPSKMRQKAPRDRQQRRGSFARASWGEDYHFILRDKMQQLVEFIEANATAEVRFKPMVDTGELSDVAVAQRAGLGFIGRNGLLITEEFGSFVYIGEIITNIPFTPDPPVENQCGTCTRCIDYCPPSALMGDGRLNAQRCLSYQTQTKGMMAAEFRPQIRSVIYGCDICQLVCPFNRGKDFHRHSRMEPEVEEVTPVLQSMLTISNKEFKQRFGRLAGSWRGKKPLQRNAIIALANVKDRSAVPLLLEVIDNDPRPVIRATAIWAVAELAQHNEAELLEFLQNQQVSENETEVQSAITAATAKLKSQQD

SEQ ID NO: 77637 - protein, 383 aa, Lactobacillus coryniformis
  REGION 1..383: note = tr|A0A2D1KLX5|A0A2D1KLX5_9LACO tRNA epoxyqueuosine(34) reductase QueG OS=Lactobacillus coryniformis subsp. torquens DSM 20004 = KCTC 3535; OX = 1423822 GN=LC20004_03975PE=4 SV=1
MYDDLKQKIIAASADLGIDKIGFTTAAPFAEMAASLKAQKAAGHTSGFEHQVLAERLYPEQIFEQPQSIIAIALAYPSKMRQKAPRDRQQRRGSFARASWGEDYHFILRDKMQQLVEFIEANAAAEVRFKPMVDTGELSDVAVAQRAGLGFIGRNGLLITEEFGSFVYIGEIITNIPFTPDPPVENQCGTCTRCIDYCPPSALMGDGRLNAQRCLSYQTQTKGMMAAEFRPQIRSVIYGCDICQLVCPFNRGKDFHRHSRMEPEVEEVTPVLQSMLTISNKEFKQRFGRLAGSWRGKKPLQRNAIIALVNVKDRSAVPLLLEVIDNDPRPVIRATAIWAVAELAQHNEAELLEFLQNQQVSENETEVQAAITAATAKLKSQQD

SEQ ID NO: 77638 - protein, 385 aa, Lactobacillus curvatus
  REGION 1..385: note = tr|A0A1X7QHS3|A0A1X7QHS3_LACCU Putative epoxyqueuosine reductase OS=Lactobacillus curvatus; OX = 28038 GN=queG PE=4 SV=1
MPTLKEQVIEASKTIGIDKIGFTSAAPFDYLEASLKEQKANGHSTGFEHKVLEERLYPDLIFDQPKSIIAIALAYPTKITNKPARTGAKRGSFARASWGIDYHDILRDKMDQLISAIETLADSDTEITFKPMVDTGELSDVAVAQRAGLGFIGLNGLLITPEFGSYVYLGEIITNIPFEPDTPMANQCGSCTRCIDYCPPQALMGDGRLNAKRCLSYQTQTKGFMPEEFRPKIRSVIYGCDICQQVCPFNKGKDFHFHPDMEPDPESVMPELQPMLTISNKQFKLQFGHLASSWRGKKPLQRNAIIALANVKDRTAIPKLLELIDTDPRPVIRGTAAWALSQLVRDVTPEILDFLETAAKREEEPEAQVEFDNALQILKERYSER

SEQ ID NO: 77639 - protein, 385 aa, Lactobacillus curvatus
  REGION 1..385: note = tr|A0A0B2XN63|A0A0B2XN63_LACCU Epoxyqueuosine reductase OS=Lactobacillus curvatus OX=28038 GN=queG PE=4; SV = 1
MPTLKEQVIEASKTIGIDKIGFTSAAPFDYLEASLKEQKANGHSTGFEHKVLEERLYPDLIFDQPKSIIAIALAYPTKIINKPARTGAKRGSFARASWGIDYHDILRDKMDQLISAIETLADSDTEITFKPMVDTGELSDVAVAQRAGLGFIGLNGLLITPEFGSYVYLGEIITNIPFEPDTPMANQCGSCTRCIDYCPPQALMGDGRLNAKRCLSYQTQTKGFMPEEFRPKIRSVIYGCDICQQVCPFNKGKDFHFHPDMEPDPESVMPELQPVLTISNKQFKLQFGHLAGSWRGKKPLQRNAIIALANVKDRTAIPKLLELIDTDPRPVIRGTAAWALSQLVRDVTPEILDFLETAAKREEEPEAQVEFDNALQILKERYSER

SEQ ID NO: 77640 - protein, 396 aa, Lactobacillus dextrinicus
  REGION 1..396: note = tr|A0A5J6UQW7|A0A5J6UQW7_9LACO tRNA epoxyqueuosine(34) reductase QueG OS=Lactobacillus dextrinicus OX=51664 GN=queG PE=4 SV=1
MTNELLKQAIIKASQEIGIDKIGFTTADNFEHLRPSLVAQKAAGHTTGFEHQNLDERLNPDQIFDQPQSIIAIALAYPTRIKQRPPRTENIRGQFARASWGIDYHRILDNKMAQLITAIKQLATKNNDIKFKPMVDTGELIDVAVAQRAGLGFIGRNGLLITEEFGSFVYLGEIITNIEFTPDEPIANQCGTCTRCIDACPPSALLGDGRLNGQRCLSYQTQTKNLMPKEFRPMIRNVIYGCDICQIVCPFNKGKNFHFHAEMEPDPEAVMPELVPMLTMSNKEFKVKFGPMSGSWRGKKPLQRNAIIALVNSKATSTIPQLLEVIDHDPRPVIRATATWAVVELSDLRNEALLNFLTSARTKETSVAEVDPEILDEYDQAIAKLRALPELPNTTN

SEQ ID NO: 77641 - protein, 396 aa, Lactobacillus dextrinicus; identical to SEQ ID NO: 77640
  REGION 1..396: note = tr|A0A0R2BKX5|A0A0R2BKX5_9LACO Putative Fe-S protein; OS = Lactobacillus dextrinicus DSM 20335 OX=1423738; GN = FC84_GL000736 PE=4 SV=1

SEQ ID NO: 77642 - protein, 385 aa, Lactobacillus diolivorans
  REGION 1..385: note = tr|A0A0R1S7U7|A0A0R1S7U7_9LACO Iron-sulfur cluster-binding protein OS=Lactobacillus diolivorans DSM 14421 OX=1423739 GN=FC85_GL000770 PE=4 SV=1
MSISKQQVIELSQQIGIDKIGFTTADNFEYLRAGLEAQKAAGHTSGFEHPNLDERLNPALTFDHPKSIIAIALAYPSRMKESPVRTNLKRGQFARASWGIDYHQILREKMTSLIKQLKGLDETARFKPMVDTGELVDVAVANRAGLGFIGKNGLLITKEYGSFVYLGEMITNLEFEADTPIPCQCGDCTRCIDACPVRALLGNGKMNAQRCLSYQTQTKGLMSDFARKKTRNVIYGCDICQLVCPFNQGKDFHLHKEMTPDPDKVRPELLPILSLSNHDFKAGFGQMAGSWRGKKPLQRNAIIALANLNDRSAIPKLREVMDGDVRPVIRATAAYALGRLAKPGDEEILGDLQSAYQKERTEKSDALILHDYQVAINAVQRQKNS

SEQ ID NO: 77643 - protein, 224 aa, Lactobacillus farraginis
  REGION 1..224: note = tr|X0PAY3|X0PAY3_9LACO Iron-sulfur cluster-binding protein OS=Lactobacillus farraginis DSM 18382 = JCM 14108; OX = 1423743 GN=JCM14108_1752 PE=4 SV=1
MRTPSALKERIIAESRKIGIDKIGFTTADDFESLRSSLEAQKAAGHTSGFEHPNLDERLNPKLILKDAKTIIAIALAYPSKLKRQPPRTGLKRGQFARASWGDDYHDILREKMALLTERIQELTDESVSFEPMVDTGQLIDVAVANRAGLGFIGKNGLLITEEFGSFVYLGEIVTNLVLAPDQPIPCQCGDCTRCLDACPVQALLGDGRMNAQRCLSYQTQTKG

SEQ ID NO: 77644 - protein, 388 aa, Lactobacillus farraginis
  REGION 1..388: note = tr|A0A0R1VTK5|A0A0R1VTK5_9LACO Iron-sulfur cluster-binding protein OS=Lactobacillus farraginis DSM 18382 = JCM 14108 OX=1423743 GN=FD41_GL000083 PE=4 SV=1
MRTPSALKERIIAESRKIGIDKIGFTTADDFESLRSSLEAQKAAGHTSGFEHPNLDERLNPKLILKDAKTIIAIALAYPSKLKRQPPRTGLKRGQFARASWGDDYHDILREKMALLTERIQELTDESVSFEPMVDTGQLIDVAVANRAGLGFIGKNGLLITEEFGSFVYLGEIVTNLVLAPDQPIPCQCGDCTRCLDACPVQALLGDGRMNAQRCLSYQTQTKGVMADEFRPKIRNVIYGCDICQVACPFNRGKDFHRHARMEPETTKVRPELLPMLTLSNRQFKDQFGNMAGAWRGKKPLQRNAMIALANLGDASAVPDLLAVMSRDPRPMIRATAAYAVGRLVRKFDEPVRQAIAAQYQKARQANEAPEFLTEYHRALLKIDALIR

SEQ ID NO: 77645 - protein, 385 aa, Lactobacillus fuchuensis
  REGION 1..385: note = tr|A0A2N9DSY8|A0A2N9DSY8_9LACO Epoxyqueuosine reductase OS=Lactobacillus fuchuensis OX=164393 GN=queG; PE = 4 SV=1
MPTLKEQVIAASQSIGINKIGFTTAAPFDYLEASLKEQQQNDHSSGFEHKILEERLYPELIFDQPKSIIAIALAYPTKMANKPARTGAKRGSFARASWGIDYHDILRDKMAQLIDAIKDLAADDAEVTFKPMVDTGELSDVAVAQRAGLGFIGLNGLLITPEFGSYVYLGEIITNIPFEPDVPMSNQCGSCTRCIDYCPPSALMGDGRLNAKRCLSYQTQTKGFMPEEYRPKIRSVIYGCDICQQVCPFNKGKDFHFHPDMEPDPESVMPELQPLLTIGNKEFKVKFGHLAGSWRGKKPLQRNAIIALANVKDRSAVPQLLQLIDTDPRPVIRGTAAWAIAQLTRDVTPELITFMQQAEAQEIDPEAQGEFQNALLKLNEQLSEN

SEQ ID NO: 77646 - protein, 385 aa, Lactobacillus fuchuensis; identical to SEQ ID NO: 77645
  REGION 1..385: note = tr|A0A0R1RYC6|A0A0R1RYC6_9LACO 4Fe-4S ferredoxin-type domain-containing protein OS=Lactobacillus fuchuensis DSM 14340 = JCM 11249 OX=1423747; GN = FC69_GL001193 PE=4 SV =1

SEQ ID NO: 77647 - protein, 385 aa, Lactobacillus graminis
  REGION 1..385: note = tr|A0A5J6Z2A4|A0A5J6Z2A4_9LACO tRNA epoxyqueuosine(34) reductase QueG OS=Lactobacillus graminis OX=60519 GN=queG PE=4 SV=1
MPTLKEQVITASKAIGIDKIGFTSAAPFDYLEASLKEQKSNDHSTGFEHKVLEERLYPNLIFDQPQSIIAIALAYPTKITNKPARTGAKRGSFARASWGIDYHDILRDKMDQLIKTIEELANSDTKITFKPMVDTGELSDVAVAQRAGLGFIGLNGLLVTPEFGSYVYLGEIITNIPFEPDTPMANQCGSCTRCVDYCPPQALMGDGRLNAKRCLSYQTQTKGFMPEEFRPKIRSVIYGCDICQQVCPFNKGKDFHFHPDMEPDPESVMPELQPMLTISNKQFKLQFGHLAGAWRGKKPLQRNAIIALANVKDRTAIPKLLELIDTDVRPVIRGTAAWAIAQLVRDVTPEILTFLETAAKRESEPEAQVEFDNALQILKKRYSER

SEQ ID NO: 77648 - protein, 385 aa, Lactobacillus graminis; identical to SEQ ID NO: 77647
  REGION 1..385: note = tr|A0A0R1XB29|A0A0R1XB29_9LACO Iron-sulfur cluster-binding protein OS=Lactobacillus graminis DSM 20719 OX=1423752 GN=FC90_GL000736 PE=4 SV=1

SEQ ID NO: 77649 - protein, 407 aa, Lactobacillus harbinensis
  REGION 1..407: note = tr|A0A510TZD0|A0A510TZD0_9LACO Epoxyqueuosine reductase OS=Lactobacillus harbinensis OX=304207; GN = LHA01_28770 PE=4 SV=1
MHADLKQQIIAASQTIGIDKIGFTTAAPFTDLKPSLVAQREKGYNSGFEHQNIDERVYPDKIFNQPRSIIAIALAYPTRMHQRAPRSEYKRGYFARASWGTDYHTILRAKMTQLIEKIRQLAGNDASIAFKPMVDTGELVDVAVAQRAGLGFIGKNGLLITKEFGSWVYLGEIITNIDFPPDTPIPCQCGECTRCIDFCPPSALLGDGHLNAQRCLSFQTQTKGMMPAEFRPMIRNVIYGCDICQLVCPFNKGKDTHFHPDMEPDPEAVSPKLVPLLDISNKQFKEKFGALAGAWRGKKPLQRNAIIALANMRDRSAVPKLLEVIDKDPRPVIRGTAAWAVGHLLKNQNAEISAFLTTALAKETDADAQAEFQQALRAIAALPLNTVFGEGNFYYETLSSIDPGHRG

SEQ ID NO: 77650 - protein, 384 aa, Lactobacillus harbinensis
  REGION 1..384: note = tr|A0A0R1XGB5|A0A0R1XGB5_9LACO Iron-sulfur cluster-binding protein OS=Lactobacillus harbinensis DSM 16991 OX=1122147 GN=FC91_GL001739 PE=4 SV=1
MHADLKQQIIAASQTIGIDKIGFTTAAPFTDLKPSLVAQREKGYNSGFEHQNIDERVYPDKIFNQPRSIIAIALAYPTRMHQRAPRSEYKRGYFARASWGTDYHTILRAKMTQLIEKIRQLAGDDASIAFKPMVDTGELVDVAVAQRAGLGFIGKNGLLITKEFGSWVYLGEIITNIDFPPDTPIPCQCGECTRCIDFCPPSALLGDGHLNAQRCLSFQTQTKGMMPAEFRPMIRNVIYGCDICQLVCPFNKGKDTHFHPDMEPDPEAVSPELVPLLDISNKQFKEKFGALAGAWRGKKPLQRNAIIALANMHDRSAVPKLLEVIDKDPRPVIRGTAAWAVGHLLKNQNAEISAFLTTALAKETDADAQAEFQQALRAIAALPA

SEQ ID NO: 77651 - protein, 388 aa, Lactobacillus hilgardii
  REGION 1..388: note = tr|C0XMY6|C0XMY6_LACHI Putative iron-sulfur cluster-binding protein OS=Lactobacillus hilgardii DSM 20176 = ATCC 8290 OX=1423757 GN=HMPREF0519_2597 PE=4 SV=1
MSASVTLKQQIITESKKLGIDKIGFTTADDFEELRSSLEAQKAAGHTSSFEHPNIDERLNPKLIFDHPQSIIAIALAYPSRMKQRPKRSGLKRGQFARASWGDDYHHILREKMALLIDRIKDIVGEGKARFEPMVDTGQLIDVAVAHRAGLGFIGKNGLLITEEFGSFVYLGEMITDLKLEPDTPIPCQCGECTRCLDACPVQALLGDGRMNAQRCLSYQTQTKGLMADEFRPKIRNVIYGCDICQVACPFNRGKDFHLHQRMEPNVEKVRPELLPMLKLSNKQFNDRFGQMAGAWRGKKPLQRNAIIALANLGDVSAVDDLLHVMSQDPRPMIRATAAYAVARLSRSYETTSRAKVAEQYQKELASGQEEALLKEYRRALKTIDALK

SEQ ID NO: 77652 - protein, 394 aa, Lactobacillus odoratitofui
  REGION 1..394: note = tr|A0A0R1LZ10|A0A0R1LZ10_9LACO Iron-sulfur cluster-binding protein OS=Lactobacillus odoratitofui DSM 19909 = JCM 15043 OX=1423776 GN=FD04_GL000611 PE=4 SV=1
MNGMVQAATLKQQIITASQQLGIDKIGFTTADDFEYMRAGLEKQKADDHVTGFEHPNLDERLNPSLIFDEPKSIIAIALAYPARLQEKPAKTDSKRGQFARASWGEDYHFILRDKLNALIDAIRDLLPADVQARFKPMVDTGELMDVVVAQRAGVGFIGKNGLLITPEFGSFVYLGEVITNLAIEPDEPMACQCGECTRCVDACPPQALMGNGQLNGKRCLSYQTQTKGQMPDEFRPMIRNVIYGCDICQVVCPFNRGVDNHLHQRMEPDPERVRPELVPMLTQSNREFKETFGEMAGSWRGKKPLQRNAIIALANLNDTSAIPDLMAVIQNDPRPVIRATAAYAVGRLTKRPEPVMLQALQTAYEAEQQAGTEAALLNEYARALARIEVLTSD

SEQ ID NO: 77653 - protein, 380 aa, Lactobacillus paracasei
  REGION 1..380: note = tr|A0A422MG01|A0A422MG01_LACPA Epoxyqueuosine reductase OS=Lactobacillus paracasei OX=1597; GN = FAM3228_00951 PE=4 SV=1
MDLKMMIKVHAKELGIDKIGFTTADNFAALKPSLLAQKAAGHTTGFEHQNIDERLYPDKIFDQPQSIIAIALAYPAKIHERPPRTGPKRGRFARASWGIDYHTVLDRKMASLIKFIKRTAENDPNLRFKPMVDTGELIDVVVAQRAGLGFIGKNGLLITPEFGSYVYLGEIITNIKFAPDEPMTSQCGDCTRCIDFCPPKALLGDGRMNGQRCLSYQTQTKGYMDPEFRPMIRNVLYGCDICQQVCPFNKGKDFHIHPEMEPDPETVLPELIPMLTLTNKDFKTRFGKLAGAWRGKKPLQRNAIIALVNLHDRSAIPHLLEVIEHDPRPMIRATAAWAVGELQSSSNPEIETFLKTALAKETTPEAQVVFQDALDHLTQH

SEQ ID NO: 77654 - protein, 380 aa, Lactobacillus paracasei
  REGION 1..380: note = tr|S2NBV2|S2NBV2_LACPA Iron-sulfur cluster-binding protein OS=Lactobacillus paracasei subsp. paracasei Lpp225; OX = 1256225 GN=Lpp225_0945 PE=4 SV=1
MDLKMMIKAHAKELGIDKIGFTTADNFAALKPSLLAQKAAGHTTGFEHQNIDERLYPDKIFDQPQSIIAIALAYPAKIHERPPRTGPKRGRFARASWGIDYHTVLDRKMASLIKFIKRMAENDPTLRFKPMVDTGELIDVVVAQRAGLGFIGKNGLLITPEFGSYVYLGEIITNIKFAPDEPMASQCGDCTRCIDFCPPKALLGDGRMNGQRCLSYQTQTKGYMDPEFRPMIRNVLYGCDICQQVCPFNKGKDFHIHPEMEPDPETVLPELIPMLTLTNKDFKTRFGKLAGSWRGKKPLQRNAIIALVNLHDRSAIPHLLEVIEHDPRPMIRATAAWAVGELQSSSNPEIETFLKTALAKETTPEAQVAFQDALDHLTQH

SEQ ID NO: 77655 - protein, 388 aa, Lactobacillus parafarraginis
  REGION 1..388: note = tr|A0A0R1YPM9|A0A0R1YPM9_9LACO Iron-sulfur cluster-binding protein OS=Lactobacillus parafarraginis DSM 18390 = JCM 14109 OX=1423786 GN=FD47_GL001203 PE=4 SV=1
MTPTADLKQRIIAASHEVGIDKIGFTTAANFEGLRESLTEQIKAGHTSGFEHPNLDERLNPDLIFDGPKSIIAIALAYPSRMTQRPPKTGLKRGQFARASWGEDYHGILREKMNQLIEKIRVLAGADARFKPMVDTGELIDVAVANRAGLGFIGKNGLLITEEFGSFVYLGEIMTNLTLEPDTPIACQCGDCTRCLDACPVKALLGDGRMNAQWCLSYQTQTKGMMADEFRPKIRNVIYGCDICQVVCPYNRGKDFHLHEKMAPDPERVRPELLPMLTLSNRQFKDQFGEMAGAWRGKKPLQRNAIIALANLHDQSALSQLVAVMQADPRPMIRATAAYAIGEIVRKYDAEMIETLRAQYQREADADQAAEFLDEFERAINRINELKH

SEQ ID NO: 77656 - protein, 402 aa, Lactobacillus parafarraginis
  REGION 1..402: note = tr|G9ZRK9|G9ZRK9_9LACO Putative iron-sulfur cluster-binding protein OS=Lactobacillus parafarraginis F0439 OX=797515 GN=HMPREF9103_02370 PE=4 SV=1
MLIFEHNQTKGPECMTPTADLKQRIIAASHEVGIDKIGFTTAANFEGLRESLTEQIKAGHTSGFEHPNLDERLNPDLIFDGPKSIIAIALAYPSRMTQRPPKTGLKRGQFARASWGEDYHGILREKMNQLIEKTRMLAGADARFKPMVDTGELIDVAVANRAGLGFIGKNGLLITEEFGSFVYLGEIMTNLTLEPDTPIACQCGDCTRCLDACPVKALLGDGRMNAQRCLSYQTQTKGMMADEFRPKIRNVIYGCDICQVVCPYNRGKDFHLHEKMAPDPEKVRPELLPMLTLSNRQFKDQFGEMAGAWRGKKPLQRNAIIALANLHDQSALPQLVAVMQADPRPMIRATAAYAIGEIVRKYDAEMIEILRAQYQREADADQAIEFRHEFERAINRINELKH

SEQ ID NO: 77657 - protein, 389 aa, Lactobacillus perolens
  REGION 1..389: note = tr|A0A0R1MWW3|A0A0R1MWW3_9LACO Putative Fe-S protein; OS = Lactobacillus perolens DSM 12744 OX=1423792; GN = FD09_GL002830 PE=4 SV=1
MEVMTMHDDLKQAIIDASHEIGIDKIGFTTADDFAALKPSLVAQREKGYNSGFEHQNVDERVYPDLIFDHPRSIIAIALAYPTRMHQRAPRSQYKRGYFARASWGIDYHTILRDRMNQLVTRIRQLAGDAADVTFKPMVDTGELVDVAVAQRAGLGFIGKNGLLITKEFGSWVYLGEIITNIEFTPDTPIECQCGECTRCIDFCPPAALLGDGHLNAQRCLSYQTQTKGLMPEEFRPMIRNVIYGCDICQLVCPFNKGKDFHFHPEMEPDPATVSPELVPLLDISNKQFKAKFGPLAGSWRGKKPLQRNAIIALVNQHDRSVVPKLLAVIDNDPRPVIRGTAAWGVGQLLTQQNDEITIFLQDAQAKEKEPDVIHEFTQALAIIAQLPA

SEQ ID NO: 77658 - protein, 386 aa, Lactobacillus pobuzihii
  REGION 1..386: note = tr|A0A0R2L1E1|A0A0R2L1E1_9LACO (Fe-S)-binding protein OS=Lactobacillus pobuzihii OX=449659; GN = IV66_GL001073 PE=4 SV=1
MVNAYLKKQIIAASQELGIDKIGFTTAEDFEHLRPSLMAQKAAGHTSGFEHQNLDERLDPDLIFDQPRSIIAIALAYPSKMTQRPPRTKYKRGHFARASWGDDYHTVLNKKMSALIEKIKDLATNESEFKPMVDTGELIDVAVAQRAGIGFIGKNGLLITKEFGSFVYLGEIITDLEFEPDEPMDSQCGDCTRCVDYCPPHALLGDGRLNAQKCLSYQTQTKGMMPEKYRPMIHNVIYGCDICQSVCPFNRGSDHHFHPDMEPDPKKVSPELLPLLTISNREFKNTYGPMAGSWRGKKPLQRNALIALANLGDKSALPQILEVIDHDSRPVIRATAAYAVGRLVRKFNPEICDFLTEKYQQEQQQGQEEQYLREYRMAIQKISSLE

SEQ ID NO: 77659 - protein, 354 aa, Lactobacillus rapi
  REGION 1..354: note = tr|A0A512PPW6|A0A512PPW6_9LACO Epoxyqueuosine reductase OS=Lactobacillus rapi OX=481723 GN=LRA02_21110; PE = 4 SV=1
MRDSLIAQKAAGHTSGFEHQNLDERLNPKLIFDQPKSIIAIALAYPSRIKQRPSRTKLKRGQFARASWGNDYHQILRAKLNCLIEQMKAVAGSEARFKPMVDTGELIDVAVANRAGLGFIGKNGLLITEEYGSYVYLGEIITNLGLPADTPIPCQCGSCTRCIDACPVKALLGDGRMNAQHCLSYQTQTKGLMKAEFRPKIRNVIYGCDICQQVCPFNQGKNFHLHDEMEPDPEKVRPELLPMLTMSNREFKDQFGEMSGLWRGKKPLQRNAIIALANLHDQSAIPQLLAVMKADPRPMIRATAAYAIGEIMTTTNNDILAALQEQLEHEVATGQPDEFLAEFRAAIKQAKQLK

SEQ ID NO: 77660 - protein, 390 aa, Lactobacillus rennini
  REGION 1..390: note = tr|A0A1K2I869|A0A1K2I869_9LACO Epoxyqueuosine (OQ) reductase QueG OS=Lactobacillus rennini OX=238013; GN = LREN565_1707 PE=4 SV=1
MQTDALKQKIITAKTSLGIDKIGFTTAAPFRHLAAGLKTQKAKGYTSGFEHQVLAQRLYPQRIFDHPQSIIAIALAYPSKLPFKVPHDRQQPRGRFARASWGLDYHQILRDKMQQLINFIKANIDVKAHFKAMVDTGELIDVAVAQRAGLGFIGRNGLLITQEFGSFVYLGEIITDIPFVPDQPMANQCGTCTRCIDQCPSQALLGNGHLNAQRCLSYQTQTKGIMAAEFRPKIRNVIYGCDICQLVCPFNRGKAVDGHVQMQPQLDEAAPKLKQLLTISNQEFREQFGQLAGAWRGKKPLQRNAIIALANLGDRSAIPLLLKLSEQDVRPIIRATAIWALAKLAKDNKTAIVAFLKQCQQVEKDAQVQHSLQVALKRIRGKELNSHKIS

SEQ ID NO: 77661 - protein, 390 aa, Lactobacillus rennini
  REGION 1..390: note = tr|A0A0R2D2F6|A0A0R2D2F6_9LACO Iron-sulfur cluster-binding protein OS=Lactobacillus rennini DSM 20253; OX = 1423796 GN=FC24_GL001446 PE=4 SV=1
MQIDALKQKIIAAKTSLGIDKIGFTTAAPFRHLAAGLKMQKAKEYTSGFEHQVLAQRLYPQRIFDHPQSIIAIALAYPSKLPFKVPHDRQQPRGRFARASWGLDYHQILRDKMQQLINFIKANIDVEAHFKAMVDTGELIDVAVAQRAGLGFIGRNGLLITQEFGSFVYLGEIITDIPFTPDQPMANQCGTCTRCIDRCPSQALLGNGHLNAQRCLSYQTQTKGIMAAEFRPKIRNVIYGCDVCQLVCPFNRGKAVDGHVQMQPQLDEAAPKLKQLLTISNQEFREQFGQLAGAWRGKKPLQRNAIIVLANLGDRSAIPLLLKLSEQDVRPIIRATAIWALAKLAKDNKTAIVAFLKQCQQVENDAQVQQSLQAALKRIRGKELNSHKIS

SEQ ID NO: 77662 - protein, 380 aa, Lactobacillus rhamnosus
  REGION 1..380: note = tr|A0A179Y9I8|A0A179Y9I8_LACRH Epoxyqueuosine reductase OS=Lactobacillus rhamnosus OX=47715; GN = PY91_13305 PE=4 SV=1
MDLKATIKQHAKDLGIDKIGFTTADNFAALKPSLLAQKAAGHTTGFEHQNLDERLYPDKIFDQPQSIIAIALAYPPKIHDRPPRTGPKRGRFARASWGIDYHTVLDRKMAALIRFIKKTAKSQTDIRFKPMVDTGELIDVAVAQRAGLGFIGKNGLLITPEFGSYVYLGEIITNIKFAPDEPMSCQCGTCTRCIDFCPPHALLGDGRMNGQRCLSYQTQTKGFMDPEFRPMIRNVLYGCDICQQVCPFNKGKDFHVHPEMEPDPDTVMPELIPMLTLSNKGFKNRFGKLAGAWRGKKPLQRNAIIALVNLHDRSAVPHLLEVIDTDPRPMIRATAAWAVSELAATPNAELTTFLEKAQAKETTALAQAEFQKALERIAQR

SEQ ID NO: 77663 - protein, 380 aa, Lactobacillus rhamnosus
  REGION 1..380: note = tr|K8QNP8|K8QNP8_LACRH Epoxyqueuosine (OQ) reductase QueG OS=Lactobacillus rhamnosus LRHMDP2 OX=1203258; GN = LRHMDP2_666 PE=4 SV=1
MDLKATIKQHAKDLGIDKIGFTTADNFAALKPSLLAQKAAGHTTGFEHQNLDERLYPDKIFDQPQSIIAIALAYPSKIHDRPPRTGPKRGRFARASWGIDYHTVLDRKMAALIRFIKKTAKSQTDIRFKPMVDTGELIDVAVAQRAGLGFIGKNGLLITPEFGSYVYLGEIITNIKFAPDEPMSCQCGTCTRCIDFCPPHALLGDGRMNGQRCLSYQTQTKGFMDPEFRPMIRNVLYGCDICQQVCPFNKGKDFHVHPEMEPDPDTVMPELIPMLTLSNKGFKNRFGKLAGAWRGKKPLQRNAIIALVNLHDRSAVPHLLEVIDTDPRPMIRATAAWAVSELAATPNAELTTFLEKAQAKETTALAQAEFQKALERIAQR

SEQ ID NO: 77664 - protein, 385 aa, Lactobacillus sakei
  REGION 1..385: note = tr|A0A2Z4W6A5|A0A2Z4W6A5_LACSK tRNA epoxyqueuosine(34) reductase QueG OS=Lactobacillus sakei; OX = 1599 GN=queG PE=4 SV=1
MPTLKEQVIAASREIGIDKIGFTSAAPFDYLEASLIEQKKNGHSSGFEHKVLEERLYPELIFDQPKSIIAIALAYPTKIHNKPARTGAKRGSFARASWGIDYHDILRDKMAQLIDAIKELADEDDEVTFKPMVDTGELSDVAVAQRAGLGFIGLNGLLITPEFGSFVYLGEIITNIPFEPDTPMANQCGSCTRCIDYCPPSALLGDGRLNATRCLSYQTQTKGFMPEEFRPKIRSVIYGCDICQQVCPFNKGKDFHFHPDMEPDPEVVMPELQPLLTISNKEFKVKFGHLSGSWRGKKPIQRNAIIALANVKDRTAIPQLLQLIDNDPRPVIRGTAAWALGQLVRDVTPEMLDFLQQSADKEEEPEAQVEFHKALLILNERFEER

SEQ ID NO: 77665 - protein, 385 aa, Lactobacillus sakei
  REGION 1..385: note = tr|Q38ZP1|Q38ZP1_LACSS Putative Iron-sulfur cluster-binding protein OS=Lactobacillus sakei subsp. sakei (strain 23K) OX=314315 GN=LCA_0035 PE=4 SV=1
MPTLKEQVIAASREIGIDKIGFTSAAPFDYLEASLIEQKKNGHSSGFEHKVLEERLYPELIFDQPKSIIAIALAYPTKIHNKPARTGAKRGSFARASWGIDYHDILRDKMAQLIDAIKELADEDDEVTFKPMVDTGELSDVAVAQRAGLGFIGLNGLLITPEFGSFVYLGEIITNIPFEPDTPMANQCGSCTRCIDYCPPKALLGDGRLNATRCLSYQTQTKGFMPEEYRPKIRSVIYGCDICQQVCPFNKGKDFHFHPDMEPDPEVVMPELQPLLTISNKEFKVKFGHLSGSWRGKKPIQRNAIIALANVKDRTAIPQLLQLIDNDPRPVIRGTAAWALGQLVRDVTPEMLDFLQQAADKEEEPEAQVEFHKALLILNERFEER

SEQ ID NO: 77666 - protein, 385 aa, unidentified
  source 1..385: note = Lactobacillus shenzhenensis
  REGION 1..385: note = tr|U4TRP3|U4TRP3_9LACO YhbA OS=Lactobacillus shenzhenensis LY-73 OX=1231336 GN=yhbA PE=4 SV=1
MADTDLKQRIIAASQTIGIDKIGFTTAAPFSELAPSLAAQRAKGYSSGFEHQNIDERVHPDKIFDQPRSIIAIALAYPSRMHERAPRSEYKRGYFARASWGIDYHTILREKMTRLIAEIKRLAGEDAAVNFKPMVDTGELVDVAVAQRAGLGFIGKNGLLITKEFGSWVYLGEIITNIEFAPDTPIPCQCGDCTRCIDFCPPGALLGDGHLNAQRCLSYQTQTKGMMPAEYRPMIRNVIYGCDICQLVCPFNKGKDTARHPEMTPDPDRVSPELVPMLTMSNKEFKNRFGALAGAWRGKKPLQRNAIIALANTRDRSALPKLLEVIDKDPRPVIRGTAAWAVSQLLKNQNPEISAFLTAALAKETDLAAQTEFRDALAHIAALPA

SEQ ID NO: 77667 - protein, 385 aa, unidentified
  source 1..385: note = Lactobacillus silagincola
  REGION 1..385: note = tr|A0A1Z5J256|A0A1Z5J256_9LACO Epoxyqueuosine reductase OS=Lactobacillus silagincola OX=1714681 GN=queG; PE = 4 SV=1
MSNVTLKQQIIAASQQVGIDKIGFTTAADFEHLRAGLVKQKADGHTTGFEHQNLDERLNPSLIFDDPKTLISIALAYPAKLKGRAPRTGLKRGQFARASWGEDYHFILDDHLAALINAIKNLLPEDNDIRFKPMVDTGELIDVAVAQRAGVGFIGKNGLLITPEFGSYVYLGEIVTNLELAPDEPMTSQCGNCTRCIDACPPRALMGNGQLNGQRCLSYQTQTKGEMPDEFRPLIRNVIYGCDICQVVCPFNRGVDNHLHERMEPDVERVRPELTPMLAMTNREFKASFGSMAGSWRGKKPLQRNAIIALANLNDTSAVPKLLEVIEKDPRPLIRATAAYAVGRLSQPGNTAIVDFLRAAYETERDSGTDAQLLQEYVRAIDRIS

SEQ ID NO: 77668 - protein, 389 aa, Lactobacillus similis
  REGION 1..389: note = tr|A0A0R2EZ11|A0A0R2EZ11_9LACO (Fe-S)-binding protein OS=Lactobacillus similis DSM 23365 = JCM 2765; OX = 1423804 GN=FD14_GL000885 PE=4 SV=1
MMANTTLKQQIIAASQRVGIDKIGFTTAADFEHLRAGLVKQKADGHITGFEHQNLDERLNPDLIFDNPKTLISIALAYPARLKNQPPRTGLKRGQFARASWGEDYHFILDDHLEALIAAIKALLPADSDVRFKPMVDTGELIDVAVAQRAGVGFIGKNGLLITPEFGSFVYLGEIVTNLELEPDEPMACRCGDCTRCIDACPPRALMGNGQLNGQRCLSYQTQTKGQMPDEFRPLIRNVIYGCDICQVVCPFNRGVDNHLHERMEPDVELVRPELTPMLTQTNREFKESFGPMAGSWRGKKPLQRNAIIAIANLNDTSSLPKLLEVIENDPRPLIRATAAYAVGRLSQPGNTAVAEFLQAAYETERDNGTDESLLQEYVRAIEQVTVND

SEQ ID NO: 77669 - protein, 383 aa, Lactobacillus sp.
  REGION 1..383: note = tr|A0A425WTR4|A0A425WTR4_9LACO tRNA epoxyqueuosine(34) reductase QueG OS=Lactobacillus sp.; OX = 1591 GN=queG PE=4 SV=1
MYDDLKQKIIAASADLGIDKIGFTTAAPFAEMAASLKAQKAAGHTSGFEHQVLAERLYPEQIFEQPQSIIAIALAYPSKMRQKAPRDRQQRRGSFARASWGEDYHFILRDKMQQLVEFIEANATAEVRFKPMVDTGELSDVAVSQRAGLGFIGRNGLLITEEFGSFVYIGEIITNIPFTPDPPVENQCGTCTRCIDYCPPSALMGDGRLNAQRCLSYQTQTKGMMAAEFRPQIRSVIYGCDICQLVCPFNRGKDFHRHSRMEPEVEEVTPVLQSMLTISNKEFKQRFGRLAGSWRGKKPLQRNAIIALANVKDRSAVPLLLEVIDNDPRPVIRATAIWAVAELAQHNEAELLEFLQNQQVSENETEVQAAITAATAKLKSQQD

SEQ ID NO: 77670 - protein, 386 aa, Lactobacillus sp.
  REGION 1..386: note = tr|A0A401IRP7|A0A401IRP7_9LACO Epoxyqueuosine reductase OS=Lactobacillus sp. YK43 OX=2163553 GN=queG; PE = 4 SV=1
MANAALKEQIIAASQKIGIDKIGFTTADDFEHLRPSLVAQKAAGHTSGFEHQNLDERLDPALIFDQPRSIIAIALAYPTKLQQRPPKTKYKRGHFARASWGNDYHDILRQKMADLIEQIKVLAGEQVTFKPMVDTGELIDVAVAQRAGLGFIGKNGLLITEEFGSFVYLGEIITNIEFEPDQPQESQCGDCTRCIDYCPPGALLGDGRLDAQKCLSYQTQTKGLMDEQYRPLIRNVIYGCDICQMVCPFNRGKNFHFHPEMEPDPDKVSPELVPLLTISNKQFKAEFGPMAGSWRGKKPLQRNALIALANLGDRSAIPEILQVVEQDPRPVIRATGAYALGRLVRDYNPEISGFLQQKLQQEEDAGLADEYLREYRAAIRKINALQ

SEQ ID NO: 77671 - protein, 380 aa, Lactobacillus zeae; identical to SEQ ID NO: 77631
  REGION 1..380: note = tr|A0A0R1EYQ4|A0A0R1EYQ4_LACZE Iron-sulfur cluster-binding protein OS=Lactobacillus zeae DSM 20178 = KCTC 3804 OX=1423816 GN=FD51_GL000549 PE=4 SV=1

SEQ ID NO: 77672 - protein, 351 aa, Lactococcus chungangensis
  REGION 1..351: note = tr|A0A1K2H4G3|A0A1K2H4G3_9LACT Epoxyqueuosine reductase OS=Lactococcus chungangensis CAU 28 = DSM 22330; OX = 1122154 GN=SAMN02746068_00123 PE=4 SV=1
MTNLKEQIIAISKEIGISKIGFTAADNFDYLEKSLRLAQEKGTNSGFEHQNIEERIKPKLLLDNAKTIISIAIAYPNKLPQLPGKSSYKRGKFSSSSWGVDYHTILTEKMACLSERIAELTDDFDHKAMVDTGALVDTAVARRAGIGFIGKNGLVISKEFGSYMFLGELITNLDIEPDSPVDYGCGDCDHCITSCPTDALNGDSTMNAKRCLSFQTQKKGPLDEEFRVKMKTLIYGCDICQIACPYNKGIRNEAQTIIDPELAYPELQPFIQLSNQEFKAKFSEIAGSWRGKNVLQRNAIYVLANVNDKTAIPLLEEIAADPSNAVHQEAAQWALDKIKSKVNHHQSLKNR

SEQ ID NO: 77673 - protein, 351 aa, Lactococcus fujiensis
  REGION 1..351: note = tr|A0A2A5RNL1|A0A2A5RNL1_9LACT Epoxyqueuosine reductase OS=Lactococcus fujiensis JCM 16395 OX=1291764; GN = queG PE=3 SV=1
MNNLKAAIQELARELNIQKIGFTTADNFEYLRKSLVEQKEAGHTSGFEHQNLDERLHPKLAVEDAKTIISIAIAYPNKPLGRPEKTEYRRGQFSRGSWGEDYHDVLGRKLDALARGIEKIAGDFNYKAMVDTGALVDVAVAARSGIGFIGKNGLLISKEYGSWMFLGELVTNLEIEPDQPVDYGCGECTRCVDFCPTKALLGDGRLNAQRCLSYQTQAKGKMPEEYRDKIKTVIYGCDICQMVCPYNKGIDSHFHPEMEPDPELTNPELLPLLDLSNKQFVNKFGAMAGSWRGKNPIQRNAVYALANANDKSALPKLKEIVEQDVREYMVDAAEWAIERLENGKKRIRPRK

SEQ ID NO: 77674 - protein, 351 aa, Lactococcus garvieae
  REGION 1..351: note = tr|A0A173M467|A0A173M467_9LACT Epoxyqueuosine reductase OS=Lactococcus garvieae OX=1363 GN=queG PE=3 SV=1
MKSLKEEIQKLAADLNIQKIGFTKADDFEYLRASLIEQKEAGHTSGFEHKNLDERLQPKLSLEDAKTIISIGIAYPNKAEGKPEKTEYRRGSFSRGSWGEDYHHVLRRKLKELAEGIEKIAGSFNYTAMVDTGALVDVAVAARAGLGFVGKNGLLVSKEYGSWMFLGELVTNLDIEEDQPVDYGCGSCTRCVDFCPTKALLGDGRLNAQRCLSYQTQTRGAMPEEYREKIKTVIYGCDICQVVCPYNKGINSHFHPEMEPDPDLTNPELLPLLDLSNKEFANKFGNMAGSWRGKNPIQRNTVYALGNANDRTALPKLHEIAENDVRDYMVDAAEWAIEKLENKHRMRPRKR

SEQ ID NO: 77675 - protein, 351 aa, Lactococcus garvieae
  REGION 1..351: note = tr|V8AQN4|V8AQN4_9LACT Epoxyqueuosine reductase; OS = Lactococcus garvieae TRF1 OX=1380772 GN=queG PE=3 SV=1
MKSLKEEIQKLAADLNIQKIGFTKADDFEYLRASLIEQKEAGHTSGFEHKNLDERLQPKLSLEDAKTIISIGIAYPNKAEEKPEKTEYRRGSFSRGSWGEDYHHVLRRKLKELAEGIEKIAGDFNYTAMVDTGALVDVAVAARAGLGFVGKNGLLVSKEYGSWMFLGELVTNLDIEEDQPVDYGCGSCTRCVDFCPTKALLGDGRLNAQRCLSYQTQTRGAMPEEYREKIKTVIYGCDICQVVCPYNKGINSHFHPEMEPDPDLTNPELLPLLDLSNKEFANKFGNMAGSWRGKNPIQRNAVYALGNANDRSALPKLHDIAENDVRDYMVDAAEWAIEKLENKHRMRPRKR

SEQ ID NO: 77676 - protein, 352 aa, Lactococcus lactis
  REGION 1..352: note = tr|A0A166VRG6|A0A166VRG6_LACLC Epoxyqueuosine reductase OS=Lactococcus lactis subsp. cremoris OX=1359; GN = queG PE=3 SV=1
MTSLKQAIQTLAQELNIQKIGFTTADDFEYLRKSLVEQKAAGHTSGFEHQNLEERLHPRLAVASAKTIISIGIAYPNKADERPEKTSYRRGQFSRGSWGEDYHFVLQRKLKALAEGIERLAGEFEYKAMVDTGALVDVAVAARAGLGFIGKNGLLISKEFGSWMFLGELVTDLEIEPDEPVDYGCGECSRCVDFCPTSALLGDGRLNAQRCLSFQTQAKGKMPEEYREKIKTVIYGCDICQTVCPYNKGINSHFHPEMEPDPELTNPEILPLLELSNKQFVNKFGQMAGSWRGKNPLQRNAVYALANANDRSALPKLREMAENDKRDYMVDAAQWAIERLENGKTRIRPKRR

SEQ ID NO: 77677 - protein, 351 aa, unidentified
  source 1..351: note = Lactococcus petauri
  REGION 1..351: note = tr|A0A252CFK2|A0A252CFK2_9LACT Epoxyqueuosine reductase OS=Lactococcus petauri OX=1940789 GN=queG PE=3; SV = 1
MKSLKEEIQKLAADLNIQKIGFTKADDFEYLRASLIEQKEAGHTSGFEHKNLDERLQPKLSLEDAKTIISIGIAYPNKAEENPEKTEFRRGSFSRGSWGEDYHHVLRRKLKELAEGIEKIAGRFNYTAMVDTGALVDVAVAARAGLGFVGKNGLLVSKEYGSWMFLGELVTNLEIEEDQPVDYGCGSCTRCVDFCPTKALLGDGRLNAQRCLSYQTQTRGPMPEEYREKIKTVIYGCDICQVVCPYNKGINSHFHPEMEPDPDLTNPELLPLLDLSNKEFANKFGNMAGSWRGKNPIQRNAIYALGNANDRSALPKLHEIAENDVRDYMVDAAEWAIEKLENKHRMRPRKR

SEQ ID NO: 77678 - protein, 299 aa, Lactococcus piscium
  REGION 1..299: note = tr|A0A2C8EGG5|A0A2C8EGG5_9LACT Epoxyqueuosine reductase OS=Lactococcus piscium OX=1364 GN=queG PE=4 SV=1
MLLANAKTIIAIAVAYPNKLPQMPEKSAYKRGKFSPSSWGIDYHDILAGKMSLLAERISELTDEFDHKAMVDTGALVDTAVARRAGIGFIGKSGLVISKEFGSYMFLGELITNLDIEPDSPVDYGCGDCERCVTFCPTDALNGDTTMNAKRCLSFQTQKTGYIDEEFRIKTKSVLYGCDICQIVCPYNKGINSEPQTPIDPELSYPELQPFIKLTNKEFKETFGEIAGSWRGKNVLQRNAIFVLANLNDKTAIPLLEEIAANPQNAVHQEAAQWALDKLKRTSQHNRPLKKNIERGKIK

SEQ ID NO: 77679 - protein, 358 aa, Lactococcus piscium
  REGION 1..358: note = tr|A0A0D6DY24|A0A0D6DY24_9LACT Epoxyqueuosine reductase OS=Lactococcus piscium MKFS47 OX=297352 GN=QueG; PE = 4 SV=1
MTDLKQQIIAIAKEIGISKIGFTTADNFDYLKKTLTRAQEAGTNSGFEHKNIEERVDPKLLLANAKTIIAIAVAYPNKLPQMPEKSAYKRGKFSPSSWGIDYHDILVGKMSLLAQRISELTDEFDHKAMVDTGALVDTAVARRAGIGFIGKSGLVISKEFGSYMFLGELITNLDIEPDSPVDYGCGDCERCVTFCPTDALNGDTTMNAKRCLSFQTQKTGYIDEEFRIKTKSVLYGCDICQIVCPYNKGINSEPQTPIDPELSYPELQPFIKLTNKEFKEKFGEIAGSWRGKNVLQRNAIFVLANLNDKTAIPLLEEIAANPQNAVHQEAAQWALDKLKRTSQHNRPLKKNIERGKIK

SEQ ID NO: 77680 - protein, 358 aa, Lactococcus plantarum
  REGION 1..358: note = tr|A0A2A5S1R8|A0A2A5S1R8_9LACT Iron-sulfur cluster-binding protein OS=Lactococcus plantarum OX=1365; GN = RU87_GL001019 PE=4 SV=1
MTDLKQQIISIAKSVGISKIGFTTADNFDYLKASLIQSQEDGTNSGFEHKNIDERVTPKLLLDNAKTIISIAVAYPNKLPDMPKKSTYKRGKFSPSSWGIDYHDILTEKMSKLAQGISELTDEFDHKAMVDTGALVDTAVARRAGIGFIGKSGLVISKEFGSYMFLGELITNLDIEPDEPVDYGCGDCDRCVTFCPTEALNGDTTMNAKRCLSFQTQTTGMIDEEFRIKTKSILYGCDICQIVCPYNKGIENTPQTPIDPELAYPELQPFIRLTNKEFKEKFGEIAGSWRGKNVLQRNAIYVLANLNDKTAIPLLEEIAANPQNAVHQEAAQWALEKLSRRDKQNRPLKKRHKHGKLK

SEQ ID NO: 77681 - protein, 351 aa, Lactococcus raffinolactis
  REGION 1..351: note = tr|A0A2A5S7B9|A0A2A5S7B9_9LACT Iron-sulfur cluster-binding protein OS=Lactococcus raffinolactis; OX = 1366 GN=RU88_GL001544 PE=4 SV=1
MTNLKEQIIAISKEIGISKIGFTTADNFDYLEKSLRLSQEKGTNSGFEHQNIEERIKPKLLLDNAKTIISIAVAYPNKLPQLPGKSPYKRGKFSSSSWGVDYHTILTEKMARLSERIAELTDDFDHKAMVDTGALVDTAVARRAGIGFIGKNGLVISKEYGSYMFLGELITNLDIEPDSPVDYGCGDCDHCITSCPTDALNGDSTMNAKRCLSFQTQKKGPLDEEFRVKMKTLIYGCDICQIACPYNKGIRNEGQTAIDPELAYPELQPFIRLSNQEFKAKFSEIAGSWRGKNVLQRNAIYVLANVNDKTAIPLLEEIAANPSNAVHQEAAQWALDKIKTKAKRNQSLKNR

SEQ ID NO: 77682 - protein, 351 aa, Lactococcus raffinolactis
  REGION 1..351: note = tr|I7KJ25|I7KJ25_9LACT Epoxyqueuosine (OQ) reductase QueG OS=Lactococcus raffinolactis 4877 OX=1215915; GN = BN193_10925 PE=4 SV=1
MTNLKEQIIAISKEIGISKIGFTTADNFDYLEKSLRLAQEKGTNSGFEHQNIEERIKPKLLLDNAKTIISIAVAYPNKLPQLPGKSPYKRGKFSSSSWGVDYHTILTEKMARLSERIAELTDDFDHKAMVDTGALVDTAVARRAGIGFIGKNGLVISKEFGSYMFLGELITNLDIEPDSPVDYGCGDCDHCITSCPTDALNGDSTMNAKRCLSFQTQKKGPLDEEFRVKMKTLIYGCDICQIACPYNKGIRNEAQTTIDPELAYPELQPFIQLSNQEFKAKFSEIAGSWRGKNVLQRNAIYVLANVNDKTAIPLLEEIAANPSNAVHQEAAQWALYKIKSKANHHQSLKNR

SEQ ID NO: 77683 - protein, 345 aa, unidentified
  source 1..345: note = Lactococcus reticulitermitis
  REGION 1..345: note = tr|A0A224X911|A0A224X911_9LACT 4Fe-4S ferredoxin-type domain-containing protein OS=Lactococcus reticulitermitis OX=2025039 GN=RsY01_71 PE=4 SV=1
MTNLKEQIIAISQEIGISKIGFTTADDFDYLEKSLRLAQENGTNSGFEHPNIDERIKPKLLLKNAKTIISIAVAYPNKLPQLPEKSTYKRGKFSSSSWGVDYHTILTEKMARLSERIAELTDDFDHKAMVDTGALVDTAVARRAGIGFIGKNGLVISKEFGSYMFLGELITNLELEPDSPVDYGCGDCNHCITSCPTDALNGDSTMNAKRCLSFQTQTKGPLDEEFRVKMKTMLYGCDICQIACPYNKGITNEAQTTINPELAYPELQPFIQLTNQEFKAKFSEIAGSWRGKNVLQRNAIYVLANVNDKTAIPLLEEIAANPSNAVHQEAAQWALDKLRSKAKDK

SEQ ID NO: 77684 - protein, 352 aa, Lactococcus sp.
  REGION 1..352: note = tr|A0A3C1XBS7|A0A3C1XBS7_LACSP Epoxyqueuosine reductase OS=Lactococcus sp. OX=44273 GN=queG PE=3 SV=1
MKSLKEEIQKLAAELNIQKIGFSKADDFEYLRASLIEQKEAGHTSGFEHKNLDERLQPKLSLEDAKTIISIGIAYPNKAESKPKKTGFRRGSFSRGSWGEDYHHVLQKKLKALAEGIEQLAGSFNYKAMVDTGALIDVAVAARAGLGFIGKNGLLVSKEYGSWLFLGELVTNLEIEADQPVDYGCGSCTRCVDFCPTSALLGDGRLNAQRCLSYQTQTRGAMPEEFREKIKTVIYGCDICQVVCPYNKGINSHFHPEMEPDPELTNPELLQLLDLSNKAFTDKFGNMAGSWRGKNPIQRNAIYALANANDRTALPKLHDIAQNDVRDYMVDAAEWAIEKLENKHRIRRRERE

SEQ ID NO: 77685 - protein, 351 aa, Lactococcus sp.
  REGION 1..351: note = tr|A0A5C8JJZ1|A0A5C8JJZ1_9LACT Epoxyqueuosine reductase OS=Lactococcus sp. dk310 OX=2603289 GN=queG PE=3; SV = 1
MKTIKEAIQTLAQELNIQKIGFTTADNFEYLRKSLIEQKEAGHTSGFEHQNLDERLHPKLAVENAKTIISIAIAYPNKALEKPEKPDYRRGQFSRGSWGEDYHYVLGRKLEALAQGIERIAGEYNYKAMVDTGALVDVAVASRAGLGFIGKNGLLISKEYGSWMFLGELVTDLEIEPDQPVDYGCGECTRCVDFCPTTALLGDGRLNAQKCLSFQTQAKGKMPVEYREKIKTVIYGCDICQMVCPYNKGINSHFHPEMEPDAELTNPELLPLLDLSNKQFVNKFGTMAGSWRGKNPLQRNAVYALANANDKSALPKLHEIAENDVRDYMVDAAEWAIDKLENGKTRIRPRR

SEQ ID NO: 77686 - protein, 350 aa, unidentified
  source 1..350: note = Lactococcus termiticola
  REGION 1..350: note = tr|A0A2R5HIW1|A0A2R5HIW1_9LACT Epoxyqueuosine reductase OS=Lactococcus termiticola OX=2169526 GN=queG; PE = 4 SV=1
MTLKEEIQALASSIGIQKIGFSPADDFEHLRQSLIEQKEAGHSSGFEHQNLDERLHPKLSLENARTIISVAVAYPSKIQEKPEKTAYRRGQFSRSSWGLDYHEVLNAKLRQLAEGIEELAGHYDYKAMVDTGALIDVAVAQRAGLGFIGKNGLLVTKEYGSYVFLGELVTNLDIAPDQAFDYGCGDCRRCVDFCPTEALLGDGRLNAKRCLSFQTQAKGAMPEEFREKIKTTIYGCDICQMVCPYNKGIDSHFTAEMEPDPELAQPELLPLLDLSNKQFKEKFGQVAGSWRGKNPIQRNAIYALGNINDKSALPRLAELAENDPRDDIREAAQWSIQKILAGKKPRNVIK

SEQ ID NO: 77687 - protein, 393 aa, unidentified
  source 1..393: note = Lacunisphaera limnophila
  REGION 1..393: note = tr|A0A1D8AVI1|A0A1D8AVI1_9BACT Epoxyqueuosine reductase OS=Lacunisphaera limnophila OX=1838286 GN=queG; PE = 4 SV=1
MNSGAGRRMEGLPREALRERLHGLGFDEVRFARAGREAGAGLRDWLGAGHHADMAWMERTAEKRGAADLVLPGVKTVVMLGVNYGPGAAENGSPGAEDRPRWAQYALYEDYHDTIEPALAAAGRVLEEELGLVAADNRPYVDTGPVLERGWAARSGLGFRGKNAMLISRTHGNWLFLACILTRGDIAPDEPLRPAAERPGKEEPAGLLCGKCTRCLDACPTQAFPAPGVVDARRCISYHTIENKGIIPRELRAGIGTRIYGCDVCLEVCPWNRFAAEGRRLLLSARGDIAELALAEILALSPARYAEVFRRTPIKRLKLTGLLRNACVVAGNTGDRALLPALVALAGHESAVVRAHAVWAVQKIAGNGADGLLAAARAGETDAGVLAEYAAGA

SEQ ID NO: 77688 - protein, 386 aa, unidentified
  source 1..386: note = Lacunisphaera sp.
  REGION 1..386: note = tr|A0A4Q1C495|A0A4Q1C495_9BACT tRNA epoxyqueuosine(34) reductase QueG OS=Lacunisphaera sp. TWA-58 OX=2508720 GN=queG PE=4 SV=1
MTTQAGPVVTGAQREKLREQLRALGFDAVRFAAATRPGGESLRSWLEAGHHADMAWIERGAEKRGNPELVLPGVRSVIMLGVNYWSGIETKGPKWARYVLHTDYHDTIKAGLAAAGRLLEQEYAAEAADYRYYVDTGPVLERGWAARSGLGFRGKNAMLISREHGNWLFLACILTRLAIEPDTPLRPEFARPGAEEPAGLLCGKCTRCLDACPTQAFPEPGVVDARRCISYQTIENKGLIPREQRAGIGTRIYGCDVCLEVCPWNRFAQEGRRVLLSVRGEVAELSLQEILELTPVRFAAVFKGTAVKRLKLSGLLRNACVVAGNSGDGTLLPALVGLATHELPLVRAHAVWAVRRLAGGGAGTLLQAARSHESDATVLAEYEGVA

SEQ ID NO: 77689 - protein, 362 aa, Lampropedia hyalina
  REGION 1..362: note = tr|A0A1M4WW70|A0A1M4WW70_9BURK Epoxyqueuosine reductase OS=Lampropedia hyalina DSM 16112 OX=1122156; GN = queG PE=3 SV=1
MEQHTELWAKIQQWAHDLGFSQIGVAGIDLSDAEEGLMQWLAKGFHGDMAFMQQHGLKRARPAELVPGTVSIITARMDYLPQDTPPAWQGREWQRQANAHEAVVSVYARGRDYHKVLRNRLQKLAERIQQEVGPLGFRAFTDSAPVMEVELARRSGLGWRGKHTLLLSRKAGSMFFLGEIFLDMALPPTPATTAHCGQCSACMDICPTQAIVAPGQVDARLCISYLTIEHAAAIPEHLRPLIGNHLYGCDDCQLACPWNKFATPAVLADFNARAVWNDTRLLTLLRWQEADFLRYTEGSPIRRIGFARWQRNLAVVCGNALRQLSAEEAVPIRQHLQSMQDSEATPALVREHVLWALAQQAA

SEQ ID NO: 77690 - protein, 364 aa, unidentified
  source 1..364: note = Lampropedia puyangensis
  REGION 1..364: note = tr|A0A4S8F0D6|A0A4S8F0D6_9BURK Epoxyqueuosine reductase OS=Lampropedia puyangensis OX=1330072 GN=queG; PE = 3 SV=1
MRSWARELGFSQIGVAGVDLADAEAGLLAWLEQGFHGQMDYMQRHGLMRARPAELVPGTVSVLTARMDYLPPDTSAQWQAQEWARQIDAQQAVVSVYARGRDYHKVLRNRLQKLAMQIQEEIGPLGHRVFTDSAPVLEAELAKRSGLGWRGKHTLVLSRDAGSMFFLGEIFLDIALPETAATSAHCGQCSACIQACPTQAIVAPGQVDARLCISYLTIEYAGVIDTALRPLIGNHLYGCDDCQLACPWNKFAKPAKLVDFQARASWQKNDLLEFLGWSEAQFLRYTEGSPIRRIGFERWQRNLAVVCGNALRQETLVYAHREVICRQLHAWLADAQTSAVVREHIEWALQQAPEPVCQAGVEEE

SEQ ID NO: 77691 - protein, 357 aa, Lampropedia sp.
  REGION 1..357: note = tr|A0A4S5BR32|A0A4S5BR32_9BURK Epoxyqueuosine reductase OS=Lampropedia sp. YIM MLB12 OX=2562762 GN=queG; PE = 3 SV=1
MRLWAHALGFSQVGVASVDLSDAEEGLLAWLAQGFHGQMDYMERHGLKRARPAELVPGTVCVLTARMDYLPPDTPGDWQDVEWRQHAQAGQAVVSLYARGRDYHKVLRNRLQKLADQIQAEVGPLGHRVFTDSAPVLEAELAKRSGLGWRGKHTLVLSREAGSMFFLGEIFLDLALPETAPTTAHCGQCQACIQVCPTQAIVAPGKVDARLCISYLTIEFDGVIEPHLRPLIGNHLYGCDDCQLACPWNKFAKPSQLVDFQSRASLQHNDLLRFLGWSEADFLRNTEGSPIRRIGYVRWQRNLAVVSGNALRQPKASAELRLAIRQHLHAWLEAATTTDVVREHLQWALDAPEEAAI

SEQ ID NO: 77692 - protein, 394 aa, Laribacter hongkongensis
  REGION 1..394: note = tr|A0A248LLH0|A0A248LLH0_9NEIS Epoxyqueuosine reductase OS=Laribacter hongkongensis OX=168471 GN=queG; PE = 3 SV=1
MPGTSRLASASPKASVAASSASPTVSVVCVSMSAQALQTTDYPQLSRQIKEWATELGFAACRISRASLPAEAEQGLSDWLAAGYHGSMDYMARHGMMRARPAELVAGTLSVICVRLPYWPGDARPAADQLADGDGAYVSRYALGRDYHKVLRARLQKLADRISAAHGPFGYRAFTDSAPLMEVALAAQSGLGWRGKHTLLLTREAGSYFFLGELLTDLPLPEDPPQDQHCGRCTRCLDACPTGAIVAPFQVDARRCISYLTIEHDGPIPPDLRPLLGNRIYGCDDCQLACPWNRFAEPTTVADFAPRHGLDRARLVELFGWSEDDFRQRMAGSPVLRIGFERWSRNLAVALGNAPASPAVVAALRTRADDPSGLVREHVAWALAQHCRSDSQSA

SEQ ID NO: 77693 - protein, 394 aa, Laribacter hongkongensis
  REGION 1..394: note = tr|C1DBT4|C1DBT4_LARHH Epoxyqueuosine reductase; OS = Laribacter hongkongensis (strain HLHK9) OX=557598; GN = queG PE=3 SV=1
MPGTSRLASASPKASVAASSASPTVSVVCVSMSAQALQTTDYPQLSRQIKEWATELGFAACRISRASLPAEAEQGLSDWLAAGYHGSMDYMARHGMMRARPAELVAGTLSVICVRLPYWPGDARPAADQLADGDGAYVSRYALGRDYHKVLRARLQKLADRISAAHGPFGYRAFTDSAPLMEVALAAQSGLGWRGKHTLLLTREAGSYFFLGELLTDLPLPEDPPQDPHCGRCTRCLDACPTGAIVAPFQVDARRCISYLTIEHDGPIPPDLRPLLGNRIYGCDDCQLACPWNRFAEPTTVADFAPRHGLDRARLVELFGWSEDDFRQRMAGSPVLRIGFERWSRNLAVALGNAPASPAVVAALRTRADDPSGLVREHVAWALAQHCRSDSQSA

SEQ ID NO: 77694 - protein, 314 aa, Larkinella arboricola
  REGION 1..314: note = tr|A0A327X0Q6|A0A327X0Q6_9BACT Epoxyqueuosine reductase OS=Larkinella arboricola OX=643671 GN=queG PE=3; SV = 1
MMVDLIKKHTQLIKSKAAELGFDFCGVSKAEFLEEEAPRLETWLRQNRHGQMGYMANHFDKRLDPRLLVEGAKSVVTVLLNYYPEKTIAQEGDGYKISKYAYGTDYHFVIKDKLKDLLALVHEEIGEVNGRVFVDSAPVMDKVWAKRSGLGWVGKHTNLITREMGSFVFIAEMILDLELEADGPVADYCGTCTRCLDACPTDAITEPYVVDGSKCISYFTIELKDAIPDEVKGKFENWIFGCDICQDVCPWNRFARPHRTPAFDPNPGLSELSKNDWEEITQEVFQEIFRRSAVKRTKLEGLKRNIAFVKTEGW

SEQ ID NO: 77695 - protein, 313 aa, unidentified
  source 1..313: note = Larkinella knui
  REGION 1..313: note = tr|A0A3P1CZ71|A0A3P1CZ71_9BACT Epoxyqueuosine reductase OS=Larkinella knui OX=2025310 GN=queG PE=3 SV=1
MISIPQKHTRLLKSKAAELGFDFCGISNAEFLEEEAPRLESWLDRQMHGKMGYMANHFDKRLDPRLLVDGARSVVTVLLNYYPEKTIACEEDGYKISKYAYGTDYHFVIKNKLKELLAFVHEEIGEVGGRFFVDSAPVMDKVWAKRSGLGWVGKHTNLITREMGSFVFIGELILDLELIPDGPIADYCGTCTRCIDACPTDAITDPYVVDGSKCISYFTIELKEAIPDEVKGKFENWIFGCDICQDVCPWNRFSRPHHTPDFDPNPALTEFTKNDWEEITQEIFQEIFRRSAVKRTKLEGLKRNVAFVKLNEE

SEQ ID NO: 77696 - protein, 314 aa, unidentified
  source 1..314: note = Larkinella rosea
  REGION 1..314: note = tr|A0A3P1C2M9|A0A3P1C2M9_9BACT Epoxyqueuosine reductase OS=Larkinella rosea OX=2025312 GN=queG PE=3 SV=1
MLELIQKRTQLIKSKAAELGFDFCGVSKAEFLEAEAPRLEGWLNRQMHGQMSYMANHFDKRLDPRLLVEGAKSVVTVLLNYYPEKTVSETGGYKISKYAYGTDYHFVIKDKLKELLAFVHEEIGEVNGRFFVDSAPVMDKVWAKKSGLGWVGKHTNLITRDLGSFVFIGELILDLELVADGPMADYCGTCTRCIDACPTDAISDPYVVDGSKCISYFTIELKEAIPDEVKGKFENWIFGCDICQDVCPWNRFSRTHSTPAFDPSPGLSEMTKTDWEEITQEIFQEIFRRSAVKRTKLEGLKRNISFVKIDGNAD

SEQ ID NO: 77697 - protein, 312 aa, Larkinella sp.
  REGION 1..312: note = tr|A0A4R8CQW3|A0A4R8CQW3_9BACT Epoxyqueuosine reductase OS=Larkinella sp. BK230 OX=2512173 GN=queG PE=3; SV = 1
MVDLIKKRTQLIKSKAAELGFDFCGVSKAEFLEEEAPRLEAWLAQNRHGQMGYMANHFDKRLDPRLLVEGAKSVVTVLLNYYPEKTVAQDEDGYKISKYAYGTDYHFVIKDKLKALLAFVEEEIGEVAGRVFVDSAPVMDKAWARRSGLGWVGKHTNLITREMGSFVFIGEMILDLDLEADGPMADYCGTCTRCVDACPTDAITEPYVVDGSKCISYFTIELKDAIPDEVKGKFENWIFGCDICQDVCPWNRFARPHRTPAFDPNPALSSLSKSDWEEITQEIFGELFRRSAVKRTKLEGLKRNIAFVKTEG

SEQ ID NO: 77698 - protein, 312 aa, Larkinella sp.
  REGION 1..312: note = tr|A0A368JJ83|A0A368JJ83_9BACT Epoxyqueuosine reductase OS=Larkinella sp. ZZJ9 OX=2315727 GN=queG PE=3; SV = 1
MISVIQKHTRLLKAKAAELGFDFCGVSNAEFLEEEAPRLEAWLNRQMHGKMGYMANHFDKRLDPRLLVNGAKSVVTVLLNYYPEKTVAQEEGGYKISKYAYGTDYHFVIKDKLKELLAFVHEEIGDVNGRFFVDSAPVMDKVWAKRSGLGWVGKHTNLITRDTGSFVFIGELILDLELEADGPIADYCGTCTRCIDACPTDAITDPYVVDGSKCISYFTIELKDAIPDEVKGKFENWIFGCDICQDVCPWNRFSRPHTTPAFDPNPALAEFTKTDWEEITQDIFQEIFRRSAVKRTKLEGLKRNITFVKTGE

SEQ ID NO: 77699 - protein, 265 aa, Lautropia sp.
  REGION 1..265: note = tr|A0A3B8RHS4|A0A3B8RHS4_9BURK tRNA epoxyqueuosine(34) reductase QueG (Fragment) OS=Lautropia sp. OX=2053568 GN=queG PE=4 SV=1
DYHKVLRSRLQALGQALQQQMPSLRFRAFCDSAPVMEVELAQRAKLGWRGKNTLLLNRQSGSMFFLGSLFLNHSIDQLPVSLRGESAETRVDASSDRCGTCRACLDVCPTKAIVAPYRLDARRCISYLTIENPGPIPEVFREAIGNRIYGCDDCQLVCPWNKFAVATPLEDFKTRQAFVNLSLSEALRWTEPQFLQHTEGMAIRRIGHWRWQRNLVVALGNLLASKQAGEAQALSAKQEARQALFSIRPQADPILAEHIEWALQR

SEQ ID NO: 77700 - protein, 389 aa, Lautropia sp.
  REGION 1..389: note = tr|A0A1D2TFZ3|A0A1D2TFZ3_9BURK Epoxyqueuosine reductase OS=Lautropia sp. SCN 70-15 OX=1660105 GN=queG; PE = 3 SV=1
MSSTPNLATATLRQWAAELGFASLGVAGVDLSSVEGGLQAWLDAGWHGEMDYMARHGMARARPAELVPGTVSAIMVTLDYAPEESGWVDAAWRTLAQGERAYLSRYALGRDYHKVVRARLQKLAERIAAAVGPFGHRVFCDSAPVMEVELARRAGLGWRGKHTLLIHPKRGSTFFLGTLYTDLPLPADEAEPDHCGSCTRCIEACPTGAIVAPWRLDARRCISYLTIELKGAIPEPLRAPIGNRIYGCDDCQLACPWNRFAQPAALPDFAARNGLDAASLVDLFGWSADEFDARLAGSPIRRIGHERWLRNIAVALGNVGAEGCGAGAADVAGGADAIAAARAALEARADHPSELVREHVGWALAQLARRAPGGRSENGERAAGPRASG

SEQ ID NO: 77701 - protein, 302 aa, Leadbetterella byssophila
  REGION 1..302: note = sp|E4RUV9|QUEG_LEAB4 Epoxyqueuosine reductase; OS = Leadbetterella byssophila (strain DSM 17132 / KACC 11308 / 4M15) OX=649349 GN=queG PE=3 SV=1
MRDYSKEIKSWAAELGFDFCGISAADFLEEEAPRLERWLNRNYHGKMAYMANHFDKRLDPRKLVDGAKSVVSLLLNYYPEEPLDASPYKISKYAYGKDYHYVIKDKLKLLFERIQKEIGEVGGRIFVDSAPVMDKIWAKKAGLGWVGKNSNLINRKMGSFFFIAELILDLPLQADGPIRDYCGTCTACIDACPTDAITPYEVDGSKCISYLTIELKDQIPNEFKGKMENWIFGCDICQDVCPWNSFARPHSTEEFYPNENLKTFQDWDEITSEIFSHLFKKSAVERTKLEGLKRNIAFVKEV

SEQ ID NO: 77702 - protein, 379 aa, Leclercia adecarboxylata
  REGION 1..379: note = tr|A0A352U3H9|A0A352U3H9_9ENTR Epoxyqueuosine reductase OS=Leclercia adecarboxylata OX=83655 GN=queG; PE = 3 SV=1
MSQPLDLNQLAQNIKQWGAELGFQHVGITDTDLSASEPKLQAWLDNQYHGEMEWMARHGMMRARPHELLPGTLRVISVRMNYLPARAAFASTLKDPTLGYVSRYALGRDYHKLLRNRLKKLGEMIQQQCATLNFRPFVDSAPVLERPLAEKAGLGWTGKHSLILSRDAGSFFFLGELLIDLPLPVDKPVEDGCGRCVACMTICPTGAIVEPYTVDARRCISYLTIELEGAIPEEFRPLIGNRIYGCDDCQLICPWNRYSQLTEEDDFSPRKALHAPPLIELFGWSEAWFLKVTEGSAIRRIGHLRWLRNIAVALGNAPWDEANIQALESRRGEHPLLDEHIEWAVAQQIARRNACAVEVQLPQKNRLVRVVEKGLPRDA

SEQ ID NO: 77703 - protein, 379 aa, Leclercia adecarboxylata
  REGION 1..379: note = tr|A0A514VCS6|A0A514VCS6_9ENTR Epoxyqueuosine reductase OS=Leclercia adecarboxylata OX=83655 GN=queG; PE = 3 SV=1
MSQPLDLNQLAQNIKQWGAELGFQHVGITDTDLSASEPKLQAWLDNQYHGEMEWMARHGMMRARPHELLPGTLRVISVRMNYLPAKAAFASTLKDPTLGYVSRYALGRDYHKLLRNRLKKLGEMIQQQCATLNFRPFVDSAPVLERPLAEKAGLGWTGKHSLILSRDAGSFFFLGELLIDLPLPVDKPVEDGCGRCVACMTICPTGAIVEPYTVDARRCISYLTIELEGSIPEEFRPLIGNRIYGCDDCQLICPWNRYSQLTEEDDFSPRKALHAPPLIELFAWSEAWFLKVTEGSAIRRIGHLRWLRNVAVALGNAPWDEANLQALESRRGEHPLLDEHIEWAVEQQIAKRNACVVEVQLPQKIRLVRVVEKGLPRDA

SEQ ID NO: 77704 - protein, 379 aa, Leclercia sp.
  REGION 1..379: note = tr|A0A3D3PY27|A0A3D3PY27_9ENTR Epoxyqueuosine reductase OS=Leclercia sp. OX=1898428 GN=queG PE=3 SV=1
MSQPLDLNQLAQNIKQWGAELGFQHVGITDTDLSASEPKLQAWLDNQYHGEMEWMARHGMMRARPHELLPGTLRVISVRMNYLPAKAAFASTLKDPTLGYVSRYALGRDYHKLLRNRLKKLGEMIQQQCATLNFRPFVDSAPVLERPLAEKAGLGWTGKHSLILSRDAGSFFFLGELLIDLPLPVDKPVEDGCGRCVACMTICPTGAIVEPYTVDARRCISYLTIELEGAIPEEFRPLIGNRIYGCDDCQLICPWNRYSQLTEEDDFSPRKALHAPPLIELFAWSEAWFLKVTEGSAIRRIGHLRWLRNVAVALGNAPWDEANLQALESRRGEHPLLDEHIEWAVAQQIAKRNACVVEVQLPQKIRLVRVVEKGLPRDA

SEQ ID NO: 77705 - protein, 379 aa, Leclercia sp.
  REGION 1..379: note = tr|A0A345CFH8|A0A345CFH8_9ENTR Epoxyqueuosine reductase OS=Leclercia sp. W17 OX=2282309 GN=queG PE=3 SV=1
MSQPLDLNQLAQNIKQWGAELGFQHVGITDTDLSASEPKLQAWLDNQYHGEMEWMARHGMMRARPHELLPGTLRVISVRMNYLPTGAAFASTLKNPSLGYVSRYALGRDYHKLLRNRLKKLGEMIQEQCATLNFRPFVDSAPVLERPLAEKAGLGWTGKHSLILSRDAGSFFFLGELLVDIPLPVDKPVEEGCGRCVACMTICPTGAIVEPYTVDARRCISYLTIELEGAIPEEFRPLIGNRIYGCDDCQLICPWNRYSQLTEEDDFSPRKALHAPPLTELFAWSEAWFLKVTEGSAIRRIGHIRWLRNIAVALGNAPWNEANLRALESRRGEHPLLDEHIEWAVAQQIAKRNACVVEVQSPQKLRLVRVVEKGLPRDA

SEQ ID NO: 77706 - protein, 310 aa, Leeuwenhoekiella aequorea
  REGION 1..310: note = tr|A0A4V1KRE8|A0A4V1KRE8_9FLAO Epoxyqueuosine reductase OS=Leeuwenhoekiella aequorea OX=283736 GN=queG; PE = 3 SV=1
MIENKLKYTKLIKDEAQRLGFMSCGISKAGFLEQEAPRLESWLNKNMHGEMAYMENHFDKRLDPTLLVPGAKSVVSLLLNYYPDEKQREDTYKISKYAYGTDYHFVIKDKLKELLEFINANIGEVAGRAFVDSAPVLDKAWAAKSGLGWIGKHSNLLTKQVGSFYFIAELIIDLDLDYDTPVTDHCGSCTACIDACPTNAIVDAHVVDGSKCISYFTIELKNELPSFAQDKMDDWMFGCDVCQDVCPWNRFSKPHNEPLFDANPEILKYSKSEWKELTQEVFSTLFKKSPVKRTKFKGLERNINFLNGKF

SEQ ID NO: 77707 - protein, 312 aa, Leeuwenhoekiella blandensis
  REGION 1..312: note = tr|A3XHV4|A3XHV4_LEEBM Epoxyqueuosine reductase; OS = Leeuwenhoekiella blandensis (strain CECT 7118 / CCUG 51940 / MED217) OX=398720 GN=queG PE=3 SV=1
MNTKAKYTSWIKDKAKELGFMSCGISKAGFLEQEAPRLEDWLNKNRNGEMHYMENHFDKRLDPTLLVPGAKSVVSLLLNYYPEERQRDDSYKISKYAYGTDYHFVIKDKLKGFLEAIREHIGEVDGRAFVDSAPVLDKAWAAKSGLGWIGKNSNLLTKQVGSFYFIAELIIDLELEYDTPVTDHCGSCTACIDACPTQAIVDPYVVDGSKCISYFTIELKNEIPDYAQDKMDDWMFGCDVCQDVCPWNRFSKPHNEPLFNPKPKLLEYSKQEWKELTQEVFSEIFKKSPVKRTKFSGLKRNIDFLENAADAD

SEQ ID NO: 77708 - protein, 310 aa, Leeuwenhoekiella marinoflava
  REGION 1..310: note = tr|A0A4V1KSG3|A0A4V1KSG3_9FLAO Epoxyqueuosine reductase OS=Leeuwenhoekiella marinoflava OX=988 GN=queG; PE = 3 SV=1
MNSKKAEYTRLIKAEAKRLGFMSCGISQAGFLEEEAPRLENWLKQNMNGEMRYMENHFDKRLDPTLLVPGAKSVVSLILNYFPEEKQREDSFKVSKYAYGTDYHFVIKDKLKEFLEYIRETIGEVDGRAFVDSAPVLDKAWAAKSGLGWIGKHSNLLTKQVGSFYFIAELIIDLDLEYDTPVTDHCGSCTACIDACPTQAIVDPYIVDGSKCISYYTIELKNEIPAYAQDKMDDWMFGCDVCQDVCPWNRFSKPHAEPLFNPKSEILNNSKKEWRELTQEVFSEIFRKSPVKRTKYSGLIRNIEFLDKKQ

SEQ ID NO: 77709 - protein, 308 aa, unidentified
  source 1..308: note = Leeuwenhoekiella nanhaiensis
  REGION 1..308: note = tr|A0A2G1VX48|A0A2G1VX48_9FLAO Epoxyqueuosine reductase OS=Leeuwenhoekiella nanhaiensis OX=1655491; GN = queG PE=3 SV=1
MNTKASNTAFIKAEAKRLGFMSCGVSKAEFLETEAPRLEDWLSKNRNGEMAYMENHFDKRLDPTLLVPGAKSVVSLLFNYFPKEQQREDSFKISKYAYGTDYHFVIKDKLKELLFSINEKIGKVEGRAFVDSAPVLDKAWAARSGLGWIGKNSNLLTKQVGSYYFIAELIIDLNLDYDTPVTDHCGSCTACIDACPTDAIVDPYVVDGSKCISYFTIELKNEIPAYAQDKMEDWMFGCDICQDVCPWNRFSKPHNEPLFQPRPEIISNSKNDWKELTQEVFSEIFKKSPVKRTKYSGLMRNISFLSEE

SEQ ID NO: 77710 - protein, 313 aa, Leeuwenhoekiella palythoae
  REGION 1..313: note = tr|A0A1M5YR44|A0A1M5YR44_9FLAO Epoxyqueuosine reductase OS=Leeuwenhoekiella palythoae OX=573501 GN=queG; PE = 3 SV=1
MNNTKAKHTAWIKAKAKELGFMSCGVSKAGFLEQEAPRLEDWLNKNRNGEMHYMENHFDKRLDPTLLVPGAKSVVSLLLNYYPEETQREDSYKISKYAYGTDYHFVIKDKLKEFLEAIRAHIGEVDGRAFVDSAPVMDKAWAAKSGLGWVGKNSNLLTKQVGSFFFIAELIIDLELEYDTPVTDHCGSCTACIDACPTQAIVDPYVVDGSKCISYFTIELKNEIPDYAKGKMDDWMFGCDVCQDVCPWNRFSKPHNEPLFNPKPELLQYSKKEWKELTQEVFSEIFKKSPVKRTKFSGLKRNIDFLEDIKDPE

SEQ ID NO: 77711 - protein, 310 aa, unidentified
  source 1..310: note = Leeuwenhoekiella polynyae
  REGION 1..310: note = tr|A0A4Q0P1N9|A0A4Q0P1N9_9FLAO Epoxyqueuosine reductase OS=Leeuwenhoekiella polynyae OX=1550906 GN=queG; PE = 3 SV=1
MNSKKAEYTRLIKAEAKRLGFMSCGISKAGFLEEEAPRLENWLKKNMNGEMRYMENHFDKRLDPRLLVPGAKSVVSLLLNYFPEEQQREDSFKISKYAYGTDYHFVIKDKLKEFLEYIRETIGEVDGRAFVDSAPVLDKAWAAKSGLGWVGKHSNLLTKQAGSFYFIAELIIDLDLEYDTPVTDHCGSCTACIDACPTQAIVDPYIVDGSKCISYYTIELRNEIPDYAQDKLDDWMFGCDVCQDVCPWNRFSKPHSEPLFNPKTQILENSKKEWRELTQEVFSEIFRKSPVKRTKYSGLMRNIEFLDNKQ

SEQ ID NO: 77712 - protein, 314 aa, Leeuwenhoekiella sp.
  REGION 1..314: note = tr|A0A2E5GPD2|A0A2E5GPD2_9FLAO Epoxyqueuosine reductase OS=Leeuwenhoekiella sp. OX=1977054 GN=queG PE=3; SV = 1
MVNNTKAKHTAWIKAKAKELGFMSCGVSKAGFLEQEAPRLEDWLNKNRNGEMHYMENHFDKRLDPTLLVPGAKSVVSLLLNYYPEETQREDSYKISKYAYGTDYHFVIKDKLKGFLEAIRAQIGEVDGRAFVDSAPVLDKAWAAKSGLGWVGKNSNLLTKQVGSFFFIAELIIDLELEYDTPVTDHCGSCTACIDACPTQAIVDPYVVDGSKCISYFTIELKNEIPDYAKGKMDDWMFGCDVCQDVCPWNRFSRPHKEPLFNPKPELLQYSKKEWKELTQEVFSEIFKKSPVKRTKFSGLKRNIDFLEDIKDPE

SEQ ID NO: 77713 - protein, 310 aa, Leeuwenhoekiella sp.
  REGION 1..310: note = tr|A0A4Q0NSR6|A0A4Q0NSR6_9FLAO Epoxyqueuosine reductase OS=Leeuwenhoekiella sp. R-50232 OX=2249425; GN = queG PE=3 SV=1
MNTKKAEYTRLIKAEAKRIGFMSCGISQAGFLEEEAPRLENWLKKNMNGEMRYMENHFDKRLDPRLLVPGAKSVVSLLLNYFPEEQQREDSFKISKYAYGTDYHFVIKDKLKEFLEYIRENIGEVDGRAFVDSAPVLDKAWAAKSGLGWVGKHSNLLTKQVGSFYFIAELIIDLDLEYDTPVTDHCGSCTACIDACPTQAIVDPYIVDGSKCISYYTIELKNEIPDYAQDKMDDWMFGCDVCQDVCPWNRFSKPHSEPLFNPKPQILENSKKEWRELTQELFSEIFRKSPVKRTKYSGLVRNIEFLDNKQ

SEQ ID NO: 77714 - protein, 368 aa, unidentified
  source 1..368: note = Legionellaceae bacterium
  REGION 1..368: note = tr|A0A2E2WMG4|A0A2E2WMG4_9GAMM Epoxyqueuosine reductase OS=Legionellaceae bacterium OX=2026753 GN=queG; PE = 3 SV=1
MFHSMTINAENIKQWAMTLGFQQVGVADTKLATYESRLKAWLKKNYHGKMDYMANNIEKRCDPSKLLPGTKSIIMVSMDYLPPNPTFSLLKNPIKAFISRYALGRDYHKLIRKRLQQLANKISEHVDGFQYRSFADSAPVFEKALAEKAGLGWIGKHTNLLNQSRGSWFFLGALYTNLTLAYDKSTDNHCGTCTSCIDVCPTNAIVAPYELDARRCISYLTIELRESIPTELRPLIGNRIYGCDDCQMACPWNKFAKNTEEEGFYARRGLADTELIEVFSWDEKTFLSKTEGSAIRRIGYDCWIRNVAVAMGNAPENKAIIDALRARLDYPNQMVREHIEWAIATQKNKKNVENKLEQIPEKRWLYLG

SEQ ID NO: 77715 - protein, 350 aa, unidentified
  source 1..350: note = Legionellales bacterium
  REGION 1..350: note = tr|A0A2E0PZN0|A0A2E0PZN0_9GAMM Epoxyqueuosine reductase OS=Legionellales bacterium OX=2026754 GN=queG; PE = 3 SV=1
MNETKLTKKIKEWGAELGFQQIGVTTTDLHQDEAYLINWLSKGRHGEMNYMASHGKKRSRPQDLIPGTLSVISARMDYFPPSSNHPTKVLKNKNLAYISRYATGRDYHKIIRQRLKKLARRIQEQYGEFGHRCFVDSAPVLEKALARNSGLGWIGKHSNLINPKAGSWFFLGEIYTNLPLEIDEPFTENHCGSCKACIDICPTNAIIGDMEIDARRCISYLTIELRDSIPEKFRKLIGNRVYGCDDCQLICPWNKFAKNSDEDDFRVRNGLDAPDLVELFSWTEKNFIDRTEGSAIRRIGYECWLRNIAVGLGNAPKTEKVVSALIARRKNSTALVSEHIEWALEQHNEK

SEQ ID NO: 77716 - protein, 348 aa, unidentified
  source 1..348: note = Legionellales bacterium
  REGION 1..348: note = tr|A0A2E2WRT0|A0A2E2WRT0_9GAMM Epoxyqueuosine reductase OS=Legionellales bacterium OX=2026754 GN=queG; PE = 3 SV=1
  VARIANT 187: note = Xaa can be any naturally occurring amino acid
  VARIANT 201: note = Xaa can be any naturally occurring amino acid
MNKLELSKEIKKWGAELGFQQIGITTADLHQDEAYLINWLSKGRHGEMSYMASHGTKRSRPNDLIPGTSSVISARMDYMPPSSKHPIEVLKNKKLAYISRYATGRDYHKLIRQRLKKLANKIHEHYSDFGYRCFVDSAPVLEKALARNAGLGWIGKHSNLINPQAGSWFFLGEIYTNLPLEIDTPFXENHCGSCNACIDIXPTNAIVGEMEIDARRCISYLTIELRGRIPEEFRKMIGNRVYGCDDCQLICPWNKFSKNSDEDDFRIRHGLDTANLVDLFSWTEAEFLERTEGSAIKRIGYECWLRNIAVGLGNAPTSKKVINTLKKRQYNSSALVSEHIEWALRQHC

SEQ ID NO: 77717 - protein, 347 aa, unidentified
  source 1..347: note = Leisingera aquaemixtae
  REGION 1..347: note = tr|A0A0P1HDM6|A0A0P1HDM6_9RHOB Epoxyqueuosine reductase OS=Leisingera aquaemixtae OX=1396826 GN=queG; PE = 3 SV=1
MKDRSGIKEKLVAQALAEGFVSCRVCRPWDVPEVPGRLQAFLDAGYHGQMGWMAERTHWRGDPSLLWPEARSVIMLAESYTPDEDPMAVVGQADRGAVSVYARNKDYHDLVKKRLKRLARWLIAEAGEDCEVKVFVDTAPVPEKALGQAAGLGWQGKHSNLVSRDWGNWAFLGSVFTTLELPADAPERDRCGSCRACLDSCPTDAFPAPYQVDARRCISYLTIEHKGPVAEELREKMGNRIYGCDDCLAACPWNKFAVAASDMRYAAREELKAPKLAELAALEDAAFREMFSGSPIKRIGRDRFVRNVLYAIGNSGLPELRAVVQGLAEDPDPAVADAARWAVQRLS

SEQ ID NO: 77718 - protein, 345 aa, Leisingera methylohalidivorans
  REGION 1..345: note = tr|V9VXL2|V9VXL2_9RHOB Epoxyqueuosine reductase; OS = Leisingera methylohalidivorans DSM 14336 OX=999552; GN = queG PE=3 SV=1
MSAALKERLVSQALAEGFVSCRICRPWDVPQVPARLQAFLDAGYHGQMGWMAERTAWRSDPAQLWPEAQSVIMLAESYTPEEDPMAVVGQSDRGAVSVYARNKDYHDLVKKRLKRLARWLIAVAAEPCEVKVFVDTAPVPEKALGMAAGLGWQGKHSNLVSRDWGNWAFLGSVFTTLELPADAAEPDRCGSCRACLDSCPTDAFPAPYQVDARRCISYLTIEHKGPVEEELRAKLGNRIYGCDDCLAACPWNKFAVAASDMRYAARDELKAPKLAELAALDDAEFRAMFAGSPIKRIGRNRFVRNVLYAIGNSGLPELRKVARGLTQDPDAAVADAAAWAVQRLS

SEQ ID NO: 77719 - protein, 347 aa, Leisingera sp.
  REGION 1..347: note = tr|A0A0B4EEG3|A0A0B4EEG3_9RHOB Epoxyqueuosine reductase OS=Leisingera sp. ANG1 OX=1002340 GN=queG PE=3; SV = 1
MKDGAGIKEKLVAQALAEGFVSCRICRPWDVPQVPGRLQAFLDAGYHGQMGWMAERSHWRGDPAQLWPEARSVIMLAESYTPEEDPMAVVGQADRGAVSVYARGKDYHDLVKKRLKRLARWLIAEAGADCEVKVFVDTAPVPEKALGMAAGLGWQGKHSNLVSRDWGNWAFLGSVFTTLELPADVAEPDRCGSCRACLDSCPTDAFPAPYQVDARRCISYLTIEHKGPVAEELRGKMGNRIYGCDDCLAACPWNKFAVAASDMRYAARDELKAPRLAELAVLDDAAFREKFSGSPIKRIGRDRFVRNVLYAIGNSGLAELREVAQRLAEDPDPAVADAARWAVQRLS

SEQ ID NO: 77720 - protein, 345 aa, Leisingera sp.
  REGION 1..345: note = tr|A0A481PQ50|A0A481PQ50_9RHOB Epoxyqueuosine reductase OS=Leisingera sp. NJS204 OX=2508307 GN=queG PE=3; SV = 1
MSAALKERLVAQALAEGFVSCRICRPWDVPQVPGRLQAFLDAGYHGQMGWMAERTHWRGDPALLWPDARSVIMLAESYTPDEDPMAVVGQADRGAVSVYARNKDYHDLVKKRLKRLARWLIAEAGEDCEVKVFVDTAPVPEKALGMAAGLGWQGKHSNLVSRDWGNWAFLGSVFTTIELPADHAERDRCGSCRACLDSCPTDAFPAPYQVDARRCISYLTIEHKGPVDEELRGKLGNRIYGCDDCLAACPWNKFAVAASDMRYAARDDLKAPKLAELAVLDDAAFRALFSGSPIKRIGRDRFVRNVLYAIGNSCQPDLRDVARRLTEDPDPAVADAARWAVQQLS

SEQ ID NO: 77721 - protein, 379 aa, unidentified
  source 1..379: note = Lelliottia amnigena
  REGION 1..379: note = tr|A0A3S5XWQ7|A0A3S5XWQ7_LELAM Epoxyqueuosine reductase OS=Lelliottia amnigena OX=61646 GN=queG PE=3 SV=1
MSQPLDLNQLAQNIKQWGAELGFQKVGITDTDLSASEPKLQAWLDKQYHGEMEWMARHGMMRARPHELLPGTLRVISVRMNYLPANAAFARTLKDPSLGYVSRYALGRDYHKLLRNRLKKLGETIQEHCGSLNFRPFVDSAPILERPIAEKAGLGWTGKHSLILSRDAGSFFFLGELLIDLPLPVDGPVEEGCGRCVACMTICPTGAIVEPYTVDARRCISYLTIELEGAIPEAFRPLIGNRIYGCDDCQLICPWNRYSQLTDEDDFSPRKALHAPKLIELFAWDEAYFLRITEGSAIRRIGHLRWLRNIAVALGNASWDEANIMALESRRGEHPLLDEHIEWAIAQQIEKRNACVVEVQLPKKQRLVRVIEKGLIRDA

SEQ ID NO: 77722 - protein, 379 aa, unidentified
  source 1..379: note = Lelliottia amnigena
  REGION 1..379: note = tr|A0A1A9F746|A0A1A9F746_LELAM Epoxyqueuosine reductase OS=Lelliottia amnigena OX=61646 GN=queG PE=3 SV=1
MSQPLDLNQLAQNIKQWGAELGFQKVGITDTDLSASEPKLQAWLDKQYHGEMEWMARHGIMRARPHELLPGTLRVISVRMNYLPANAAFARTLKDPSLGYVSRYALGRDYHKLLRNRLKKLGETIQQHCGSLNFRPFVDSAPILERPLAEKAGLGWTGKHSLILSRDAGSFFFLGELLIDLPLPVDSPVEEGCGRCVACMTICPTGAIVEPYTVDARRCISYLTIELEGAIPEEFRPLIGNRIYGCDDCQLICPWNRYSQLTDEEDFSPRKALHAPPLTELFAWSEAWFLKVTEGSAIRRIGHLRWLRNIAVALGNAAWDEANMTALESRRGEHPLLDEHIEWAIAQQIEKRNACVVEVQLPKKQRLVRVIEKGLVRDA

SEQ ID NO: 77723 - protein, 379 aa, unidentified
  source 1..379: note = Lelliottia nimipressuralis
  REGION 1..379: note = tr|A0A4Q0W7L5|A0A4Q0W7L5_9ENTR Epoxyqueuosine reductase OS=Lelliottia nimipressuralis OX=69220 GN=queG; PE = 3 SV=1
MSQPLDLNQLAQNIKQWGAELGFQKVGITDTDLSASEPKLQAWLDKQYHGEMEWMARHGMMRARPHELLPGTLRVISVRMNYLPANAAFARTLKDPSLGYVSRYALGRDYHKLLRNRLKKLGETIQQHCGSLNFRPFVDSAPILERPIAEKAGLGWTGKHSLILSRDAGSFFFLGELLIDLPLPVDGPVEEGCGRCVACMTICPTGAIVEPYTVDARRCISYLTIELEGAIPEEFRPLIGNRIYGCDDCQLICPWNRYSQLTDEDDFSPRKALHAPKLTELFAWDEPYFLRITEGSAIRRIGHLRWLRNIAVALGNAPWDEANILALEKRRGEHPLLDEHIEWAIAQQIEKRNACVVDVQLPQKKRLVRVIEKGLVRDA

SEQ ID NO: 77724 - protein, 379 aa, unidentified
  source 1..379: note = Lelliottia nimipressuralis
  REGION 1..379: note = tr|A0A2L2JCG3|A0A2L2JCG3_9ENTR Epoxyqueuosine reductase OS=Lelliottia nimipressuralis OX=69220 GN=queG; PE = 3 SV=1
MSQPLDLNELAQKIKQWGAELGFQKVGITDTDLSASEPKLQAWLDKQYHGEMEWMARHGMMRARPHELLPGTLRVISVRMNYLPANAAFARTLKDPSLGYVSRYALGRDYHKLLRNRLKKLGETIQQHCVSLNFRPFVDSAPILERPIAEKAGLGWTGKHSLILSRDAGSFFFLGELLIDLPLPVDGPVEEGCGRCVACMTICPTGAIVEPYTVDARRCISYLTIELEGAIPEEFRPLIGNRIYGCDDCQLICPWNRYSQLTDEEDFSPRKALHAPPLIELFAWSEAWFLKVTEGSAIRRIGHLRWLRNVAVALGNAPWDEANIRALESRRGEHPLLDEHIEWAIAQQIEKRNACVVEVQLPKKQRLVRVIEKGLPRDA

SEQ ID NO: 77725 - protein, 379 aa, unidentified
  source 1..379: note = Lelliottia sp.
  REGION 1..379: note = tr|A0A2S5C6D3|A0A2S5C6D3_9ENTR Epoxyqueuosine reductase OS=Lelliottia sp. 7254-16 OX=2080842 GN=queG; PE = 3 SV=1
MSQPLDLNQLAQNIKQWGAELGFQKVGITDTDLSASEPKLQAWLDKQYHGEMEWMARHGMMRARPHELLPGTLRVISVRMNYLPANAAFARTLKDPSLGYVSRYALGRDYHKLLRNRLKKLGETIQQHCGSLNFRPFVDSAPILERPIAEKAGLGWTGKHSLILSRDAGSFFFLGELLIDLPLPVDGPVEEGCGRCVACMTICPTGAIVEPYTVDARRCISYLTIELEGAIPEEFRPLIGNRIYGCDDCQLICPWNRYSQLTEEDDFSPRKALHAPKLTELFAWDENYFLKITEGSAIRRIGHLRWLRNIAVALGNAPWDEANIQALETRRGEHPLLDEHIEWAIAQQIEKRNACVVEVQLPKKQRLVRVVEKGLPRDA

SEQ ID NO: 77726 - protein, 379 aa, Leminorella grimontii
  REGION 1..379: note = tr|A0A485AZZ0|A0A485AZZ0_9GAMM Epoxyqueuosine reductase OS=Leminorella grimontii OX=82981 GN=queG PE=3; SV = 1
MSLPLDFNQLAQHIKQWGQELGFQQVGISDTDLRAEEPKLQAWLDNQYHGDMSWMARYGMLRARPHELQPGTLRVISVRMNYLPSDAAFASSLDNPEEGYISRYALGRDYHKVLRQRLKKLGEKIQQHCGELSFRPFVDSAPILERPLAAKAGLGWTGKHSLIINRSQGSWFFLGELLVDIPLPVDVPVEEECGRCVACMTLCPTGAIVEPYVVDARRCISYLTIEHEGAIPLELRPLMGNRIYGCDDCQLACPWNRFAPLTDEADFYPKAALYRTPLLKLYAWDEAEFLAQTEGSPIRRIGYFRWLRNITVALGNAPYREEIVAALRGRKGLFPLLDEHIGWALEQQAKRTDGQPVEIKTSKRMRLIRSIEKGLPRDA

SEQ ID NO: 77727 - protein, 379 aa, Leminorella grimontii; identical to SEQ ID NO: 77726
  REGION 1..379: note = tr|A0A085HF53|A0A085HF53_9GAMM Epoxyqueuosine reductase OS=Leminorella grimontii ATCC 33999 = DSM 5078; OX = 1005999 GN=queG PE=3 SV=1

SEQ ID NO: 77728 - protein, 379 aa, Leminorella richardii
  REGION 1..379: note = tr|A0A2X4UYQ6|A0A2X4UYQ6_9GAMM Epoxyqueuosine reductase OS=Leminorella richardii OX=158841 GN=queG PE=3; SV = 1
MSHPLDLNQLAQHIKLWGQELGFQQVGITDTDLSVEEPKLLAWLDKQYHGDMSWMARYGLLRARPHELQPGTLRVISVRMNYLPADAAFASALDAPEQGYISRYALGRDYHKVLRQRLKKLGEKIQQHCGELSFRPFVDSAPIMERPLAAKAGLGWTGKHSLIINGSEGSWFFLGELLVDIPLPVDIPVQEECGRCVACMTLCPTGAIVEPYVVDARRCISYLTIEHEGAIPLSLRPLMGNRIYGCDDCQLACPWNRFAPLTDEVDFSPRAALHRTPLLALYAWSEDEFLFQTEGSPIRRIGYFRWLRNITVALGNAPYQEENVTALNARKGLFPLLDEHIDWALERQIAQQKGQLIDLKEPKRQRLIRSIEKGLPRDA

SEQ ID NO: 77729 - protein, 380 aa, unidentified
  source 1..380: note = Lentibacillus amyloliquefaciens
  REGION 1..380: note = tr|A0A0U3W6F0|A0A0U3W6F0_9BACI Epoxyqueuosine reductase OS=Lentibacillus amyloliquefaciens OX=1472767; GN = queG PE=3 SV=1
MNTNQLRQEIIDYSKEIGIDKIGFASADVFESLKDRLKRQQELGFQSGFEKGSVEERTEPERLMPEAKSIISIALAYPSRIKNGPKSTKEERRGVFCRASWGTDYHDVLREKLDKLSQFIKEKIPEAATKVMVDTGELSDRAVAERAGIGFSGKNTAIITPEFGSYVYLGELITNLSFESDTPLEDGCGTCTKCLDACPTGALVQGGQLNAQRCLAFLTQTKDFMPDEFRSKIGNFIYGFDTCQAVCPYNKRVDFHNHPEFEPEPEVAKPKLKPMLSLSNREFKETFGHIAGSWRGKKPLQRNALIALAHYKDETAVDEIIRVMNHDPRPVIRGTAAWSLGKIGTDEAYSAIKDAKEHEEDDQVLAEMDKGLEFQKTSSA

SEQ ID NO: 77730 - protein, 381 aa, Lentibacillus halodurans
  REGION 1..381: note = tr|A0A1I0VX89|A0A1I0VX89_9BACI Epoxyqueuosine reductase OS=Lentibacillus halodurans OX=237679 GN=queG; PE = 3 SV=1
MNLDQLRQEIIDYSKNIGIDKIGFASADVFEGLKERLKRQQELGYQSGFEKGSIEERTEPERLVPEAKSIISVALAYPSRIKDGVKGTKEERRGIFCRASWGTDYHDVLQDKLGKLAAFINEKVPEATTKVMVDTGELSDRAVAERAGIGFSGKNTSIITPEFGSYVYLGELMTNLPFVPDKPLEDGCGSCTKCLDACPTGALVQGGQLNAQRCLAFLTQTKDFMPDEFRPKIGNFIYGFDTCQVVCPYNKHVDFHNHPEFEPDPEVAKPKLKPMLRISNRAFKDTFGHIAGSWRGKKPLQRNALIALAHYKDETAVDEMITVMKNDPRPVIRGTAAWSLGKIGTEDAFAAIKEAVDKETDEQVLAEMDKGLAFQEEFSTT

SEQ ID NO: 77731 - protein, 380 aa, Lentibacillus persicus
  REGION 1..380: note = tr|A0A1I1X6P6|A0A1I1X6P6_9BACI Epoxyqueuosine reductase OS=Lentibacillus persicus OX=640948 GN=queG PE=3; SV = 1
MNTNQLRQDVIDYSKKIGIDKIGFASADVFESLKDRLKRQQELGFQSGFEKGSVEERTEPDRLMPEAKSIISIALAYPSRIKDGPKSTKEERRGVFCRASWGTDYHEVLRERLTKLSNFIKEKMPEAETKVMVDTGELSDRAVAERAGIGFSGKNTAIITPEFGSYVYLGELITNVPFEPDTPLEDGCGSCTKCLDACPTGALVQGGQLNAQRCLAFLTQTKDFMPDEFRPKIGNFIYGFDTCQVVCPYNKRVDFHNHPEFEPEPDVAKPKLKPMLSISNREFKETFGHVAGSWRGKKPLQRNALIALAHYKDETAIPEITRVMNDDPRPVIRGTAAWSLGKIGTQAAYTAIEEAMETEKDEHVLAEMEKGLEFQDISSG

SEQ ID NO: 77732 - protein, 387 aa, Lentibacillus salicampi
  REGION 1..387: note = tr|A0A4Y9A9P7|A0A4Y9A9P7_9BACI Epoxyqueuosine reductase OS=Lentibacillus salicampi OX=175306 GN=queG; PE = 3 SV=1
MKTEQLKKDIVAYSREIGIDKIGFASADVFAGLKDRLKRQQELGYQSGFEKGSIEERTEPERLLPEAQSIISIALAYPSRIKDGPKSTKEERRGVFCRASWGVDYHEVLREKLGKLSAFIKEKVPEASMKVMVDTGELSDRAVAERAGIGFSGKNTAMITPEFGSYVYLGELITNLPFIPDTPLEDGCGSCTKCLDACPTGALVQGGQLNAQRCLAFLTQTKGFMPDEDRSKIGNFIYGFDTCQVVCPYNKKIDVHHHPEFEPEPDVAKPKLKPLLRISNREFKNTFGHIAGSWRGKKPLQRNALIALAHYKDETAVDDMIAVMNNDPRPVIRGTAAWSLGKIGTDEAFAAIEAATEKESDEQVMAEMEKGLAFNKFAEKSPSKSVI

SEQ ID NO: 77733 - protein, 380 aa, Lentibacillus sp.
  REGION 1..380: note = tr|A0A549YIT6|A0A549YIT6_9BACI Epoxyqueuosine reductase OS=Lentibacillus sp. NKC851-2 OX=2584959 GN=queG; PE = 3 SV=1
MNTQQLKQEIIDYSKEIGIDKIGFASADVFEGLKERLKRQQALGYQSGFEKGSVEERTEPDRLLPEAKSIISIALAYPSRIKNGPKSTKEERRGVFCRASWGVDYHKVLRDKLEKLSAFIVDKIPEASTKVMVDTGELSDRAVAERAGIGFSGKNTAIITPEFGSYVYLGELITNIPFVPDTPLEDGCGSCTKCLDACPTGALVQGGQLNAQRCLAFLTQTKDFLPDEFRPKIGNFIYGFDTCQVVCPYNKHVDFHNHPEFEPEPDVAKPKLKPMLRISNREFKATFGHIAGSWRGKKPLQRNALIALGHYKDKTAVDEIIAVMNNDPRPVIRGTAAWSLGKIGTDDGFVAIKEAMDKETDEQVLAEMEKGLAFKETSTT

SEQ ID NO: 77734 - protein, 380 aa, Lentibacillus sp.
  REGION 1..380: note = tr|A0A4Q3X4L4|A0A4Q3X4L4_9BACI Epoxyqueuosine reductase OS=Lentibacillus sp. SSKP1-9 OX=2510307 GN=queG; PE = 3 SV=1
MNTDQLRQEIIDYSKEIGIDKIGFASADVFAGLKDRLKRQQELGYQSGFEKGSIEERTEPGRLLPEAKSIISIALAYPSRMNDRPTNTKEERRGVFCRASWGVDYHQVLRDRLEKLADFIQEKFPEASTKVMVDTGELSDRAVAERAGIGFSGKNTSIITPEFGSYVYLGELITNVPFVPDTPLEDGCGSCTKCLDACPTGALVQGGQLNAQRCLAFLTQTKDFLPDEFRPKLGNFIYGFDTCQVVCPYNKHVDFHNHPEFEPEPDVAKPKLKPMLRISNREFKETFGHIAGSWRGKKPLQRNALLALGHYKDETAVDEMIAVMNNDPRPVIRGTAAWSLGKIGTEEAFAAIREAMDKETDEQVLTEMEKGLAFAETPAT

SEQ ID NO: 77735 - protein, 352 aa, Lentibacter algarum
  REGION 1..352: note = tr|A0A1H3MM05|A0A1H3MM05_9RHOB Epoxyqueuosine reductase OS=Lentibacter algarum OX=576131 GN=queG PE=3; SV = 1
MDALANKLREQARAEGFDACQICAPDAVPDVPARLDAFLEKGYHGQMGWLAERTHWRGNPAALWPEARSVIMLAVSYTPEEDPLEALTRKEAGTVSVYAQNKDYHDLVKKGLKRLARWLIAEAGGEVKVFVDTAPVPEKPLGQAAGLGWQGKHTNLVSRELGNWFFIGSIFSTLDLLKDAPEQDHCGSCRNCLDVCPTGAFPAAYQLDARRCISYLTIEHHGPVDEELRPLLGNRIYGCDDCLAVCPWNKFAQNARDIRLKPRDDLQSPPLAELAMLNDTEFREKFSGSPIKRIGRNRFVRNVLYAVGNSGSTNLLKCAQHLLNDNDETVRDAADWACKRLKSAANGQDEAG

SEQ ID NO: 77736 - protein, 306 aa, unidentified
  source 1..306: note = Lentimicrobiaceae bacterium
  REGION 1..306: note = tr|A0A2E2XXI6|A0A2E2XXI6_9BACT tRNA epoxyqueuosine(34) reductase QueG OS=Lentimicrobiaceae bacterium OX=2026756 GN=queG PE=4 SV=1
MKDQLNKFIIDEAKKLGFFDCGISKAEELTDDKIRMEKWLLEAGNGEMSYLDRNKEKRYNPKLLVENSKSVITVLYNYFPKDKLPEKDNFKIAKYAYGTDYHYVIKEKLNSLVKIIETKAGKYNTRVFVDSAPVMDRAWARKSGLGFVGKNTMLINKKGGSFFFIGNIITELELNYSNTEITKDFCGNCTKCIDACPTQAITEFNVDSKKCISYLTIEYRGDLDTKFKQKAKNWMFGCDICQDVCPWNRFSTQHNEPLFNPSSDLKAMTKEKWKVLEKIEFNKLFKGSAVNRTRYKGLKRNIDSLT

SEQ ID NO: 77737 - protein, 322 aa, unidentified
  source 1..322: note = Lentimicrobium saccharophilum
  REGION 1..322: note = tr|A0A0S7BVF5|A0A0S7BVF5_9BACT Epoxyqueuosine reductase OS=Lentimicrobium saccharophilum OX=1678841; GN = queG PE=3 SV=1
MNLRTELTQLIKTRAGELGFSFCGISRARRLDEEASRLEQWLKEGRHGKMAYMENHFDKRLDPRLLVDGARSVVSLLINYYPSAAEKYTSPLKVSKYAWGADYHTVIREKLYVLTGLLQEKAGEFNFRVFTDSAPVLDRAWAVNAGLGWIGNNTMMITRRHGSFFFIAEIITDLEFDYDQPFGGNYCGDCTRCIDACPTGAIIGPRQLDASRCISYLNIELKDEIPAEFNGKVNDWIFGCDICQDVCPWNRFSLANTEVQFSPAGEWVEWSRDAWEHLEKPVFGSVFGKSALKRAGFKKLKNNVTFAGHSFIDESGYGKDSD

SEQ ID NO: 77738 - protein, 341 aa, Lentisphaera araneosa
  REGION 1..341: note = tr|A6DLP8|A6DLP8_9BACT Iron-sulfur cluster-binding protein OS=Lentisphaera araneosa HTCC2155 OX=313628; GN = LNTAR_05306 PE=4 SV=1
MSKFDIKTLAQQCGALSVACIDLNDAEFQKALKKHGEEQAQWLAQGYGADMDYLERMLADKIDLQNTFPGANSAIIITFTNKWGMEEAEHPFPEVDPNALVGYISGYAKEQDYHRTGHEILTSIHESLQEQVGEFEAYPAVDTKPVFERFLAAYAGLGIIGPNDLLRTPERDVRVFIGTLFCTEKIAELKLKPEFAFPCHFCRACEKRGCPTGAIKEGQEFDSRLCISYLTIEKKGLLNSSERNLMEDWLFGCDWCSVVCPPKEKEDQRIPVDLEWLMKSSAGEIRRLIKGSAVEYAGVQKLRRNAIAILRKSQDPRAEELLTWCAKNMQSEMLLKQITCD

SEQ ID NO: 77739 - protein, 391 aa, unidentified
  source 1..391: note = Lentisphaerae bacterium
  REGION 1..391: note = tr|A0A3M0ZN90|A0A3M0ZN90_9BACT DUF1730 domain-containing protein OS=Lentisphaerae bacterium; OX = 1932692 GN=D6820_00190 PE=4 SV=1
MTGRFDAHLIIVAETPERFSSVPREYFIQCQKLKTVTTQLSAQQLIHLCREAGFDDAGCTTPEIPEQVQRHALAISRAGFFDELPYLQRHLHDGVSPATVLSGVNTVIVTVLHYNLPASATAPAGSPAIARYACFRDYHRVFKRLHRNVLKKLSAMGAQARAFSDTTPFSERTFAIKARLGNLMRNGMFCHHRFGPRVFLGCILTDLRCDDLPESTPDASVLHPHCHNCDACIRHCPTGALRHGLPPAVDTRRCLSSLTIENRGPVPASLQEKIRYQLFGCDRCLDVCPIQDAYQSEEFPMQSPLFPPRLPQAWDPVQFLAECIDDERFRQRFDGTVLRRPGQWGLIRNALIVCTNLHLSAAVPLIETLLQRNDLPHWLRHLAVASLAELS

SEQ ID NO: 77740 - protein, 302 aa, unidentified
  source 1..302: note = Lentisphaerae bacterium
  REGION 1..302: note = tr|A0A1G1A4V8|A0A1G1A4V8_9BACT tRNA epoxyqueuosine(34) reductase QueG OS=Lentisphaerae bacterium RIFOXYC12_FULL_60_16 OX=1798582 GN=A2498_08435; PE = 4 SV=1
MVPDIPTLMAALRAEHAGQGNAAFGIATAGPSQTQDRFRQWIDRGIPPGIDYLKRHIPLRADPDTLLSGVRSILAIAAPYPVNPDPAAGISTYARCRDYHDILRARLRRFARIIEQHDPGTKCRTCVDSAPLAEREWALRAGLGWRGRQGHLVTASGCSVVLGFLLTRTVLPPTGTIPDQCGTCTRCRDACPTQAIGRDGLINPSRCISYLTIEHSGDIPESFHTAIGRRLFGCDCCTASCPWNRQSDHPPSHDFAFREMPSAHDLLAMDDTTFKARYADTPLIRAGLKRLQRNAAIVIRNT

SEQ ID NO: 77741 - protein, 310 aa, unidentified
  source 1..310: note = Lentisphaerales bacterium
  REGION 1..310: note = tr|A0A524MXS2|A0A524MXS2_9BACT Epoxyqueuosine reductase OS=Lentisphaerales bacterium OX=2448604; GN = E4H02_06665 PE=4 SV=1
MTTPEQLAAELKALAADAGFSACGITSAAPFEEYIEALDKLTTRFQGTIPLYERMRTKSDPRALAPWARSIIVCVRRYGKYKIPKHGVGHIGKNYLFDSRCGGCPDHGMARRMKAGLEQLGLRVKTGGIPDRSAAVRSGIAGIGRNCFAYTSVGSWINIHSWLVDVELPADRPVVRSPCPEGCTVCIDACPTGALVEPGVMRMDRCIAYLSYEAPEPVDPDLWNRMGPWVYGCDVCQDVCPLNRGKWEELESADWLGEIEELLAPEALAGMTQAMFESKIHPMFWYIPKTNIARWHRNAERAVRSTASPL

SEQ ID NO: 77742 - protein, 332 aa, unidentified
  source 1..332: note = Lentisphaeria bacterium
  REGION 1..332: note = tr|A0A3D1K8N9|A0A3D1K8N9_9BACT 4Fe-4S ferredoxin-type domain-containing protein OS=Lentisphaeria bacterium OX=2053569 GN=DET40_12420 PE=4 SV=1
MQAGKNSFEKFLREAKDTLGFCAVSALSMNSDTYPRLLERLKEAYVADGKVTHDWPGYMQRTSGKRADPRTVFPWAKSLAVISMPFNGIPINNNFLPEAAEDCIAGLVAGYAGRIDYHTFLQDNIYIFSAALKKYLGKDFRSEIFVDTKPVAEKSLAAFSGLGAIGLNSCLLCKGEGSGTCLGILAMDIDLPETEPVDFDAPCTTCGKCVERCPTGAITGKPGVFIYKKCRSYLTMEKKGVLEKDEAVLLGDWIFGCDICTSLCPGSHPMTPIKADLEWLLLEKDSIVKDVIKSTALEYPGLKLLRRNALAVLENRDSSESHELARKFSSIG

SEQ ID NO: 77743 - protein, 370 aa, unidentified
  source 1..370: note = Lentisphaeria bacterium
  REGION 1..370: note = tr|A0A3D1K2I3|A0A3D1K2I3_9BACT Uncharacterized protein OS=Lentisphaeria bacterium OX=2053569; GN = DET40_06310 PE=4 SV=1
MNSIKESLRAYSAEIGLDLIGVTTPDPFERMISELQLREEHYRGRYAYRIDTWRKFANPKEMLPEAKSIVVIGFYYLADEKPVPGLNGRMGRIVSYGHLGILKRARLMCAFLRNHGFKAVMGAHRKEAAVRAGLGAIGKNNLVCNPKYGGWVAYQSIITDADIEKDQPFEKDLCGDCRLCMEACPTGALYEPYRVDPRRCVTCLLTSREVSEENLPKMGTSILGCDICLEACPRNKGLEPKRDIECLLPDGIGTQPPLRRMLDFTEESFQDELISKIQDKISDKKLLNLLMKSRLIRNTASYVMKKFLKGREMLPETFVHASGNMMVYKRNAIVAAGNLGDPELLPDIRRFKDDPMLGSYARWAERKMMK

SEQ ID NO: 77744 - protein, 380 aa, Leptolinea tardivitalis
  REGION 1..380: note = tr|A0A0N8GMA3|A0A0N8GMA3_9CHLR 4Fe-4S ferredoxin-type domain-containing protein OS=Leptolinea tardivitalis OX=229920 GN=ADM99_01270 PE=4 SV=1
MSTFITANEIISITSRHGFVLCGAASTDPLPEFDRYLDWIKAGYQGTMHFLEDPKGMKSRSNPEQLFPGSMSVLVLGARYTIDRLTESPFPLSGRIASYAWGKDYHDVLQHRAELVMSDISDSLGKPVENFVAVDSSPILEKPLAKRARLGWTGNNSLLIHPRLGSFFFLTNIFLKEKLDPIFNNLYGSCGTCHRCIDACPTACILPGGLLEARRCISYLTIEHRGIIPVELRKSMGNWIYGCTICQAVCPWNRKPGNNYVLPEFEAADERVIFPDLVEIVHLSDDEFKSRFSGTSLKRLKRSRLVRNAAVALGNSGQLDAVKPLGWLLENEPDPVIRCHAAWGLGQIRTSKARTILSVRLTREIDSSVQSEIRQALDLP

SEQ ID NO: 77745 - protein, 134 aa, unidentified
  source 1..134: note = Leptolyngbya antarctica
  REGION 1..134: note = tr|A0A2W4VQN6|A0A2W4VQN6_9CYAN Epoxyqueuosine reductase (Fragment) OS=Leptolyngbya antarctica OX=268115; GN = DCF17_19385 PE=4 SV=1
ASHCGTCTRCLEACPTGAITQPYVVDANRCIAYHTIENRAETLPETIVPHLQNWVAGCDICQDVCPWNQRFAQPTPAAELQPYPGNLAPSLDDLATLSEAEWDQRFRASALRRIKPAMWRRNAQAAQQNHPESP

SEQ ID NO: 77746 - protein, 194 aa, unidentified
  source 1..194: note = Leptolyngbya antarctica
  REGION 1..194: note = tr|A0A2W4W3B8|A0A2W4W3B8_9CYAN Epoxyqueuosine reductase (Fragment) OS=Leptolyngbya antarctica OX=268115; GN = DCF17_13150 PE=4 SV=1
MTPSVPLPDRQAVIDQALGLGFDLVGIAAVETAPSAAETAAVGHLQTWLNQGHQAAMGWMDNPRRQDIRQVLPGARSLVCVALNYYTPHRHSADPRHGKISRYAWGRDYHRVLHKRLKALADWLIAAGEGAIQVRHYADTGPVQDKAWAQQAGLGWVAKNGNLITRQYGSWVFLGELVTTLALAPDPPHASHCG

SEQ ID NO: 77747 - protein, 303 aa, unidentified
  source 1..303: note = Leptolyngbya boryana
  REGION 1..303: note = tr|A0A1Z4J9W6|A0A1Z4J9W6_LEPBY Epoxyqueuosine reductase OS=Leptolyngbya boryana NIES-2135 OX=1973484; GN = queG PE=3 SV=1
MTLTEEIKQKAIELGFHKVGIASVTDPAQSSAIQALQNWLDRGFQADMAWMANPKRQNIRELVPDARSMICVALNYHTAQQRPAGKEYAKISRYGWGRDYHRILHKKLKAFSIWLEQNGAQTRYFADTAPVQDKFWAQQAGLGWIAKNGNLITRDYGSWVFLGGVVTNLDLAIDQPHTQHCGTCTRCIDACPTDAITEPFVIDANRCIAYHTIENRAENLPEMDLKGWVAGCDICQDVCPWNQRFAQETDVQDFQPRSWNIAPTLKELAEISEAEYDRRFTGSALRRIKIGMLRRNAKANLRE

SEQ ID NO: 77748 - protein, 322 aa, unidentified
  source 1..322: note = Leptolyngbya foveolarum
  REGION 1..322: note = tr|A0A2W4WKE8|A0A2W4WKE8_9CYAN Epoxyqueuosine reductase OS=Leptolyngbya foveolarum OX=47253 GN=queG PE=3; SV = 1
MNDATKSPLDSEAIKQKAIALGFHQVGIASISQPPSSAEKTAKQHLQSWLAAGYQADMAWMSSAKRQDIRQIVPDAKSVVCVALNYYTSHQRPEGSQYAKISRYGWGRDYHRVLTKKLKQLARWMQESEAGIEARLYADTGPVQDKFWAQQAGIGWIAKNGNVITRKYGSWVFLGEIITNAALAADQPHSAHCGSCTRCLSACPTEAIRAPGVVDANRCIAYHTIENRAEELPGAIAQNLENWVAGCDICQDVCPWNQRFAQETDEAAFQPYRQNIAPTLESLSQITEADWNERFPASALRRIKPEMLRRNARAAMQTHSEE

SEQ ID NO: 77749 - protein, 309 aa, unidentified
  source 1..309: note = Leptolyngbya frigida
  REGION 1..309: note = tr|A0A2T1E1T8|A0A2T1E1T8_9CYAN Epoxyqueuosine reductase OS=Leptolyngbya frigida ULC18 OX=2107698 GN=queG; PE = 3 SV=1
MPLDTQIKQKALELGFHKVGIAAIAPDAAAPETHLQTWLNNGYNADMTWMENPKRQDLRQIMPDVQSVICVALNYYTPASRPDSHTTAKIARYGWGRDYHKVLHKKLKALTVWLCHQGEAIQARYYADTGPVQDKVWAQRAGIGWIAKNGNVITREYGSWVFLGEVLTNLALPPDRPHTAHCGTCTRCMEACPTNAIPTPYVVDANRCIAYHTIENRAATLPEAIAPHLHGWVAGCDICQDVCPWNQRFAQPTNVADFQPHPWNLTSTLPALATITEEDYDRQFTGSALRRIKPWMLRRNAQANLESLQ

SEQ ID NO: 77750 - protein, 326 aa, Leptolyngbya sp.
  REGION 1..326: note = tr|A0A2W6Z0D9|A0A2W6Z0D9_9CYAN Epoxyqueuosine reductase OS=Leptolyngbya sp. OX=47254 GN=queG PE=3 SV=1
MAEAAGLPDRQAVIDQALALGFHLVGIVAVEPEPSPAETAAVGHLQTWLDQGHQADMDWMANPRRQDIRQVLPGARSLICVALNYYTPHRHSQNPNHGKISRYAWGRDYHRVLHKRLKVLADWLTTAGEGTVQARYYADTGPVQDKAWAQQAGLGWIAKNGNLITRQYGSWVFLGELITTLSLAPDAPHTAHCGTCTRCLEACPTGAITQPYVVDANRCIAYHTIENRDAALPEAIAPHLQNWVAGCDICQDVCPWNQRFAQPTTVDDFQPRPGNLTPNLDDLANLSEADWDSRFRASALRRIKPAMWRRNAQAVQKWSGAPNADP

SEQ ID NO: 77751 - protein, 324 aa, Leptolyngbya sp.
  REGION 1..324: note = tr|K9PZ59|K9PZ59_9CYAN Epoxyqueuosine reductase; OS = Leptolyngbya sp. PCC 7376 OX=111781 GN=queG PE=3 SV=1
MSKKSISEQTRLIKAQGLELGFNKTGIAAIAPEDSENLERLNDWLTKGFQADMAWMASPKRQDIQLCLSEVKSVISVALNYYTDHQHSDDPAIAKISRYGWGRDYHRVLTKKLKAFCHWLSIEFPGDRHRFYVDTGPVQDKIWAQRAGLGWQAKNSNVITREYGSWVFLGEILTTLELEIDKPHTNHCGTCTRCLDACPTGAIAEPYVVDANRCIAYHTIENRAEDLPETIKPHLQNWVAGCDICQDVCPWNQRFAKETDVTDFQPYPKNLAPKLTELADITDEEWGDRLIGSALRRIKPWMWRRNAKANLEAQQKTSPTDGEG

SEQ ID NO: 77752 - protein, 329 aa, unidentified
  source 1..329: note = Leptolyngbya valderiana
  REGION 1..329: note = tr|A0A166V659|A0A166V659_9CYAN Uncharacterized protein OS=Leptolyngbya valderiana BDU 20041 OX=322866; GN = AY599_13940 PE=4 SV=1
MRREAEMRAWLARGRHGSMAYLARHADLKADPSQLLDGATCAVMVADLYATRDDEPDDVPDGRGRIARYARGGDYHQIMKKRLHALCDDLASRWPESRTRAFVDTAPVHEREMALAAGLGWIGKHTLLIHPKMGSWMLLGGVLTTLELEVRQSEEPDHCGTCTRCIDACPTDAITPYSVDASRCISYLTIERREPIEPDLHRGMGAWIFGCDVCQEVCPHNSPRSVDVGEANPAYAGDRSSFDLLEVLGWDEGARRAAFAKSAMKRAKLAMMRRNAVIAAGNEIRRLGPGDDVATKLVRGLREVAGDAAADQELRTLAMRTLEDLGQSL

SEQ ID NO: 77753 - protein, 328 aa, Leptonema illini
  REGION 1..328: note = tr|H2CJ63|H2CJ63_9LEPT 4Fe-4S ferredoxin-type domain-containing protein OS=Leptonema illini DSM 21528; OX = 929563 GN=Lepil_1312 PE=4 SV=1
MVPLVSPLSHELATEAIALARQQGFDLVGFTDLHISEEEKQHFRSFVEEGRPAEMSWFSRHQELRLNPGRLLAYESTDETDEVSAQSALVLGMLYRDPDYDRALEDSRFRIARYAVGRDYHKVMKKRAAPLTALFEKAGIQARVCVDSAPLPEKLLARKAGLGWQGKHTNLIHPEKGSFFALAVILLSASTPASAMNPELADLCRSCNLCIEACPTGALEPYRIEPRKCLSYITIESKEDRHRQADRRQGWVFGCDICQEVCPYNRSPRGRRAIRSEPEFAPRPVIYAMLNESPDEAVWEETAGMALRRVSLEQMQFNYSFVKEAGTE

SEQ ID NO: 77754 - protein, 318 aa, unidentified
  source 1..318: note = Leptospira adleri
  REGION 1..318: note = tr|A0A5F2CMG4|A0A5F2CMG4_9LEPT tRNA epoxyqueuosine(34) reductase QueG OS=Leptospira adleri; OX = 2023186 GN=queG PE=4 SV=1
MIESKEIISELAPLIEECGFDLYGICEAAIPEEDQKNILTWVKDGKHGKMDWYPKNMDLRLQFSNLGFEPKSVIALGTLYNDPEYDGICKTMSFRFSRYAIGEDYHRVLRRIAKPLVSELKKKFPNHRFRQGVDSLPVPEKVLAREAGLGWQAKNTNLIHPELGSFFFITVILTDLPISVANVPLKDRCGTCTACIDACPTNALTPYRIDAGKCISHHTLEDHSPKISNSFEWIAGCDICQDVCPWNAVKARKKGIQTKREEFRARSVFKENPNSILDLDKVGFNRVFGDSAISRMNFEMFRRNVELAKEWATKRGTL

SEQ ID NO: 77755 - protein, 318 aa, unidentified
  source 1..318: note = Leptospira adleri
  REGION 1..318: note = tr|A0A2M9YLZ0|A0A2M9YLZ0_9LEPT tRNA epoxyqueuosine(34) reductase QueG OS=Leptospira adleri; OX = 2023186 GN=queG PE=4 SV=1
MIESKEIISELAPLIEECGFDLYGICEAAIPEEDQKNILTWVKDGKHGKMDWYPKNMDLRLQFSNLGFEPKSVIALGTLYNDPEYDGICKTMSFRFSRYAIGEDYHLVLRRIAKPLVSELKKKFPNHRFRQGVDSLPVPEKVLAREAGLGWQAKNTNLIHPELGSFFFITVILTDLPISVANVPLKDRCGTCTACIDACPTNALTPYRIDAGKCISHHTLEDHSPKISNSFGWIAGCDICQDVCPWNQVKARKKGIQTKREEFRARSVFKENPNSILDLDKEGFDRVFGDSAISRMNFEMFRRNVELAKEWVRKKETF

SEQ ID NO: 77756 - protein, 310 aa, Leptospira alexanderi
  REGION 1..310: note = tr|V6IB26|V6IB26_9LEPT Epoxyqueuosine reductase; OS = Leptospira alexanderi serovar Manhao 3 str. L 60; OX = 1049759 GN=queG PE=4 SV=1
MIESKEIIAEFKTLIENSGFDLYGICDAKIPQEDKENILTWVQEGKHGKMDWYPKNMDLRLNFKNLGFDPLSVIVLGVIYNDPEYVEVSKGMSFRFSKYAIGEDYHRVLRRLAKSVIQELKKKYPNHRFRQGVDSLPVPEKVLARLAGLGWKAKNTNLIHPDFGSFFFITVILTDLPIYTTQIQVKDRCGTCTACIDACPTGALKPYQIDAGKCISHHTLEDPSEKISDTHGWLAGCDICQDVCPWNRVKANKKGIRTSVEEFKVRSYFKGNSDSLLSLNEREFEEYFFDSAISRMSFKMYKRNIKMIKR

SEQ ID NO: 77757 - protein, 310 aa, unidentified
  source 1..310: note = Leptospira alstonii
  REGION 1..310: note = tr|T0H3W0|T0H3W0_9LEPT Epoxyqueuosine reductase; OS = Leptospira alstonii serovar Pingchang str. 80-412; OX = 1218564 GN=queG PE=4 SV=1
MIESKEIISEFKTLIENCGFDLYGICEAKIPNEDRENILSWVKEGKHGKMEWYPKNMDLRLDFKNLGFDPLSVIALGVIYNDPEYDEVSKGMPFRFSRYAIGEDYHRVLRRLAKPLIQELKRKYPNHRFRQGVDSLPLPEKVLARLAGLGWKAKNTNLIHPDFGSFFFITVILTDLPIHIAHIEIKDRCGTCTACIDACPTGALKPYQIDAGKCISHHTLEDSSDTISDTKGWIAGCDICQDVCPWNRVKAFKKGIRTELEEFKVRSYFKENPDSLLTLNEQEFKETFSDSAISRMSFRMYQRNVKKVSS

SEQ ID NO: 77758 - protein, 310 aa, unidentified; identical to SEQ ID NO: 77757
  source 1..310: note = Leptospira alstonii
  REGION 1..310: note = tr|M6CML2|M6CML2_9LEPT Epoxyqueuosine reductase; OS = Leptospira alstonii serovar Sichuan str. 79601; OX = 1218565 GN=queG PE=4 SV=1

SEQ ID NO: 77759 - protein, 312 aa, unidentified
  source 1..312: note = Leptospira andrefontaineae
  REGION 1..312: note = tr|A0A4R9HBQ5|A0A4R9HBQ5_9LEPT tRNA epoxyqueuosine(34) reductase QueG OS=Leptospira andrefontaineae OX=2484976 GN=queG PE=4 SV=1
MLLESKELLDELKDIAETNGFQLFGVGSAFVPTPDKENILHWVEEGRHGNMDWYPKNMNLRLELEGLGFKPESVIALGALYNDPEYENLDLPYRFSRYAMGEDYHSVLRKKASSLLEFLRKKFPNQKFRQGVDSLPVPEKILAREAGLGWIGKNTNLIHEEYGSFFFISLIFTDLPLRFVSVKAKDRCGTCRACIDSCPTGALEPYRIDARKCISYKTIEDRSENVDSLHGWVYGCDICQEICPWNQVKARKKGWKTEIGEFKIRDLFKKENLSDLNEKEFKTYFQDSAVSRISYKQMKRNLSVWERDSSKF

SEQ ID NO: 77760 - protein, 327 aa, unidentified
  source 1..327: note = Leptospira bandrabouensis
  REGION 1..327: note = tr|A0A4Z1B7U1|A0A4Z1B7U1_9LEPT tRNA epoxyqueuosine(34) reductase QueG OS=Leptospira bandrabouensis OX=2484903 GN=queG PE=4 SV=1
MTNPVYQIRSQIKTICEKEGFSLVGFAEAKIPEADLANLEEWISEGRFGNMDWFAKDHALGIRNRFENLGLTPRSAICLGFVYRSDASENILSLMESKVSRYALGSDYHILLKEKGNRILKILRTKFPNYKFRQSVDSLPVAEKILTRESGIAWQGKNTNLIHPKLGSYFFLSTILTDLELGGPDPEEIVTDHCGSCRKCIDICPTGALDAYKIDAKKCISYLTIEDRRETEATESFLKWDRKGWVYGCDLCQEVCPWNANVAKRNKVETTEPGFLPRAFWTDPEFTNKKALTKQEFDEYFKDSPIERIGFEIWNRNLIQKNEKEPN

SEQ ID NO: 77761 - protein, 317 aa, unidentified
  source 1..317: note = Leptospira barantonii
  REGION 1..317: note = tr|A0A2M9YYR4|A0A2M9YYR4_9LEPT tRNA epoxyqueuosine(34) reductase QueG OS=Leptospira barantonii; OX = 2023184 GN=queG PE=4 SV=1
MIESKEIISEFKSLIESSGFDLYGICDAKIPQEDRDNILSWVKEGKHGKMEWYPKNMDLRLDFKNLGFDPVSAIALGTLYNDPEYDEFSRKMSYRFSRYAIGEDYHRVLRRLAKPLIQALKTKYPNHKFRQGVDSLPVPEKVLARMAGLGWKAKNTNLIHPDFGSFFFITVILTDLPVHTVQIDVKDRCGTCTACIDSCPTGALEPYKIDAGKCISHHTLEDSSETISDTQGWLAGCDVCQDVCPWNHVKARKKGIQTKREEFKTRFYFKENPDSILDFNKEEFKTYFSDSAISRMSFEMFQRNANHIKDTFKNPKV

SEQ ID NO: 77762 - protein, 317 aa, unidentified
  source 1..317: note = Leptospira barantonii
  REGION 1..317: note = tr|A0A5F2AX28|A0A5F2AX28_9LEPT tRNA epoxyqueuosine(34) reductase QueG OS=Leptospira barantonii; OX = 2023184 GN=queG PE=4 SV=1
MIESKEIISEFKSLIESSGFDLYGICDAKIPQEDRDNILSWVKEGKHGKMEWYPKNMDLRLDFKNLGFDPVSAIALGTLYNDPEYDEFSQKMSYRFSRYAIGEDYHRVLRRLAKPLIQALKTKYPNHKFRQGVDSLPIPEKVLARMAGLGWKAKNTNLIHPDFGSFFFITVILTDLPVHTVQIDVKDRCGTCTACIDSCPTGALEPYKIDAGKCISHHTLEDSSETISDTHGWLAGCDVCQDVCPWNHVKARKKGIQTKRAEFKTRSYFKENPDSILEFNKEEFKTYFSDSAISRMSFEMFQRNANHIKDTFKNPKA

SEQ ID NO: 77763 - protein, 324 aa, Leptospira biflexa
  REGION 1..324: note = tr|A0A5F2C7P5|A0A5F2C7P5_LEPBI tRNA epoxyqueuosine(34) reductase QueG OS=Leptospira biflexa; OX = 172 GN=queG PE=4 SV=1
MKNPHSAYQSQIKSLCMKEGFSFVGFTKANIPKKDLQFLDTWISEKKFGNMDWFAKDHALSIRNRFENLGFTPRSAICLGFVYRSEKAERLVSQMDRKVSRYALGTDYHIILRKKGNQILKELRSLYPESHFRQSVDSLPIAEKILTRESGVVWQGKHTNLIHPKLGSYFFLSVILTDLELGESPPEERTTDHCGSCRRCLDVCPTNALEPYQLDASKCISYLTIEDRNATEVTDQFLKWDRRSWVYGCDLCQEVCPWNEGIAKRNQVETSEPGFLPREFWNDPSFPSKEFLSEAEFKEYFENSPIERIGVSIWNRNQVTKKNS

SEQ ID NO: 77764 - protein, 324 aa, Leptospira biflexa
  REGION 1..324: note = tr|B0SMS0|B0SMS0_LEPBP Putative iron-sulfur cluster-binding protein OS=Leptospira biflexa serovar Patoc (strain Patoc 1 / ATCC 23582 / Paris) OX=456481; GN = LEPBI_I271 6 PE=4 SV=1
MTMPPFPNQVQIKSLCTKVGFSLVGFTKAEIPKKDLSYLETWIAEKKYGNMDWFAKDHAIAIRNRFENLGFTPRSAICLGFVYRSEKAERLVSQMDRKVSRYALGTDYHILLRKKGNQILKELRSLYPESHFRQSVDSLPIAEKILTRESGVVWQGKHTNLIHPKLGSYFFLSVILTDLELGESPPEERTTDHCGSCRRCLDVCPTNALEPYQLDASKCISYLTIEDRNATEVTDQFLKWDRRSWVYGCDLCQEVCPWNEGIAKRNQVETSEPGFLPREFWNDPSFPSKEFLSEAEFKEYFENSPIERIGVSIWNRNQVTKKNS

SEQ ID NO: 77765 - protein, 310 aa, Leptospira borgpetersenii
  REGION 1..310: note = tr|A0A0E3B3G1|A0A0E3B3G1_LEPBO 4Fe-4S binding protein OS=Leptospira borgpetersenii serovar Ballum; OX = 280505 GN=LBBP_01528 PE=4 SV=1
MIESKEIISEFKTLIKNSGFDLYGICDAKIPQEDKENILTWVQEGKHGKMEWYPKNMDLRLDFKNLGFEPRSVIALGTIYNDPDYDDVALTMSYRFSRYAIGEDYHRVLRRLAKPLLQQLKQKYPNHHFRQGVDSLPVPEKVLARMAGLGWKAKNTNLIHPDFGSFFFITIILTDLPIYTTQIQVKDRCGTCTACIDACPTGALKPYQIDAGKCISHHTLEDPSEKISDTHGWLAGCDICQDVCPWNRVKASKKGIRTNVEEFKVRSYFKRNSDFLLSLNEQEFKEYFFDSAISRMSFQMFQRNIKMIKK

SEQ ID NO: 77766 - protein, 310 aa, Leptospira borgpetersenii; identical to SEQ ID NO: 77765
  REGION 1..310: note = tr|M3HIQ2|M3HIQ2_LEPBO Epoxyqueuosine reductase; OS = Leptospira borgpetersenii str. 200701203 OX=1193007; GN = queG PE=4 SV=1

SEQ ID NO: 77767 - protein, 327 aa, unidentified
  source 1..327: note = Leptospira bourretii
  REGION 1..327: note = tr|A0A4R9IIU3|A0A4R9IIU3_9LEPT tRNA epoxyqueuosine(34) reductase QueG OS=Leptospira bourretii; OX = 2484962 GN=queG PE=4 SV=1
MTNPIYQIRSQIKTICEKEGFSLVGFTEAKIPESDLEHLDQWISEGRFGNMDWFAKDHALGIRNRFENLGLTPRSAICLGFVYRSQAAEELLSQMESKVSRYALGSDYHSILKKKGNRILKILKEQFPNHKFRQSVDSLPVAEKILTRESGIAWQGKNTNLIHPKLGSYFFLSTILTDLELGGPDPEEIITDHCGSCRKCLDVCPTGALDAYKIDAKKCISYLTIEDRKETEATESFLSWDRKGWVYGCDLCQEVCPWNANVAKRNEVETIEPDFLPRAFWTDPDFINKKRLTKEEFDGYFKNSPIERIGFEIWNRNLQHLNEKESN

SEQ ID NO: 77768 - protein, 323 aa, unidentified
  source 1..323: note = Leptospira bouyouniensis
  REGION 1..323: note = tr|A0A4R9HSY9|A0A4R9HSY9_9LEPT tRNA epoxyqueuosine(34) reductase QueG OS=Leptospira bouyouniensis OX=2484911 GN=queG PE=4 SV=1
MATQSQYQSQIKSLCMKEGFSFVGFAKASIPEKDLTFLETWILEKKFGNMDWFAKDHAIAIRNRFENLGFAPKSAICMGFVYRSSEGETLLSQMERKVSRYALGTDYHIVLRNKGNLILKALRKLFPTNQFRQSVDSLPIAEKILTRESGVVWQGKHTNLIHPKLGSYFFLSIILTDLELGETPKEEITTDHCGSCRRCLDVCPTNALEPYQLDASKCISYLTIEDRMESEVTESFLKWDRKGWVYGCDLCQEVCPWNEGIAKRNQVETNEPSFLPKEFWNDPSFLSKEFLSEEEFKGYFEKTPIERIGVSIWNRNQVNKKNS

SEQ ID NO: 77769 - protein, 325 aa, unidentified
  source 1..325: note = Leptospira brenneri
  REGION 1..325: note = tr|A0A2M9XYV1|A0A2M9XYV1_9LEPT tRNA epoxyqueuosine(34) reductase QueG OS=Leptospira brenneri; OX = 2023182 GN=queG PE=4 SV=1
MINPIYQIRSQIKTICEVEGFSLVGFTEAKIPNSDLEHLEEWIQGNQFGSMSWFAKDHAVGIRNRFENLGLIPKSVICLGFIYRSSQGEELLSGMKSKVSRYALGSDYHIILKEKGNRILKTLRTEFPNYKFRQSVDSLPVAEKILTRESGIVWQGKNTNLIHPKLGSYFFLSTILTDLELGGPEPEEIVTDHCGSCRRCIDICPTGALEEYKMDARKCISYLTIEDQEETEATESFLEWDRKGWVYGCDLCQEVCPWNANVAKRNEVETTEPNFLPRDFWTDPNFISKKSLTKQEFAMYFKDSPIERIGFEIWNRNLKEKDDEE

SEQ ID NO: 77770 - protein, 325 aa, unidentified
  source 1..325: note = Leptospira brenneri
  REGION 1..325: note = tr|A0A5F1Z8C1|A0A5F1Z8C1_9LEPT tRNA epoxyqueuosine(34) reductase QueG OS=Leptospira brenneri; OX = 2023182 GN=queG PE=4 SV=1
MINPIYQIRSQIKTICEVEGFSLVGFTEAKIPNSDLEHLEEWIQGNQFGSMSWFAKDHAVGIRNRFENLGLIPKSVICLGFIYRSSQGEELLSGMKSKVSRYALGSDYHIILKEKGNRILKTLRTEFPNYKFRQSVDSLPVAEKILTRESGIVWQGKNTNLIHPKLGSYFFLSTILTDLELGGPASEEIVTDHCGSCRRCIDICPTGALEEYKMDARKCISYLTIEDREETEATESFLEWDRKGWVYGCDLCQEVCPWNANVAKRNEVETTEPNFLPRDFWTDPNFISKKSITKQEFEMYFKDSPIERIGFEIWNRNLKEKDDEE

SEQ ID NO: 77771 - protein, 312 aa, Leptospira broomii
  REGION 1..312: note = tr|T0F6I6|T0F6I6_9LEPT Epoxyqueuosine reductase; OS = Leptospira broomii serovar Hurstbridge str. 5399; OX = 1049789 GN=queG PE=4 SV=1
MFMESKELLSELESLVHKNGFQLFGAARAVVPESDKRNILEWVREGRHGNMDWYPRNMKLRLELEGLGFHPETVFVLGALYSDPEYEEIASKLPFRFSRYATGADYHAVLKKSARDVLTILRDRFPNNVFRQGVDSLPVPEKILAREAGLGWIGKNTNLLNEEIGSYFFLTVIFTDLPLRIASLTAKDRCGTCDECIRACPTGALSAYQIDARKCISYKTIEDRSPTVEGLHGWVYGCDICQEVCPWNRVKAKRRGTETEIEEFKVRDFFKTDGSAMLTLTDEEFQRQFSDAAVNRISYAQFRRNLITVNSE

SEQ ID NO: 77772 - protein, 327 aa, unidentified
  source 1..327: note = Leptospira congkakensis
  REGION 1..327: note = tr|A0A4Z1AAS9|A0A4Z1AAS9_9LEPT tRNA epoxyqueuosine(34) reductase QueG OS=Leptospira congkakensis OX=2484932 GN=queG PE=4 SV=1
MTNPIYQIRSQIKTICEEEGFSFVGFAEAKIPKADREYLDEWIREERFGNMHWFAKDHAVGIRNEFQNLGLVPRSAICLGFVYRSSAGEEIVSQMESKVSRYALGSDYHIILKEKGNRILKILRGEFPNYKFRQSVDSLPVAEKILTKESGIVWQGKNTNLIHPKLGSYFFLSTILTDLELGGPDPEEIITDHCGSCRKCLDVCPTNALEEYKMDASKCISYLTIEDREETKVTDSFLKWDRKGWVYGCDLCQEVCPWNANVAKRNKVETSEPEFLPRYFWTDPGFLEKKSLTKQEFDDYFKDSPIERIGFEIWNRNLQHLNEKESS

SEQ ID NO: 77773 - protein, 310 aa, unidentified
  source 1..310: note = Leptospira dzianensis
  REGION 1..310: note = tr|A0A5F2AN05|A0A5F2AN05_9LEPT tRNA epoxyqueuosine(34) reductase QueG OS=Leptospira dzianensis; OX = 2484905 GN=queG PE=4 SV=1
MIESKEIISEFKTLIERSGFDMYGICDAKIPQEDRENILTWVAEGRHGKMEWYPKNMDLRLDFKNLGFEPRSVLALGTIYNDPDYDDVAETMSFRFSRYAVGEDYHRVLRRLAKPLLQELKRKYPNHHFRQGVDSLPVPEKVLARKAGLGWKAKNTNLIHPDFGSFFFITVILTDLPIVSAQIEQKDRCGTCTVCIDACPTQALEPYRIDAGKCISHHTLEDSSPEISATHGWIAGCDICQDVCPWNRVKARKRGIQTRLEEFRVRSIFRENSDSLLDLNESEFRNHFSDSAISRMRFSMYERNVKMAKK

SEQ ID NO: 77774 - protein, 310 aa, unidentified
  source 1..310: note = Leptospira dzianensis
  REGION 1..310: note = tr|A0A5F2BBK2|A0A5F2BBK2_9LEPT tRNA epoxyqueuosine(34) reductase QueG OS=Leptospira dzianensis; OX = 2484905 GN=queG PE=4 SV=1
MIESKEIISEFKTLIERSGFDMYGICDAKIPQEDRENILTWVAEGRHGKMEWYPKNMDLRLDFKNLGFEPRSVLALGTIYNDPDYDDVAETMSFRFSRYAVGEDYHRVLRRLAKPILQELKRKYPNHHFRQGVDSLPVPEKVLARRAGLGWKAKNTNLIHPDFGSFFFITVILTDLPIVSVQIEQKDRCGTCTACIDACPTQALEPYRIDAGKCISHHTLEDSSPEISATHGWVAGCDICQDVCPWNRVKARKKGIRTRLEEFRVRSIFRENPDSILDLNESEFKNNFSDSAISRMSFSMYQRNAKMAKK

SEQ ID NO: 77775 - protein, 309 aa, unidentified
  source 1..309: note = Leptospira dzoumogneensis
  REGION 1..309: note = tr|A0A4Z1APY3|A0A4Z1APY3_9LEPT tRNA epoxyqueuosine(34) reductase QueG OS=Leptospira dzoumogneensis OX=2484904 GN=queG PE=4 SV=1
MLLESKELLDRLKHIAETNGFQLFGVGPASVPSEDKENILHWVGEGRHGNMEWYPKNMNLRLELEGLGFKPESVIALGALYNDPEYDNLDLPYRFSRYAMGEDYHSVLRKKASGLLEFLRKKFPNQKFRQGVDSLPVPEKILAREAGIGWIGKNTNLIHEEYGSFFFISLIFTDLPLRFVSIKAKDRCGTCTACIDSCPTGALEPYKIDARKCISYKTIEDRSENVDSLHGWVYGCDICQEICPWNQVKARKKGWKTEIGEFKIRDLFKEENLSDLDEKKFKVYFQDSAVNRISYFQLKRNLKAVSREK

SEQ ID NO: 77776 - protein, 320 aa, unidentified
  source 1..320: note = Leptospira ellinghausenii
  REGION 1..320: note = tr|A0A2P2DCJ6|A0A2P2DCJ6_9LEPT 4Fe-4S binding protein OS=Leptospira ellinghausenii OX=1917822; GN = LPTSP2_16140 PE=4 SV=1
MTPSPLPIQSQIKSLCEKEGFSFVGFTKAEIPEKDLEYLDHWISEKKHGNMDWFAKDHALSIRNRFENLGFKPTSAICLGFVYRSSEGENLLAHMKRKVSRYALGTDYHIVLRKKGNQILKELKALYPQNHFRQSVDSLPIAEKILTRESRIVWQGKHTNLIHPKLGSYFFLSIILTDLELGETNLEETTTDHCGSCRRCLDVCPTNALEPYELDASKCISYLTIEDRTHTEVTDSFLKWDKKGWVYGCDLCQEVCPWNEGIAKRNQVETLEPSFLPREFWKDRSFQEKQKLSEEEFQTYFQDSPIERIGLSIWNRNQST

SEQ ID NO: 77777 - protein, 318 aa, unidentified
  source 1..318: note = Leptospira elllisii
  REGION 1..318: note = tr|A0A2N0BCB2|A0A2N0BCB2_9LEPT tRNA epoxyqueuosine(34) reductase QueG OS=Leptospira elllisii; OX = 2023197 GN=queG PE=4 SV=1
MIESKEIISELAESIENSGFELYGICKAYVPEEDKTKILSWVKRGNHGRMDWYPKNMELRLEFKNLGFEAKSVIVLGTIYNDPDYDKISKTMSFRFSKYAIGEDYHRVLKKSTASLLRTLQEKYPHHRFRQGVDSLPVPEKVLAREAGLGWIGKNTNLIHPEFGSFFFLTVLLTDLPIHTVAISVKDRCGTCTACLDSCPTGALRPYEIDAGKCISHHTLEDRSDIVPETFGWIAGCDICQDVCPWNRVKAAKKGVRTLREEFKVRSVFRENPDSILEFNEEEFRRNFQDSAISRMNFSMFRRNVELCKRNVSREENR

SEQ ID NO: 77778 - protein, 312 aa, Leptospira fainei
  REGION 1..312: note = tr|S3VI39|S3VI39_9LEPT Epoxyqueuosine reductase; OS = Leptospira fainei serovar Hurstbridge str. BUT 6; OX = 1193011 GN=queG PE=4 SV=1
MFMESKELLPELESIAHKNGFQLFGAAKAIVPDVDKRNILEWVQDGRHGKMDWFPRNMKLRLELEGLGFQAETVFVLGALYSDPDYEEITSKLPFRFSRYATGTDYHTVLKKSARDVMDILRNRFPNNVFRQGVDSLPVPEKILAREAGLGWIGKNTNLLNEQIGSYFFLTVIFTDLPLRIASLSAKDRCGTCDECIRACPTGALAPYQIDARKCISYKTIEDRSPTVEGLHGWVYGCDICQEVCPWNRVKAKRRGAATEIEEFRVRDFFRSPGPIILALTEEEFQRQFSDAAVNRISYAQFRRNLISASSE

SEQ ID NO: 77779 - protein, 319 aa, unidentified
  source 1..319: note = Leptospira fletcheri
  REGION 1..319: note = tr|A0A4V3JCJ1|A0A4V3JCJ1_9LEPT tRNA epoxyqueuosine(34) reductase QueG OS=Leptospira fletcheri; OX = 2484981 GN=queG PE=4 SV=1
MILESKELLSELESLSRKNGFQLCGAAKAKVPDSDRENILEWVNSDLHGGMDWYPRNMQLRLEFSGLGFRPESVLVFASLYSDSEYEAIFGESPFRFSRYAVGEDYHTVLRRKAKEILDFLKRTFPNHSFRQGVDSLPVPEKVLAREAGLGWIGKNTNLINEEIGSFFFLTVVLTDVPLRIASLPAKDRCGTCDACLRACPTGALEAYKIDARKCISYKTIEDRSPSVQGLHGWVYGCDICQEVCPWNRVKAKKKGLETELPELKVRDFFRNKIESLETISEQEFDSLFRDSSVNRISYSQFRRNWKTLRSESFPRASS

SEQ ID NO: 77780 - protein, 319 aa, unidentified
  source 1..319: note = Leptospira fluminis
  REGION 1..319: note = tr|A0A4R9GMZ2|A0A4R9GMZ2_9LEPT tRNA epoxyqueuosine(34) reductase QueG OS=Leptospira fluminis; OX = 2484979 GN=queG PE=4 SV=1
MLLESKELLSELESLSRKNGFQLCGAAKAKVPDSDRENILEWVNSGLHGSMDWYPRNMQLRLEFSGLGFRPESVLVFASLYSDSEYESILGDSPFRFSRYAVGEDYHTVLRRNAKEILDFLRRSFPNRSFRQGVDSLPVPEKVLAREAGIGWIGKNTNLINEEIGSFFFLTVVLTDLPLRIASLPAKDRCGTCDACLRACPTGALESYKIDARKCISYKTIEDRSPSVGGLHGWVYGCDICQEVCPWNKVKARKKGVETELPEFKVRDFFRNKIESLETISEQEFDSLFRDSSVNRISYSQFRRNWKTIRFESFRGDSG

SEQ ID NO: 77781 - protein, 318 aa, unidentified
  source 1..318: note = Leptospira gomenensis
  REGION 1..318: note = tr|A0A5F1YFL0|A0A5F1YFL0_9LEPT tRNA epoxyqueuosine(34) reductase QueG OS=Leptospira gomenensis; OX = 2484974 GN=queG PE=4 SV=1
MIESKEIISELAEPIENSGFELYGICKAFVPEEDKTKILSWVKNGNHGRMDWYPKNMELRLEFKNIGFEARSVIVLGTIYNDPEYDKISKTMSFRFSKYAIGEDYHRVLKKSAASLLETLQKKYPHHRFRQGVDSLPVPEKVLAREAGLGWIGKNTNLIHPEFGSFFFLTVLLTDLPIHTVAVSVRDRCGTCTACLDACPTGALRPYEIDAGKCISHHTLEDRSDVIPDTFGWIAGCDICQDVCPWNRVKAAKKGVRTRREEFKARALFRENPDSILGFDEEDFRGNFGDSAISRMSFSMFRRNVELCKRSIEREKES

SEQ ID NO: 77782 - protein, 309 aa, unidentified
  source 1..309: note = Leptospira haakeii
  REGION 1..309: note = tr|A0A2N0BT40|A0A2N0BT40_9LEPT tRNA epoxyqueuosine(34) reductase QueG OS=Leptospira haakeii; OX = 2023198 GN=queG PE=4 SV=1
MLLESKELLNELKGIAETNGFQLFGVGPASVPSEDKENILHWVSEGRHGNMEWYPKNMNLRLELEGLGFKPESVIALGALYNDPEYENLDLPYRFSRYAMGEDYHSVLRKKASGLLEFLKKKFPNQKFRQGVDSLPVPEKILAREAGLGWIGKNTNLIHEEYGSFFFISLIFTDLPLTFVSVKAKDRCGTCTACIDSCPTKALEPYKIDARKCISYKTIEDRSENVDSLHGWVYGCDICQEICPWNGVKARKKGWKTEIGEFKIRDLFRKENLSNLDEKEFKTYFQDSAVNRISYFQLKRNLKVVRREK

SEQ ID NO: 77783 - protein, 325 aa, unidentified
  source 1..325: note = Leptospira harrisiae
  REGION 1..325: note = tr|A0A2N0AHY4|A0A2N0AHY4_9LEPT tRNA epoxyqueuosine(34) reductase QueG OS=Leptospira harrisiae; OX = 2023189 GN=queG PE=4 SV=1
MTNPLYQIRSQIKTICEKEGFSLVGFVDAKIPESDLANLEEWVQKKRYGNMDWFAKDHALGIRNRFQNLGLTPHSAICLGFVYRSNAGEELVSEMKSKVSRYALGSDYHIILKKKGNQILKILKEMFPNHKFRQSVDSLPVAEKILSRESGIAWQGKNTNLIHPKLGSYFFLSTILTDLELGGPDPEEIITDHCGNCRKCLDVCPTGALEAYQIDARKCISYLTIEDRNEAKATESFLDWNRKGWVYGCDLCQEVCPWNSNVAKRNEVETTEPDFLPRKFWTNPDFINKKGINKREFDVYFEDSPIERIGFEIWNRNLQQRDWKE

SEQ ID NO: 77784 - protein, 312 aa, unidentified
  source 1..312: note = Leptospira hartskeerlii
  REGION 1..312: note = tr|A0A2M9XBY2|A0A2M9XBY2_9LEPT tRNA epoxyqueuosine(34) reductase QueG OS=Leptospira hartskeerlii OX=2023177 GN=queG PE=4 SV=1
MLLESKELLDRLKNIAETNGFQLFGVGPASVPPEDKENILHWVEEGRHGNMDWYPKNMNLRLELEGLGFKPESVIALGALYNDPEYENLDLPYRFSRYAMGEDYHSVLRKKASDLLEFLRKKFPNQKFRQGVDSLPVPEKILAREAGLGWIAKNTNLIHEEYGSFFFISLIFTDLPLSFVSVKAKDRCGTCRACLDSCPTGALEPYKIDARKCISYKTIEDRSENVDFLYGWVYGCDICQEICPWNQVKARKKGWKTEIGEFKIRDLFKKENLSDLDEKEFKTYFQDSAVSRISYKQMKRNLTAWERDSTKF

SEQ ID NO: 77785 - protein, 323 aa, unidentified
  source 1..323: note = Leptospira idonii
  REGION 1..323: note = tr|A0A4R9M2G0|A0A4R9M2G0_9LEPT tRNA epoxyqueuosine(34) reductase QueG OS=Leptospira idonii; OX = 1193500 GN=queG PE=4 SV=1
MSLLSVELSRIKDICLSEGFDLVGFTPAVIPKQDIDNIQSWVDQQFFGKMDWFTKQISQEIRLEMRHLGFVPQSVIALGMVYRSEEAEEILEQSAVKVSRYALGDDYHQVLRNKGKNILKKLKQLYPQASFRQSIDSLPIPEKVFARLAGIGWMGKNTNIINEAFGSYFFLSMILTDYKWEIPEVAKVDHCGTCNACLDACPTGALFEPYKIDASKCISHHTIENREDDFSPTEFTANWLYGCDICQEVCPWNKNKAKRNRIQTTVKEFIPYKYWTENKNLMESPLSMEDFASIFRNSAVKRIGSKSWNRNLSSVLNHLIQEE

SEQ ID NO: 77786 - protein, 324 aa, unidentified
  source 1..324: note = Leptospira ilyithenensis
  REGION 1..324: note = tr|A0A4R9LLB7|A0A4R9LLB7_9LEPT tRNA epoxyqueuosine(34) reductase QueG OS=Leptospira ilyithenensis OX=2484901 GN=queG PE=4 SV=1
MISSELEKIKQFCLAQGFDLVGFCKAEIPEKDRNNLLSWVEHGFFGKMNWYTKEVSQEIRLDLKHLGFFPKSVLVLAVVYNSPAAEETIQAQPKKVSRYALGDDYHSVLRKKANPILKELKALYPNHSFRQSVDSLPVPEKVFARLAGIGWMGKNTNIINEELGSYFFISTILTDCEWEIPLQKEFDRCGSCRACLDACPTGALFEPYKINANKCISHHTIEDRNSLLNEETKLSDWIYGCDICQEVCPWNKTKARRNSVKTSMDEFLPYPFWKEEDLSGEKVFSDEEFQSKFKQSAIGRIGSLVWNRNLKSVLGSKEINRKEI

SEQ ID NO: 77787 - protein, 312 aa, Leptospira inadai
  REGION 1..312: note = tr|V6HA24|V6HA24_9LEPT Epoxyqueuosine reductase; OS = Leptospira inadai serovar Lyme str. 10 OX=1049790; GN = queG PE=4 SV=1
MFIESKELLPELESLAHKNGFQLFGAARATVPENDKRNILEWVREGRHGKMDWYPRNMKLRLELEGLGFSPETVFVLGALYSDPEYEEITSKLPFRFSRYATGADYHAVLKKSARELLAILRDRFPNNVFRQGVDSLPVPEKILAREAGLGWIGKNTNLLNEEIGSYFFLTVIFTDLPLRIASIGAKDRCGTCDECIRACPTGALSAYQIDARKCISYKTIEDRSPTVQGLHGWVYGCDICQEVCPWNRVKARRKGARTEIEEFKVRDFFKTDASAMRTLTEEEFRRRFSDAAVNRISYAQFRRNLITVNSE

SEQ ID NO: 77788 - protein, 312 aa, Leptospira interrogans
  REGION 1..312: note = tr|A0A4D8S528|A0A4D8S528_LEPIR tRNA epoxyqueuosine(34) reductase QueG OS=Leptospira interrogans OX=173 GN=queG PE=4 SV=1
MIESKEIISEFKTLIEGSGFDLYGICEANIPEEDRENILLWVKEHKHGNMEWYPKNMDLRLDFKNLGFDPQSVIVLGAIYNDPEYEKIRSGMTFQFSKYAVGEDYHRVLRKHAKPLIKALQKKYPNHHFRQGVDSLPVPEKVLARLAGLGWKGKNTNLIHPEIGSFFFITVILTDLPIYTTQVQIKDRCGTCTACIDACPTGALKPYQIDAGKCISHHTLEDGSEEIPDTYGWLVGCDICQDVCPWNRVKAFKKGIRTGLEEFKVRSYLKENPESILTLNEQEFEKTFSDSAISRMNFKMYQRNVNKLKNKI

SEQ ID NO: 77789 - protein, 312 aa, Leptospira interrogans
  REGION 1..312: note = tr|A0A0E2D4H9|A0A0E2D4H9_LEPIR Epoxyqueuosine reductase OS=Leptospira interrogans str. UI 12758; OX = 1049938 GN=queG PE=4 SV=1
MIESKEIISEFKTLIEGSGFDLYGICEANIPEEDRENILLWVKKHKHGNMEWYPKNMDLRLDFKNLGFDPQSVIVLGAIYNDPEYEKIRSGMTFQFSKYAVGEDYHRVLRKHAKPLIKALQKKYPNHHFRQGVDSLPVPEKVLARLAGLGWKGKNTNLIHPEIGSFFFITVILTDLPIYTTQVQIKDRCGTCTACIDACPTGALKPYQIDAGKCISHHTLEDGSEEIPDTYGWLVGCDICQDVCPWNRVKAFKKGIRTGLEEFKVRSYLKENPESILTLNEQEFEKTFSDSAISRMNFKMYQRNVNKLKNKI

SEQ ID NO: 77790 - protein, 329 aa, unidentified
  source 1..329: note = Leptospira jelokensis
  REGION 1..329: note = tr|A0A5F2BJ47|A0A5F2BJ47_9LEPT tRNA epoxyqueuosine(34) reductase QueG OS=Leptospira jelokensis; OX = 2484931 GN=queG PE=4 SV=1
MATHSSDQFQIKTICEKEGFSFVGFTKASLPDKDLQFLETWITEKKYGNMDWFAKDQAIAIRNRFENLGFVPRSAICLGFVYRSSESEALVSQMERKVSRYALGTDYHIVLRNKGNQILKELRNLFPTNHFRQSVDSLPIAEKILTRESGVVWQGKHTNLIHPKLGSYFFLSIILTDLELGETIPEETTTDHCGSCRKCLDICPTNALEPYQLDASKCISYLTIEDRVDPLVSESFLAWDRKGWVYGCDLCQEVCPWNEGIAKRNQVETNEPSFLPKEFWKDPTFQSKEFLSETEFKGYFEKSPIERIGVSIWNRNQVIKKDSNESIIS

SEQ ID NO: 77791 - protein, 325 aa, unidentified
  source 1..325: note = Leptospira jelokensis
  REGION 1..325: note = tr|A0A4Z1A567|A0A4Z1A567_9LEPT tRNA epoxyqueuosine(34) reductase QueG OS=Leptospira jelokensis; OX = 2484931 GN=queG PE=4 SV=1
MATHSSDQFQIKTICEKEGFSFVGFTKASLPDKDLQFLETWITEKKYGNMDWFAKDHAIAIRNRFENLGFVPRSAICLGFVYRSSESEALVSQMERKVSRYALGTDYHIVLRNKGNQILKELRNLFPTNHFRQSVDSLPIAEKILTRESGVVWQGKHTNLIHPKLGSYFFLSIILTDLELGETIPEETTTDHCGSCRKCLDICPTNALEPYQLDASKCISYLTIEDRVDPLVTESFLEWDRKGWVYGCDLCQEVCPWNEGIAKRNQVETNEPSFLPKEFWKDPTFQSKEFLSETEFKGYFEKSPIEWIGVSIWNRNQVNKKDSYE

SEQ ID NO: 77792 - protein, 312 aa, unidentified
  source 1..312: note = Leptospira johnsonii
  REGION 1..312: note = tr|A0A2P2CZF9|A0A2P2CZF9_9LEPT Epoxyqueuosine reductase OS=Leptospira johnsonii OX=1917820 GN=queG PE=4; SV = 1
MLLESKELLDELKDIAETNGFQLFGVAPAYVPSEDKENILHWVEEGRHGNMDWYPKNMNLRLELEGLGFKPESVIALGALYNDPEYENLDLPYRFSRYAMGEDYHSVLRKKASSLLEFLKKKFPNQKFRQGVDSLPVPEKILAREAGIGWIGKNTNLIHEEYGSFFFISLIFTDLPVRFVSVNAKDRCGTCRACIDSCPTGALEPYKIDARKCISYKTIEDRSEDVESLHGWVYGCDICQEICPWNQVKARKKGWKTEIGEFKIRDLFKKENLSDLDEKEFKSYFQDSAVSRISYKQMRRNLRVWERDSSKF

SEQ ID NO: 77793 - protein, 327 aa, unidentified
  source 1..327: note = Leptospira kanakyensis
  REGION 1..327: note = tr|A0A4R9HXT9|A0A4R9HXT9_9LEPT tRNA epoxyqueuosine(34) reductase QueG OS=Leptospira kanakyensis OX=2484968 GN=queG PE=4 SV=1
MTNPVYQIRFQIKTICEKEGFSLVGFTEAKIPNSDREHLDKWIQDERFGNMHWFAKDHAVGIRNDFQNLGLVPRSVICLGFVYRSTAGEEIVSQLESKVSRYALGSDYHIILKEKGNRILKTLRSEFPNFKFRQSVDSLPVAEKILTKESGIVWQGKNTNLIHPKLGSYFFLSTILTDLELGGPEPEEIITDHCGSCRKCLDVCPTGALEEYQIDARKCISYLTIEDRKETEATDSFLKWDRKGWVYGCDLCQEVCPWNANIAKRNKVETLEPEFLPRSFWTDPGFLEKKSLTKEEFDDYFKDSPIERIGFEIWNRNLRQKNEKKSN

SEQ ID NO: 77794 - protein, 320 aa, unidentified
  source 1..320: note = Leptospira kemamanensis
  REGION 1..320: note = tr|A0A4R9JU17|A0A4R9JU17_9LEPT tRNA epoxyqueuosine(34) reductase QueG OS=Leptospira kemamanensis OX=2484942 GN=queG PE=4 SV=1
MTITQPQDQSQIKSLCETEGFAFVGFTKAEIPEKDLRFLEKWISEKKHGNMDWFAKDHALAIRNRFENLGFKPTSAICLGFLYRSSEAEDLLPQMKRKVSRYALGTDYHIVLRKKGNQILKELKKLYPKHQFRLSVDSLPIAEKILTRESGMVWQGKHTNLIHPKLGSYFFLSVILTDLELGETNPQEKTTDHCGSCRRCLDICPTNALEPYQIDASKCISYLTIEDRSTAEVSDSFLAWDRRAWVYGCDLCQEVCPWNEGIAKRNQVETNEPSFLPREFWKDLSFQKKEFLTEDEFQEYFKDSPIERIGVSIWNRNQAT

SEQ ID NO: 77795 - protein, 312 aa, Leptospira kirschneri
  REGION 1..312: note = tr|M6I3L9|M6I3L9_9LEPT Epoxyqueuosine reductase; OS = Leptospira kirschneri serovar Bim str. 1051 OX=1049941; GN = queG PE=4 SV=1
MIESKEIISEFKTLIERSGFDLYGICEAKVPEEDREKILLWVNKGNHGKMEWYPKNMDLRLDFKNLGFDPQSVIVLGAIYNDPEYEEVQKGMTFRFSKYAVGEDYHRVLREHAKPLIKALQKKYPNHHFRQGVDSLPVPEKVLARLAGLGWNGKNTNLIHPEIGSFFFITVILTDLPMYTARIQVKDRCGTCTACIDACPTGALKPYQIDAGKCISHHTLEDSSEEIPDTYGWLAGCDICQDVCPWNRVKAFKKGIRTGLEEFKVRSYLKENPESILTLNEQEFQKNFSDSAISRMSFKMYQRNVNKLKKKI

SEQ ID NO: 77796 - protein, 312 aa, Leptospira kirschneri
  REGION 1..312: note = tr|A0A0E2B4H0|A0A0E2B4H0_9LEPT Epoxyqueuosine reductase OS=Leptospira kirschneri str. H1 OX=1049966; GN = queG PE=4 SV=1
MIESKEIISEFKTLIERSGFDLYGICEAKVPEEDREKILLWVNEGNHGKMEWYPKNMDLRLDFKNLGFDPQSVIVLGAIYNDPEYEEVQKGMTFRFSKYAVGEDYHRVLREHAKPLIKALQKKYPNHHFRQGVDSLPVPEKVLARLAGLGWNGKNTNLIHPEIGSFFFITVILTDLPMYTARIQVKDRCGTCTACIDACPTGALKPYQIDAGKCISHHTLEDSSEEIPDTYGWLAGCDICQDVCPWNRVKAFKKGIRTGLEEFKVRSYLKENPESILTLNEQEFQKNFSDSAISRMSFKMYQRNVNKLIKKI

SEQ ID NO: 77797 - protein, 317 aa, Leptospira kmetyi
  REGION 1..317: note = tr|A0A2M9XT06|A0A2M9XT06_9LEPT tRNA epoxyqueuosine(34) reductase QueG OS=Leptospira kmetyi; OX = 408139 GN=queG PE=4 SV=1
MIESKEIISEFKNLIESSGFDLYGICDAKIPQEDRDNILSWVKDGKHGKMEWYPKNMDLRLDFKNLGFDPVSVIALGTIYNDPEYDEFSRKMSYRFSRYAIGEDYHRVLRRLAKPLILALQTKYPNHKFRQGVDSLPVPEKVLARMAGLGWKAKNTNLIHPEFGSFFFITVILTDLPVHTAQIEVKDRCGTCTACIDSCPTGALEPYRIDAGKCISHHTLEDSSLKIENTHGWLAGCDVCQDVCPWNHVKARKKGIRTKREEFRTRSYFKENPDSVLDFNEQEFKNHFSDSAISRMSFDMFQRNANMLKNDLKNPKV

SEQ ID NO: 77798 - protein, 317 aa, Leptospira kmetyi
  REGION 1..317: note = tr|A0A5F1XIS5|A0A5F1XIS5_9LEPT tRNA epoxyqueuosine(34) reductase QueG OS=Leptospira kmetyi; OX = 408139 GN=queG PE=4 SV=1
MIESKEIISEFKNLIESSGFDLYGICDAKIPQEDRDNILSWVKDGKHGKMEWYPKNMDLRLDFKNLGFDPVSVIALGTIYNDPEYDEFSRKMSYRFSRYAVGEDYHRVLRRFAKPLIQALQTKYPNHKFRQGVDSLPVPEKVLARMAGLGWKAKNTNLIHPEFGSFFFITVILTDLPVHTAQIEVKDRCGTCTACIDSCPTGALEPYRIDAGKCISHHTLEDSSLKIANTHGWLAGCDICQDVCPWNHVKARKKGIRTKREEFRTRSYFKENPDSVLDFDEQEFKNHFSDSAISRMSFDMFQRNANMLKNDLKNPKV

SEQ ID NO: 77799 - protein, 324 aa, unidentified
  source 1..324: note = Leptospira kobayashii
  REGION 1..324: note = tr|A0A2P2DRG0|A0A2P2DRG0_9LEPT Epoxyqueuosine reductase OS=Leptospira kobayashii OX=1917830 GN=queG PE=4; SV = 1
MISSELEKIKQFCLAQGFDLVGFCKAEIPEKDRNNLLSWVEHGFFGKMNWYTKEVSQEIRLDLKHLGFLPKSVLVLAVVYNSPAAEETIQAQSKKVSRYALGDDYHSVLRKKANPILKELKSLYPSHFFRQSVDSLPVPEKVFARLAGIGWMGKNTNIINEDLGSYFFISTILTDCEWDVPLQEEFDRCGSCRACLDACPTGALFEPYKINANKCISHHTIEDRNTILNEETKLSDWIYGCDICQEVCPWNKTKARRNSVKTSVNEFLPYSFWKEEDLSGEKIYSDEEFQSKFKGSAIKRIGSLVWNRNLKSVLGSKETNRQEI

SEQ ID NO: 77800 - protein, 312 aa, unidentified
  source 1..312: note = Leptospira koniamboensis
  REGION 1..312: note = tr|A0A4R9J2G3|A0A4R9J2G3_9LEPT tRNA epoxyqueuosine(34) reductase QueG OS=Leptospira koniamboensis OX=2484950 GN=queG PE=4 SV=1
MLLESKELLDMLKDIAETNGFQLFGAGPASVPTPDKENILHWVGEGRHGNMDWYPKNMNLRLELEGLGFKPESVIALGALYNDPDYESLDLPYRFSRYAMGEDYHSVLRKKASGLMEFLKKKFPNQKFRQGVDSLPVPEKILAREAGLGWIGKNTNLIHEEYGSFFFISLIFTDLPLSFVSVQAKDRCGTCKACIDSCPTGALEPYKIDARKCISYKTIEDRSEDVDSLHGWVYGCDICQEICPWNQVKARKKGWKTEIGEFKIRDLFKKESLSDLDEKEFKTYFQDSAVSRISYKQMRRNLTVWERDSSKS

SEQ ID NO: 77801 - protein, 312 aa, unidentified
  source 1..312: note = Leptospira langatensis
  REGION 1..312: note = tr|A0A5F1ZPD4|A0A5F1ZPD4_9LEPT tRNA epoxyqueuosine(34) reductase QueG OS=Leptospira langatensis OX=2484983 GN=queG PE=4 SV=1
MVLESKELLDELRPIAFANGFQLFGVSPALVPSVDKENILHWVQEGRHGKMDWYPKNMNLRLELEGLGFKPESVIALGALYNDPEYDALDLPYRFSRYAMGEDYHSVLRRKALCLLDFLRTKYPNQKFRQGVDSLPVPEKILAREAGLGWIGKNTNLIHEEYGSFFFISLIFTDLPLQFVASPAKDRCGTCRACIDSCPTGALEPYRIDARKCISYKTIEDRSEDVDSLHGWVYGCDICQEVCPWNQVKARKKGWKTEMAEFKIRDLFKKDKLSDLNEKEFQVYFQDSAVSRISYKQMKRNLNTLGRESSGS

SEQ ID NO: 77802 - protein, 321 aa, unidentified
  source 1..321: note = Leptospira levettii
  REGION 1..321: note = tr|A0A2N0AUW7|A0A2N0AUW7_9LEPT tRNA epoxyqueuosine(34) reductase QueG OS=Leptospira levettii; OX = 2023178 GN=queG PE=4 SV=1
MALSHLPIQSQIKSLCEKEGFSFVGFTKAEIPEKDLAYLENWIAEKKHGNMDWFAKDHALSIRNRFENLGFKPLSAICLGFVYRSSEGEGLLAQMQRKVSRYALGTDYHIVLRKKGNQILKELKALYPQNHFRQSVDSLPIAEKILTRESKIVWQGKHTNLIHPKLGSYFFLSIILTDLELGDTNPLESTTDHCGSCRRCLDVCPTNALEPYQLDASKCISYLTIEDRTHTEVTGSFLQWEKKGWVYGCDLCQEVCPWNEGIAKRNQVETIETSFLPREFWKDPAFQKKQKLSEEEFQTYFQDSPIERIGVSIWNRNQVEK

SEQ ID NO: 77803 - protein, 321 aa, unidentified
  source 1..321: note = Leptospira levettii
  REGION 1..321: note = tr|A0A5F2D4G5|A0A5F2D4G5_9LEPT tRNA epoxyqueuosine(34) reductase QueG OS=Leptospira levettii; OX = 2023178 GN=queG PE=4 SV=1
MALSHLPIQSQIKSLCEKEGFSFVGFTKAEIPEKDLAYLENWIAEKKHGNMDWFAKDHALSIRNRFENLGFKPLSAICLGFVYRSSEGEGLLTQMQRKVSRYALGTDYHIVLRKKGNQILKELKALYPQNHFRQSVDSLPIAEKILTRESGVVWQGKHTNLIHPKLGSYFFLSIILTDLELGDTNPLESTTDHCGSCRRCLDVCPTNALEPYQLDASKCISYLTIEDRTHTEVTDSFLQWEKKGWVYGCDLCQEVCPWNEGIAKRNQVETMESSFLPREFWKDPSFQKKQKLSEEEFQTYFQDSPIERIGVSIWNRNQVEK

SEQ ID NO: 77804 - protein, 314 aa, Leptospira licerasiae
  REGION 1..314: note = tr|A0A5F2DZU2|A0A5F2DZU2_9LEPT tRNA epoxyqueuosine(34) reductase QueG OS=Leptospira licerasiae; OX = 447106 GN=queG PE=4 SV=1
MLLESKELLDELKDIAETNGFQLFGVAPASVPTPDKENILHWVEEGRHGNMDWYPKNMNLRLELDGLGFEPQSVIALGALYNDPEYENLDLPYRFSRYAMGEDYHSVLRKKASGLLEFLRKKFPNQKFRQGVDSLPVPEKVLAREAGLGWIGKNTNLIHEEYGSFFFISLIFTDFPLRFASIQAKDRCGTCTACINSCPTGALEPYKIDARKCISYKTIEDRSEIVDSLHGWVYGCDICQEICPWNQVKARKKGWKTEIAEFKIRDLFKKENLSDLDENEFKTYFKDSAVSRISYKQMRRNLTVWQRDSSEFRG

SEQ ID NO: 77805 - protein, 309 aa, Leptospira licerasiae
  REGION 1..309: note = tr|I0XMC2|I0XMC2_9LEPT Putative iron-sulfur cluster-binding protein OS=Leptospira licerasiae serovar Varillal str. VAR 010 OX=1049972 GN=LEP1GSC185_2803 PE=4; SV = 1
MLLESKELLDELKNIAETNGFQLFGVGPASVPSEDKENILHWVEEGRHGNMDWYPKNMNLRLELDGLGFKPQSVIALGALYNDPEYENLDLPYRFSRYAMGEDYHSVLRKKASGLLEFLRKKFPNQKFRQGVDSLPVPEKILAREAGLGWIGKNTNLIHEEYGSFFFISLIFTDFPLRFASIQAKDRCGTCTACINSCPTGALEPYKIDARKCISYKTIEDRSESVDSLHGWVYGCDICQEICPWNQVKARKKGWKTEIAEFKIRDLFKKENLSDLDENEFKTYFKDSAVSRISYFQLKRNLKVIGREK

SEQ ID NO: 77806 - protein, 321 aa, unidentified
  source 1..321: note = Leptospira macculloughii
  REGION 1..321: note = tr|A0A2N0CHP8|A0A2N0CHP8_9LEPT tRNA epoxyqueuosine(34) reductase QueG OS=Leptospira macculloughii OX=2023202 GN=queG PE=4 SV=1
MALSHLPIQSQIKSLCETEGFSFVGFTKAEIPEKDLAYLENWIAEKKHGNMDWFAKDHALSIRNRFENLGFKPLSAICLGFVYRSSEGEGLLAQMQRKVSRYALGTDYHIVLRKKGNQILKELKALYPQNHFRQSVDSLPIAEKILTRESGVVWQGKHTNLIHPKLGSYFFLSIILTDLELGDTNPMESTTDHCGSCRRCLDVCPTNALEPYQLDASKCISYLTIEDRTHTDVTDSFLQWEKKGWVYGCDLCQEVCPWNEGIAKRNQVETMESSFLPREFWKDPSFQKKQKLSEEEFQTYFQDSPIERIGVSIWNRNQVEK

SEQ ID NO: 77807 - protein, 323 aa, unidentified
  source 1..323: note = Leptospira macculloughii
  REGION 1..323: note = tr|A0A2N0CEE6|A0A2N0CEE6_9LEPT tRNA epoxyqueuosine(34) reductase QueG OS=Leptospira macculloughii OX=2023202 GN=queG PE=4 SV=1
MTNPIYQIRSQIKTICEKEGFSLVGFTEAKIPQSDLEHLDQWILEERFGNMDWFAKEHAVGIRNRFENLGLVPRSAICLGFIYRSNEGEKIVSQMQSKVSRYALGSDYHIILKKKGNRILKILKEHFPNHKFRQSVDSLPVAEKILTKESGIAWQGKNTNLIHPKLGSYFFLSTILTDLELGGPDPTEIITDHCGSCRKCLDVCPTGALEEYKIDARKCISYLTIEDRTDTEATDTFLHWDRKGWVYGCDLCQEVCPWNANVAKRNEVETTEPDFLPRPFWTNPNFIEKTSLTKEEFDSFFKDSPIERIGFEIWNRNLKQRES

SEQ ID NO: 77808 - protein, 310 aa, unidentified
  source 1..310: note = Leptospira mayottensis
  REGION 1..310: note = tr|A0A5F2ELC3|A0A5F2ELC3_9LEPT tRNA epoxyqueuosine(34) reductase QueG OS=Leptospira mayottensis OX=1137606 GN=queG PE=4 SV=1
MIESKEIISEFKTLIENSGFDLYGICNAEIPQEDKENILTWVQEGKHGKMDWYPKNMDLRLNFKNLGFDPLSVIVLGVIYNDPEYNEVSKGMSFRFSRYAIGEDYHRVLRRLAKSVIKELKKRYSNHRFRQGVDSLPVPEKVLARLAGLGWKAKNTNLIHPDFGSFFFITVILTDLPIYTTQIQVKDRCGTCTACIDACPTGALKPYQIDAGKCISHHTLEDPSERISDTHGWLAGCDICQDVCPWNRVRANKKGIRTNVEEFKVRSYFKGNSDSLLSLNEQEFKEYFFDSAISRMSFKMYQRNIKMIKR

SEQ ID NO: 77809 - protein, 310 aa, unidentified; identical to SEQ ID NO: 77808
  source 1..310: note = Leptospira mayottensis
  REGION 1..310: note = tr|A0A3S9KJT0|A0A3S9KJT0_9LEPT tRNA epoxyqueuosine(34) reductase QueG OS=Leptospira mayottensis 200901116 OX=1192864 GN=queG PE=4 SV=1

SEQ ID NO: 77810 - protein, 323 aa, Leptospira meyeri
  REGION 1..323: note = tr|A0A5F1ZKA0|A0A5F1ZKA0_LEPME tRNA epoxyqueuosine(34) reductase QueG OS=Leptospira meyeri; OX = 29508 GN=queG PE=4 SV=1
MTNPIYQIRSQIKTICEKEGFSLVGFTEAKIPQSDLEHLDQWILEERFGNMDWFAKEHAVGIRNRFENLGLVPRSAICLGYIYRSNEGEKIVSQMQSKVSRYALGSDYHIILKKKGNRILKILKEHFPNHKFRQSVDSLPVAEKILTKESGIAWQGKNTNLIHPKLGSYFFLSTILTDLELGGPDPTEIITDHCGSCRKCLDVCPTGALEEYKIDARKCISYLTIEDRTDTEATDTFLHWDRKGWVYGCDLCQEVCPWNANVAKRNEVETTEPDFLPRPFWTNPNFIEKTSLTKEEFDSYFKDSPIERIGFEIWNRNLKQRES

SEQ ID NO: 77811 - protein, 323 aa, Leptospira meyeri
  REGION 1..323: note = tr|A0A5F2CXX3|A0A5F2CXX3_LEPME tRNA epoxyqueuosine(34) reductase QueG OS=Leptospira meyeri; OX = 29508 GN=queG PE=4 SV=1
MTNPIYQIRSQIKTICEKEGFSLVGFTEAKIPQSDLEHLDQWILEERFGNMDWFAKEHAVGIRNRFENLGLVPRSAICLGFIYRSNEGEKIVSQMQLKVSRYALGSDYHIILKKKGNRILKILKEHFPNHKFRQSVDSLPVAEKILTKESGIAWQGKNTNLIHPKLGSYFFLSTILTDLELGGPDPTEIITDHCGSCRKCLDVCPTGALEEYKIDARKCISYLTIEDRTDTEATDTFLHWDRKGWVYGCDLCQEVCPWNANVAKRNEVETTEPDFLPRPFWTNPNFIEKTSLTKEEFDSYFKDSPIERIGFGIWNRNLKQRET

SEQ ID NO: 77812 - protein, 327 aa, unidentified
  source 1..327: note = Leptospira montravelensis
  REGION 1..327: note = tr|A0A4Z0ZH72|A0A4Z0ZH72_9LEPT tRNA epoxyqueuosine(34) reductase QueG OS=Leptospira montravelensis OX=2484961 GN=queG PE=4 SV=1
MTNPVYQIRSQIKTICEAEGFSLVGFAEAKIPESDLANLEKWIEEGRFGTMDWFAKDHALGIRNRFENLGLTPRSAICLGFVYRSNSGEKILSQMGSKVSRYALGSDYHILLKEKGNRILKTLRTEFPNFKFRQSVDSLPVAEKILTRESGIAWQGKNTNLIHPKLGSYFFLSTILTDLELGGPDPEEMVTDHCGSCRKCIDICPTRALDEYKIDAKKCISYLTIEDRKEIEATESFLKWDRKGWVYGCDLCQEVCPWNANVAKRNDVETTEPGFLPRSFWTDPQFIEKKELTKQEFDEYFRDSPIERIGFEIWNRNLKHKEKKELN

SEQ ID NO: 77813 - protein, 327 aa, unidentified
  source 1..327: note = Leptospira mtsangambouensis
  REGION 1..327: note = tr|A0A5F2DJZ1|A0A5F2DJZ1_9LEPT tRNA epoxyqueuosine(34) reductase QueG OS=Leptospira mtsangambouensis OX=2484912 GN=queG PE=4 SV=1
MTNPIYQIRSQIKTICEKEGFSLVGFTEAKIPEADLAHLEEWISEGRFGNMDWFAKDHALGIRNRFENLGLTPRSAICLGFIYRSNASEEILSQMESKVSRYALGSDYHIILKEKGNRILKTLRTKFPNHKFRQSVDSLPVAEKILTRESGIAWQGKNTNLIHPKLGSYFFLSTILTDLELGGPDPEEIITDHCGSCRKCLDVCPTGALDAYKIDAKKCISYLTIEDRRETEATETFLSWDRKGWVYGCDLCQEVCPWNANIAKRNEVETSEREFLPRAFWTNPEFTNKKTLTKQEFDEYFKDSPIERIGFEIWNRNLQHLNEKESN

SEQ ID NO: 77814 - protein, 312 aa, unidentified
  source 1..312: note = Leptospira neocaledonica
  REGION 1..312: note = tr|A0A2M9ZVW9|A0A2M9ZVW9_9LEPT tRNA epoxyqueuosine(34) reductase QueG OS=Leptospira neocaledonica OX=2023192 GN=queG PE=4 SV=1
MLLESKELLDELKDITETNGFQLFGVGPASVPSEDKENILHWVGEGRHGNMDWYPKNMNLRLELEGLGFKPESVIALGALYNDPEYENLDLPYRFSRYAMGEDYHSVLRKKASGLLEFLKKKFPNQKFRQGVDSLPVPEKILAREAGLGWIGKNTNLIHEEYGSFFFISLIFTDLPLSFVSVQAKDRCGTCRACIDSCPTGALEPYKIDARKCISYKTIEDRSENVDSLHGWVYGCDICQEICPWNQVKARKKGWKTEMGEFKIRDFFKKENLSDLDEKEFKTYFRDSAVSRISYKQMRRNLTVWERDSSKS

SEQ ID NO: 77815 - protein, 312 aa, Leptospira noguchii
  REGION 1..312: note = tr|M6VLB3|M6VLB3_9LEPT Epoxyqueuosine reductase; OS = Leptospira noguchii OX=28182 GN=queG PE=4 SV=1
MIESKEIISEFKTLIEGSGFDLYGICEAKIPEKDRENILLWVKEGNHGKMEWYPKNMDLRLDFKNLGFNPQSVIVLGIIYKDPEYEEVQKGMSFRFSKYAIGEDYHRVLKRHAKPIIQAFKKKYPNHHFRQGVDSLPVPEKVLARLAGIGWNGKNTNLIHPEIGSFFFITVILTDLPVYTVRVQVKDRCGTCTACIDACPTGALKPYKIDAGKCISHHTLEDLSEEIPNTYGWLAGCDICQDVCPWNRVKAFKKGVQTRLEEFKVRSYLKENPESILTLNEEEFQKTFSDSAISRMNFKMYQRNVNKIKKKI

SEQ ID NO: 77816 - protein, 312 aa, Leptospira noguchii
  REGION 1..312: note = tr|V6GT69|V6GT69_9LEPT Epoxyqueuosine reductase; OS = Leptospira noguchii str. Cascata OX=1193054 GN=queG; PE = 4 SV=1
MIESKEIISEFKTLIEGSGFDLYGICEAKIPEEDRENILLWVNEGNHGKMEWYPKNMDLRLDFKNLGFDPQSVIILGIIYKDPEYEEVQKEMSFRFSKYAIGEDYHRVLKRHAKPIIQALRKKYPNHHFRQGVDSLPVPEKVLARLAGLGWNGKNTNLIHPEIGSFFFITVILTDLPIYTVRVQVKDRCGTCTACIDACPTGALKPYQIDAGKCISHHTLEDLSEEIPDTYGWLAGCDICQDVCPWNRVKAFKKGVQTRLEEFKVRSYLKENPESILTLNEEEFQKTFSDSAISRMNFKMYQRNVNKIKKKI

SEQ ID NO: 77817 - protein, 327 aa, unidentified
  source 1..327: note = Leptospira noumeaensis
  REGION 1..327: note = tr|A0A4R9I1L7|A0A4R9I1L7_9LEPT tRNA epoxyqueuosine(34) reductase QueG OS=Leptospira noumeaensis OX=2484964 GN=queG PE=4 SV=1
MTNPVYQIRSQIKTICEKEGFSLVGFAEAKIPNADREHLDQWIQEERFGNMDWFAKDHAVGIRNDFQNLGLAPRSVICLGFVYRSSEGETILSQMESKVSRYALGSDYHLILKEKGNRILKILREKFPGFKFRQSVDSLPIAEKILTKESGIVWQGKNTNLIHPKLGSYFFLSTILTDLDLGGPEPEEIITDHCGSCRKCLDVCPTGALEEYQIDARKCISYLTIEDRSETEATESFLKWERKGWVYGCDLCQEVCPWNANVAKRNKVETTEPEFLPRSFWTDPEFLEKKSLTKEEFNEYFKDSPIERIGFEIWNRNLQQREKKESN

SEQ ID NO: 77818 - protein, 326 aa, unidentified
  source 1..326: note = Leptospira ognonensis
  REGION 1..326: note = tr|A0A4R9K929|A0A4R9K929_9LEPT tRNA epoxyqueuosine(34) reductase QueG OS=Leptospira ognonensis; OX = 2484945 GN=queG PE=4 SV=1
MDAFQPEIIKQLCIDSGFDLVGFAKPILPDFHREYLLSWVRDQKFGKMTWFPKEQSMEIRTDFRHLGFKPASMICLGMVYRSEWGESTLETLDSKVSRYALGEDYHEVLRKKAEPILRYLRQAFPKNYFRQSVDTLPIMEKVFAVKAGIGWMGKNTNVIHSELGSYFFISTILTDCPWLVVEPVPTDHCGSCTSCLDACPTGALTAPYQLDASLCISHHTIEDRDPIFETGVELFGWQYGCDICQEVCPWNQTKAKRNQIETKSQELLPKGIFAKVSGSLDLEMSEEDFRHHFKQTSIYRIGVDAWNRNVKKLREKRGDQSIKEAK

SEQ ID NO: 77819 - protein, 327 aa, unidentified
  source 1..327: note = Leptospira perdikensis
  REGION 1..327: note = tr|A0A4R9JI16|A0A4R9JI16_9LEPT tRNA epoxyqueuosine(34) reductase QueG OS=Leptospira perdikensis OX=2484948 GN=queG PE=4 SV=1
MTNPIYQIRSQIKTICEAEGFSLVGFTEAKIPNSDRKHLDEWIQEERFGEMVWFAKDHAVGIRNDFQNLGFVPKSVICLGFIYRSSQGEELLSQMESKVSRYALGSDYHLILKEKGNRILKTLREKFSGFKFRQSVDSLPVAEKILTRESGIVWQGKNTNLIHPKLGSYFFLSTILTDLELGGPDPEEIITDHCGSCRKCLDVCPTNALEAYQIDARKCISYLTIEDRKETEATDSFLEWDRKGWVYGCDLCQEVCPWNANVAKRNEVETSENEFLPRSFWTDPNFLEKESLTKQEFDVYFKDSPIERIGFEIWNRNLKQKKIKEAN

SEQ ID NO: 77820 - protein, 309 aa, unidentified
  source 1..309: note = Leptospira perolatii
  REGION 1..309: note = tr|A0A2M9ZMN4|A0A2M9ZMN4_9LEPT tRNA epoxyqueuosine(34) reductase QueG OS=Leptospira perolatii; OX = 2023191 GN=queG PE=4 SV=1
MVLESKELLPDLEKIAFQNGFQLVGAAKALVPNSDKKNILQWVQEGRFGTMNWYPKNMNLRLELEGLGFSPESVLVLGAVYYDEDSEAKLDRSKFRFSRYAMGEDYHSVLRKRTKSLLEVLRTRFPENQFRHGVDSLPVPEKVLAREAGIGWIGKNTNLIHEDFGSFFFLSTIFTDLPLRIESTVAKDRCGTCDLCIRACPTSALEPYRIDARKCISYRNIEDKSEEATSLHGWLYGCDICQEVCPWNRVKAKSRKVRTAIPEFKPKAHFIEEPEKLLRLTEDEFTSFFSDSAVLRIGFKKYRRNIENL

SEQ ID NO: 77821 - protein, 318 aa, unidentified
  source 1..318: note = Leptospira putramalaysiae
  REGION 1..318: note = tr|A0A4R9L283|A0A4R9L283_9LEPT tRNA epoxyqueuosine(34) reductase QueG OS=Leptospira putramalaysiae OX=2484984 GN=queG PE=4 SV=1
MIESKELISELSPLIEECGFDFYGISEAVIPETDRKNILTWVQEGKHGKMDWYPKNMDLRLHFKNLGFEPKSVIALGTLYNDLDYDTISKTMSFRFSRYAIGEDYHRVLRRMANPLLQELRKKFPSNQFRQGVDSLPISEKVLAREAGLGWQAKNTNLIHPEFGSYFFISVILTDLPISVAKISVKDRCGTCNACIDACPTNALAPYQIDAGKCISHHTLEDRSEKIPNTFGWIAGCDICQDVCPWNQVKARKKGIQTGREELKSRPIFKESPESILDLDQDGFESIFGDSAISRMNFKMFRRNVELAKEWALENKTF

SEQ ID NO: 77822 - protein, 321 aa, unidentified
  source 1..321: note = Leptospira ryugenii
  REGION 1..321: note = tr|A0A2P2E1Q8|A0A2P2E1Q8_9LEPT Putative iron-sulfur cluster-binding protein OS=Leptospira ryugenii OX=1917863; GN = LPTSP4_23550 PE=4 SV=1
MSIDQLSENDLHFKEFETLAYTQGFDLVGYTNWSITDEEKNYISKWVLDGKHGDMDWFAKPQSMEIRLEGKHLGFKPERVICLGMLYRSQTAEILSKTAKYKVSRYALGRDYHTVIRRQAKPLLQHLKTRHPGFHFRLSVDSLPIPEKAFARKSGIGWMGKNTNLIHPKLGSYFFLSTILTDLPFSYEPDMITDHCGSCRACMDACPTQALVAPYQLDASLCISHHNIESKKPMGEGNRERASWLYGCDICQEVCPWNAKVAERNGVETRVLDYAPKSIFTDPNQAVSKPMSPEEFQEIFSDSAIYRIGVDKWNENIKLVL

SEQ ID NO: 77823 - protein, 312 aa, unidentified
  source 1..312: note = Leptospira saintgironsiae
  REGION 1..312: note = tr|A0A2M9YF45|A0A2M9YF45_9LEPT tRNA epoxyqueuosine(34) reductase QueG OS=Leptospira saintgironsiae OX=2023183 GN=queG PE=4 SV=1
MLLESKELLDELKDIAEMNGFQLFGVGPASVPSGDKENILHWVGEGRHGNMDWYPKNMNLRLELEGLGFKPESVIALGALYNDPEYENLDLPYRFSRYAMGEDYHSVLRKKASGLLEFLKKKFPNQKFRQGVDSLPVPEKILAREAGLGWIGKNTNLIHEEYGSFFFISLIFTDLPLSFVSIQAKDRCGTCRACIDSCPTGALEPYKIDARKCISYKTIEDRSENVDSLHGWIYGCDICQEICPWNGVKARKKGWKTEIGEFKIRDLFKKENLSDLDEKEFKMYFQDSAVSRISYKQMKRNLSVWERDSSKS

SEQ ID NO: 77824 - protein, 310 aa, Leptospira santarosai
  REGION 1..310: note = tr|A0A2P1QXK5|A0A2P1QXK5_9LEPT Epoxyqueuosine reductase OS=Leptospira santarosai OX=28183 GN=XB16_3331; PE = 4 SV=1
MIESKEIISEFKTLIESSGFDLYGICDAKIPQEDKENILAWVREGKHGKMDWYPKNMDLRLNFKNLGFDPLSAIVLGTVYNDPEYDEVRKGMSFRFSRYAIGEDYHRVLRRLAKSLIQELKKKYPNHRFRQGVDSLPVPEKVLARLAGLGWKAKNTNLIHPDFGSFFFITVILTDLPIYTTQIQVKDRCGTCTACIDACPTGALKPYQIDAGKCISHHTLEDPSEKISDTHGWLAGCDICQDVCPWNRVKANKNGIRTNVEEFKVRPYFKVNSDSILSLNEREFNEYFFDSAISRMSFKMYLRNLKMLKR

SEQ ID NO: 77825 - protein, 310 aa, Leptospira santarosai
  REGION 1..310: note = tr|M6UUP9|M6UUP9_9LEPT Epoxyqueuosine reductase; OS = Leptospira santarosai str. ZUN179 OX=1049985 GN=queG; PE = 4 SV=1
MIESKEIISEFKTLIESSGFDLYGICDAKIPQEDKENILTWVREGKHGKMDWYPKNMDLRLNFKNLGFDPLSAIVLGTVYNDPEYDEVRKGMSFRFSRYAIGEDYHRVLRRLAKSLIQELKKKYPNHRFRQGVDSLPVPEKVLARLAGLGWKAKNTNLIHPDFGSFFFITVILTDLPIYTTQIQVKDRCGTCTACIDACPTGALKPYQIDAGKCISHHTLEDPSEKISDTHGWLAGCDICQDVCPWNRVKANKNGIRTNVEEFKARSYFKANSDSLLSLNEREFNEYFFDSAISRMSFKMYLRNLKMLKR

SEQ ID NO: 77826 - protein, 310 aa, unidentified
  source 1..310: note = Leptospira sarikeiensis
  REGION 1..310: note = tr|A0A4R9K184|A0A4R9K184_9LEPT tRNA epoxyqueuosine(34) reductase QueG OS=Leptospira sarikeiensis OX=2484943 GN=queG PE=4 SV=1
MVLESKELLNELKAIASENGFQLFGVADAQIPDPDKENILHWVEEGRHGNMNWYPRNMNLRLELEGLGFKPQSVIALGALYNDPEYENLDLTYRFSRYAMGEDYHSVLRKKASALMEFLQNSFPNQKFRQGVDSLPVPEKILAREAGIGWIGKNTNLIHEEYGSFFFISLIFTDLPLRSASLIAKDRCGTCTACIDSCPTAALSPYKIDARKCISYKTIEDRSESVENLHGWIYGCDICQEVCPWNQVKARKKGWKTEIQEFKIRDLFKQQGSLEKLEENEFRERFEDSAVNRVSYKQFRRNLETNRREK

SEQ ID NO: 77827 - protein, 309 aa, unidentified
  source 1..309: note = Leptospira selangorensis
  REGION 1..309: note = tr|A0A4R9FXK7|A0A4R9FXK7_9LEPT tRNA epoxyqueuosine(34) reductase QueG OS=Leptospira selangorensis OX=2484982 GN=queG PE=4 SV=1
MLLESKELLNELKDIAETNGFQLFGVGPASVPSADKENILHWVGEGRHGNMDWYPKNMNLRLELEGLGFKPESVIALGALYNDPEYENLDLPYRFSRYAMGEDYHSVLRKKASELLEFLKKKFPNQKFRQGVDSLPVPEKILAREAGLGWIGKNTNLIHEEYGSFFFISLIFTDFPLSFVSVQAKDRCGTCRACIDSCPTGALEPYKIDARKCISYKTIEDRSENVDSLHGWVYGCDICQEICPWNGVKARKKGWKTEIGEFKIRDLFKKENLSDLDEKGFKIYFQDSAVNRISYFQLKRNLKVVRREK

SEQ ID NO: 77828 - protein, 309 aa, unidentified
  source 1..309: note = Leptospira selangorensis
  REGION 1..309: note = tr|A0A5F2C776|A0A5F2C776_9LEPT tRNA epoxyqueuosine(34) reductase QueG OS=Leptospira selangorensis OX=2484982 GN=queG PE=4 SV=1
MLLESKELLNELKDIAETNGFQLFGVGPASVPSADKENILHWVGEGRHGNMDWYPKNMNLRLELEGLGFKPESVIALGALYNDPEYENLDLPYRFSRYAMGEDYHSVLRKKASDLLEFLKKKFPNQKFRQGVDSLPVPEKILAREAGLGWIGKNTNLIHEEYGSFFFISLIFTDLPLSFVSVQAKDRCGTCRACIDSCPTGALEPYKIDARKCISYKTIEDRSENVDSLHGWVYGCDICQEICPWNGVKARKKGWKTEIGEFKIRDLFKKENLSDLDEKGFKMYFQDSAVNRISYFQLKRNLKVVRREK

SEQ ID NO: 77829 - protein, 316 aa, unidentified
  source 1..316: note = Leptospira semungkisensis
  REGION 1..316: note = tr|A0A4R9FR32|A0A4R9FR32_9LEPT tRNA epoxyqueuosine(34) reductase QueG OS=Leptospira semungkisensis OX=2484985 GN=queG PE=4 SV=1
MVLESKELLSDLRNIASANGFQLFGVAKAFVPKSDQENILHWVQEGRHGKMDWFPKNMNLRLELEGLGFKPESVIALGALYNDPEYDALNLPYRFSRYAMGEDYHSVLRKKAADLLDFLRKNYPNQKFRQGVDSLPVPEKILAREAGLGWIGKNTNLIHEEYGSFFFISLIFTDLPLQYAASIAKDRCGTCRACIDSCPTGALEPYRIDARKCISYKTIEDRSETVDSLHGWVYGCDICQEICPWNQVKARKKGWKTEIEEFKIRDLFKKDKLSTLEEKEFKASFKDSAVSRISYKQMKRNLSSVTGLKPESPDNL

SEQ ID NO: 77830 - protein, 330 aa, Leptospira sp.
  REGION 1..330: note = tr|A0A2M8HQ12|A0A2M8HQ12_9LEPT tRNA epoxyqueuosine(34) reductase QueG OS=Leptospira sp. OX=178; GN = queG PE=4 SV=1
MNNNIIKFESVSEIQNSLHSIAIEAGFEMIGFTEARISEKDQTNIQSFIDNNYYGSMKWFPERQNIRLRFENLGFPIASCIVLGMVYKPSEESVKSCEVILDSISKYAWGQDYHQVLKDKAKPILEFLRSQFPNYKFRQAVDSLPIPEKILARDAGLGWIGKHTILINSNYGSYFFLTVILSEKVLHLIDTEKIAFKMPSKDRCGTCTACIDACPTNAIVNAYELDSNLCISHNTIELKDPSFDEATKNHGWVYGCDICQDVCPWNKTVARKKNIHSKIEEFKPIKFFSESSEIFHELDEQDFEHVFKDSAILRIGYKNWNRNIQQKDTF

SEQ ID NO: 77831 - protein, 310 aa, Leptospira sp.; identical to SEQ ID NO: 77765
  REGION 1..310: note = tr|M6E7Z7|M6E7Z7_9LEPT Epoxyqueuosine reductase; OS = Leptospira sp. serovar Kenya str. Sh9 OX=1242991; GN = queG PE=4 SV=1

SEQ ID NO: 77832 - protein, 318 aa, unidentified
  source 1..318: note = Leptospira stimsonii
  REGION 1..318: note = tr|A0A5E8TMQ5|A0A5E8TMQ5_9LEPT tRNA epoxyqueuosine(34) reductase QueG OS=Leptospira stimsonii; OX = 2202203 GN=queG PE=4 SV=1
MIESKELISELSPLIEECGFDFYGISEAVIPETDRKNILTWVQEGKHGKMDWYPKNMDLRLHFKNLGFEPKSVIALGTLYNDLDYDTISKTMSFRFSRYAIGEDYHRVIRRMANPLLQELRKKFPSNQFRQGVDSLPISEKVLAREAGLGWQAKNTNLIHPEFGSYFFISVILTDLPISVAKIPVKDRCGTCNACIDACPTNALAPYQIDAGKCISHHTLEDRSEKIPNTFGWIAGCDICQDVCPWNQVKARKKGIQTGREELKSRPIFKESPESILDLDQDGFESIFGDSAISRMNFKMFRRNVELAKEWALKNKTF

SEQ ID NO: 77833 - protein, 318 aa, unidentified
  source 1..318: note = Leptospira stimsonii
  REGION 1..318: note = tr|A0A396Z7H9|A0A396Z7H9_9LEPT tRNA epoxyqueuosine(34) reductase QueG OS=Leptospira stimsonii; OX = 2202203 GN=queG PE=4 SV=1
MIESKEIISELSPLIEECGFDFYGISEAVIPETDRKNILTWVQEGKHGKMDWYPKNMDLRLHFKNLGFEPKSVIALGTLYNDLDYDTISKTMSFRFSRYAVGEDYHQVLRRMANPLLQELRKKFPSNQFRQGVDSLPISEKVLAREAGLGWQAKNTNLIHPEFGSYFFISVILTDLPISVAKIPVKDRCGTCNACIDACPTNALAPYQIDAGKCISHHTLEDRSEKIPNTFGWIAGCDICQDVCPWNQVKARKKGIQTEREELKTRPIFKENPESILDLDQDGFERNFGDSAISRMNFKMFRRNVELAKEWALKKETF

SEQ ID NO: 77834 - protein, 325 aa, unidentified
  source 1..325: note = Leptospira terpstrae
  REGION 1..325: note = tr|N1VM40|N1VM40_9LEPT Epoxyqueuosine reductase; OS = Leptospira terpstrae serovar Hualin str. LT 11-33 = ATCC 700639 OX=1257025 GN=queG PE=4 SV=1
MTNPIYQIRSQIKTICEKEGFSLVGFAEAKIPASDLEHLEEWILENRFGNMTWFAKDHAVGIRNRFENLGLAPRSVICLGFVYRSNEGEQVVSQMESKVSRYALGSDYHSVLKEKGNRILKTLRSEFPGHKFRQSVDSLPIAEKILTRESGIVWQGKNTNLIHPTLGSYFFLSTILTDLELGGPDPEEIVTDHCGSCRKCLDVCPTGALEEYKIDARKCISYLTIEDRETSEISESFLQWDRKGWVYGCDLCQEVCPWNANVAKRNRVETTEPKFLPRAFWTDPEFTEKTHLTKQEFGAYFQDSPIERIGFEIWNRNLQQRDTNE

SEQ ID NO: 77835 - protein, 323 aa, unidentified
  source 1..323: note = Leptospira tipperaryensis
  REGION 1..323: note = tr|A0A1D7UXJ6|A0A1D7UXJ6_9LEPT Epoxyqueuosine reductase OS=Leptospira tipperaryensis OX=2564040; GN = A0128_10675 PE=4 SV=1
MIESKEIISELSPLIEECGFDLFGICEAVIPEEDQKNILTWVQEGKHGKMDWYPKNMDLRLHFKNLGFEPKSVIALGTLYNDPEYDIFCKTMSFRFSRYAIGEDYHEVLRKLAKPLLSELRKKFPNHQFRQGVDSLPVSEKVLAREAGLGWKAKNTNLIHPELGSFFFITVILTDLPISVANVAVKDRCGTCTACIDSCPTGALVPYQIDAGKCISHHTLEDRSSMIPNTFGWIAGCDICQDVCPWNDVKARKKGIQTRREEFKTRSIFKEDPNSILDLDERGFEKTFGDSAISRMNFSMFRRNVELSKIDISSREENSKKEH

SEQ ID NO: 77836 - protein, 320 aa, unidentified
  source 1..320: note = Leptospira vanthielii
  REGION 1..320: note = tr|A0A4R9LIG2|A0A4R9LIG2_9LEPT tRNA epoxyqueuosine(34) reductase QueG OS=Leptospira vanthielii; OX = 293085 GN=queG PE=4 SV=1
MTNPIYQIRSQIKTICTAEGFSLVGFAEAKIPNSDLDHLDEWIRENRFGNMAWFAKDHAVGIRNRFENLGLVPKSVVCLGFVYRSSQGEEVVSQMESKVSRYALGSDYHIVLKEKGNRILKTLRTEFPDYKFRQSIDSLPIAEKILTRESGIVWQGKNTNLIHPTLGSYFFLSTILTNLELGGSDPEEIVTDHCGSCRKCLDVCPTGALEEYKIDARKCISYLTIEDREKTEATDSFLQWDRKGWVYGCDLCQEVCPWNANVAKRNQVETTEPKFLPRAFWTDPQFTSKESLTEQEFGDLFKDSPIERIGVKIWNRNLKK

SEQ ID NO: 77837 - protein, 320 aa, unidentified
  source 1..320: note = Leptospira vanthielii
  REGION 1..320: note = tr|N1WG98|N1WG98_9LEPT Epoxyqueuosine reductase; OS = Leptospira vanthielii serovar Holland str. Waz Holland = ATCC 700522 OX=1218591 GN=queG PE=4 SV=1
MTNPIYQIRSQIKTICTAEGFSLVGFAEAKIPNSDLDHLDEWIRESRFGNMAWFAKDHAVGIRNRFENLGLVPKSVVCLGFVYRSSQGEEVVSQMESKVSRYALGSDYHIVLKEKGNRILKTLRTEFPDYKFRQSIDSLPIAEKILTRESGIVWQGKNTNLIHPTLGSYFFLSTILTDLELGGSDPEEIVTDHCGSCRKCLDVCPTGALEEYKIDARKCISYLTIEDREKTEATDSFLQWDRKGWVYGCDLCQEVCPWNANVAKRNQVETTEPKFLPRAFWTDPQFTSKESLTEQEFGDLFKDSPIERIGVKIWNRNLKK

SEQ ID NO: 77838 - protein, 310 aa, Leptospira weilii
  REGION 1..310: note = tr|A0A514W0W3|A0A514W0W3_9LEPT tRNA epoxyqueuosine(34) reductase QueG OS=Leptospira weilii; OX = 28184 GN=queG PE=4 SV=1
MIESKEIISEFKTLIESSGFDLYGICDAKIPQEDKENILTWVQEGKHGKMDWYPKNMDLRLNFKNLGFDPLSVIVLGAIYNDPEYGEVSKGMLFRFSRYAIGEDYHRVLRRLAKSVIRELRKKYPNHRFRQGVDSLPVPEKVLARLAGLGWKAKNTNLIHPDFGSFFFITVILTDLPIYTTQIQVKDRCGTCTACIDACPTGALKPYQIDAGKCISHHTMEDPSEKISDTHGWLAGCDICQDVCPWNRVKADKKGVRTNVEEFKVRSYFKGNSDFLLSLNEREFEEYFFDSAISRMSFKMYQRNIKMIKR

SEQ ID NO: 77839 - protein, 310 aa, Leptospira weilii
  REGION 1..310: note = tr|M6QFP2|M6QFP2_9LEPT Epoxyqueuosine reductase; OS = Leptospira weilii str. UI 13098 OX=1088542 GN=queG PE=4; SV = 1
MIESKEIISEFKTLIESSGFDLYGICDAKIPQEDKENILTWVREGKHGKMDWYPKNMDLRLNFKNLGFDPLSVIVLGAIYNDPEYGEVSKGMSFRFSRYAIGEDYHRVLRRLAKSVIRELRKKYPNHRFRQGVDSLPVPEKVLARLAGLGWKAKNTNLIHPDFGSFFFITVILTDLPIYTTQIQVKDRCGTCTACIDACPTGALKPYQIDAGKCISHHTMEDPSEKISDTHGWLAGCDICQDVCPWNRVKADKKGVRTNVEEFKVRSYFKENSDSLLSLNEREFEEYFFDSAISRMSFKMYQRNIKMIKR

SEQ ID NO: 77840 - protein, 320 aa, Leptospira wolbachii
  REGION 1..320: note = tr|R9A8E0|R9A8E0_9LEPT Epoxyqueuosine reductase; OS = Leptospira wolbachii serovar Codice str. CDC OX=1218599; GN = queG PE=4 SV=1
MTNPIYQIRSQIKTICEAEGFSFVGFAEAKIPDSDLKHLDQWIRENRFGNMTWFAKDHAVGIRNRFENLGLAPKSVVCLGFVYRSTQADEVVSRMESKVSRYALGSDYHIVLKDKGNRILKTLRTEFPGNKFRQSIDSLPVAEKILTRESGIVWQGKNTNLIHPTLGSYFFLSTILTDLELGGPVPEEIVTDHCGSCRKCLDVCPTGALEEYKMDARKCISYLTIEDREETEATDSFLQWDRQGWVYGCDLCQEVCPWNANVAKRNGVETKEPEFLPRTFWTDPQFTEKEFLTKEEFDSYFKDSPIERVGFEIWNRNLKQ

SEQ ID NO: 77841 - protein, 310 aa, Leptospira wolffii
  REGION 1..310: note = tr|A0A2M9ZDE5|A0A2M9ZDE5_9LEPT tRNA epoxyqueuosine(34) reductase QueG OS=Leptospira wolffii; OX = 409998 GN=queG PE=4 SV=1
MVFESKELLTELREIAGREGFQLFGAAPAIVPESDKEKIRLWVEEGRHGGMEWYPRNMPLRLELQGLGFKPETVLVFGALYSDTEYENLRLPFRFSRYAMGEDYHSVLRKRGAAVIDRLKALFPGNRFRQGVDSLPVPEKVLAREAGIGWVGKNTNLLNEEFGSFFFLTVLFTDLPLQIANLPAKDRCGTCTACIDACPTDALEPYRIDSRKCISYKTIEDRSEEIAGLHGWAYGCDICQEVCPWNRIKAKKNDRKTEILEFKIRDIFKEEGKLENLNETEFRERFRDSAVSRISYSQFRRNLDAVKREK

SEQ ID NO: 77842 - protein, 310 aa, Leptospira wolffii
  REGION 1..310: note = tr|S3VTV7|S3VTV7_9LEPT Epoxyqueuosine reductase; OS = Leptospira wolffii serovar Khorat str. Khorat-H2; OX = 1193069 GN=queG PE=4 SV=1
MVFESKELLTELREIAGREGFQLFGAAPAIVPESDKEKIRLWVEEGRHGSMEWYPRNMPLRLELEGLGFKPETVLVFGALYSDTEYENLRLPFRFSRYAMGEDYHSVLRKRGAAVIDRLKALFPGNRFRQGVDSLPVPEKVLAREAGIGWVGKNTNLLNEEFGSFFFLTVLFTDLPLQIANLPAKDRCGTCTACIDACPTDALEPYRIDSRKCISYKTIEDRSEEVAGLHGWAYGCDICQEVCPWNRIKAKKNDRKTEILEFKIRDIFKEEGKLENLNESEFRERFRDSAVSRISYSQFRRNLDTVKREK

SEQ ID NO: 77843 - protein, 323 aa, unidentified
  source 1..323: note = Leptospira yanagawae
  REGION 1..323: note = tr|A0A4V3JM65|A0A4V3JM65_9LEPT tRNA epoxyqueuosine(34) reductase QueG OS=Leptospira yanagawae; OX = 293069 GN=queG PE=4 SV=1
MTTHSPYQSQIKSLCTKEGFSFVGFTRAMLPEKDLSFLETWISEKRFGNMEWFAKEHAIAIRNRFENLGFVPRSAICLGFVYRSSEGETLLSQMERKVSRYALGTDYHIVLRNKGNRILKELRKLFPTNQFRQSVDSLPIAEKILTRESGVVWQGKHTNLIHPKLGSYFFLSIILTDLELGETPIEETTTDHCGSCRRCLDVCPTNALEPYQLDASKCISYLTIEDRMENEVTESFLEWDRKGWVYGCDLCQEVCPWNEGIAKRNQVETNEPSFLPREFWNDPSFLSKEFLSEGEFTEYFEKTPIERIGVSIWNRNQVNKKNS

SEQ ID NO: 77844 - protein, 323 aa, unidentified
  source 1..323: note = Leptospira yanagawae
  REGION 1..323: note = tr|A0A5E8HF39|A0A5E8HF39_9LEPT Epoxyqueuosine reductase OS=Leptospira yanagawae serovar Saopaulo str. Sao Paulo = ATCC 700523 OX=1249483 GN=queG PE=4 SV=1
MTTHSPYQSQIKSLCTKEGFSFVGFTRAMLPEKDLSFLETWISEKKFGNMDWFAKEHAIAIRNRFENLGFVPRSAICLGFVYRSSEGETLLSQMERKVSRYALGTDYHIVLRNKGNRIIKELRKIFPTNQFRQSVDSLPIAEKILTRESGVVWQGKHTNLIHPKLGSYFFLSIILTDLELGETPIEETTTDHCGSCRRCLDVCPTNALEPYQLDASKCISYLTIEDRMENEVTESFLEWDRKGWVYGCDLCQEVCPWNEGIAKRNQVETNEPSFLPREFWNDPSFLSKEFLSEEEFKGYFEKTPIERIGVSIWNRNQVEKKDS

SEQ ID NO: 77845 - protein, 310 aa, unidentified
  source 1..310: note = Leptospira yasudae
  REGION 1..310: note = tr|A0A418A9W8|A0A418A9W8_9LEPT tRNA epoxyqueuosine(34) reductase QueG OS=Leptospira yasudae; OX = 2202201 GN=queG PE=4 SV=1
MIESKEIISEFKTLIERSGFDMYGICDAKIPQEDRENILTWVAEGRHGKMEWYPKNMDLRLDFKNLGFEPRSVLALGTIYNDPDYDDVAETMSFRFSRYAVGEDYHRVLRRLAKPILQELKRKYPNHHFRQGVDSLPVPEKVLARRAGLGWKAKNTNLIHPDFGSFFFITVILTDLPIVSAQIEQKDRCGTCTACIDACPTQALEPYRIDAGKCISHHTLEDSSPEISATHGWVAGCDICQDVCPWNRVKARKKGIRTRLEEFRVRSIFRENPDSLLDLNESEFKNNFSDSAISRMSFSMYQRNAKMAKK

SEQ ID NO: 77846 - protein, 326 aa, unidentified
  source 1..326: note = Leptospiraceae bacterium
  REGION 1..326: note = tr|A0A2E5S734|A0A2E5S734_9LEPT Epoxyqueuosine reductase OS=Leptospiraceae bacterium OX=2026757; GN = CMF59_19715 PE=4 SV=1
MSREAGFDLYGFTYASISESDRTNLSAFARDNEANDLHWFNRHLNLRTHPSDILPGAISVLMLGVIYRHPEMDSAVEQARAKISRYAAGKDYHLVLRKKAARLADHFFEENKEVLPGLKYRITTDSAPVPEKILARNAGLGWQGKNTNLIHPEKGSYFFLTAVFLNAELEGAKGESPLDSAGNLEESGDLFRPANFDRCGSCRQCLDACPTGALEPYRIQADRCLSYWTIEAREDMPPEIAQNTKGWVFGCDICQEVCPYNRGAKGRKQITNEKDFFPRARLLGWLKKPENPAEEELWQSLSVSSPLKRPGQERFRKSWLQANTSS

SEQ ID NO: 77847 - protein, 342 aa, Leptospirillum ferriphilum
  REGION 1..342: note = tr|A0A094X8Y0|A0A094X8Y0_9BACT Epoxyqueuosine (OQ) reductase QueG OS=Leptospirillum ferriphilum OX=178606; GN = LptCag_2423 PE=4 SV=1
MRKKPDRETLLPGEAAPDKPEDDLSRARRILGETLVEFPCAAVLSDPPARPDFPRLLEWLERGDHGRMEWMRRRPERRRSLGEGYPGYRSIVIALLPVAGKGDPVHVFGTSVRIARYAEGPDYHQVFLERFRRIIERIRPLLDSGDRPLVKPDHGALLEKSLAMEAGLGVLGKNTLLINPLLGSHFTIGSLLLKTPLASITGPFSEFSPCGNCTRCLEACPTNAFRGPYSLDARRCLSYLTIEAPEDDEREVRRTDGEDWLFGCDVCQDTCPHNSSRSRREMPGRETSFSEKRVVNHPEDLIEWVRTNPSMDRVSLDTLRERVQEITSVKSGRISGLPKRSD

SEQ ID NO: 77848 - protein, 342 aa, Leptospirillum ferriphilum
  REGION 1..342: note = tr|A0A059XT00|A0A059XT00_9BACT (Fe-S)-binding protein OS=Leptospirillum ferriphilum YSK OX=1441628; GN = Y981_01220 PE=4 SV=1
MKNKLDGDNLLTGEQAPDEPEEDLSRARRILGETLVEFPCAAVLSDPPDRPDFPRLLEWLERGDHGRMDWMKRRPERRRSLGEGYPGYRSVVIALLPVAGKGEPVHVFGTSVRIARYAEGPDYHQVFLERFRRVIERIRPLLDSGDRPLVKPDHGALLEKSLAMEAGLGTLGKNTLLINPLLGSHFTIGSLLLKTPLASVKGPFSGFSPCGNCTRCLDACPTNAFRGPYRLDARRCLSYLTIEEPEDDERALRRTSGEDWLFGCDVCQDTCPHNGSRSRREMSGREPFLSEKRVVNHPEDLIEWVRTNPSMGRVSLDTLRERVQEITSVKSGRISGFPKRRD

SEQ ID NO: 77849 - protein, 360 aa, unidentified
  source 1..360: note = Leptospirillum ferrodiazotrophum
  REGION 1..360: note = tr|C6HWP4|C6HWP4_9BACT Probable iron-sulfur cluster binding protein OS=Leptospirillum ferrodiazotrophum; OX = 412449 GN=UBAL3_80630077 PE=4 SV=1
MPCGCSSFQTDGWRRSLRHFLKGSPSSNSRICRMELRTPSETSPGSGALMEALALAMDQEFPAWGILCDPEAAPEWAYFQEWLKDGFHGKLDYMARSAHRRQKLSLAYPGLRTLVIALLFHGSGQSEKSQSPDTTSHDRFAKIARYAVGPDYHRLFEEAFGRVITAITPFLPSGETPLIKVDHGALLEKSLARRAGLGAIGKNTLLIRPGQGSYFTLGSLLLSTPLPSRIDGYGSTEICGGCRRCLDACPTGALVEPFRLDARRCLSYLTIERPSDDPLELRKKFGGEWFFGCDICQEVCPYNATPSHAEIEDEGRLLPVSASSGELKGFRGRNGALSRVSLTRLEYRLREIRETESPED

SEQ ID NO: 77850 - protein, 257 aa, Leptospirillum ferrooxidans
  REGION 1..257: note = tr|I0IL35|I0IL35_LEPFC Putative iron-sulfur cluster binding protein OS=Leptospirillum ferrooxidans (strain C2-3) OX=1162668 GN=LFE_0262 PE=4 SV=1
MSFLERNPHRRRSISDGYPGYRTAVLALLPSDKKLPIPETAAIKVRVARYAVGEDYHCVFEERFKSVLNEIRPLLQKGDKPLIKPDHGAILEKSLAQQAGLGRIGRHTLLIHRKMGTRFTIGVLLLKTPFSSWRPPLEDFMPCGSCTLCLDSCPTEAFSGPFRLDARKCLSYLTIESPKSENPGKIPVDVAQNWIFGCDICQEVCPYNAPSGAFSGGEAIVRSPTDLIRLVKENPSLQRAGFPALWKRYEEIRGQSG

SEQ ID NO: 77851 - protein, 342 aa, Leptospirillum sp.; identical to SEQ ID NO: 77847
  REGION 1..342: note = tr|B6AMD5|B6AMD5_9BACT Probable iron-sulfur cluster binding protein OS=Leptospirillum sp. Group II '5-way CG'; OX = 419541 GN=CGL2_11277278 PE=4 SV=1

SEQ ID NO: 77852 - protein, 342 aa, Leptospirillum sp.
  REGION 1..342: note = tr|A0A0K0WJT3|A0A0K0WJT3_9BACT (Fe-S)-binding protein OS=Leptospirillum sp. Group II 'CF-1' OX=1660083; GN = ABH19_01115 PE=4 SV=1
MKNKLDGDNLLTGEQAPDEPEEDLSRARRILGETLVEFPCAAVLSDPPDRPDFPRLLEWLERGDHGRMDWMKRRPERRRSLGEGYPGYRSVVIALLPVAGKGEPVHVFGTSVRIARYAEGPDYHQVFLERFRRVIERIRPLLDSGDRPLVKPDHGALLEKSLAMEAGLGTLGKNTLLINPLLGSHFTIGSLLLKTPLASITGPFSGFSPCGNCTRCLDACPTNAFRGPYRLDARRCLSYLTIEEPEDDERALRRTTGEDWLFGCDVCQDTCPHNGSRSRREMSGRETFLSEKRVVNHPDDLIEWVRTNPSMGRVSLDTLRERVQEITSVKSGRISGFPKRRD

SEQ ID NO: 77853 - protein, 361 aa, Leptothrix cholodnii
  REGION 1..361: note = tr|B1Y406|B1Y406_LEPCP Epoxyqueuosine reductase; OS = Leptothrix cholodnii (strain ATCC 51168 / LMG 8142 / SP-6) OX=395495 GN=queG PE=3 SV=1
MSDLPIDAPALLEQLQEWARTLGFSQIGVADVDLASAEPGLTAWLAAGFHGDMQYMAAHGLKRARPAELIPGTVRVITARLDYLPRDTPPDWREHERARQQSPGEAVISIYARGRDYHKVLRQRLQRLADRIAQAVGPFGHRVFCDSAPVLEVELASRSALGWRGKHTLLLDRAAGSMFFLGEIYVDLALPPTPPVTPHCGQCSACIDVCPTRAIVAPYRLDARRCISYLTIEDDGPIPIELRAAIGNRIYGCDDCQLICPWNKYAQRSPLADFDARAPLVSATLLQLWGWDEAAFLRHTEGSAIRRIGHRRWRRNLAVALGNAWRETGDAAIAAALQSALPEPDDMLAEHIGWALAQRAA

SEQ ID NO: 77854 - protein, 382 aa, Leptothrix mobilis
  REGION 1..382: note = tr|A0A4Q7LG63|A0A4Q7LG63_9BURK Epoxyqueuosine reductase OS=Leptothrix mobilis OX=47994 GN=queG PE=3 SV=1
MSTCPSDLQRPDATLLARVSQQLRGWAGALGFSQIGVADVDLASAEPGLLAWLQAGFHGQMHYMAAHGLRRARPAELVPGTVRVLSVRADYLPRDTPEDWRDRERTRLSRPDEAVVSVYARGRDYHKVVRHRLQQLSDRIAAEIGPHGHRVFCDSAPVLEVELARRAAIGWRGKHTLLLDRGHGSMFFLGEIYVDLALPVTPVLAGKADEHGPVDVQGSCGSCTACLSACPTQAIVAPYRLDARRCISYLTIEHDGPIPTELRSSMGNRIYGCDDCQLACPWNKYAQVSALPDFDVRAPFVAPTLLALWDWDEATFLHRTEGSAIRRIGHTRWRRNLAIALGNAWRETGDAAIAAALQSAIDAGLDDAVLAEHLAWALAQRA

SEQ ID NO: 77855 - protein, 358 aa, unidentified
  source 1..358: note = Leucothrix pacifica
  REGION 1..358: note = tr|A0A317CQ23|A0A317CQ23_9GAMM Epoxyqueuosine reductase OS=Leucothrix pacifica OX=1247513 GN=queG PE=3; SV = 1
MAKFTSHQAQAAFVRQLEEWGHELGFQQLGVSNVDLSDAESQLWNWIDQQHHGEMTWMSSHGLKRSRPDLLEPNTRSIISVRMDYLPPQSADAEMVLNHPELGYISRYALGRDYHKVLKKRLQRLANKIQHEIGEFGYRVFVDSAPVLEKPIAVKAGLGWVGKHSNILNRDAGSWFFLGEIYTDLELPETGSVQEHCGSCTACLDVCPTQAIVAPYDVDARRCISYLTIELKGAIPIEFRKAMGNRIYGCDDCQLICPWNRFAQETVENDYQVRNGLDSEQLLVLFSWSEAEFLEKMQGSPIRRIQFDRWQRNIAIALGNAPYHPNIVKALESQQPNASEMVVEHINWAIRQHVEKLD

SEQ ID NO: 77856 - protein, 359 aa, Leucothrix sp.
  REGION 1..359: note = tr|A0A317CBG9|A0A317CBG9_9GAMM Epoxyqueuosine reductase OS=Leucothrix sp. IMCC9719 OX=1481894 GN=queG; PE = 3 SV=1
MANLMSQSERDTLLHQLEEWGQSLGFQQVGISNTNLGEAEAQLHDWLDKGHHGDMGWMASHGLKRSRPELLETGTRSIISVRMDYLPPENTDPEMVLNHPELGYISRYALGRDYHKVMRARLKKLAHKMQEAVGDFGFRVFVDSAPVLEKPIAVKAGLGWVGKHSNILNREAGSWFFLGEIYTDLVLPESEPQTDHCGSCTACIDVCPTQAIIAPYVVDARRCISYLTIELDGAIPVEFREAMGNRIYGCDDCQLICPWNRFAQETHETDYQVRHDLDHEHLLTLFAWTEQDFLDKMQGSAVRRIGFKRWQRNIAVALGNAPPNDNIINVLIAARPSSDDIVKEHIDWAIEQQQKKYAN

SEQ ID NO: 77857 - protein, 379 aa, Levilinea saccharolytica
  REGION 1..379: note = tr|A0A0P6YMG1|A0A0P6YMG1_9CHLR 4Fe-4S ferredoxin-type domain-containing protein OS=Levilinea saccharolytica OX=229921 GN=ADN01_00590 PE=4 SV=1
MSFEDDVKAEAFHLGFSLCGLAAAQPQAQHAAVYEDWLAAGHHAQMGYLAAESARLRRADPSLTLPGVRTVLTVGLPYPNPARAAAPADGRLRGRTAAYSWGQDYHDRIPPRLNQLAVFLETRLGLPLAHRAYTDTGPLLERAWGQQAGLGWFGKNSCLIHPRGGSAFLLGELLLDVELQPDVPWEADRCGSCTRCLDACPTGCILPNRTLDARRCLSYWTIENKGLIPVELRPSLGNWVFGCDICQQVCPWNQHAAPSQVDAAFDFTPEEAFPDLLEALSLSPVDFNRSFRRTPLARTKRRGFLRNAAVALGNLGDPAAAPALIHTLENEPEPLVRAHAAWALGQLHHPRVRPALEHAQLTDPDPSVRLEAAGALAAL

SEQ ID NO: 77858 - protein, 309 aa, Lewinella agarilytica
  REGION 1..309: note = tr|A0A1H9CGQ4|A0A1H9CGQ4_9BACT Epoxyqueuosine reductase OS=Lewinella agarilytica OX=478744 GN=queG PE=3; SV = 1
MSPAQLSTLVKQTALDAGFSFVGVAKAGPMEEEARHLEEWLRQGRHGSMHWMENHFDKRVDPTKLVPGAKSVVSLLYNYFPEDDRPSQEAPKISRYAYGEDYHKVVRAKLREVVQRVEESIGSPIDGRVFVDSAPVLERDWARRAGVGWTGKNTLLINPKAGSYFFLAEIISDLNLAPDQEIKDYCGTCTACIDACPTEAISPEGYLLDGSKCISYLTIELREAIPEEFAGRMEGWAFGCDICQEVCPWNRFSSPHKEPAFNAHPDLPEMSSREVREMTEEVFRRVFQKSAVKRTKFTGLRRNIDFLDV

SEQ ID NO: 77859 - protein, 316 aa, Lewinella marina
  REGION 1..316: note = tr|A0A2G0CK14|A0A2G0CK14_9BACT Epoxyqueuosine reductase OS=Lewinella marina OX=438751 GN=queG PE=3 SV=1
MNPTQLATLIKTTAYDLGFGFVGIARAERMEPEEARLEAWLNAGHHGTMRWMENHFDKRVDPTKLVPGARSVVSLLYNYFPADDTPSREAPKLARYAYGEDYHRVVRGKLRELVARLEESIGAPIDGRVFVDSAPVLERDWAARAGTGWTGKNTLLLNPKAGSYFFLAEIISDLAPATDTGIRDHCGTCTRCIEACPTEAISPAGYVVDGSRCISYLTIELREAIPEEFRGRMEGWAFGCDICQEVCPWNRFSTPHREPAFEPHPDLPGMGEREWREMTEEVFRRVFQKSAVKRTKFSGLRRNIDFLAEGTDPVED

SEQ ID NO: 77860 - protein, 307 aa, Lewinella nigricans
  REGION 1..307: note = tr|A0A2D0NE66|A0A2D0NE66_9BACT Epoxyqueuosine reductase OS=Lewinella nigricans DSM 23189 = NBRC 102662; OX = 1122177 GN=queG PE=3 SV=1
MKTRHTHLIRQEAARLGFAFVGIARAERLDEEATRLEQWLQADMNGKMQYMENHFEKRVDPTKLVEGAKSVITLMYNYYTDREQSDPAAPKLSKYAYGKDYHYVIKHKLKDLLHFIREEIGEVDGRCFVDSAPVLERDWAKRSGVGWVGRNTLLIHPKAGSYYFLAELILDLDLVYDHPIKDYCGTCTRCIEACPTDAIAPAGYLVDGSKCISYFTIELREALPEEYRGRFENWMFGCDICQEVCPWNRFAKPHEEEAFEPHPDLLEMSKEEWYELTEEVFREVFRGSAVKRTKYAGLKRNIAFLRE

SEQ ID NO: 77861 - protein, 309 aa, Lewinella sp.
  REGION 1..309: note = tr|A0A180ES26|A0A180ES26_9BACT Epoxyqueuosine reductase OS=Lewinella sp. 4G2 OX=1803372 GN=queG PE=3 SV=1
MSLTNAHIKKLVFDLGFSFIGVAKAERMTEEEARLEEWLNQGKHGTMQWMENHFDKRVDPTKLVPGAKTVISLLYNYFPEDDGPSLEAPKISRYAYGKDYHHVIKGKLKHLVWQIEEALGAPLDGRVFVDSAPVLERDWAKRAGVGWTGKNTLLINPKAGSYYFLAELISDLDVEPDQRIKDYCGTCTACIDACPTEAISPQGYIVDGSKCISYLTIELREAIPEEFKGRMEGWAFGCDICQEVCPWNRFSTPHREPDFLPHPDLPGMSARETREMTEEVFRRVFQKSAVKRTKFSGLRRNIDFLDPEL

SEQ ID NO: 77862 - protein, 310 aa, Lewinella sp.
  REGION 1..310: note = tr|A0A562YUR4|A0A562YUR4_9BACT Epoxyqueuosine reductase OS=Lewinella sp. W8 OX=2528208 GN=queG PE=3 SV=1
MSPQFTAQNLKQLAYDLGFTHVGIARAEPMEEEARRLEEWLNRGHHGTMRWMENHFDKRTDPTKLVPGAKTVVSLLYNYFPKDESPSETAPKISRYAYGEDYHRVIRAKLRELVHRVEEKLGATLEGRVFVDSAPVLERDWARRAGVGWVGKNTLLINPRSGSYYFLAEIISDLDLPADTAIRDHCGTCTRCIEACPTEAISPGGYVVDGSKCISYLTIELKEAIPESFRGQMEGWAFGCDICQEVCPWNRFSTPHHEPAFEPHPDLPGMQEGDWRELTEEVFRRVFRKSAVKRTKFSGLRRNLNFLSDE

SEQ ID NO: 77863 - protein, 313 aa, unidentified
  source 1..313: note = Lewinella xylanilytica
  REGION 1..313: note = tr|A0A2S6I9S4|A0A2S6I9S4_9BACT Epoxyqueuosine reductase OS=Lewinella xylanilytica OX=1514080 GN=queG; PE = 3 SV=1
MDPTSLANLIKQTAYDLGFGFVGIARAERMEPEERRLEAWLDAGHHGQMHWMENHFDKRVDPTKLVPGAKSVVSLLYNYFPADDTPSREAPKVARYAYGEDYHKVVRGKLRELTGRLEEAIGSPIDGRVFVDSAPVLERDWAARAGAGWIGKNTLLLNPKAGSYFFLAEIISDLQPATDSAIRDHCGTCTRCIDACPTDAISPQGYLVDGSKCISYLTIELKEAIPEEFRGRMEGWAFGCDICQEVCPWNRFSTPHREPAFEPHADLPGMGPREWTEMTEDVFRRVFQKSAVKRTKFTGLRRNIDFLDKGGSD

SEQ ID NO: 77864 - protein, 306 aa, unidentified
  source 1..306: note = Lewinellaceae bacterium
  REGION 1..306: note = tr|A0A2C6CPD5|A0A2C6CPD5_9BACT tRNA epoxyqueuosine(34) reductase QueG OS=Lewinellaceae bacterium SD302 OX=2014804 GN=queG PE=4 SV=1
MSPKAFIQQLATEQGFLHVGFARAEFMEPEARQLESWLNQGRHGKMSWMENYFDKRVDPTKLVPGAKTVITFLYNYFPEDDTPSQEAPKIARYAYGQDYHHVIKGKLRTIIEAVREEYGEIDGRAFVDSAPVLERDWAKRSGSGWVGKNTLLLRQGVGSYFFLAELIVDLEVDPDGPVTDHCGSCTRCIDACPTEAISPQGYLLDGSKCISYLTIELKEAIPEEFKDRMEGWAFGCDICQEVCPWNRFSKAHSEPAFLPHPDLPAMSPAERKEMTEEVFRRVFRKSAVKRAKFVGLRRNIDFLGET

SEQ ID NO: 77865 - protein, 382 aa, unidentified
  source 1..382: note = Lihuaxuella thermophila
  REGION 1..382: note = tr|A0A1H8H978|A0A1H8H978_9BACL Epoxyqueuosine reductase OS=Lihuaxuella thermophila OX=1173111 GN=queG; PE = 3 SV=1
MRPAELKQKLIDRAKEIGIDKIGFASADPFIELKARLIEHRKKGYESGFEEPDIEKRVRPDLSLPEAKTIIAIALAYPSKLKNPPRSEPGAYRGIFCRASWGEDYHHVLRDKLNRLEAYLHEWVPEARTKIMVDTGALSDRAVAERAGIGWSGKNTSIITEEFGSWVYLGEMITDVYIPADQPVTDGCGDCNLCIEACPTGALVQPGQLNSRSCIAYLTQTKGFLPEEYRSKIGNRLYGCDTCQTVCPKNRKVHFDHHEEFQPDPEKVKPLLKPLLSMSNRQFKETFGQMAGSWRGKKPIQRNAILALAHFKDQTAIPDLTELLHNDPRPVIRGTAAWALGKIGGEEAKKALITAAQNEKDEEVRKEIIKGMELLGQEKIYH

SEQ ID NO: 77866 - protein, 354 aa, unidentified
  source 1..354: note = Limimaricola cinnabarinus
  REGION 1..354: note = tr|A0A2G1MDN5|A0A2G1MDN5_9RHOB Epoxyqueuosine reductase OS=Limimaricola cinnabarinus OX=1125964 GN=queG; PE = 3 SV=1
MNQGAALKTRLREAALGEGFAEMGICRPDAIPEAAARLATYVEEGRHGQMGWMEERMHWRGDPAALWPKARSVIMLAEAYTPRHDPLDVLEHPDRAAISVYAHGRDYHDLVKKRLKRVGRWLLEQCPEEEIKVFVDTAPVMEKPLAQAAGLGWQGKHTNLLGRTVGNWVFLGAIFTTVELPVDAPAREKCGSCTRCLDICPTGAFPAPFQLDARRCISYLTIEHKGPVPEEFREALGNRIYGCDDCLAICPWNKFAQEATEMRYFGKVDAPPLAELAKLDDASFREMFSGSPIKRIGRDRFLRNVAYAIGNSGDPGLLPTARNLAAEPDPTLAEAGQWAVRRLEAAANGASSVP

SEQ ID NO: 77867 - protein, 354 aa, unidentified
  source 1..354: note = Limimaricola cinnabarinus
  REGION 1..354: note = tr|U3AAQ4|U3AAQ4_9RHOB Epoxyqueuosine reductase; OS = Limimaricola cinnabarinus LL-001 OX=1337093 GN=queG; PE = 3 SV=1
MVTDPGLKDRLREAALGEGFAEMGICRPDSIPEAAGRLATYVDEGRHGQMDWMEERMHWRGDPAALWPEARSVIMLAEAYTPRHDPLEVLEQRDRAAISVYAHGRDYHDLVKKRLKRVGRWLLEQCPDEQIKVFVDTAPVMEKPLAQAAGLGWQGKHTNLLGRTVGNWVFLGAIFTTVDLPVDAPAVEKCGSCTRCLDICPTNAFPAPFQLDARRCISYLTIEHKGPVPEEFREALGNRIYGCDDCLAVCPWNKFAQEATEMRYFGKVDAPPLADLAKLDDATFREMFSGSAIKRIGRDRFLRNVAYAIGNSGDRGLLGVARDLAAEADPVLAEAGQWAVRRLEGAEKAARSSS

SEQ ID NO: 77868 - protein, 353 aa, unidentified
  source 1..353: note = Limimaricola hongkongensis
  REGION 1..353: note = tr|A0A017HHJ8|A0A017HHJ8_9RHOB Epoxyqueuosine reductase OS=Limimaricola hongkongensis DSM 17492; OX = 1122180 GN=queG PE=3 SV=1
MTPASLKDRLRETALAEGFAEMGICRPDAIPEAAGRLATYVEEGRHGQMGWMEERMHWRGDPAALWPEARSVIMLAEAYTPRHDPLEVLGHPDRAAISVYAHGRDYHDLVKKRLKRVGRWLLEQLPEEQIKVFVDTAPVMEKPLAQAAGLGWQGKHTNLLGRTVGNWVFLGAIFTTAELPVDAPAREKCGSCTRCLDICPTRAFPAPFQLDARRCISYLTIEHKGPVPEEFREALGNRIYGCDDCLAVCPWNKFAQDATEMRYFGKVDAPPLADLARLDDAAFREMFSGSPIKRIGRDRFLRNVAYAIGNSGDPGLLPTARDLAAEPDPVLAEAGQWAVRRLEGQGDGASSLS

SEQ ID NO: 77869 - protein, 346 aa, unidentified
  source 1..346: note = Limimaricola pyoseonensis
  REGION 1..346: note = tr|A0A1G7EV44|A0A1G7EV44_9RHOB Epoxyqueuosine reductase OS=Limimaricola pyoseonensis OX=521013 GN=queG; PE = 3 SV=1
MDAPTLKTRLRDTALAEGFAEMGVCRPDAIPEAAGRLGAFVGEGRHGQMGWMAERMHWRGDPAALWPEARSVVMLAEAYTPRHDPLEVLGRRDHAAISVYAHGRDYHDLVKKRLKRVGRWLLEQCPGEEIKVFVDTAPVMEKPLAQAAGLGWQGKHTNLLGRTVGNWVFLGAIFTTVELPADAPAAEKCGSCTRCLDICPTNAFPAPFQLDARRCISYLTIEHKGPVPEEFREALGNRIYGCDDCLAVCPWNKFAQEATEMRYFGKVAAPRLADLARLDDAGFREMFSGSPIKRIGRDRFLRNVCYAIGNSGDRTLLPVLAPLRAEPDPALSDAARWATARLEGRG

SEQ ID NO: 77870 - protein, 354 aa, unidentified
  source 1..354: note = Limimaricola soesokkakensis
  REGION 1..354: note = tr|A0A1X6YPC6|A0A1X6YPC6_9RHOB Epoxyqueuosine reductase OS=Limimaricola soesokkakensis OX=1343159; GN = queG PE=3 SV=1
MNQGAALKTRLREAALGEGFAEMGICRPDAIPEAAGRLATYVEEGRHGQMGWMEERMGWRGNPAALWPEARSVIMLAEAYTPRHDPLEVLGQRDRAAISVYAHGRDYHDLVKKRLKRVGRWLLEQCPDEQIKVFVDTAPVMEKPLAQAAGLGWQGKHTNLLGRTVGNWVFLGAIFTTVELPVDAPAAEKCGSCTRCLDICPTNAFPAPFQLDARRCISYLTIEHKGPVPEEFREALGNRIYGCDDCLAVCPWNKFAQEATEMRYFGKVDAPPLADLARLDDAAFREMFSGSPIKRIGRDRFLRNVAYAIGNSGDPSLLPVARDLAAEPDPVLAEAGQWAVRRLDGKGGGASSLS

SEQ ID NO: 77871 - protein, 377 aa, unidentified
  source 1..377: note = Limimonas halophila
  REGION 1..377: note = tr|A0A1G7SK25|A0A1G7SK25_9PROT Epoxyqueuosine reductase OS=Limimonas halophila OX=1082479 GN=queG PE=3; SV = 1
MADTDPKAAIRTQALELGFDAVGFTEADLGEQARENLHAYLARGHHGDMGWLADTAERREHPRALWDDARSVVVLGLNYGPAHNPLTVLELPDRGAISVYAQNRDYHDLVKKRLKRLARWMHETLGAQVKVFVDTAPVMEKPLAERAGVGWQGKHTNLVSRPLGSWLFLGEVFTDLDLEPDAPEGDHCGSCRRCLDVCPTNAFPAPYRLDATRCISYLTIEHKGHIPREFRAPMGNRIYGCDDCLAVCPWNKFAKPTDETALWGRVELRAPRLRDLVNLDDAGFRQVFSASPIKRLGRNRFVRNVLIAIGNSGQPALVPEVRARLDDNSALVRAMAVWALARLADARTVEQEARRRLAVEDDAEVRAEWRMELGEPV

SEQ ID NO: 77872 - protein, 147 aa, Limnobacter sp.
  REGION 1..147: note = tr|A0A350FT25|A0A350FT25_9BURK tRNA epoxyqueuosine(34) reductase QueG (Fragment); OS = Limnobacter sp. OX=2003368 GN=DCX50_04360 PE=4 SV=1
MQAHQEQENWALLQRVAKTQGLGCMGVSDTHLQACEPHLQTWLNQGMHGEMAYMERHGLNRLNADTLFPGAIRIVSLRVPYVPETTLNQPDATTFTEKTLMEIEAHNKPYVSLYARGRDYHKVIRQRLKRFADAVNSEVGGFGFRVA

SEQ ID NO: 77873 - protein, 361 aa, Limnobacter sp.
  REGION 1..361: note = tr|A6GSM2|A6GSM2_9BURK Putative iron-sulfur cluster-binding protein OS=Limnobacter sp. MED105; OX = 391597 GN=LMED105_15833 PE=4 SV=1
MQAHQEQENWALLQRVAKAQGLGCMGVSDTHLQACEPHLQAWLNQGMHGEMAYMERHGLKRLNTDTLFPGAIRIVSLRVPYVPETTLNQPDAATFTEKTLSEIEARDTPYVSLYARGRDYHKVIRQRLKRFADAVNSEVAGFGFRVAVDSAPTAEVEIARKAGLGWRGKHTLLIHPDEGSLFFLGEVFTNMPLPLSGEFGKNHCGTCNSCMTACPTQAIVKPYQVDARLCISYLTIEHDSEIPLELRPLVGTRIYGCDDCQLACPWNKFAKPAQYADFNPRAEFEKPDWFAMMRWTEEEFLKLTEGSAIRRIGYKRFRRNLAVAAGNSVEVMGIREALLGMRKTADAFLMEHIDWALSRLD

SEQ ID NO: 77874 - protein, 379 aa, unidentified
  source 1..379: note = Limnobaculum parvum
  REGION 1..379: note = tr|A0A2Y9U0N2|A0A2Y9U0N2_9ENTR Epoxyqueuosine reductase OS=Limnobaculum parvum OX=2172103 GN=queG PE=3; SV = 1
MSHPLDLNLLAQHIKQWGQALGFQQVGICDTDLSLEEPRLQAWLDKQYHGDMAWMARYGMMRARPHELEPGTLRVISVRMNYLPPHASFAKSLADPNIGYISRYALGRDYHKVLRQRLKNLGEKIQQHCENLHFRPFVDSAPMMERPLAAKAGIGWTGKHSLIINREAGSWFFLGELLVDIPLPVDQPVEEECGRCIACMTLCPTGAIVEPYIVDARRCISYLTIELEGSIPEELRPLMGNRIYGCDDCQMGCPWNRIAPLTEEQDFLPRSTLHHTALLELYAWDEATFLSKTEGSPVRRIGYFRWLRNISVALGNAPYQAEIIEALEQRKNLYAIVDEHIEWALTRQWEKREQRGVEVRAPKQLRLIRSVEKGLPRDA

SEQ ID NO: 77875 - protein, 408 aa, unidentified
  source 1..408: note = Limnochorda pilosa
  REGION 1..408: note = tr|A0A0K2SJ27|A0A0K2SJ27_9FIRM Epoxyqueuosine reductase OS=Limnochorda pilosa OX=1555112 GN=LIP_1175; PE = 4 SV=1
MSLEEELKAEGRRLGFHRVGIAPASELARARALLQSQAEQGTYPAFTHPDAALRTDPSRWLEGARSVVAVALAYPHPPRSAPSDGSPRGLVARYACFEDYHPVIEEGLRKLMALLARRAGRPVRWRLLVDTGPAVDRAVAEKAGLGGVGKNGCLFVNGAGSWVVLGEAVTDVALTPDEPVSLDCGTCNRCVEACPTGALEPYRVDPRLCISEATQLRGPLPGERRESLGRYVWGCDICQQVCPWNRDVDPEGALLDPLPQVGPNPSLLELLTLTRQGFRERFAHSALNWRDEKVLQRNAAYALGNLRRASTVPALAERLVADPSPTVRGAAAWALGRIATARAVEALAAALVTECDRGVRRELEDALRVARSSPSPPSKPRRHPARAPGRRGSESPPRPAPAPPGSRC

SEQ ID NO: 77876 - protein, 357 aa, Limnohabitans curvus
  REGION 1..357: note = tr|A0A315EVJ4|A0A315EVJ4_9BURK Epoxyqueuosine reductase OS=Limnohabitans curvus OX=323423 GN=queG PE=3; SV = 1
MQALGQTLGFSQIAVAPLDLSSAEPHLQHWLAQNFHGSMDYMARHGLKRARPAELVPGTLSVLTARMNYLPRDTAEGWQDAEWQRLRNPAEAVVSVYARGRDYHKVLRNRLDTLAQQIDTLLIDTLKPNGFEYRAFTDSAPVMEAELATRSGQGWRGKHSLVLNREAGSMFFLGEIFLNVALPASESTSAHCGQCTACMDVCPTQAIVAEGLVDARRCISYLTIEHEGSIDVALRPLMGNHIYGCDDCQLICPWNKFAQASSLPDFDVRAGLVGQGMARLLAWTEAEFLRYTEGSPIRRIGHVRWLRNLAVAAGNALRQADDATLRQALQVHLSHSSDVVREHVQWALAQSDRLRAV

SEQ ID NO: 77877 - protein, 359 aa, Limnohabitans parvus
  REGION 1..359: note = tr|A0A315FIL3|A0A315FIL3_9BURK Epoxyqueuosine reductase OS=Limnohabitans parvus II-B4 OX=1293052 GN=queG; PE = 3 SV=1
MDLLELWPQIQIWARELGLSQIGVTGIDLTSAEPGLQAWLAAGFHGSMGYMASHGLKRARPAELQPGTVSVITARMDYLPQGSPPDWLARETARSLQPGEAVVSLYARGRDYHKVLRSRLQKLQDRIAQAIGPFGHRVFTDSAPVLEAELATRSGLGWRGKHTLVLSREAGSMFFLGELFVDFALPETPAVSAHCGQCTACMDLCPTKAIVGPYRLDARRCISYLTIEHAGPIDEALRPLIGNRIYGCDDCQLACPWNKFAQVSPLPDWQAREGLGAGSLVQLMAWSEAEFLCRTEGSAIRRIGHARWLRNLALAAGNALASEVITAPERQALQQALAVHLVHTDPVVQEQVSWSLAQV

SEQ ID NO: 77878 - protein, 359 aa, Limnohabitans planktonicus
  REGION 1..359: note = tr|A0A2T7UHT9|A0A2T7UHT9_9BURK Epoxyqueuosine reductase OS=Limnohabitans planktonicus II-D5 OX=1293045; GN = queG PE=3 SV=1
MDLLELWPQIQIWARELGLSQIAVTGIDLSSAEPGLQAWLAAGFHGSMGYMASHGMKRARPAELVPGTVSVITARMDYLPQDTPPDWLAHETARSLQPGEAVVSVYARGRDYHKVLRSRLQKLQDRIAEAIGPFGHRVFTDSAPVLEAELATRSGLGWRGKHTLVLSREAGSMFFLGELFVDFALPETPAVSAHCGQCTACMDLCPTQAIVGPYRLDARRCISYLTIEHAGPIDEALRPLIGNRIYGCDDCQLACPWNKFAQVSALPDWQPRDGLKASSIVSLMRWDEAEFLRRTEGSAIRRIGHDRWLRNLALAAGNALASMGMNTEDRLALQQALTTHAAHPDPVVQEQVAWSLAKV

SEQ ID NO: 77879 - protein, 446 aa, Limnohabitans sp.
  REGION 1..446: note = tr|A0A5C7ZHS7|A0A5C7ZHS7_9BURK Epoxyqueuosine reductase OS=Limnohabitans sp. OX=1907725 GN=queG PE=3 SV=1
MGLHHRIGRTFDAAPHAAGAQQVAHESGLARTQIAAQLDAGVASARPFGQVRRERASPPLRGLFVRPVQRPYGLAFYNGRVALAHQRFDPLVLWPQIQGWAHGLGLSQIGVTGIDLRDAEPGFQAWLKMGFHGGMDYMASHGIKRARPAELVPGTVSVITVRMDYLPQGTPDDWVAQEQARQERPEEAVVSVYARGRDYHKVLRARLQKLADRIAAVVGPFGHRVFTDSAPVLEAELATRSGLGWRGKHTLVLSREAGSMFFLGELFVDFDLPPTEPVSAHCGQCSACLQVCPTQAIVAPYRLDARRCISYLTIEHEGLIPHELRPLIGNRVYGCDDCQLVCPWNKFAKVHALPDWQPREGLTGSAIATLLSWSEAEFLRRTEGSAIRRIGHVRWLRNLALAAGNALRSGQLSPAQQEALREALLARRDHPDEVVREQVAWSLALR

SEQ ID NO: 77880 - protein, 354 aa, Limnohabitans sp.
  REGION 1..354: note = tr|A0A315BKU3|A0A315BKU3_9BURK Epoxyqueuosine reductase OS=Limnohabitans sp. WS1 OX=1100726 GN=queG PE=3; SV = 1
MWPQIQVWAGELGLSQIGVTGIDLSSAEPGLSAWLEAGFQGSMHYMAAHGLKRARPAELVPGTVSVITARMDYLPEGTTSDWVSRETARSLQPGEAVVSIYARGRDYHKVLRSRLQKLQDRIAQAIGPFGHRVFTDSAPVLEAELASRSGLGWRGKHTLILSREAGSMFFLGELFVDFALPETPAATAHCGQCTACMDLCPTQAIVGPYRLDARRCISYLTIEHAGPIDEALRPLIGNRIYGCDDCQLACPWNKFAQVNALPDWQPREGLGASSIVQLMAWSEAEFLGRTEGSAIRRIGHARWLRNLALAAGNALASAGLTALDRHALHQALSTHAGHPDPVVQEQVVWSLGSA

SEQ ID NO: 77881 - protein, 306 aa, unidentified
  source 1..306: note = Limnoraphis robusta
  REGION 1..306: note = tr|A0A0F5Y7A1|A0A0F5Y7A1_9CYAN Epoxyqueuosine reductase OS=Limnoraphis robusta CS-951 OX=1637645 GN=queG; PE = 3 SV=1
MYPPVQAHQVKQQAITLGFHKVGIATVVEPKAEVERLQAWLNQGYQAEMAWMANPRRQDIRQVMPEVQSVICVALNYYTPDERREGAEYGKISRYGWGRDYHKVMHQKLKAFSNWLQAQGEGIQARYYADTGPISDKVWAQRAGIGWIAKNSNVITREYGSWVFLGEVLTNLELTPDSPHTEHCGTCTRCIEACPTNAITEPFVVDANRCIAYHTIENRAEQLPENIDLNGWVAGCDICQDVCPWNQRFAKETDVEAFQPYPGNIDPKLSELAELSEEEWNEQFTASALRRIKPQMWRRNAKKNLL

SEQ ID NO: 77882 - protein, 309 aa, unidentified; identical to SEQ ID NO: 74607
  source 1..309: note = Limnospira indica
  REGION 1..309: note = tr|H1WBW1|H1WBW1_9CYAN Epoxyqueuosine reductase; OS = Limnospira indica PCC 8005 OX=376219 GN=queG PE=3 SV=1

SEQ ID NO: 77883 - protein, 319 aa, unidentified
  source 1..319: note = Limnothrix rosea
  REGION 1..319: note = tr|A0A1Q4R839|A0A1Q4R839_9CYAN Epoxyqueuosine reductase OS=Limnothrix rosea IAM M-220 OX=454133 GN=queG; PE = 3 SV=1
MDKQTQRIKAQGLALGFHKIGIAAIAPVDTENLERLNRWLDKGFQADMAWMASPKRQDIRRCLPEVKSVIAVALNYYTDHQHSADPAIAKISRYGWGRDYHRVLTKRLKAFCHWLSIEFPADQHRFYVDTGPVQDKIWAERAGLGWQAKNSNVITREYGSWVFLGEILTTLELTPDKPHTNHCGTCTRCLDACPTGAIAKPYVVDANRCIAYHTIENRAEDLPETIKPHLQNWVAGCDICQDVCPWNQRFAKETDIPDFQPYPKNLAPKLTELAEITDEEWGDRLIGSALRRIKPSMWRRNAKANLEAQQKTSPRDGEG

SEQ ID NO: 77884 - protein, 401 aa, unidentified
  source 1..401: note = Limnothrix sp.
  REGION 1..401: note = tr|A0A372DT77|A0A372DT77_9CYAN Epoxyqueuosine reductase OS=Limnothrix sp. CACIAM 69d OX=1890733 GN=queG; PE = 3 SV=1
MDTTALEYDPAVGGSSPVAIARRNTYQVKTKALALGFHQVGIAAISSEYPPLPSAVSALQRWLDRGFAAEMKWMAAPKRFDAREFMPEARSVICVALNYYSPEQRPLEQRPLNPSFSQAESAIEPAQAQPQLDQPQLDQPQFGKIARYAWGRDYHRVLETRLKALAQWLVTLDPRAQSRWAVDSSPVQDKAWAQEAGLGWIGKNGNLITRQYGSWVFLGELFTTLELLPDRPHTSHCGTCTRCLEACPTGAIPEPFVVDANRCIAYHTIENRAETLPPAIVENLQGWVAGCDICQDVCPWNQRFAQPTDIEDFRPRSGVVAPRLDQLAQLSDDAWDQAFRGSALRRIKPAMWRRNARASLKLDPNVSLQASSLSPPRSADSPPDRPIDPSMDPQLDSESHP

SEQ ID NO: 77885 - protein, 308 aa, Lishizhenia tianjinensis
  REGION 1..308: note = tr|A0A1I7B424|A0A1I7B424_9FLAO Epoxyqueuosine reductase OS=Lishizhenia tianjinensis OX=477690 GN=queG; PE = 3 SV=1
MSKEKHTRLIKEKARELGFFFCGISKADFLEEEAPRLEKWLNNQRHGKMNYMENHFDKRLDPRLLVDGAKSVVSLLLNYYPSEKQAENTYKISKYAYGQDYHHIIKDKLKEFFQYLQDEIGEVGGRVFVDSAPVMDKAWAKKSGLGWIGKNSNLINTKAGSFFFIAELILDLELQEDGPIKDFCGTCTRCIDACPTEAIVAPYVVDGSKCISYLTIELKDEILPSEFKGKMDDWMFGCDVCQDVCPWNRFSKPHNTKAFDPHENLLKMNKADWEDLTEEVYRELFKKSAVKRTKFNGVQRNVSFLKSS

SEQ ID NO: 77886 - protein, 408 aa, unidentified
  source 1..408: note = Listeria aquatica
  REGION 1..408: note = tr|W7BJ94|W7BJ94_9LIST YhbA protein OS=Listeria aquatica FSL S10-1188 OX=1265818 GN=MAQA_06753 PE=4 SV=1
MNLEQLKVDIQAYATEIGIQKIGFTTADPFLFLKERLEIAEKEDVLTGFEHPVLEERVYPDRIFTEPKSIIAIALSYPSKLKASPVSRKESRRGVFARASWGIDYHTILREKLALLETFIKKRVPEAVMKSMVDTGELSDVAVAERAGIGARGKNTLLLTKEYGSWVYLGEMITNLAFPSDKPIGDLCGDCNQCIKACPTGSLLGEGKMNPKICLSYLTQTKGFLEDEYREVLHNRLYGCDTCQVVCPYNRGKDFHLHEAMEPDPELVRPELKPLLKISNREFKEKFGNMAGSWRGKKPIQRNAIIVLARYKDKTAVEPLIDCLKNDPRPVIRGTSAWALAKIGGKEAEQAIFEALTVEQDQEALLELEKAKKNHRNKVKKNYAKSCCTLSTRNPCKHREHFTDVCRN

SEQ ID NO: 77887 - protein, 376 aa, unidentified
  source 1..376: note = Listeria booriae
  REGION 1..376: note = tr|A0A099W8I1|A0A099W8I1_9LIST Epoxyqueuosine reductase OS=Listeria booriae OX=1552123 GN=queG PE=3 SV=1
MDMKQLKQDIIQYANEIGIQKIGFASADPFLELKARLEVAVKEDVLTGFEHPNIDERVYPDLIFDEPRSIIAIALAYPSKMKEEPVSRREARRGVFSRASWGTDYHTVLREKLAKLETFITELVPEARFKSMVDTGELSDVAVAERAGLGWRGKNTLLISPEFGSFIYLGEMVTNLPLAPDKPMGDLCGDCNKCVEACPTGSLLGEGKMNPKICLSYLSQTKGFLDEKYRDVLHNRLYGCDTCQVVCPYNRGHDFHFHEAMEPDPELVKPELKPLLSISNKEFKAKFGPMAGSWRGKKPIQRNAIIVLARYKDKTAVPELIRCMTEDTRPVIRGTAAWALGKIGGEEAKEALQVAHDEDNEVLAEITRAKNLIGIR

SEQ ID NO: 77888 - protein, 374 aa, unidentified
  source 1..374: note = Listeria cornellensis
  REGION 1..374: note = tr|W7BWZ7|W7BWZ7_9LIST YhbA protein OS=Listeria cornellensis FSL F6-0969 OX=1265820 GN=PCORN_05673 PE=4; SV = 1
MNELKQDIIEYADEIGIQKIGFASADPFLELKTRLDVAAKEDVLTGFEHPNIDERVYPDLIFKEPRSIIAIALAYPSKMKNGPVSRKEARRGVFSRASWGTDYHTVLREKLTLLEAFIVERVPEARFKSMVDTGEFSDVAVAERAGLGSRSKNTLLITPEFGSFVYLGETLTNLPLAPDKPMGDLCGDCNKCVEACPTGSLLGEGKMNPKICLSYLSQTKGFLDEKYRDVLHNRLYGCDTCQVVCPYNRGHDFHFHEAMEPDPELVKPELKPLLSISNKEFKEKFGPMAGSWRGKKPIQRNAIIVLARYKDKTAVPELIRCMTEDPRPVIRGTAAWALGKIGGADAEQALMQAHDDDAEVLAEMTRAKNLIGVR

SEQ ID NO: 77889 - protein, 378 aa, unidentified
  source 1..378: note = Listeria fleischmannii
  REGION 1..378: note = tr|A0A0J8GCX3|A0A0J8GCX3_9LIST YhbA protein; OS = Listeria fleischmannii 1991 OX=1430899 GN=X560_1880; PE = 4 SV=1
MDVKKLKAEIIQYATEIGVQKIGFTTADPFLFLKERLEVAEKEGVLTGFEHPVLDERVYPDLIFEEPKSIIAIALAYPSKLKESPTSKRESRRGVFARASWGIDYHTILREKLALIEAFILERVKDAKMKSMVDTGELSDVAVAERAGIGARGKNTLLITKEFGSWVYLGEMLTNIAFPPDTPETDLCGDCNKCVEACPTNSLLGEGAMNPKICLSYLTQTKGFLEEEYREVLHNRLYGCDTCQVVCPYNRGRDFHLHKEMEQDGNLVRPELKPLLHISNREFKEKFGSMAGSWRGKKPIQRNAIIILARYKDKTAIPDLIGCLNHDTRPVIRGTAAWALAKIGGKDAEVAILNAWEKEKDEEVKIEIERAKKIIGVG

SEQ ID NO: 77890 - protein, 378 aa, unidentified; identical to SEQ ID NO: 77889
  source 1..378: note = Listeria fleischmannii
  REGION 1..378: note = tr|A0A2X3GR88|A0A2X3GR88_9LIST Epoxyqueuosine reductase OS=Listeria fleischmannii subsp. fleischmannii; OX = 1671902 GN=queG PE=4 SV=1

SEQ ID NO: 77891 - protein, 378 aa, unidentified
  source 1..378: note = Listeria floridensis
  REGION 1..378: note = tr|W7BTI5|W7BTI5_9LIST YhbA protein OS=Listeria floridensis FSL S10-1187 OX=1265817 GN=MFLO_12621 PE=4 SV=1
MNLEELKQEIIDYAAQVGIQKIGFTTADPFLFLKERLLIAEKEGILTGFEHPVIDERVYPDQIFHEPRSIIAIALSYPSKLKEPPVSKRGSRRGVFARASWGTDYHTILREKLVLLEKFITERVPDAKMKSMVDTGELSDVAVAERSGIGARGKNTLLLTEDYGSFVYLGEMITNLAFPPDKPIGDLCGDCNQCVKACPTGSLLGEGKMNPKICLSYLTQTKGFLEEEYREVLHNRLYGCDTCQVVCPYNRGKDFHLHPEMEPDPELVRPELKPLLTISNRDFKEKFGDMAGSWRGKKPIQRNAIIVLARYKDKTAVSLLIDCLTNDPRPVIRGTSAWALAKIGGEAAEQALNEALQTETDLEVLAELDHAKNIIETR

SEQ ID NO: 77892 - protein, 379 aa, unidentified
  source 1..379: note = Listeria grandensis
  REGION 1..379: note = tr|W7B959|W7B959_9LIST YhbA protein OS=Listeria grandensis FSL F6-0971 OX=1265819 GN=PGRAN_07014 PE=4 SV=1
MQNIDMNDLKQDIIAYADEIGIQKIGFASADPFLELKARLEVAAKEDVLTGFEHPNIDERVYPDLIFKEPRSIIAIALAYPSKMKNEPVSRKEARRGIFSRASWGTDYHTVLREKLTLLEAFIAERVPDARFKSMVDTGEFSDVAVAERAGIGWRGKNTLLISPEFGSFIYLGEMLTNLPLASDKPMGDLCGDCNKCVEACPTGSLLGEGKMNPKICLSYLSQTKGFLDEKYRDVLHNRLYGCDTCQSVCPYNRGHDFHFHEAMEPDPELVKPELKPLLSISNKEFKQKFGPMAGSWRGKKPIQRNAIIVLARYKDKTAVPELIRCMTEDPRPVIRGTAAWALGKIGGEEAEQALLRAEEQDTEVLAEITRAKNLIGAR

SEQ ID NO: 77893 - protein, 384 aa, Listeria grayi
  REGION 1..384: note = tr|A0A448QEC6|A0A448QEC6_LISGR Epoxyqueuosine reductase OS=Listeria grayi OX=1641 GN=queG PE=3 SV=1
MTTQTPIDYEQLKQEIIAYSKTIGIQKIGFTTAEPFLFLKKRLEKAKEEDVLTGFEHPNIDERVYPELIFEAPQSIIAIALAYPSKLKESPVSKREARRGVFARASWGTDYHTILREKLALLEAFIQEKVPEAKFKSMVDTGELSDVAVAERAGIGWRGKNTLLITPEYGSFVYLGEMITNLAFPADQPMEDLCGSCNQCVKACPTGSLLGEGRMNPKICLSYLTQTKDMLPEEYREKIHNRLYGCDTCQVVCPFNRGHDFHLHEEMEPDPELVRPELKPLLSLSNKEFKEKFGKMAGSWRGKKPLQRNALLILARYKDQTAIPDIIQCLEKDPRPVIRGTAAWSLAKIGGKEAKTAVYRANQVEENEEVQAEIKRAIQIIETR

SEQ ID NO: 77894 - protein, 384 aa, Listeria grayi
  REGION 1..384: note = tr|D7V0S6|D7V0S6_LISGR Epoxyqueuosine reductase; OS = Listeria grayi DSM 20601 OX=525367 GN=queG PE=3 SV=1
MTTQTPIDYEQLKQEIIAYSKTIGIQKIGFTTAEPFLFLKKRLEKAKEEDVLTGFEHPNIDERVYPELIFEAPQSIIAIALAYPSKLKESPVSKREARRGVFARASWGTDYHTILREKLALLEAFIQEKVPEAKFKSMVDTGELSDVAVAERAGIGWRGKNTLLITPEYGSFVYLGEMITNLAFPADQPMEDLCGSCNQCVKACPTGSLLGEGKMNPKICLSYLTQTKDMLPEEYREIIHNRLYGCDTCQVVCPFNRGHDFHLHEEMEPDPELVRPELKPLLSLSNKEFKEKFGKMAGSWRGKKPLQRNALLILARYKDQTAVPDIIQCLEKDPRPVIRGTAAWSLAKIGGKEAKIAIYRANQVEENEEVQAEIKRAIQIIETR

SEQ ID NO: 77895 - protein, 379 aa, Listeria innocua
  REGION 1..379: note = tr|A0A473HFK8|A0A473HFK8_LISIO Epoxyqueuosine reductase OS=Listeria innocua OX=1642 GN=queG PE=3 SV=1
MIVKPESNYAALKEELIAYAHEIGIQKIGFTTADPFLFLKERLLEAEALDLFTGFEHPVIDERVYPELIFKEPQSIIAIALAYPSKLKEAPTSKKEARRGVFARASWGIDYHTVLREKLALLEQFLSERLPDVRMKSMVDTGELSDVAVAERAGIGWRGKNTLLITPEFGSWVYLGEMITNIPFEPDTPASDLCGSCNQCVKACPTGSLLGEGKMNPKICLSYLTQTKDFLDEKYREVLHNRLYGCDTCQVVCPYNRGHDFHFHEEMEPDPELVRPELKPLLHISNRAFKEQFGDMAGSWRGKKPIQRNAIIILARYKDKTAVPDLIDCLENDPRPVIRGTAGWALRKIGGEQAEEAVQKALQNEQDEQVLQELTAIPN

SEQ ID NO: 77896 - protein, 380 aa, Listeria innocua
  REGION 1..380: note = tr|Q92D84|Q92D84_LISIN Epoxyqueuosine reductase; OS = Listeria innocua serovar 6a (strain ATCC BAA-680 / CLIP 11262) OX=272626 GN=queG PE=3 SV=1
MMIVKPESNYAALKEELIAYAHEIGIQKIGFTTADPFLFLKERLLEAEALDLFTGFEHPVIDERVYPELIFKEPQSIIAIALAYPSKLKEAPTSKKEARRGVFARASWGIDYHTVLREKLALLEQFLSERLPDVRMKSMVDTGELSDVAVAERAGIGWRGKNTLLITPEFGSWVYLGEMITNIPFEPDTPASDLCGSCNQCVKACPTGSLLGEGKMNPKICLSYLTQTKDFLDEKYREVLHNRLYGCDTCQVVCPYNRGHDFHFHEEMEPDPELVRPELKPLLHISNRAFKEQFGDMAGSWRGKKPIQRNAIIILARYKDKTAVPDLIDCLENDPRPVIRGTAGWALRKIGGEQAEEAVQKALQNEQDEQVLQELTAIPN

SEQ ID NO: 77897 - protein, 377 aa, Listeria ivanovii
  REGION 1..377: note = tr|G2ZDT8|G2ZDT8_LISIP Putative YhbA protein; OS = Listeria ivanovii (strain ATCC BAA-678 / PAM 55); OX = 881621 GN=LIV_0877 PE=4 SV=1
MDTEPNYSKLKKELIAYAHEIGIQKIGFTTADPFLFLKERLLESEALDLFTGFEHPIIDERVYPELIFQEPQSIIAIALAYPSKLKEAPISKKEGRRGVFARASWGIDYHTILREKLALLETFLAERLPDVRMKSMVDTGELSDVAVAERAGIGWRGKNTLLITPEYGSWVYLGEMITNIPFEPDQPASDLCASCNQCVKACPTGSLLGEGKMNPKICLSYLTQTKDFLDEKYREVLHNRLYGCDTCQVVCPYNRGHDFHFHEEMEPNPELVRPELKPLLKISNRAFKEQFGDMAGSWRGKKPIQRNAIIILARYKDKTAVPDLIECLQNDPRPVIRGTAGWALRKIGGDEAEKAIEKALQIEQDEQVLQELAAMPN

SEQ ID NO: 77898 - protein, 377 aa, Listeria ivanovii
  REGION 1..377: note = tr|A0A097BBY5|A0A097BBY5_LISIV Iron-sulfur cluster-binding protein OS=Listeria ivanovii subsp. londoniensis OX=202752 GN=JL58_04900 PE=4 SV=1
MDTEPNYSKLKKEFIAYAYEIGIQKIGFTTADPFLFLKERLLESEALDLFTGFEHPVIDERVYPELIFQEPQSIIAIALAYPSKLKEAPVSKKEGRRGVFARASWGIDYHTILREKLALLETFLAERLPDVRMKSMVDTGELSDVAVAERAGIGWRGKNTLLITPEYGSWVYLGEMITNIPFEPDQPASDLCASCNQCVKACPTSSLLGEGKMNPKICLSYLTQTKDFLDEKYREVLHNRLYGCDTCQVVCPYNRGHDFHFHEEMEPNPELVRPELKPLLKISNRAFKEQFGDMAGSWRGKKPIQRNAIIILARYKDKTAIPDLIECLQNDPRPVIRGTAGWALRKIGGDEAEKAIEEALQIEQDAQVLQELTAIPN

SEQ ID NO: 77899 - protein, 378 aa, unidentified
  source 1..378: note = Listeria kieliensis
  REGION 1..378: note = tr|A0A3D8TTP9|A0A3D8TTP9_9LIST Iron-sulfur cluster-binding protein OS=Listeria kieliensis OX=1621700; GN = UR08_01385 PE=4 SV=1
MDLEQLKADIQAYATEIGIQKIGFTTADPFLFLKERLEIAEKEDVLTGFEHPVLEERVYPDRIFNEPKSIIAIALSYPSKLKMSPVSRKEARRGVFARASWGIDYHTILREKLALLEAFIKERVPDAVMKSMVDTGELSDVAVAERAGIGARGKNTLLITKEYGSWVYLGEMITNLAFPPDEPIGDLCGDCNQCVKACPTGSLLGEGKMNPKICLSYLTQTKDFLEEEYREVLHNRLYGCDTCQVVCPYNRGKDFHFHEAMEPDPELVRPELKPLLKISNREFKEKFGDMAGSWRGKKPIQRNAIIVLARYKDKTAIEPLIDCLTNDPRPVIRGTSAWALAKIGGEKAEQAIHKALTVEEEEEVLMELENAKKIIETK

SEQ ID NO: 77900 - protein, 379 aa, Listeria monocytogenes
  REGION 1..379: note = tr|A0A5D5DT26|A0A5D5DT26_LISMN Epoxyqueuosine reductase OS=Listeria monocytogenes OX=1639 GN=queG PE=3; SV = 1
MIVKSTSNYAALKEELIAYAHEIGIQKIGFTTADPFLFLKERLLEAEALDLFTGFEHPVIDERVYPELIFKEPQSIIAIALAYPSKLKEAPVSKKGARRGVFARASWGIDYHTVLREKLALLETFLSERLPDVRMKSMVDTGELSDVAVAERAGIGWRGKNTLLITPEYGSWVYLGEMITNIPFEPDTPASDLCGSCNQCVKACPTGSLLGEGKMNPKICLSYLTQTKDFLDEKYREVLHNRLYGCDTCQVVCPYNRGHDFHFHDEMEPDPELVRPELKPLLHISNRAFKEQFGDMAGSWRGKKPIQRNAIIILARYKDKTTVPDLIDCLQNDPRPVIRGTAGWALRKIGGSDAEKAVEQALQTEQDEQVLQELTAIPN

SEQ ID NO: 77901 - protein, 379 aa, Listeria monocytogenes
  REGION 1..379: note = sp|Q8Y8H0|QUEG_LISMO Epoxyqueuosine reductase; OS = Listeria monocytogenes serovar 1/2a (strain ATCC BAA-679 / EGD-e) OX=169963 GN=queG PE=3 SV=1
MVVKQKADYAALKEELIAYAYEIGIQKIGFTTADPFLFLKERLLEAEALDLFTGFEHPVIEERVYPELIFKEPQSIIAIALAYPSKLKEAPVSKKGARRGVFARASWGIDYHTVLREKLALLETFLIERLPDVRMKSMVDTGELSDVAVAERAGIGWRGKNTLLITPEYGSWVYLGEMITNIPFEPDTPASDLCGSCNQCVKACPTGSLLGEGKMNPKICLSYLTQTKDFLDEKYREVLHNRLYGCDTCQVVCPYNRGHDFHFHEEMEPDPELVRPELKPLLHISNRAFKEQFGDMAGSWRGKKPIQRNAIIILARYKDKTAVPDLIDCLQNDPRPVIRGTAGWALRKIGGRDAEEAVERALQTEQDVQVLQELTAIPN

SEQ ID NO: 77902 - protein, 374 aa, unidentified
  source 1..374: note = Listeria riparia
  REGION 1..374: note = tr|W7D5T2|W7D5T2_9LIST Epoxyqueuosine reductase; OS = Listeria riparia FSL S10-1204 OX=1265816 GN=queG PE=3; SV = 1
MKQLKQDIIQYANEIGIQKIGFASADPFLELKARLEVAVKEDVLTGFEHPNIDERVYPDLIFDAPRSIIAIALAYPSKMKEEPVSRKEARRGVFSRASWGTDYHTVLREKLAKLETFITELVPEARFKSMVDTGELSDVAVAERAGLGWRGKNTLLISPEFGSFIYLGEMVTNLPLAPDKPMGDLCGDCNKCVEACPTGSLLGEGKMNPKICLSYLSQTKGFLDEKYRDVLHNRLYGCDTCQVVCPYNRGHDFHFHEAMEPDPELVKPELKPLLSISNKEFKAKFGPMAGSWRGKKPIQRNAIIVLARYKDKTAVPELIRCMTEDTRPVIRGTAAWALGKIGGEEAKEALQKAHDEDKEVLAEIMRAKNLIGIR

SEQ ID NO: 77903 - protein, 379 aa, Listeria rocourtiae
  REGION 1..379: note = tr|A0A4R6ZSM7|A0A4R6ZSM7_9LIST Epoxyqueuosine reductase OS=Listeria rocourtiae OX=647910 GN=DFP96_101388; PE = 4 SV=1
MRNIGMNELKQDIIDYAAEIGIQKIGFASADPFLELKTRLEAAVKEAVLTGFEHPNIDERVYPERIFNEPRSIIAIALAYPSKMKNEPVSKKEARRGVFSRASWGTDYHTVLREKLALLEAFIEKRVPEARFKSMVDTGELSDVAVAERAGLGWRGKNTLLITPEFGSFVYLGETLTNLPLVPDKPMGDLCGDCNKCVEACPTGSLLGEGKMNPKICLSYLSQTKGFLDEKYRAVLHNRLYGCDTCQVVCPYNRGHDFHFHEAMEPNPELVKPELKPLLSISNKEFKEQFGPMAGSWRGKKPIQRNAIIVLARYKDKTAVPELIRCMKEDPRPVIRGTAAWALGKIGGREAELALREAYDDDAEVLTEITRAKNLIGVR

SEQ ID NO: 77904 - protein, 377 aa, Listeria seeligeri
  REGION 1..377: note = tr|A0A5B8A8R3|A0A5B8A8R3_LISSE Epoxyqueuosine reductase OS=Listeria seeligeri OX=1640 GN=queG PE=3 SV=1
MTTKTDYTILKKELIAYAHEIGIQKIGFTTADPFLFLKERLLKAEALDLFTGFEHPVIDERVYPELIFKEPQSIIAIALAYPSKLKEAPISKKKGRRGVFARASWGIDYHTILREKLALLETFLAERLPEVRMKSMVDTGELSDVAVAERAGIGWRGKNTLLITPEYGSWVYLGEMITNIPFEPDQPASDLCGSCNQCVKACPTGSLLGEGKMNPKICLSYLTQTKDFLDEKYREVLHNRLYGCDTCQVVCPYNRGHDFHFHEEMEPDPELVRPQLKPLLKISNRAFKEQFGDMAGSWRGKKPIQRNAIIILARYKDKTAIPDLIDCLQNDPRPVIRGTAGWALLKIGGTEAEQAVQKALQTEEDEQVRKELTAIPN

SEQ ID NO: 77905 - protein, 377 aa, Listeria seeligeri
  REGION 1..377: note = tr|E3ZNR3|E3ZNR3_LISSE Putative iron-sulfur cluster-binding protein OS=Listeria seeligeri FSL N1-067; OX = 702453 GN=NT03LS_1091 PE=4 SV=1
MTTKTDYTILKKELIAYAHEIGIQKIGFTTADPFLFLKERLLKAEALDLFTGFEHPVIDERVYPELIFKEPLSIIAIALAYPSKLKEAPISKKEGRRGVFARASWGIDYHTILREKLALLETFLAERLPEVRMKSMVDTGELSDVAVAERAGIGWRGKNTLLITPEYGSWVYLGEMITNIPFEPDQPASDLCGSCNQCVKACPTGSMLGEGKMNPKICLSYLTQTKDFLDEKYREVLHNRLYGCDTCQVVCPYNRGHDFHFHEEMEPNPELVRPQLKPLLKISNRAFKEQFGDMAGSWRGKKPIQRNAIIILARYKDKTAIPDLIDCLQNDPRPVIRGTAGWALLKIGGTEAEQAVNEALQTEEDEQVRKELTAIPN

SEQ ID NO: 77906 - protein, 374 aa, Listeria sp.
  REGION 1..374: note = tr|A0A3N9TRV4|A0A3N9TRV4_9LIST tRNA epoxyqueuosine(34) reductase QueG OS=Listeria sp. SHR_NRA_18 OX=2269046 GN=queG PE=4 SV=1
MNGLKQDIIEYADEIGIQKIGFASADPFLELKTRLEVAAKEDVLTGFEHPNIDERVYPDLIFKEPRSIIAIALAYPSKMKNEPVSRKEARRGVFSRASWGTDYHTVLREKLMLLETFITERVPEARFKSMVDTGEFSDVAVAERAGLGSRAKNTLLITPEFGSFVYLGETLTNLPLAPDKPMGDLCGDCNKCVEACPTGSLLGEGKMNPKICLSYLSQTKGFLDEKYREVLHNRLYGCDTCQVVCPYNRGHDFHFHEAMEPNPELVKPELKPLLSISNKEFKEKFGPMAGSWRGKKPIQRNAIIVLARYKDKTAVPELIRCMTEDPRPVIRGTAAWALGKIGGADAEQALMQAHDDDAEVVAEMTRAKNLIGVR

SEQ ID NO: 77907 - protein, 374 aa, unidentified
  source 1..374: note = Listeria weihenstephanensis
  REGION 1..374: note = tr|A0A1S7FYL5|A0A1S7FYL5_9LIST Iron-sulfur cluster-binding protein OS=Listeria weihenstephanensis; OX = 1006155 GN=UE46_06195 PE=4 SV=1
MNELKQEIIRYAREIDIQEIGFASADPFLELKTRLEVAAKEDVLTGFEHPNIDERVYPELIFKEPRSIIAIALAYPSKMKNEPVSRKEARRGLFSRASWGTDYHTVLREKLDLLEAFIRERVPEARFKSMVDTGEFSDVAVAERAGIGWRGKNTLLISPEFGSFTYLGETLTNLPIAPDKPMGDLCGDCNKCVEACPTGSLLGEGKMNPKICLSYLSQTKGFLDEKYRDVLHNRLYGCDTCQVVCPYNRGHDFHFHEAMEPDPELVKPELKPLLSISNKEFKEKFGPMAGSWRGKKPIQRNAIIVLARYKDKTAVPELIRCMTEDPRPVIRGTAAWALGKIGGADAEQALLEVQEDDVEVLAEITRAKNLIGVR

SEQ ID NO: 77908 - protein, 379 aa, unidentified
  source 1..379: note = Listeria weihenstephanensis
  REGION 1..379: note = tr|W7CH29|W7CH29_9LIST YhbA protein OS=Listeria weihenstephanensis FSL R9-0317 OX=1265845 GN=PWEIH_14329; PE = 4 SV=1
MQNIDMNELKQEIIRYAREIDIQEIGFASADPFLELKTRLEVAAKEDVLTGFEHPNIDERVYPELIFKEPRSIIAIALAYPSKMKNEPVSRKEARRGLFSRASWGTDYHTVLREKLDLLEAFIRERVPEARFKSMVDTGEFSDVAVAERAGIGWRGKNTLLISPEFGSFTYLGETLTNLPIAPDKPMGDLCGDCNKCVEACPTGSLLGEGKMNPKICLSYLSQTKGFLDEKYRDVLHNRLYGCDTCQVVCPYNRGHDFHFHEAMEPDPELVKPELKPLLSISNKEFKEKFGPMAGSWRGKKPIQRNAIIVLARYKDKTAVPELIRCMTEDPRPVIRGTAAWALGKIGGADAEQALLEVQEDDVEVLAEITRAKNLIGVR

SEQ ID NO: 77909 - protein, 377 aa, Listeria welshimeri
  REGION 1..377: note = tr|A0AH49|A0AH49_LISW6 Epoxyqueuosine reductase; OS = Listeria welshimeri serovar 6b (strain ATCC 35897 / DSM 20650 / SLCC5334) OX=386043 GN=queG PE=3 SV=1
MKPEPNYTLLKKELIAYAHEIGIQKIGFTTADPFLFLKERLLEAEALDLFTGFEHPIINERVYPELIFKEPQSIIAIALAYPSKLKEAPVSKKGARRGVFARASWGIDYHTILREKLALLETFLSERLPGVRMKSMVDTGELSDVAVAERAGIGWRGKNTLLITPEYGSWLYLGEMITNIPFEPDTPASDLCGSCNQCVKACPTGSLLGEGKMNPKICLSYLTQTKDFLDEKYREVLHNRLYGCDTCQVVCPYNRGHDFHFHEEMEPNPELVRPELKPLLRISNRAFKEQFGDMAGSWRGKKPIQRNAIIILARYKDKTAVPDLIDCLQNDPRPVIRGTAGWALRKIGGEAAEEAVREALQTEQDEQVLQELTAIPN

SEQ ID NO: 77910 - protein, 376 aa, unidentified
  source 1..376: note = Listeriaceae bacterium
  REGION 1..376: note = tr|A0A099W4W0|A0A099W4W0_9LIST Iron-sulfur cluster-binding protein OS=Listeriaceae bacterium FSL A5-0209 OX=1497679 GN=EP56_12670 PE=4 SV=1
MDMNGLKQDIIEYADEIGIQKIGFASADPFLELKTRLEVAAKEDVLTGFEHPNIDERVYPDLIFKEPRSIIAIALAYPSKMKNEPVSRKEARRGVFSRASWGTDYHTVLREKLMLLETFITERVPEARFKSMVDTGEFSDVAVAERAGLGSRAKNTLLITPEFGSFVYLGETLTNLPLAPDKPMGDLCGDCNKCVEACPTGSLLGEGKMNPKICLSYLSQTKGFLDEKYREVLHNRLYGCDTCQVVCPYNRGHDFHFHEAMEPNPELVKPELKPLLSISNKEFKEKFGPMAGSWRGKKPIQRNAIIVLARYKDKTAVPELIRCMTEDPRPVIRGTAAWALGKIGGADAEQALMQAHDDDAEVVAEMTRAKNLIGVR

SEQ ID NO: 77911 - protein, 342 aa, Litoreibacter albidus
  REGION 1..342: note = tr|A0A1H2WJS8|A0A1H2WJS8_9RHOB Epoxyqueuosine reductase OS=Litoreibacter albidus OX=670155 GN=queG PE=3; SV = 1
MSLKDKLQAQALAEGFAKMGVCRPDAIPQAPERLKAYVDDGRHGQMGWMAERMTWRANPAALWPEARSVIMLAEVYTPDQDPLEILTHRDSAAISVYAQNKDYHDLVKKRLKRVGRWLIEQAEDVEIKVFVDTAPVMEKPLAAAAGLGWQGKHTNLLSRDLGNWFFLGAIFTTLELDPDIAQTDNCGSCTACLDICPTSAFPAPFQLDARRCISYLTIEHKGPVAEDLRERMGNHIYGCDDCLAVCPWNKFAQDATEMRYAARDELRAPKLADLAGLDDAEFRLKFSGSPIKRIGRDRFIRNVLYAIGNSGNPALVAHAQQHLNDPDVAVADAARWAVERLS

SEQ ID NO: 77912 - protein, 342 aa, unidentified
  source 1..342: note = Litoreibacter arenae
  REGION 1..342: note = tr|S9QCN4|S9QCN4_9RHOB Epoxyqueuosine reductase; OS = Litoreibacter arenae DSM 19593 OX=1123360 GN=queG PE=3; SV = 1
MTLKDQLRDKALAEGFSKMGVCRPDAIPAAPDRLVDYVDAGRHGQMGWMAERMNWRGNPAALWPEARSVIMLAEVYTPDHDPLETLTLRDRAAISVYAQNRDYHDIVKKRLKRVGRWLIEQAEAVEIKVFVDTAPVMEKPLAQAAGLGWQGKHTNVLSRDLGNWFFLGAIFTTLELDPDTAQTDNCGTCRACLDICPTQAFPAPFQLDARRCISYLTIEHKGPIDEELRGKMGNRIYGCDDCLAVCPWNKFAQEATELRYEARDDLRAPELAELAALDDAAFRAKFSGSPIKRIGRDRFIRNVLYAIGNSGQPELASAARTHLNDPDPAVSDAARWAVERLT

SEQ ID NO: 77913 - protein, 324 aa, unidentified
  source 1..324: note = Litoreibacter ascidiaceicola
  REGION 1..324: note = tr|A0A1M5BYR3|A0A1M5BYR3_9RHOB Epoxyqueuosine reductase OS=Litoreibacter ascidiaceicola OX=1486859; GN = SAMN05444273_106201 PE=4 SV=1
MGICTPDAIPQAPDRLSSYVDEGRHGQMGWMAERMTWRGDPSALWPEARSVIMLAEVYSPDHDPLETLKLRDRAAVSVYAQNRDYHDIVKKRLKRVGRWLIDQAEGVEIKVFVDTAPVMEKPLAQAAGLGWQGKHTNVLSRDLGNWFFIGAIFTTVELEPDQAQTDNCGTCRACLDICPTDAFPAAFQLDARRCISYLTIEHKGPIDEELRGKLGNRIYGCDDCLAVCPWNKFAKDATELRYAARDDLRAPALSELVALDDAAFRAKFSGSPIKRIGRDRFIRNVLYAIGNSENAELVNSARAHIHDSDPTIADAARWAVKRLS

SEQ ID NO: 77914 - protein, 342 aa, unidentified
  source 1..342: note = Litoreibacter halocynthiae
  REGION 1..342: note = tr|A0A4R7LDM6|A0A4R7LDM6_9RHOB Epoxyqueuosine reductase OS=Litoreibacter halocynthiae OX=1242689 GN=queG; PE = 3 SV=1
MSLKDRLKQQALAEGFAKMGICTPDAIPQAPDRLNTYVDEGRHGQMGWMAERMTWRGNPSALWPEARSVIMLAEVYSPDHDPLETLKLRDRAAVSVYAQNRDYHDIVKKRLKRVGRWLIDQAEGVEIKVFVDTAPVMEKPLAQAAGLGWQGKHTNVLSRDLGNWFFLGAIFTTVELEPDQAQTDNCGTCRACLDICPTDAFPAAFQLDARRCISYLTIEHKGPVDEELRSRLGNRIYGCDDCLAVCPWNKFAKDATELRYAARDDLRAPALSELVALDDAAFRAKFSGSPIKRIGRDRFIRNVLYAIGNSEDAKLVNSALAHIHDSDPTIADAARWAVNRLS

SEQ ID NO: 77915 - protein, 342 aa, Litoreibacter janthinus
  REGION 1..342: note = tr|A0A1I6G0R7|A0A1I6G0R7_9RHOB Epoxyqueuosine reductase OS=Litoreibacter janthinus OX=670154 GN=queG; PE = 3 SV=1
MSLKDRLRSQALAEGFSKMGVCKPDAIPEAPERLAAFVEKGLHGQMAWMSERMTWRGNPSALWPEARSVIMLAEVYTPDHDPLESLKLRDRAAISVYAQNRDYHDMVKKRLKRVGRWLIDQAEGAEIKVFVDTAPVMEKPLAQAAGLGWQGKHTNLLARDLGNWFFLGAIFTTVEIDPDTAQTDNCGSCRACLDICPTSAFPAPFQLDARRCISYLTIEHKGPVDLELRSKLGNRIYGCDDCLAVCPWNKFAQDAQEVRYAARDDLRAPYLEELSQLTDTAFRERFSGSPIKRIGRDRFVRNVLYAIGNSQRPELIDAARNLSDDRDPTVADAARWAVERLI

SEQ ID NO: 77916 - protein, 324 aa, unidentified
  source 1..324: note = Litoreibacter meonggei
  REGION 1..324: note = tr|A0A497WLI1|A0A497WLI1_9RHOB Epoxyqueuosine reductase OS=Litoreibacter meonggei OX=1049199; GN = BCF46_2254 PE=4 SV=1
MGICRPDAIPQASNRLNTYVDEGRHGQMGWMAERMAWRGSPEALWPEARSVIMLAEVYSPDHDPLETLKLRDRAVISVYAQNRDYHDIVKKRLKRVGRWLIDQAEGAEIKVFVDTAPVMEKPLAQAAGLGWQGKHTNILSRDLGNWFFLGAIFTTVELDPDTAQTENCGTCRACLDVCPTDAFPAPFQLDARRCISYLTIEHKGPIDEDLRGKLGNHIYGCDDCLAVCPWNKFAQNATELRYAARDDLRAPALAELVALNDVEFRAKFSGSPIKRIGRDRFIRNVLYAIGNSATPALIEAARAHTNDPDPTIADAARWAVERLT

SEQ ID NO: 77917 - protein, 343 aa, unidentified
  source 1..343: note = Litoreibacter ponti
  REGION 1..343: note = tr|A0A2T6BP26|A0A2T6BP26_9RHOB Epoxyqueuosine reductase OS=Litoreibacter ponti OX=1510457 GN=queG PE=3; SV = 1
MSLKDRLRDVALAEGFSKMGVCRPDAIPLAGDRLKRFIDEGRHGEMSWMAERMAWRGDPQALWPEARSIIMLAEVYTPDHDPLDTLTLRDRAAISVYAQNRDYHDLVKKRLKRVGRWLLEQARGEKIKVFVDTAPVMEKPLAQAAGLGWQGKHTNLLARDLGNWFFLGAIFTTVKLDPDIPEDENCGSCRACLDICPTDAFPAPFQLDARRCISYLTIEHKGPVAPELRAKMGNRIYGCDDCLAVCPWNKFAQDATEIRYAAREDLRAPNLGELASLDDAGFRTKFSGSPIKRIGRDRFVRNVLYAIGNSQTPALAEAARRLTDDPDPTVAEAAQWAIERLAS

SEQ ID NO: 77918 - protein, 325 aa, Litoreibacter sp.
  REGION 1..325: note = tr|A0A5B8I8Y8|A0A5B8I8Y8_9RHOB tRNA epoxyqueuosine(34) reductase QueG OS=Litoreibacter sp. LN3S51 OX=2599296 GN=queG PE=4 SV=1
MGVCRPDAVPEIAERLRDFVAKGRHGQMQWMSERMNWRGDPSELWPEARSVIMLAEPYTPEHDPLEVLSHPDRAAISVYAQNRDYHDVVKKRLKRLGRWLLEQVDNEQIKVFVDTAPVMEKPLAAAAGLGWQGKHTNLLGRDLGSWFFLGSIFTTVELPVDEPARENCGSCRACLDVCPTDAFPAPFQLDARRCISYLTIEHKGPVDLDLREKLGNRIYGCDDCLGVCPWNKFAAESREVKYAAREDLTSPKLAELATLDDTEFRARFSGSPIKRIGRDRFVRNVLYAIGNSGEPSLRPIAQSLTSDPDETVADAARWAVTRLNG

SEQ ID NO: 77919 - protein, 363 aa, unidentified
  source 1..363: note = Litoricolaceae bacterium
  REGION 1..363: note = tr|A0A520S661|A0A520S661_9GAMM Epoxyqueuosine reductase OS=Litoricolaceae bacterium OX=2510333 GN=queG; PE = 3 SV=1
MGKSWHQSNEVLAKLEAKAHELGFTSLGITDTNVSEHVSFLDAWLESGFHGSMKWLEQHLDLRKDPTRLVEGTQRVISVRLDYLPENTNCIDILNDPDKAYISRYALGRDYHKLMRKRLKHLGDWLTEEIQPHGFRVFSDSAPILEKHLAEKAGLGWIGKHTLLLSRRAGSWFFLGELLTDCPLPLTQTTEQPRCGSCTACLDVCPTNAFPEPYQLDATKCISYLTIEHKGSIPEELRAPMGNRVFGCDDCQLFCPWNRYASIGDPAFAPRHALDDQSLIDLFQWSEEEFLLKTEGNPLRRAGYVKFLENIAIGLGNSASHIGKAIQILELKHGMHGAVLDEHIDWAVSRLRNQASESERGNA

SEQ ID NO: 77920 - protein, 381 aa, unidentified
  source 1..381: note = Litoricolaceae bacterium
  REGION 1..381: note = tr|A0A520SCP3|A0A520SCP3_9GAMM Epoxyqueuosine reductase OS=Litoricolaceae bacterium OX=2510333 GN=queG; PE = 3 SV=1
MDASWHQSDQVLDRLREKALELGFTAIGVTDPDVSQHVSFLEHWLESGFHGSMEWFERHLDLRKDPTQLVPGTQRVISVRLDYLPENIDCNDILNDPDMAYISRYALGRDYHKLMRKRLKHLGDWFSNEIAPHGFRVFSDSAPLLEKHLAEKAGLGWIGKHTLLLSRSAGSWFFLGELLTDFPLPVSDEHEEARCGSCTACLDICPTSAFPAPYQLDATKCISYLTIEHKGPIPEALRAPMGNRVFGCDDCQLVCPWNRYAAIGDPAFHPRHALDRQPLCELFGWTEAEFLMKTEGSPLRRAGYVKFLENLAIGLGNSHSDTERVIQTLGTKLGQHGPTLDEHILWAIAALQRRASENALGNASARQSNHAHQQAPDAGQI

SEQ ID NO: 77921 - protein, 441 aa, unidentified
  source 1..441: note = Litorilinea aerophila
  REGION 1..441: note = tr|A0A540VF78|A0A540VF78_9CHLR DUF1730 domain-containing protein OS=Litorilinea aerophila; OX = 1204385 GN=FKZ61_12475 PE=4 SV=1
MPTDSLTQAIKREARRLGFDDCRALPVQTAPHADFFEAWLAAGRAGEMTYLERHQEKRRQPALLASPKTPPFQTMLVLTVNYYQFDLPPSLRDDPSRGIIASYAWGDDYHEIMRPLLYELDAFIRTQTGRASLGKALVDTGPVLERDWAQQAGVGFMGKNCCLIHPRDGSWLFLATLLIPERLTYDPPPQALPPHEPTAQAVMAGLPPDQVYGRWYLSPPETPERSVVATCGRCTRCLDACPTAAFVGPYHLDPQRCISYWTIEARGPIPRALRARFGNRIFGCDICQEVCPWNRRLSRQTPLLKGLEAHADRIAPPLLEGFAAETPYWLQPAAFAEHFRHSPILRAGRAGMLRNVCVALGNWGAVEAIPALGQALQDPEPLPRGHAAWALGRIAARHPHSQARSLLAAALETEADPWVQEEIHLALSTPSLADGLSPVLH

SEQ ID NO: 77922 - protein, 400 aa, unidentified
  source 1..400: note = Litorilituus sediminis
  REGION 1..400: note = tr|A0A4P6P694|A0A4P6P694_9GAMM Epoxyqueuosine reductase OS=Litorilituus sediminis OX=718192 GN=queG PE=3; SV = 1
MTTTAINYQELAEKIKRWGQELGFSQVGISDIDLSAHEPAFLRWLEQGYHGNMDYMARHGLMRTRPDELVPGTLRVISVRLNYLPQNAQFSKILKDKNLAYISRYALGRDYHKLMRKRLQQLGQKIAQHCQSFNCRPFVDSAPVLERPLAEKAGLGWQGKHTLLLNKEAGSWFFLGELFVDIPLPVSQNDYAINASKHSDETVRSNDCGSCVACIKICPTKAIVEPYVVDARRCISYFTIESPEAIPVELRPLMGNRIYGCDDCQLICPWNKYAKLTELEDFQARENLDHVSLLSLFAWTEEYFLNKLQGSPIRRIGYQSWLRNIAVALGNAPYSEDIVTALNSKQDVANDMVKEHISWALEQQMIKRAAIAAEQQSQSANHRLTLRLIRSIEKGLPRDA

SEQ ID NO: 77923 - protein, 400 aa, unidentified
  source 1..400: note = Litorilituus sp.
  REGION 1..400: note = tr|A0A502KZF1|A0A502KZF1_9GAMM Epoxyqueuosine reductase OS=Litorilituus sp. RZ04 OX=2491017 GN=queG PE=3; SV = 1
MTTSSINYLELAEKIKCWGKELGFSQLGITDIDLSSHEEALKRWLANGYHGNMDYMAKHGLMRARPAELVPGTTRVICVRLDYLPQDAQFAKTLKDKNAAYVSRYALGRDYHKLMRKRLQQLGKKISTHCEAFNCRPFVDSAPVLERPLAEKAGLGWVGKHTLLLNKEAGSWFFLGELFIDIPLPITQIDSDLDKESTNKKTAEKSGCGACVACIKICPTNAIVEPYVVDAKRCISYFTIESPDPIPVELRPLMGNRIYGCDDCQLICPWNKYAKLTPEQDFQARHQLDNVSLLTLFSWTEEDFLSKLEGSPIRRIGYDSWLRNIAVALGNAPYSQTIVNTLIEKKGAVNDLVAEHIDWALTQQEHKKGLEQAQIEKQQVNHRLTNRLIRSIEKGLTRDA

SEQ ID NO: 77924 - protein, 348 aa, Litorimicrobium taeanense
  REGION 1..348: note = tr|A0A1H9CB55|A0A1H9CB55_9RHOB Epoxyqueuosine reductase OS=Litorimicrobium taeanense OX=657014; GN = SAMN04488092_103191 PE=4 SV=1
MSLKPRIVQQALAEGFDACRICRPWDVPDVPERLGQFLAAGRHGQMGWMAERVAWRGNPAALWPEARSVIMLAESYTPAHDPLAVLQQRDRGAISVYAQNRDYHDLVKKRLKRLARWLIAEAGGEVKVFVDTAPVPEKPLGQAAGLGWQGKHTNLVSRGLGSWFFLGSVFTTLELPEDTAEADHCGSCRNCLDICPTGAFPAPYQLDARRCISYLTIEHHGPVDESLRALMGNRIYGCDDCLAVCPWNKFAVEARELRYHAREALLAPRLAELAGLDDAGFRAFFSGSPIKRIGRDRFVRNVLYAIGNSGDPGLVVVAQGLIEDADATVVDAAKWAVERLQNTANGPE

SEQ ID NO: 77925 - protein, 352 aa, Litorimonas taeanensis
  REGION 1..352: note = tr|A0A420WDT1|A0A420WDT1_9RHOB Epoxyqueuosine reductase OS=Litorimonas taeanensis OX=568099; GN = DES40_1933 PE=4 SV=1
MVHRPTSSQHPHWHKRALKLGFTEPYILDLSQFGHMAGHRLNDFIEKKRHGSMTWMEETAQRRAHPQSLWPEAKSAIVFGMNYGPDIDPLLTLDLADRATISVYARGRDYHDVMKGRLKEIAGLIARDTQADVKIFVDTAPLMEKPIAEASGLGWQGKHTNLVSRNYGSWLFLGTILSAAELTPTPTEIDHCGSCRACLDICPTDAFPAPYQLDARLCISYLTIEHAGAIDEALRERMGNRIYGCDDCLAACPWNKFAVLGQETKLAAREDLMAPQLADLAQLGETEFRRKFAGSPIKRIGWLRFLRNVLYAIGNSGDARLTVSATPYLDHTDPVVREAAQWAANKLSYNVN

SEQ ID NO: 77926 - protein, 354 aa, Loktanella atrilutea
  REGION 1..354: note = tr|A0A1M4YVT2|A0A1M4YVT2_9RHOB Epoxyqueuosine reductase OS=Loktanella atrilutea OX=366533 GN=queG PE=3; SV = 1
MGLKEDLSAFAVTSGFAKIGICRPDAVPEAAARLAAFVDAGRHGQMGWMAERMAWRGDPTALWPEARSVIMLAESYTPDVDPLAVLSLRDRAAISVYAQGRDYHDVVKKRLKAVGRWLIDRVPGAEIKVFVDTAPVMEKPLAQAAGLGWQGKHTNLLGRDLGNWIFLGAIFTTVDMEPDAASVGHCGSCTACLDICPTQAFPAPYQLDARRCISYLTIEHRGPVDAELRPLMGNRIYGCDDCLAVCPWNKFAVDGRDARLAARGDLRAPPLTELAGLDDTAFRTRFSGSPIKRIGRDRFVRNVCYAIGNSGNPALAEVLRPLTTDADPAVADAAIWALAHLQKDDPCAPQLSSP

SEQ ID NO: 77927 - protein, 354 aa, Loktanella fryxellensis
  REGION 1..354: note = tr|A0A1H8DP20|A0A1H8DP20_9RHOB Epoxyqueuosine reductase OS=Loktanella fryxellensis OX=245187 GN=queG; PE = 3 SV=1
MDLTADLRAFATQAGFAKVGICRPDAAPDTAGRLADFVAAGRHGQMGWMAERMAWRGDPTALWPEARSVIMLAESYAPDVDPLAVLEERDRAAISVYAQGRDYHDVVKARLKVVGRWLIDRVPGTEIKVFVDTAPVMEKPLAQAAGLGWQGKHTNLLGRDLGNWVFLGAIFTTALLDVDQPEVSHCGSCTACLDICPTQAFPAPYQLDARRCISYLTIEHRGPVDIALRPALGNRVYGCDDCLAVCPWNKFAVAGRDARLAARDDLRAPALDSLLGLDDAAFRARFSGSPIKRIGRDQFVRNVCYAAGNSGNRRLVAVLAPLTTDADPAVADAARWAIQRLTPVNPVEDNPWTA

SEQ ID NO: 77928 - protein, 358 aa, Loktanella salsilacus
  REGION 1..358: note = tr|A0A1I4F8F5|A0A1I4F8F5_9RHOB Epoxyqueuosine reductase OS=Loktanella salsilacus OX=195913 GN=queG PE=3; SV = 1
MGLKADLCAFALEAGFAKVGVCRPGAVPETAERLAAFVDAGRHGQMGWMAERMAWRGDPTALWPQARSVIMLAENYAPDVDPLAVLAHRDRAAISVYAQGRDYHDVVKKRLKVVGRWLIDQVPGAEIKVFVDTAPVMEKPLAQAAGLGWQGKHTNLLARDLGNWVFLGAIFTTVDLEPDEAEVGHCGSCTACLDVCPTQAFPAPYQLDARRCISYLTIEHSGPVDPDLRAKMGNRIYGCDDCLAVCPWNKFAVQGRDARLAARDDLRAPPLAELAALDDAAFRLRFSGSPIKRIGRNRFVRNVCYAIGNSGNPALAQVLTPLMTDADATVADAASWALAQLGLEPPCDLPPLSPSSQQ

SEQ ID NO: 77929 - protein, 342 aa, Loktanella sp.
  REGION 1..342: note = tr|A0A0N8W3K2|A0A0N8W3K2_9RHOB Epoxyqueuosine reductase OS=Loktanella sp. 1ANDIMAR09 OX=1700845 GN=queG; PE = 3 SV=1
MKQRLIGFAQEAGFAAVGVCRPDAVPELPERLQAFVAAGMHGQMGWMAERMVWRADPTALWPAARSVIMLAEPYTPAHDPLAVLETRDRAAISVYAQNRDYHDVVKKRLKRVGRWLIEKVPEAEIKVFVDTAPVMEKPLAQAAGLGWQGKHTNLLSRDLGNWFFLGAIFTTVDLASDVAETSHCGSCTACLDICPTGAFPAPYRLDARRCISYLTIEHKGPVDAALRPLMGNRIYGCDDCLAVCPWNKFAHEGRDAKLAARDELISPPLADLAGLDDAGFRALFSGSPIKRIGRDRFVRNVAYAIGNSGDQTLIAAVSPLVDDLDAAVADAARWAISRLKED

SEQ ID NO: 77930 - protein, 348 aa, Loktanella sp.
  REGION 1..348: note = tr|A0A0F4RNQ3|A0A0F4RNQ3_9RHOB Epoxyqueuosine reductase OS=Loktanella sp. S4079 OX=579483 GN=queG PE=3; SV = 1
MKDRLISYAQEAGFAKVGICRPDAVPEIAERLAAFVEAGMHGQMAWMADRMHWRGNPAALWPEAKSVIMLAEPYTPEHDPLEVLQYPDKAAISVYAQGRDYHDVVKKRLKRVGRWLIEQSPGTEIKVFVDTAPVMEKPLAQAAGLGWQGKHTNVLGRDLGSWFFLGAIFTTLELEPDTPEVSHCGSCTACLDVCPTSAFPAPYQLDARRCISYLTIEHKGPVDPVLRGMLGNRIYGCDDCLGVCPWNKFAKEGRDAKYAARADLVAPPLGELAALDDTSFRARFSGSPIKRIGRDRFVRNVAYAIGNSGDQNLIGAVARLVDDDDPTVADAARWALNQLSSEAPRRSE

SEQ ID NO: 77931 - protein, 322 aa, unidentified
  source 1..322: note = Longibacter salinarum
  REGION 1..322: note = tr|A0A2A8CXZ3|A0A2A8CXZ3_9BACT Epoxyqueuosine reductase OS=Longibacter salinarum OX=1850348 GN=queG PE=3; SV = 1
MPGFDASAQLDLTLRLKAEARRLGFDDCGISSAEPLDEEARRLEQWLLEGRYATMEWMANHFDKRTDPTQLVEGAQSVISVLHNYYQPDPPEASDGRGKISRYAWGDDYHEVMKDKLYRLYQWLQEEVGTDVNGRAFVDSAPVMDKAWAARSGLGWQGKNTLLLNREMGSYFFLGELIVDVPLTPDAPVPDSCGSCTRCLDACPTDALYEPYALDASRCISYLTIEHRGFDVPDEIREELHNWIFGCDICQQVCPWNKFSRPTQEPRYEAREDVRDTDLHDWVEMNLDAFEKRFQGTPVTRAGYEGFQRNVRNAMAKLESTS

SEQ ID NO: 77932 - protein, 302 aa, Longilinea arvoryzae
  REGION 1..302: note = tr|A0A0S7BG05|A0A0S7BG05_9CHLR Protein containg 4Fe-4S double cluster binding domain OS=Longilinea arvoryzae OX=360412 GN=LARV_00381 PE=4 SV=1
MNEIVRHGDKAALFPIHHLQDLKRDVEGLKANAELNSFQQFIVNDLYHLDEPQDFGARSILIVASPQPSLLRLFFTLEGKRIQALLPASYADKNRSHLRVEDYLRACLAANGRHIQYAPRLPHKLSAVHSGLARYGRNNITFVEGFGSFLNLNTFFTDIACPEDPWREIRAMDACTHCQACQKACPTGAIIAERFLIDNQRCLTYFNEAGGEYEFPAWMDPGVHHTLYGCLRCQMICPQNQPYLAREGGTIEFDAAETAILMQGKPLECLPEGLRLKVDGLEMAEYLSGIPRNLRSLAAKTD

SEQ ID NO: 77933 - protein, 376 aa, Longilinea arvoryzae
  REGION 1..376: note = tr|A0A0S7BIV9|A0A0S7BIV9_9CHLR Epoxyqueuosine reductase OS=Longilinea arvoryzae OX=360412 GN=LARV_02159; PE = 4 SV=1
MQIRNWIKAEAASLGFPFFGITDLTPPPHLDVFRDWIAAGRHAGMDYLGRGVSLDKRSDPRQILPGAKSIITLAMPYAPSLDSTVEQSQPAGRIASYAWGMDYHEVIPARLNDLAERISEHLGCPVARRAYTDTGPILERDLAQRAGLGWAGKNSCLIHPRRGSYFFLAELFLDIELEPDKPIAIDRCGSCRRCIDACPTGCICEDRTLDAGRCVSYLTIENKGPIPVDLRPRIGNRVFGCDICQQVCPWNRFAVDNEIDPTFQPRPGIPAPSLLPELQLDARAFNRKFQLSPVKRAKRRGYLRNVCIALGNSHNPAALPALKEILQAEPEALIRGAAAWALAEIDPVNARSALEIALRVEPDAIVCQEIKAALEK

SEQ ID NO: 77934 - protein, 323 aa, unidentified
  source 1..323: note = Longimonas halophila
  REGION 1..323: note = tr|A0A2H3NLL4|A0A2H3NLL4_9BACT Epoxyqueuosine reductase OS=Longimonas halophila OX=1469170 GN=queG PE=3; SV = 1
MPQFGRHAQQRTARALKAEAARLGFDACGISTAEPLDEEARRLEQWLLEGRHGTMHWMERHFDKRIDPTRLVPGAESVISVLHNYYQPDTQHDEAATTGKISRYAWGDDYHDVLKERLYLLLHWLEEHVGQSVHGRAFVDSAPVLDKAWAARSGLGWQGKHSNLLNRDMGSFFFIGEIIVDVPLPADHPVEDFCGSCTRCVDACPTDAIYQPYAVDATRCISYLTIEHGGDDVPGAISSDMQNWIFGCDICQDVCPWNKFKEPTTEPRYQPRDGMSDTDLRDWVELELEEFRERFSGSPVTRATYEGFQRNVRTALKNVTDDA

SEQ ID NO: 77935 - protein, 300 aa, unidentified
  source 1..300: note = Lucifera butyrica
  REGION 1..300: note = tr|A0A498R9G7|A0A498R9G7_9FIRM Epoxyqueuosine reductase queg OS=Lucifera butyrica OX=1351585; GN = LUCI_2019 PE=4 SV=1
MKQKLREFCRSIGIDAVGIAPAGPYKELEVMLRNRRELGLYTELEEQDLAKRIDPHCTLPGVQSVIVCLFPYYTGDIAGANLPRYAYGRDYHNLVRKKLEQIGAFLTDRIPGFIYQAFVDTGPLADRYLAYLAGLGFYGLNSHIITDRYGSYVVIGYLLNNYPFSPDQPQERVCRQCGRCIRACPGQVILGNYRIDPRGCRSYLTQKKGELTEEERRILQRTNLLFGCDVCQEVCPHNQEIELTSLPEFRQDLFGCLNGGELDRFSNREFKEKYGDRAFSWRGKGILLRNWRYLKAGQDV

SEQ ID NO: 77936 - protein, 382 aa, unidentified
  source 1..382: note = Lujinxingia litoralis
  REGION 1..382: note = tr|A0A328C9Y7|A0A328C9Y7_9DELT tRNA epoxyqueuosine(34) reductase QueG OS=Lujinxingia litoralis; OX = 2211119 GN=queG PE=4 SV=1
MSSPNAQERAQLREAIDQEARRLGFSACAVIPAERLPSARSYQEWLREGRHGSMDYMEKYQPLRVDPRVLEEGTTSVVVLLTNYHQGSDRFEGGLRVARYAHGDDYHDFLWDRMRELAAFIHAETGVEVATRPAVDSAPLLERDLARMAGLGWVGKNALLIRQGLGSFTIISEILVAMDLGERARSAADRCGRCTRCLDACPTGAIVSPHIIDARRCISYLTIELRGPIPRRLRPLIGDHVFGCDICQTVCPWNRRAPMSEDPGFSPREAYRTLSPMELLGFDHARYVEVFRRSPMKRAKLAGLKRNAAVVVGNSGERRHVAQLGSYMAAEESALVRSHIAWALGRLGGELAIEALREARVRESEPAVLEEIEHALQMTSRG

SEQ ID NO: 77937 - protein, 358 aa, unidentified
  source 1..358: note = Luminiphilus syltensis
  REGION 1..358: note = tr|B8KW59|B8KW59_9GAMM Epoxyqueuosine reductase; OS = Luminiphilus syltensis NOR5-1B OX=565045 GN=queG PE=3; SV = 1
MDATVNERQIEQLVPTLRQWAAELGFQQLGITGIDLSEHEAVLERWLAAGYHGDMTYMARHGTKRSRPSELVPGTCSILSLRMDYDPPAVPADQVLARSDRGFISRYALGRDYHKLMRNRLSKLAKRIESELDGGQFRAFVDSAPVLERGIAENAGLGWIAKNTMLINEKAGSWFFLGEIYTSIPFPTDPAKTEKHCGSCRACLDVCPTAAFVGPYVLDARRCISYLTIEHPGSIDPELRSLMGNRIYGCDDCQLVCPWNKFAQTSSETDFAPRHQLDDAALVDLLAWDETTFEEKTLGSPIRRIGHERWLRNIAIALGNATTSDDIVNALKSRSDHPSALVREHVAWALAQHQVSSP

SEQ ID NO: 77938 - protein, 325 aa, unidentified
  source 1..325: note = Lunatimonas lonarensis
  REGION 1..325: note = tr|R7ZXU7|R7ZXU7_9BACT Epoxyqueuosine reductase; OS = Lunatimonas lonarensis OX=1232681 GN=queG PE=3 SV=1
MALPEQHAAIVKQTAKRLGFDFCGIAEAGFLEEEAPKLEAWLSRNYHGQMGYMANHFDKRLDPTRLVEGAKSVVSLIYNYFPEERLPEGEEDYKIAKYAYGNDYHFVIKEKLRGFLESLCTEIGEVDGRAFVDSAPVMERQWAQRSGLGWLGKNSLLLNRQMGSFFFLAELIIDLPLAPDDPMVKDYCGTCTRCIDACPTEAIVEAGVVDGSRCISYYTIELKEELPTAVKGKFENWIFGCDICQDVCPWNRFASPHGEQEFLLHPLLKEFGKKDWEEMTRDTFGRVFKQSALKRTKWDGLMRNVKFMQEKSPQDDLGASDKLSG

SEQ ID NO: 77939 - protein, 354 aa, unidentified
  source 1..354: note = Luteibacter pinisoli
  REGION 1..354: note = tr|A0A4Y5Z0E9|A0A4Y5Z0E9_9GAMM Epoxyqueuosine reductase OS=Luteibacter pinisoli OX=2589080 GN=queG PE=3; SV = 1
MPASTDIDYAALADDIKRWAGELGFADAGIAGTDLGHDEAYLERWLADGHHGEMDYMARHGTRRSRPAELEPGTLRVISVRMDYIPPGTANAWDVIHDTDKAYIARYALGRDYHKVMRNRLQKLASRITERVGDFAYRAYVDSAPVLEKALARNAGLGWIGKHTVLINKRAGSYFFLGELYTNLPLPVDAPASAHCGSCRKCIDICPTQAIVAPYRLDARRCISYLTIELKGSIPEELRAPMGNRVFGCDDCQLICPWNKFAQDATEPDFAPRHSLDGPRLVELFAWTEEEFLSRTEGMAIRRTGYEGWLRNLAVGLGNAPTSTDVVTSLRARENDPSPVVQEHVAWALARHNG

SEQ ID NO: 77940 - protein, 355 aa, Luteibacter rhizovicinus
  REGION 1..355: note = tr|A0A4R3YHJ2|A0A4R3YHJ2_9GAMM Epoxyqueuosine reductase OS=Luteibacter rhizovicinus OX=242606 GN=queG; PE = 3 SV=1
MSAPDPTMIDYAALALDIKRWARELGFADVGISGTALGHDEAYLERWLADGHHGEMDYMARHGTRRSRPAELEPGTLRVVSVRMDYVPPGTRDAWDVIGDGEAAYVARYALGRDYHKLMRNRLQKLAERIGQAIGDFGYRAYVDSAPVLEKALARNAGLGWIGKHTVLINKRAGSYFFLGELYTDLPLPADEPASAHCGSCRRCIDICPTQAIVAPYRLDARRCISYLTIELRGSIPEEFRAPMGNRIFGCDDCQLICPWNKFAQEAVEPDFAPRHSLDGPKLVDLFAWSEDEFLKRTEGMAIRRTGYEGWLRNIAVGLGNAPTSDVVVDALRARADDPSAIVREHVAWALSRHG

SEQ ID NO: 77941 - protein, 358 aa, Luteibacter rhizovicinus
  REGION 1..358: note = tr|A0A0G9HE02|A0A0G9HE02_9GAMM Epoxyqueuosine reductase OS=Luteibacter rhizovicinus DSM 16549 OX=1440763; GN = queG PE=3 SV=1
MSAPPSIDYAILATDIKAWARELGFADVGISGTDLGNDEAYLERWLADGHHGEMEYMSRHGTRRSRPAELEPGTLRVVSVRMDYIPPGTANAWEVINDGDKAYVARYALGRDYHKVMRNRLQKLAARIGERIGDFGYRAYVDSAPVLEKALARNAGLGWIGKHTVVINKRAGSYFFLGELYTDLPLPVDEPATAHCGSCRRCIDICPTQAIVAPYRLDARKCISYLTIELKGSIPEELRAPIGNRIFGCDDCQLICPWNKFAQEATEPDFAPRHSLDGPKLVDLFAWTEAEFLSRTEGMAIRRTGYEGWLRNLAVGLGNAPTSTEILTALEARADDPSDVVREHVAWARAQHALRSSS

SEQ ID NO: 77942 - protein, 356 aa, Luteibacter sp.
  REGION 1..356: note = tr|A0A1T5FJP1|A0A1T5FJP1_9GAMM Epoxyqueuosine reductase OS=Luteibacter sp. 22Crub2.1 OX=1283288 GN=queG; PE = 3 SV=1
MPATTDTDYAALATDIKRWARELGFADVGIAGPDLGHDEAYLERWLADGHHGEMDYMARHGTRRSRPAELEPGTLRVVSVRMDYIPPGTSNAWDVVNDGEKAYIARYALGRDYHKVMRNRLQKLAAKIGERIGDFGYRAYVDSAPVLEKALARNAGLGWIGKHTVLINKRAGSYFFLGELYTDLPLPVDEPASAHCGSCRRCIDICPTQAIVAPYRLDARKCISYLTIELKGSIPEELRASIGNRVFGCDDCQLICPWNKFAQDATEPDFAPRHSLDGPRLVDLFAWSEQEFLSRTEGMAIRRTGYEGWLRNLAVGLGNAPTTDEVVAALRARTGDPSPVVREHVAWALGRHASAT

SEQ ID NO: 77943 - protein, 357 aa, Luteibacter sp.
  REGION 1..357: note = tr|A0A1K1QIH5|A0A1K1QIH5_9GAMM Epoxyqueuosine reductase OS=Luteibacter sp. UNCMF366Tsu5.1 OX=1502758; GN = queG PE=3 SV=1
MPAPPSIDYAALAADIKQWARELGFADVGIAGTDLGNDEAYLERWLADGHHGEMDYMARHGTRRSRPAELEPGTLRVISLRMDYTPPGVPNAWDVIRDGEKAYVARYALGRDYHKLMRNRLQKLASRIEERIGEFKYRAYVDSAPVLEKAIARNAGLGWIGKHTVLINKRAGSYFFLGELYTDLPLPLDAPASAHCGSCRRCIDICPTQAIVAPYRLDARRCISYLTIELKGSIPVELREPMGNRVFGCDDCQLICPWNKFAQEAAEPDFAPRHSLDGPKLVELFAWSEEEFLSRTEGMAIRRTGYEGWLRNLAVGLGNAPASDEILSALNARADHPSPMVREHVAWALEQQMRRTH

SEQ ID NO: 77944 - protein, 368 aa, Luteibacter yeojuensis
  REGION 1..368: note = tr|A0A561GW40|A0A561GW40_9GAMM Epoxyqueuosine reductase OS=Luteibacter yeojuensis OX=345309 GN=queG PE=3; SV = 1
MPAPTDIDYAALALDIKRWARELGFADVGIAGTELGDDEAYLERWLADGHHGEMDYMARHGTRRSRPAELEPGTLRVVSVRMDYVPPGTANAWNVIHDSEKAYIARYALGRDYHKLMRNRLQKLAARITERIGDFAYRAYVDSAPVLEKALARNAGLGWIGKHTVVINKRAGSYFFLGELYTDLPLPVDEPASAHCGSCRRCIDICPTQAIVAPYRLDARKCISYLTIELKGSIPEALRAPMGNRVFGCDDCQLICPWNKFAQDATEPDFAPRHSLDGPKLVELFAWSEEEFLSRTEGMAIRRTGYEGWLRNLAVGLGNAPTSGEVVDALRARADHPSALVREHVAWALSRHGSHQPSSRTGSAPTLG

SEQ ID NO: 77945 - protein, 355 aa, Luteibacter yeojuensis
  REGION 1..355: note = tr|A0A0F3K8E0|A0A0F3K8E0_9GAMM Epoxyqueuosine reductase OS=Luteibacter yeojuensis OX=345309 GN=queG PE=3; SV = 1
MPAATDIDYAALARDIKRWALELGFADAGIAGTDLGHDEAYLQRWLADGHHGEMDYMARHGTRRSRPAELESGTLRVVSVRMDYIPPGTANAWDVINDGDKAYIARYALGRDYHKVMRNRLQKLASMITGRIGDFAYRAYVDSAPVLEKALARNAGLGWIGKHTVVINKRAGSYFFLGELYTNLPLPVDEPATAHCGSCRRCIDICPTQAIVAPYQLDARKCISYLTIELKGSIPEALRAPMGNRVFGCDDCQLICPWNKFAQEATEPDFAPRHSLDRPKLVELFAWSEAEFLARTEGMAIRRTGYEGWLRNLAVGLGNAPTSAEVVDALRARADDASGVVREHVAWALRRHAGA

SEQ ID NO: 77946 - protein, 310 aa, unidentified
  source 1..310: note = Luteibaculum oceani
  REGION 1..310: note = tr|A0A5C6VIV4|A0A5C6VIV4_9FLAO Epoxyqueuosine reductase OS=Luteibaculum oceani OX=1294296 GN=queG PE=3; SV = 1
MDLLKSTRTQTVKQIAADLGFDFCGISKAEQLQEEAKGLELWLKKGFHGDMSYMERNFDKRIDPRILVPGAKSVISLLLNYYPSEKQREDSKYKISKYAYGRDYHKVIKKKLKHFLHAITEQIGEVGGRIFVDSAPVMDKAWAKKSGLGWIGKNTNLINKGSGSFFFIAELILDLDLEPDGPIKDYCGTCTKCIDACPTDALIQPYQIDGSKCISYLTIELKENIPNNFKGKMDDWAFGCDVCQDVCPWNRFSTPHKTEDLRANKERIQISDRGWEEMTEELFEELFKGSAIKRTQYRGIKRNIGFLKNS

SEQ ID NO: 77947 - protein, 358 aa, Luteimonas aestuarii
  REGION 1..358: note = tr|A0A4R5U441|A0A4R5U441_9GAMM Epoxyqueuosine reductase OS=Luteimonas aestuarii OX=453837 GN=queG PE=3; SV = 1
MSVPASPSTPADPAALALRIKSLARESGFQRCGIAGIELGEDEAHLRSWLANGLYGSMDWMARHGDKRSRPQELVPGTLRVVSVGLDYGQDEDEAWRTLADGSRAYVARYALGRDYHKLMRNRLQKLADRIAGEIGPFGHRVFVDSAPVLERALARNAGLGWIGKHTCLIDRDGGSWFFLGELYVDLPLPIDPPASAHCGTCARCIDICPTQAIVAPHRLDARRCIAYLTIEHEGAIDEALRPAIGNRIFGCDDCQLVCPWNKFARRTDEPDFRARNRLDEASLAELFAWDEDEFLRRTEGSAIRRSGHARWLRNLAIALGNAPATREVIDALQSRRDWPDPVVREHIEWALRRHGMP

SEQ ID NO: 77948 - protein, 356 aa, unidentified
  source 1..356: note = Luteimonas cucumeris
  REGION 1..356: note = tr|A0A562LAT8|A0A562LAT8_9GAMM Epoxyqueuosine reductase OS=Luteimonas cucumeris OX=985012 GN=queG PE=3; SV = 1
MESPIARPDHRQLALRIKQLSRELGFQRCGISDIDLGADEAYLREWLAQGLYGSMEWMARHGDKRSRPQELIPGTVRVISVGLDYGRDDDDAAWQNLANGERAYVARYALGRDYHKLMRQRLQQLADRIAAETGPFGHRVFVDSAPVLERALARNAGLGWIGKHTCLIDKEGGSWFFLGEIYIDLPLPTDAAATAHCGTCMRCIDICPTQAIVAPHRLDARRCISYLTIEHEGAIPEDLRPLIGNRIFGCDDCQLVCPWNKFAKRSDEPDFRARNDLDRATLAQLFAWDEDEFLRRTEGSAIRRSGHERWLRNIAVALGNAPTAPEVVAALKSREHDGNAVVREHVAWALSQHAAS

SEQ ID NO: 77949 - protein, 359 aa, Luteimonas marina
  REGION 1..359: note = tr|A0A5C5UBG7|A0A5C5UBG7_9GAMM Epoxyqueuosine reductase OS=Luteimonas marina OX=488485 GN=queG PE=3 SV=1
MSTPAARARLPDPATLALRIKALAREAGFGRCGIAGVELGEDEAFLRTWLAQGLYGTMDWMARHGDKRSRPQELVPGTLRVISVGLDYGQDPDQAWRTLDDGERAYVARYALGRDYHKLMRHRLQKLADRVAAEVGPFGHRVFVDSAPVLERALARNAGLGWIGKHTCLIDRDGGSWFFLGEIYVDLPLPVDPPASAHCGTCVRCIDVCPTQAIVAPHRLDARRCISYLTIEHEGSIDEALRPLIGNRIFGCDDCQLVCPWNKFARRTDEPDFRARNNLDQATLAELFAWSEDEFLQRTEGSPIRRSGHSRWLRNIAVALGNAPTSPEVVAALRSRSDAADPVVREHVEWALRRHEART

SEQ ID NO: 77950 - protein, 333 aa, Luteimonas sp.
  REGION 1..333: note = tr|A0A290XI74|A0A290XI74_9GAMM Epoxyqueuosine reductase OS=Luteimonas sp. 100111 OX=2006110 GN=queG PE=3; SV = 1
MGFQRCGIAGIDLREDEAHLRDWLAHGLYGTMDWMARHGDMRARPAELLPGTVRVISVGLDYGRNDDDSAWDTLADGSRAYVARYALGRDYHKLMRNRLQKFAHRIAEEIGPFGHRVFVDSAPVLERALARNAGLGWIGKHTCLIDRNGGSWFFLGEIYVDVPLPVDPPASAHCGTCVRCIEVCPTRAIVAPHRLDARRCIAYLTIEHEGAIDASLRPLIGNRIFGCDDCQLVCPWNKFARRTDEPDFRARNHLDTASLAELFAWDEDEFLQRTEGSPIRRSGHRRWLRNLAVALGNAPGTPEVIAALRSRRRSGDALVDEHVEWALARHGVA

SEQ ID NO: 77951 - protein, 367 aa, Luteimonas sp.
  REGION 1..367: note = tr|A0A5C5U683|A0A5C5U683_9GAMM Epoxyqueuosine reductase OS=Luteimonas sp. YD-1 OX=2599615 GN=queG PE=3; SV = 1
MPAASADIRDLRATARWVRELARDAGFQRCGISGVDLEGDERHLRDWLAQGLHGGMGWMARHGDLRARPAELVPGTVRVISVGLDYGQDPDQAWATLADGERAYVARYALGRDYHKLMRRRLQRLADRIAERIGPFGHRVFVDSAPVLERALARDAGLGWIGKHTCLIDRDGGSWFFLGEIYVDLPLPVDEPASAHCGTCVRCIEVCPTRAIVAPHRLDARRCISYLTIEHEGPIDEELRPLIGNRIFGCDDCQLACPWNKFARRTDEPDFRARNRLDEATLDELFAWSEEEFLCRTEGSAIRRSGYRRWLRNIAVALGNAPTTPRVVAALQSRRDHEDAVVREHVDWALRRHEARGVAPGTVPATR

SEQ ID NO: 77952 - protein, 361 aa, unidentified
  source 1..361: note = Luteimonas terrae
  REGION 1..361: note = tr|A0A4R5UC92|A0A4R5UC92_9GAMM Epoxyqueuosine reductase OS=Luteimonas terrae OX=1530191 GN=queG PE=3 SV=1
MKPSVATAVSADAAPAALAARIKAIAGEMGFQRCGIAGIDLREDEAHLRDWLAEGLYGTMDWMARHGDMRARPAELLPGTVRVISVGLDYGRNDDDSAWDTLADGSRAYVARYALGRDYHKLMRNRLQKFAHRIAGEIGPFGHRVFVDSAPVLERALARDAGLGWIGKHTCLIDRNGGSWFFLGEIYVDVALPIDPPATAHCGTCVRCIDVCPTRAIVAPHRLDARRCIAYLTIEHEGAIDASLRPLIGNRIFGCDDCQLVCPWNKFAKRTDEPDFRARNDLDTASLADLFAWDEDEFLSRTEGSPIRRSGHRRWLRNLAVALGNAPGTPETIAALRARRHSGDALVDEHVEWALGLHGVA

SEQ ID NO: 77953 - protein, 352 aa, unidentified
  source 1..352: note = Luteitalea pratensis
  REGION 1..352: note = tr|A0A143PSL5|A0A143PSL5_9BACT Epoxyqueuosine reductase OS=Luteitalea pratensis OX=1855912 GN=queG PE=4; SV = 1
MLSLDALRAHALTLGFDLCGVAQVQQVARLDYLREWVAKGYAGDLHYVMRSADARIEPERVLPGARSAIVTGTIYHTEAPLSRDREAPGIANIARYAWGEDYHQVLGRRQHLLIGWLKEHADGAFDAVGYVDTGPVQEKALAAAAGLGWIGKHTCLINQELGSWLFLSVILTTLDLPAGSSVPDRCGTCTRCLDVCPTNAIVEPYVVDATRCLSYITIESHEGIAPAQRDWVGSQVYGCDLCQDVCPWNTGVTVTEDPVWVARPLWNQATLAGLWRATDEQLQVAIRHSPMYRTKVWRIRRNLALAIAASGDPAAHAALFEQRDPVIDPSLAHAVVIEHVAWARTRIEQLRR

SEQ ID NO: 77954 - protein, 307 aa, unidentified
  source 1..307: note = Lutibacter agarilyticus
  REGION 1..307: note = tr|A0A238VSC6|A0A238VSC6_9FLAO Epoxyqueuosine reductase OS=Lutibacter agarilyticus OX=1109740 GN=queG; PE = 3 SV=1
MKLQQTYSKLIKQEAYRLGFESCGISKAVFLEEEASNLESWLKKGHQGEMHYLENYFDKRLDPRLLVDNAKSVISLSFNYFPEEQQQNNSYKLAKYAYGEDYHHILKSKLKELTSFIQNQIGEVNGRAFVDSAPVMERAWAQKSGLGWRGKNSLLIQKNKGSFFFLAELILDLELEYDTPFKTNHCGSCTKCIDACPTNAILPNNTVNGSQCISYFTIELKNELPASVKGKFEDWMFGCDICQDVCPWNRFSTPHSEEKLNPHPDLLAMNKQDWEEITEEIFKKVFQKSAVKRTKFLGLKRNISFLK

SEQ ID NO: 77955 - protein, 308 aa, Lutibacter maritimus
  REGION 1..308: note = tr|A0A1I6RFU0|A0A1I6RFU0_9FLAO Epoxyqueuosine reductase OS=Lutibacter maritimus OX=593133 GN=queG PE=3; SV = 1
MKNLQTYSHLIKQEAKRSGFESCGISKADFLEKEASNLENWLKNGFHGKMNYMENYFDKRLDPRLLLDDAKSVISLSYNYFPKELQNNDTYKIAKYAYGEDYHHIIKGKLKELTFFIENLIGQVNGRAFVDSAPVLERAWAEKSGVGWRGKNSLLLQKNKGSFFFLAELILDVELAYDNPFKADHCGTCTKCIDACPTNAILPNNTIDGSKCISYFTIELKDEIPTSMKRKFEDWMFGCDICQDVCPWNRFSKPHSEEKFKPHPDLFSMSKNDWQEITEEVFQIIFKKSAVKRTKFAGLVRNISFLKD

SEQ ID NO: 77956 - protein, 308 aa, unidentified
  source 1..308: note = Lutibacter oceani
  REGION 1..308: note = tr|A0A3D9RTZ4|A0A3D9RTZ4_9FLAO Epoxyqueuosine reductase OS=Lutibacter oceani OX=1853311 GN=queG PE=3 SV=1
MNKLQTYSNLIKQESKRLGFESCGIAKADFLQEEASNLEQWLKNGYHGKMQYMENYFDKRLDPRLLVDDAKTVISLSFNYFPKEIQDDSTYKIAKYAYGEDYHHVLKAKLKELIFFIKQTIGEINGRAFVDSAPVLERAWAQKAGLGWQGKHSLLIQKNKGSFFFLAELILDVELAYDNPFSTDHCGTCTKCIDACPTEAILQNNTVDGSKCISYFTIELKDEIPPSMHGKFEDWMFGCDICQDVCPWNRFSKPHSEEKFNSHPDLLLMTKNDWQEITETVFKTVFNKSAVKRTKFSGLNRNIQFLKD

SEQ ID NO: 77957 - protein, 308 aa, unidentified
  source 1..308: note = Lutibacter oricola
  REGION 1..308: note = tr|A0A1H2S509|A0A1H2S509_9FLAO Epoxyqueuosine reductase OS=Lutibacter oricola OX=762486 GN=queG PE=3 SV=1
MKAAKESYSVLIKQEAKRLGFESCGVAKAEFLEEEASNLEQWLKNGFHGEMKYMENHFDKRLDPRLLVEGAKSVISLSFNYFPEEIQNKETFKVAKYAYGEDYHQIIKAKLNELAFFIQNEIGEVNGRAFVDSAPVMERAWAQKSGLGWIGKHSLLIQKNKGSFFFLAELILDLELETDTPFKTDHCGNCTKCIDACPTEAILPNNTVDGSKCISYFTIELKDEIPSSVKGKFENWMFGCDICQDVCPWNRFSTPHSEKKFKPHPDLLSMTKNDWEEITEDVFKKVFKKSAVKRTKFVGLQRNISFLK

SEQ ID NO: 77958 - protein, 309 aa, Lutibacter sp.
  REGION 1..309: note = tr|A0A4Q1IR31|A0A4Q1IR31_9FLAO Epoxyqueuosine reductase OS=Lutibacter sp. HS1-25 OX=2485000 GN=queG PE=3; SV = 1
MVKNLQRYANLIKQEAKRLGFESCGIAKADFLQEEASNLEQWLKNGFHGNMQYMENYFDKRLDPRLLVDGAKSVISLSFNYFPKEIQNNKTYKVAKYAYGEDYHHVLKSKLTALTFFIQNTIGQVNGRAFVDSAPVLERAWAQKSGLGWRGKHSLLIQKNKGSFFFLAQLILDVDLAYDAPFTTNHCGTCTKCVDACPTKAILPNNTVNGSKCISYFTIELKDEIPSAFKNKFEDWMFGCDICQDVCPWNRFSKPNFEDKFKPHQSLLSFGKPEWEEITSEIFNTIFKKSAVKRTKYAGLVRNISFLKK

SEQ ID NO: 77959 - protein, 312 aa, Lutibacter sp.
  REGION 1..312: note = tr|A0A1D8P8L3|A0A1D8P8L3_9FLAO Epoxyqueuosine reductase OS=Lutibacter sp. LPB0138 OX=1850246 GN=queG; PE = 3 SV=1
MAKLNQYQKYSNLIKTEAKRIGFSTCGIAKATFLEEEAPKLEQWLKNGYHGEMKYMENHFDMRLDPRLLVNGAKSVISLSYNYFPEKEQNLDSYKIAKYAYGQDYHHVVKSKLKELLNFIQEQIGEVNGRAFVDSAPILERSWAEKAGLGWNGKHSLLIQKELGSYFFLAELILDLELDYDQPFQTDHCGTCTKCIDACPTEAILANNTIDGSKCISYFTIELKNEIPSEVKGQFEDWMFGCDICQDVCPWNRFSKPHNEPLFNPQPELLDMTKSDWEEITEDVFRKVFKKSAVKRTKFTGLQRNIKFIKNT

SEQ ID NO: 77960 - protein, 388 aa, unidentified
  source 1..388: note = Lutibaculum baratangense
  REGION 1..388: note = tr|V4RKT4|V4RKT4_9RHIZ Epoxyqueuosine reductase; OS = Lutibaculum baratangense AMV1 OX=631454 GN=queG PE=3; SV = 1
MPTSTSETIDRDALKARLIEDALAEGFDLVRVMRPDAVPETAARLDHFLREGRHGEMEWMARTADRRRQPSALWGDARSVAMLGLNYGPEGDPLPQLAERAKGYISVYARGDDYHDLIKKRLKSVARRFAETAGADVKVFVDTAPVMEKPLAAAAGLGWQGKHTNLLSRTYGNWLFLGAIFTNAELEPDAPESDHCGSCRACLDACPTDAFPVPYQLDARRCISYLTIEHSGPIPREFREAVGNRIYGCDDCLAVCPWNKFAKEGREAKLAARDTLNMPDLEDLAELDDASFRALFTKSPIKRIGVKRFLRNVLISIGNSGDEALVRTARRRLDDESPLVRGAAVWALSRLMPGDELRALAGLRMGGETDADVLEEWRMALADGAPAA

SEQ ID NO: 77961 - protein, 347 aa, unidentified
  source 1..347: note = Lutimaribacter litoralis
  REGION 1..347: note = tr|A0A521ATT0|A0A521ATT0_9RHOB Epoxyqueuosine reductase OS=Lutimaribacter litoralis OX=1010611; GN = SAMN06265173_101361 PE=4 SV=1
MEQALKDKLLAQARAEGFDACRICAPDAIGQVPDRLTAFLDAGRHGQMRWMEERAGWRGNPAALWPEARSVIMLGESYTPAHDPLAVLGQPDCGAISVYAQNRDYHDLVKKRLKRLARWLIAEGGGEVKVFVDTAPVAEKPLGQAAGLGWQGKHTNLVSRELGSWFFIGSVFTTLDLPVDATERDHCGSCTACQVACPTAAFPAPYQLDARRCISYLTIEHHGPVDVELRGLLGNRIYGCDDCLAACPWNKFAVEAREIRYHARPELVAPKLAELAVLDDAGFRAFFSGSPIKRIGRNRFVRNVLYAIGNSGDVALLAIAQGLCEDEDVTVADAARWAVGQLSATQR

SEQ ID NO: 77962 - protein, 343 aa, unidentified
  source 1..343: note = Lutimaribacter pacificus
  REGION 1..343: note = tr|A0A1H0E749|A0A1H0E749_9RHOB Epoxyqueuosine reductase OS=Lutimaribacter pacificus OX=391948 GN=queG; PE = 3 SV=1
MKDDLKSRLIAQARAEGFDLTRICRPDAVPEVPARLAAFLAHGYHGQMGWLADRAAWRGDPAALWPEARSVIVLGESYTPEEDPLAGLETPDRGVISVYARNRDYHDLVKKRLKRLARWLIAEGGGEVKVFVDTAPVPEKPLGQAAGLGWQGKHTNLVSRDLGSWFFIGSVFTTLALEPDAPETDHCGSCRACLDACPTDAFPAPYRLDARRCISYLTIEHKGPVDEELRAKMGNRIYGCDDCLAACPWNKFAVAARELHYHARPDLVDPPLAELAALDDAGFRARFSGSPIKRVGRDRFVRNVLYAIGNSGDAALRPAAQALVDDPDATVAEAARWAVARLG

SEQ ID NO: 77963 - protein, 343 aa, Lutimaribacter saemankumensis
  REGION 1..343: note = tr|A0A1G8N876|A0A1G8N876_9RHOB Epoxyqueuosine reductase OS=Lutimaribacter saemankumensis OX=490829; GN = queG PE=3 SV=1
MKDDLKSRMIAQARSEGFDLARICRPDAVPEVPERLAGFLARGYHGQMEWLADRTHWRGNPAALWPQARSVIMLGESYTPHTDPLAGLETPDRGVISVYARNRDYHDLVKKRLKRLARWLIAEGGGEVKVFVDTAPVPEKALGQAAGLGWQGKHTNLVSRDLGNWFFIGSVFTTIDLEPDTPEIDHCGSCRACLDACPTDAFPAPYQLDARRCISYLTIEHKGPVDEELRAKMGNRIYGCDDCLAACPWNKFAVEARELRYRARPDLIDPPLAELAQLDDAGFRARFSGSPIKRIGRDRFVRNVLYAIGNSGDPALRAATQALVDDPDPSVADAARWAVARLG

SEQ ID NO: 77964 - protein, 249 aa, Lutispora thermophila
  REGION 1..249: note = tr|A0A1M6CAY6|A0A1M6CAY6_9CLOT Epoxyqueuosine reductase QueG (Queuosine biosynthesis) OS=Lutispora thermophila DSM 19022 OX=1122184 GN=SAMN02745176_00679; PE = 4 SV=1
MNIKDELIELIKKSVAESEERDFYRQPLIGFSSANDPLFKNIKNNAGLQHLYPQDILPEAKTVVSFFIPFSESVVSSNRVGDTVSIEWAESYVKTNKLINDISENMIDFLVQFGIKAATVKATHNFDEKTLTSGWSHRSAAYVAGLGKFGVNRMLITKAGSAGRYGTVIMSQEIFPDERTEEEYCLYYKNGSCLKCVKACPVDALSIDGFNRFQCYNRLLDISQQFTDIGLCDVCGKCVVSCPVAIIDK

SEQ ID NO: 77965 - protein, 296 aa, Lutispora thermophila
  REGION 1..296: note = tr|A0A1M6BF77|A0A1M6BF77_9CLOT Epoxyqueuosine reductase OS=Lutispora thermophila DSM 19022 OX=1122184; GN = SAMN02745176_00439 PE=4 SV=1
MKNNLIMFCNSIGIENVGIAPAEYYNDFGVIWKNQLDKNYVSGFEEKDIEKRLNPKLTLEDAKSVIVCLFPYYTGTEEHSNISKYVYGIDYHKIAIKKLETISDFLKSTIEGFQYKAFVDNGPLSDRHVAYRAGLGFLGINSHLITDKYGSFVFIGYIINNYPFEPDKPQDRTCYLCFNCVRNCPGQCILGDFTINPLRCKSYITQKKRDLTKEDIGILKKHRLIWGCDVCQDVCPHNKNVQKTTIKEFRENLTYNIDCEELKQMSNKEFIRRYGDRAFSWRGKAILIRNHQLINE

SEQ ID NO: 77966 - protein, 308 aa, Lyngbya aestuarii
  REGION 1..308: note = tr|U7QB84|U7QB84_9CYAN Epoxyqueuosine reductase; OS = Lyngbya aestuarii BL J OX=1348334 GN=queG PE=3 SV=1
MHPPVQTNQVKQQALTLGFHKVGIASVIEPIAEVERLQAWLNQGYQAEMAWMANPRRQDIRQVMPEVQSVICVALNYYTPHERREGAEYGKISRYGWGRDYHKVMHKKLKAFSTWLQAQGEGIQARYYADTGPISDKVWAQRAGIGWIAKNSNLITREYGSWVFLGEVLTNLELTPDSPHTEHCGTCTRCIEACPTDAITEPFVVDANRCIAYHTIENRAEQLPENIELKGWVAGCDICQDVCPWNQRFAQETDVEAFQPYPGNIAPKLSELAELSEEKWNEQFTASALRRIKPQMWQRNARKNLKEL

SEQ ID NO: 77967 - protein, 314 aa, Lyngbya confervoides; identical to SEQ ID NO: 77173
  REGION 1..314: note = tr|A0A0C1YMR8|A0A0C1YMR8_9CYAN Epoxyqueuosine reductase OS=Lyngbya confervoides BDU141951 OX=1574623; GN = queG PE=3 SV=1

SEQ ID NO: 77968 - protein, 308 aa, Lyngbya sp.
  REGION 1..308: note = tr|A0YYQ3|A0YYQ3_LYNSP Epoxyqueuosine reductase; OS = Lyngbya sp. (strain PCC 8106) OX=313612 GN=queG PE=3; SV = 1
MHSSVQANQVKQQAITLGFHKVGIASVIEPKAEVERLQAWLNQGYQADMAWMANPRRQDIRQVMPEVCAVICVALNYYTPHERPEGAEYGKISRYGWGRDYHKVMHQKLKAFSNWLQAQGEGIQARYYADTGPISDKVWAQRAGIGWISKNSNLITREYGSWVFLGEILTNLELTPDSPHTEHCGTCTRCIEACPTDAITEPFVVDANRCIAYHTIENRAEQLPENIELKGWVAGCDICQDVCPWNQRFAQETDVEAFQPYPGNIAPKLSELAELSEEKWNEQFTASALRRIKPKMWQRNARKNLKEL

SEQ ID NO: 77969 - protein, 377 aa, unidentified
  source 1..377: note = Lysinibacillus acetophenoni
  REGION 1..377: note = tr|A0A285UDQ3|A0A285UDQ3_9BACI Epoxyqueuosine reductase OS=Lysinibacillus acetophenoni OX=614649; GN = SAMN05877842_10723 PE=4 SV=1
MSIEQLQNDLIDYAKSIGVDKIGFTSASPFNELKNRLKRQQELGFQSGFEESDIEKRTEPTRLLDDAESIIAIALAYPSKMEDAPTGKKGARRGIFARASWGIDYHVALRERLKLLEEWLVERVPGVKFKSMVDTGELVDRAVAERAGIGWSGKNCSIITPEFGSYVYLGEMITNIPFAPDTPIENECGDCTLCLDVCPTGALVDAGQLNAKSCVAFLTQTKDFLPDEFRAKIGNRIYGCDTCQTVCPKNKGKINWIHEEFKPDPEIAKPLLQPLLNLSNREFKSQFGHVSGSWRGKKPIQRNAIIALAHFKEEAAVPDLIDIMKKDERPVMRGTAAWAIGKIGGPLAEEALIDARDKEKDEQVLLEIEKGLKLLTV

SEQ ID NO: 77970 - protein, 376 aa, Lysinibacillus boronitolerans
  REGION 1..376: note = tr|A0A0A3IZP6|A0A0A3IZP6_9BACI Iron-sulfur cluster-binding protein OS=Lysinibacillus boronitolerans JCM 21713 = 10a = NBRC 103108 OX=1294264 GN=CD31_04075; PE = 4 SV=1
MNIHDLQRDFVAYAMSIGVDKIGFTTAAPFTELKNRLRRQQELGYQSGFEESDIEKRTEPLQLLDEAESIIAIAVAYPSRMQNAPIGKKGARRGIFCRASWGVDYHTALRERLKLLSAWLEKQVEGVRIESMVDTGALVDRAVAERAGIGWSGKNCSIITPEFGSYVYLGELITNIPFAPDKPMEDECGDCRLCLDVCPTGALIQGGQLDAQRCIAFLTQTKGTLPDEFRSHIGNRLYGCDTCQTVCPKNKGKINWIHEEFVPDPELAKPLLTPLLTISNREFKAKFGHVSGSWRGKKPIQRNAILALAHFKEEAAIPDLIALLHKDDRPVIRGTAAWALGKIGGDTAQTALHEAEATEQDEEVLSEIYKGLQFFK

SEQ ID NO: 77971 - protein, 377 aa, unidentified
  source 1..377: note = Lysinibacillus chungkukjangi
  REGION 1..377: note = tr|A0A318THA8|A0A318THA8_9BACI Epoxyqueuosine reductase OS=Lysinibacillus chungkukjangi OX=1202712; GN = BJ095_12528 PE=4 SV=1
MKIDQLQKDLIDYAKSIGVDKIGFTHASPFHEMKNRLKRQQQLGYQSGFEESDIEKRTEPKLLLESAESIIAIALAYPSKMQDAPTGKKGARRGIFARASWGVDYHVAVRERLNLIEEWLKERIPNVQTKSMVDTGELVDRAVAERAGIGWSGKNCSIITPEFGSYVYLGEMITNIPFKPDIPIEDECGDCRLCLDVCPTGALVEGGQLNSQRCVAFLTQTKDFLPDEFRKELGNRIYGCDTCQTVCPKNKGKSNWIHEEFKPDPELVKPLLQPILQMSNKEFKSRFGYMSGSWRGKKPIQRNAIIALAHFKEESAVPDLIAIMNKDERPVMRGTAAWAIGKIGGADAEEALKKALVVEQDEEVLSEIEKGLKLLAT

SEQ ID NO: 77972 - protein, 377 aa, unidentified
  source 1..377: note = Lysinibacillus composti
  REGION 1..377: note = tr|A0A3N9URY0|A0A3N9URY0_9BACI Epoxyqueuosine reductase OS=Lysinibacillus composti OX=720633 GN=queG; PE = 3 SV=1
MNVQQLQTDLIEYARSIGVDKIGFTTASPFNELKNRLKRQQELGYQSGFEESDIEKRTEPLRLLDSAQSIIAIALAYPSKMENAPTGKKGERRGIFARASWGIDYHVAVRERLQLIEEWLEQRVPGVKLKSMVDTGELVDRAVAERAGIGWSGKNCSIITPEFGSYVYLGELITNIPFEPDEPIENECGDCTLCLDVCPTGALVQPGQLNAQHCVAFLTQTKDFMPDEFRGEIGNRIYGCDTCQTVCPKNKRKFNWIHDEFKPDPELAKPLLKPLLNISNKEFKSKFGPMSGSWRGKKPIQRNAIIALAHFKEQDAVPDLVELMKKDERPVIRGTAAWAVGKIGGPLAEQALRTALEKEKDVEVLKEIEKGLLLIKS

SEQ ID NO: 77973 - protein, 376 aa, unidentified
  source 1..376: note = Lysinibacillus contaminans
  REGION 1..376: note = tr|A0A0M8QGG2|A0A0M8QGG2_9BACI Iron-sulfur cluster-binding protein OS=Lysinibacillus contaminans; OX = 1293441 GN=AEA09_00965 PE=4 SV=1
MNIRELQSEFVAYAQSIGVDKIGFTTAAPFTELKNRLRRQQELGYQSGFEEADIDKRTEPLQLLDGAESIVAIAVAYPSRMQDAPVGKKGARRGIFCRASWGIDYHTALRERLTLLKDWLEERIEGVRIESMVDTGALVDRAVAERAGIGWSGKNCSIITPEFGSYVYLGELITNIPFAPDTPMEDECGDCRLCLDVCPTGALIEGGQLDSQRCIAFLTQTKGSLPDEFRSHIGNRLYGCDTCQTVCPKNKGKINWIHEEFKPDPELAKPLLVPLLTISNREFKEKFGHVSGSWRGKKPIQRNAIFALAHFKEEAAVPDLVALLEKDSRPVIRGTAAWALGKIGGDVAEAALLTAKDKEQDEEVLVEIDKGLQFFS

SEQ ID NO: 77974 - protein, 376 aa, unidentified
  source 1..376: note = Lysinibacillus endophyticus
  REGION 1..376: note = tr|A0A494Z030|A0A494Z030_9BACI tRNA epoxyqueuosine(34) reductase QueG OS=Lysinibacillus endophyticus OX=1978490 GN=queG PE=4 SV=1
MIAQLQKDLIEYAKSIGVDKIGFTHASPFQELKNRLKRQQELNYQSGFEESDIELRTEPHRLLEGAESIIAIALAYPSKMEEAPTGKKGARRGIFARASWGIDYHVAVRERLQLIEEWLRERVPNVTLKSMVDTGELVDRAVAERAGIGWSGKNCSIITPEFGSYVYLGEMITNIPFQPDNPIENECGDCRLCLDVCPTGALVEAGQLNSKRCVAFLTQTKDFLPDEFRAKIGNRIYGCDTCQTVCPKNKGKINWIHDEFKPDPELAKPLLQPLLNISNKEFKAKFGPMSGSWRGKKPIQRNAIIALAHFKEEAAVPDLIEILKKDERPVMRGTAAWAIGKIGGPLAEEALLAAREKESDSDVLAEIEKGLLLLEV

SEQ ID NO: 77975 - protein, 376 aa, Lysinibacillus fusiformis
  REGION 1..376: note = tr|A0A2I0UWL8|A0A2I0UWL8_9BACI tRNA epoxyqueuosine(34) reductase QueG OS=Lysinibacillus fusiformis OX=28031 GN=queG PE=4 SV=1
MNIHDLQRDFVAYAMSIGVDKIGFTTAAPFTELKNRLRRQQELGYQSGFEESNIEKRTEPLQLLNEAESIVAIAVAYPSRMQNAPVGKKGARRGIFCRASWGVDYHTAIRERLKLLSAWLEEHVEGVRIESMVDTGALVDRAVAERAGIGWSGKNCSIITPEFGSYVYLGELITNIPFAPDKPMEDECGDCRLCLDVCPTGALIQGGQLNAQRCIAFLTQTKGLLPDEFRNHIGNRLYGCDTCQTVCPKNKGKINWMHEEFMPDPELAKPLLTPLLTISNREFKAKFGHVSGSWRGKKPIQRNAILALAHFKEEAAIPDLIDVLQKDERPVIRGTAAWALGKIGGEIAQSALHEAEVTEQDEEVLSEIHKGLQFFQ

SEQ ID NO: 77976 - protein, 376 aa, Lysinibacillus fusiformis
  REGION 1..376: note = tr|D7WVV3|D7WVV3_9BACI 4Fe-4S ferredoxin-type domain-containing protein OS=Lysinibacillus fusiformis ZC1; OX = 714961 GN=BFZC1_16390 PE=4 SV=1
MNIHDLQRDFVAYAMSIGVDKIGFTTAAPFTELKNRLRRQQELGYQSGFEESDIQKRTEPLQLLDEAESIVAIAVAYPSRMQNAPIGKRGARRGIFCRASWGVDYHTALRERLKLLSAWLEEHVKGVRIESMVDTGALVDRAVAERAGIGWSGKNCSIITPEFGSYVYLGELITNIPFAPDKPMEDECGDCRLCLDVCPTGALIQGGQLDAQRCIAFLTQTKGTLPDEFRSHIGNRLYGCDTCQTVCPKNKGKINWIHEEFMPDPELAKPLLTPLLTMTNREFKGKFGHVSGSWRGKKPIQRNAILALAHFKEEAAIPDLIALLHKDDRPVIRGTAAWALGKIGGDTAQTALHEAEATEQDEEVLSEIYKGLQFFK

SEQ ID NO: 77977 - protein, 377 aa, unidentified
  source 1..377: note = Lysinibacillus halotolerans
  REGION 1..377: note = tr|A0A3M8H5T0|A0A3M8H5T0_9BACI tRNA epoxyqueuosine(34) reductase QueG OS=Lysinibacillus halotolerans OX=1368476 GN=queG PE=4 SV=1
MIIEQLQKELIEYATSIGVDKIGFTHASPFHEMKNRLKRQQELQYQSGFEEPDIEKRTEPRLLLNSAESIIAIALAYPSKMEDAPVGKKGSRRGIFARASWGVDYHVAVRERLNLIEQWLKNRVPDVQTKSMVDTGELVDRAVAERAGIGWSGKNCSIITPEFGSYVYLGEMITNIPFIPDTPIENECGDCTLCLDVCPTGALVNPGQLNSKRCVAFLTQTKDFLPDEFRKEIGNRIYGCDTCQTVCPKNKGKMNWIHEEFKPEPELAKPLLKPLLHMSNKEFKAKFGYMSGSWRGKKPIQRNAIIALAHFKEQSAVPDLIEIMDKDERPVMRGTAAWAIGKIGGSDAEQALLKAREKETDEEVLKEIEKGLTLLKA

SEQ ID NO: 77978 - protein, 376 aa, Lysinibacillus macroides
  REGION 1..376: note = tr|A0A0M9DJR7|A0A0M9DJR7_9BACI Iron-sulfur cluster-binding protein OS=Lysinibacillus macroides; OX = 33935 GN=ADM90_11705 PE=4 SV=1
MNIHDLQRDFVAYAISIGVDKIGFTTAAPFTELKNRLRRQQELGYQSGFEESDIEKRTEPLQLLEEAQSIVAIAVAYPSRMQNAPVGKKGARRGIFCRASWGVDYHTALRERLALLSAWLEERVEGIRIQSMVDTGALVDRAVAERAGIGWSGKNCSVITPEFGSYVYLGELITNIPFAPDQPMEDECGDCRLCLDVCPTGALIEGGQLNAQRCIAFLTQTKGMLPDEFRSHIGNRLYGCDTCQTVCPKNKGKINWIHEEFQPDPELAKPLLTPLLTISNREFKSRFGHISGSWRGKKPIQRNAILALAHFKEEAAVPDLIVLLQKDERPVIRGTAAWALGKIGGEQAQAALHEAEVMEQDEEVLAEIQKGLQFFY

SEQ ID NO: 77979 - protein, 378 aa, unidentified
  source 1..378: note = Lysinibacillus manganicus
  REGION 1..378: note = tr|A0A0A3IYN2|A0A0A3IYN2_9BACI Iron-sulfur cluster-binding protein OS=Lysinibacillus manganicus DSM 26584 OX=1384049 GN=CD29_02950 PE=4 SV=1
MSIEQLQLDLIDYAKSIGVDKIGFTSASPFNELKNRLKRQQELGYQSGFEESDIDKRTEPIKLLDGAESIIAIALAYPSKMEDAPTGKKGARRGIFARASWGIDYHVALRERLKLLEEWLVERVPGVKFKSMVDTGELVDRAVAERAGIGWSGKNCSIITPEFGSYVYLGEMITNIPFAQDSPIENECGDCRLCLDVCPTGALVEAGQLNAKSCVAFLTQTKDFLPDEFRGKIGNRVYGCDTCQTVCPKNKGKINWIHDEFKPDPEIAKPLLQPLLHMSNKEFKSKFGHVSGSWRGKKPIQRNAIIALAHFKEEAAVPDLINIMKKDERPVMRGTAAWAIGKIGGPLAEDALVGAKDVEKDEEVLKEIEKGLMLVMER

SEQ ID NO: 77980 - protein, 376 aa, unidentified
  source 1..376: note = Lysinibacillus mangiferihumi
  REGION 1..376: note = tr|A0A4U2Z7B2|A0A4U2Z7B2_9BACI tRNA epoxyqueuosine(34) reductase QueG OS=Lysinibacillus mangiferihumi OX=1130819 GN=queG PE=4 SV=1
MNIHDLQREFVAYAMSIGVDKIGFTTAAPFTELKNRLRRQQELGFQSGFEESDIEKRTEPLQLLEGAESIVAIAVAYPSKMKDAPAGKKGARRGIFCRASWGVDYHTALRQRLALLKAWLEERVRNVRIESMVDTGALVDRAVAERAGIGWSGKNCSIITPEFGSYVYLGELVTNIPFAPDKPMEEECGECRLCLDVCPTGALIEGGQLNSQRCIAFLTQTKGYLPDEFRSHIGNRLYGCDTCQTVCPKNKGKINWIHEEFKPDPELAKPLLTPLLTISNREFKAKFGHVSGSWRGKKPIQRNAILALAHFKEEAAVPDLIELLEKDERPVIRGTAAWALGKIGGEQAENALLAAQDQEQDEEVLVEINKGLQFFS

SEQ ID NO: 77981 - protein, 381 aa, unidentified
  source 1..381: note = Lysinibacillus massiliensis
  REGION 1..381: note = tr|A0A0A3IVN5|A0A0A3IVN5_9BACI Epoxyqueuosine reductase OS=Lysinibacillus massiliensis 4400831 = CIP 108448 = CCUG 49529 OX=1211035 GN=queG PE=3 SV=1
MNIEQLQQQLIEYASSIGVDKIGFTTASPFNELKNRLKRQQELGYQSGFEESDIDKRTEPIRLLDNAESIIAIALAYPSKMEDAPSGKKGARRGIFARASWGIDYHVAVRERLQLIEVWLQEKVPNVQLKSMVDTGELVDRAVAERAGIGWSGKNCSIITPEFGSYVYLGEMITNIPFAPDTPIENECGDCTLCLDVCPTGALVNPGQLNAQRCVAFLTQTKDYLPDEFRAKIGNRIYGCDTCQTVCPKNKGKMNWIHDEFKPDPEIAKPLLQPLLNMSNKEFKATFGYVSGSWRGKKPIQRNAIIALAHFKEQSAVPDLIDIMKKDERPVMRGTAAWAIGKIGGPLAEDALLNALEREKDEAVIHEIHKGMRLLKAETKA

SEQ ID NO: 77982 - protein, 375 aa, unidentified
  source 1..375: note = Lysinibacillus odysseyi
  REGION 1..375: note = tr|A0A0A3IJB9|A0A0A3IJB9_9BACI Epoxyqueuosine reductase OS=Lysinibacillus odysseyi 34hs-1 = NBRC 100172; OX = 1220589 GN=queG PE=3 SV=1
MRIADLQAQLIEYAKSIGVDKIGFATASPFHELKNRLRRQQELGFQSGFEESDIELRTEPLRLLDGAESIIAIAIAYPSKMKDAPAGKKGERRGIFCRASWGIDYHVAVRERLQLIEAWLAERVPDVRIKSMVDTGELVDRAVAERAGIGWNGKNCSIITPEFGSYVYLGELITNIPFEPDTPIEDECGDCTLCLDVCPTGAIVAPGQLNSQRCIAYLTQTKGFLPDEFRGKIGNRLYGCDTCQTVCPKNKGKANWIHEEFTPDPEVAKPLLSPLLSISNKEFKAKFGHVSGSWRGKKPIQRNAILALAHFKEQSAIPELIDVMKKDERPVIRGTAAWALGKIGGHEAQLALQGAKERETDAEVLTEIEKGLALL

SEQ ID NO: 77983 - protein, 372 aa, unidentified
  source 1..372: note = Lysinibacillus saudimassiliensis
  REGION 1..372: note = tr|A0A078MAJ3|A0A078MAJ3_9BACI Epoxyqueuosine reductase OS=Lysinibacillus saudimassiliensis OX=1461583; GN = queG PE=4 SV=1
MRVHQLQRELIAYAKEIGIDKIGFTTAEPFVKLKDRLYTQQKLGYASGFEERDIALRTEPLKLLPTAQSIIAIAVAYPSRMTEHVAGKKGERRGIFCRASWGTDYHTVLRERLAKLEAWLCERVPEAELSSMVDTGALVDRAVAERAGIGWSGKNCSIITPEFGSYVYLGEMLTNIPFIADEPIEDACLDCRLCLDVCPTTALVAPGQLDAQRCIAYLTQTKQEMPLEFRKHIGNRVYGCDTCQTVCPKNKGKTNMWHEEFKPEPALVKPLLEPLLTISNREFKEQYGDMSGSWRGKKPIQRNAMLALAHFKEQSALPALQKILFEDSRPDIRATAAYAISEITEDTVILEQARERETDEAVLREIARILGE

SEQ ID NO: 77984 - protein, 377 aa, unidentified
  source 1..377: note = Lysinibacillus sinduriensis
  REGION 1..377: note = tr|A0A0A3HWY0|A0A0A3HWY0_9BACI Iron-sulfur cluster-binding protein OS=Lysinibacillus sinduriensis BLB-1 = JCM 15800 OX=1384057 GN=CD33_09465 PE=4 SV=1
MKIEQLQSELIEYAKSIGVDKIGFTHASPFHEMKNRLKRQQQLGYQSGFEESDIEKRTEPLLLLDSAESIISIALAYPSKMEDAPTGKKGARRGIFARASWGVDYHVAVRERLKLLEEWLRERVQHVQTKSMVDTGELVDRAVAERAGIGWSGKNCSIITPEFGSYVYLGEMITNIPFKPDTPMEDECGECRLCLDVCPTGALIEGGQLNSQRCVAFLTQTKDFLPDEFRKELGNRIYGCDTCQTVCPKNKGKSNWIHDEFKPDPELAKPLLQPLLQMSNKEFKSKFGYMSGSWRGKKPIQRNAIIALAHFKEQSAIPDLIAIMNKDERPVMRGTAAWAIGKIGGPHAEEALRKAKAVEKDEEVLREIDKGLKLLIS

SEQ ID NO: 77985 - protein, 377 aa, Lysinibacillus sp.
  REGION 1..377: note = tr|A0A2S1H5X2|A0A2S1H5X2_9BACI tRNA epoxyqueuosine(34) reductase QueG OS=Lysinibacillus sp. 2017 OX=2169540 GN=queG PE=4 SV=1
MKVDQLQAELIEYAQSIGVDKIGFTTSAPFHELKNRLRRQQELGYQSGFEESDVELRTEPLKLLDNAESIVAIAVAYPSRMQDAPQGKKGERRGIFCRASWGVDYHTAVRERLQLLEAWLAERVPDVKVKSMVDTGELVDRAVAERAGIGWSGKNCSIITPEFGSYVYLGEIMTNIPFAPDTPMEDGCGDCNLCMDVCPTGAIVAPGQLNSQRCIAFLTQTKGFLPDEFRAKIGNRLYGCDTCQTVCPKNKGKLNWIHDEFTPDPELAKPLLQPLLSISNKEFKAKFGHVSGSWRGKKPIQRNAILALAHFKEEAAMPDLIDVLQKDERPVLRGTAAWAIGKIGAENAQEVLITAKAKEQDEEVLAEIEKGLAFLSR

SEQ ID NO: 77986 - protein, 376 aa, Lysinibacillus sp.
  REGION 1..376: note = tr|A0A0P7L012|A0A0P7L012_9BACI Epoxyqueuosine reductase OS=Lysinibacillus sp. ZYM-1 OX=1681184; GN = AO843_11015 PE=4 SV=1
MNIHDLQRDFVAYAMSIGVDKIGFTTAAPFTELKNRLRRQQELGYQSGFEESDIEKRTEPLQLLDEAESIVAIAVAYPSRMQNAPIGKKGARRGIFCRASWGVDYHTALRERLKLLSAWLEEHVEGVRIESMVDTGALVDRAVAERAGIGWSGKNCSIITPEFGSYVYLGELITNIPFAPDKPMEDECGECRLCLDVCPTGALIQGGQLDAQRCIAFLTQTKGTLPDEFRNHIGNRLYGCDTCQTVCPKNKGKINWIHEEFMPDPELAKPLLTPLLTISNREFKTKFGHVSGSWRGKKPIQRNAILALAHFKEEAAIPDLIDLLNKDDRPVIRGTAAWALGKIGGEQANFALLEAVADEQDEEVLNEIRKGLQFFQ

SEQ ID NO: 77987 - protein, 376 aa, Lysinibacillus sphaericus
  REGION 1..376: note = tr|A0A2X0Z2T1|A0A2X0Z2T1_LYSSH Iron-sulfur cluster binding protein OS=Lysinibacillus sphaericus OX=1421; GN = queG PE=4 SV=1
MNIHDLQRDFVAYAMSIGVDKIGFTTAAPFTELKNRLRRQQELGYQSGFEESDIQKRTEPLQLLDEAESIVAIAVAYPSRMQNAPIGKRGARRGIFCRASWGVDYHTALRERLKLLSTWLEEHVKGVRIESMVDTGALVDRAVAERAGIGWSGKNCSIITPEFGSYVYLGELITNIPFAPDKPMEDECGDCRLCLDVCPTGALIQGGQLDAQRCIAFLTQTKGTLPDEFRSHIGNRLYGCDTCQTVCPKNKGKINWIHEEFIPDPELAKPLLTPLLTITNREFKGRFGHVSGSWRGKKPIQRNAILALAHFKEEAAIPDLIALLHKDDRPVIRGTAAWALGKIGGDTAQTALHEAEATEQDEEVRSEIYKGLQFFK

SEQ ID NO: 77988 - protein, 376 aa, Lysinibacillus sphaericus
  REGION 1..376: note = tr|R7ZJF2|R7ZJF2_LYSSH 4Fe-4S ferredoxin-type domain-containing protein OS=Lysinibacillus sphaericus OT4b.31 OX=1285586 GN=H131_01668 PE=4 SV=1
MNIHDLQREFVAYAMSIGVDKIGFTTAAPFTELKNRLRRQQELGYQSGFEESDIEKRTEPFQLLAGAESIVAIAVAYPSRMQDAPVGKKGSRRGIFCRASWGVDYHTALRERLKLLSAWLEERVEGVRIESMVDTGALVDRAVAERAGIGWSGKNCSIITPEFGSYVYLGEIITNLPFAPDTAMEDECGDCRLCLDVCPTGALIAGGQLDSQRCIAFLTQTKGTLPDEFRSHIGNRLYGCDTCQTVCPKNKGKINWIHEEFKPNPEIAKPLLVPLLTISNRDFKDKFGHVSGSWRGKKPIQRNAILALAHFKEEIAVPDLVSLLEKDERPVIRGTAAWALGKIGGEQAERALLAAKGTEQDDEVLVEINKGLQFFS

SEQ ID NO: 77989 - protein, 376 aa, unidentified
  source 1..376: note = Lysinibacillus tabacifolii
  REGION 1..376: note = tr|A0A4U2XBC5|A0A4U2XBC5_9BACI tRNA epoxyqueuosine(34) reductase QueG OS=Lysinibacillus tabacifolii OX=1173107 GN=queG PE=4 SV=1
MNIHDLQREFVAYAMSIGVDKIGFTTAAPFTELKNRLRRQQELGFQSGFEESDIEKRTEPLQLLEGAESIVAIAVAYPSKMKDAPTGKKGARRGIFCRASWGVDYHTALRQRLALLKAWLEERVSNVRIESMVDTGALVDRAVAERAGIGWSGKNCSIITPEFGSYVYLGELVTNIPFAPDKPMEDECGECRLCLDVCPTGALIEGGQLNSQRCIAFLTQTKGYLPDEFRSHIGNRLYGCDTCQTVCPKNKGKINWIHEEFKPDPELAKPLLTPLLTISNREFKTKFGHVSGSWRGKKPIQRNAILALAHFKEEAAVPDLIELLEKDERPVIRGTAAWALGKIGGEQAENALLAAQDQEQDEEVLVEINKGLQFFS

SEQ ID NO: 77990 - protein, 379 aa, unidentified
  source 1..379: note = Lysinibacillus telephonicus
  REGION 1..379: note = tr|A0A3S0JT85|A0A3S0JT85_9BACI Epoxyqueuosine reductase OS=Lysinibacillus telephonicus OX=1714840; GN = queG PE=3 SV=1
MKIESLQSELIEYAKSIGVDKIGFTHASPFNELKNRLKRQQELGYQSGFEESDIEKRTEPIRLLNSAESIIAIALAYPSKMKDAPVGKKGSRRGIFARASWGIDYHVAVRERLKLIEEWLKERVPTVQVKSMVDTGELVDRAVAERAGIGWSGKNCSIITPEFGSYVYLGEMITNIPFAPDDPIENECGDCTLCLDVCPTGALVEAGQLNAQRCVAFLTQTKDFLPDEFRTEIGNRIYGCDTCQTVCPKNKGKTNWIHEEFKPDPELAKPLLQPLLKISNKEFKAKFGSMSGSWRGKKPIQRNAIIALAHFREQSAVPDLIDVMKKDERPVMRGTAAWAIGKIGGPLAEEALSKAYEQESDEDVLREIEKGIKLLNVSL

SEQ ID NO: 77991 - protein, 376 aa, unidentified
  source 1..376: note = Lysinibacillus varians
  REGION 1..376: note = tr|X2GSB0|X2GSB0_9BACI Iron-sulfur cluster-binding protein OS=Lysinibacillus varians OX=1145276 GN=T479_19810; PE = 4 SV=1
MNIHDLQREFVAYAMSIGVDKIGFTTAAPFTELKNRLRRQQELGFQSGFEESDIEKRTEPLQLLEGAESIVAIAVAYPSKMKDAPTGKKGARRGIFCRASWGVDYHTALRQRLALLKAWLEERVSNVRIESMVDTGALVDRAVAERAGIGWSGKNCSIITPEFGSYVYLGELVTNIPFAPDKPMEDECGECRLCLDVCPTGALIEGGQLNSQRCIAFLTQTKGYLPDEFRSHIGNRLYGCDTCQTVCPKNKGKINWIHEEFKPDPELAKPLLTPLLTISNREFKTKFGHVSGSWRGKKPIQRNAILALAHFKEEAAVPDLIELLEKDERPVIRGTAAWALGKIGGEQAANALLAAQDQEQDEEVLVEINKGLQFFS

SEQ ID NO: 77992 - protein, 376 aa, Lysinibacillus xylanilyticus
  REGION 1..376: note = tr|A0A0K9F0P1|A0A0K9F0P1_9BACI Iron-sulfur cluster-binding protein OS=Lysinibacillus xylanilyticus; OX = 582475 GN=ACZ11_23125 PE=4 SV=1
MNIHDLQREFVAYAMSIGVDKIGFTTAAPFTELKNRLRRQQELGYQSGFEESDIEKRTEPLQLLEGAESIVAIAVAYPSRMQDAPVGKKGSRRGIFCRASWGVDYHTALRERLKLLSAWLEERIEGARIESMVDTGALVDRAVAERAGIGWSGKNCSVITPEFGSYVYLGELITNIPFAPDKPMEDECGDCRLCLDVCPTGALIEGGQLDSQRCIAFLTQTKGMLPDEFRTHIGNRLYGCDTCQTVCPKNKGKINWIHEEFKPDPELAKPLLVPLLTISNRDFKEKFGHVSGSWRGKKPIQRNAISALAHFKEEAAVPDLVALLEKDERPVIRGTAAWALGKIGGEQSQSALLKAKGKEQDEEVLVEINKGLQFFN

SEQ ID NO: 77993 - protein, 376 aa, Lysinibacillus xylanilyticus
  REGION 1..376: note = tr|A0A2M9PZ03|A0A2M9PZ03_9BACI tRNA epoxyqueuosine(34) reductase QueG OS=Lysinibacillus xylanilyticus OX=582475 GN=queG PE=4 SV=1
MNIHDLQREFVAYAMSIGVDKIGFTTAAPFTELKNRLRRQQELGYQSGFEESDIEKRTEPLQLLEGAESIVAIAVAYPSRMQDAPVGKKGSRRGIFCRASWGVDYHTALRERLKLLSAWLEERIEGARIESMVDTGALVDRAVAERAGIGWSGKNCSVITPEFGSYVYLGELITNIPFAPDKPMEDECGDCRLCLDVCPTGALIEGGQLDSQRCIAFLTQTKGMLPDEFRTHIGNRLYGCDTCQTVCPKNKGKINWIHEEFKPDPELAKPLLVPLLTISNRDFKEKFGHVSGSWRGKKPIQRNAILALAHFKEEAAVPDLVALLEKDERPVIRGTAAWALGKIGGEQSQSALLKAKGKEQDEEVLVEINKGLQFFN

SEQ ID NO: 77994 - protein, 376 aa, unidentified
  source 1..376: note = Lysinibacillus xyleni
  REGION 1..376: note = tr|A0A285T6M6|A0A285T6M6_9BACI Epoxyqueuosine reductase OS=Lysinibacillus xyleni OX=614648; GN = SAMN05880501_10970 PE=4 SV=1
MIAQLQKDLVEYAKSIGVDKIGFTHASPFQELKNRLKRQQELNYQSGFEESDIDLRTEPNRLLDGAESIIAIALAYPSKMEEAPTGKKGARRGIFARASWGIDYHVAVRERLQLIEEWLKERVPTVQLKSMVDTGELVDRAVAERAGIGWSGKNCSIITHEFGSYVYLGEMITNIPFAPDTPIENECGECRLCLDVCPTGALVDAGQLNSKKCVAFLTQTKDFLPDEFRAKIGNRIYGCDTCQTVCPKNKGKINWIHDEFKPDPELAKPLLQPLLNLSNKEFKAKFGAMSGSWRGKKPIQRNAIIALAHFKEEAAVPDLIAIMKKDERPVMRGTAAWAIGKIGGPLAEEALLAAREREMDSEVVAEIEKGLTLLNV

SEQ ID NO: 77995 - protein, 358 aa, unidentified
  source 1..358: note = Lysobacter aestuarii
  REGION 1..358: note = tr|A0A507ZVH3|A0A507ZVH3_9GAMM Epoxyqueuosine reductase OS=Lysobacter aestuarii OX=1706195 GN=queG PE=3; SV = 1
MTPSTAPAPLDPDAIAARVRALAKDLGFQRCGISAIELDEDEAHLRSWLAEGLYGSMEWMARHGDKRARPAELVPGTVRVISVGLDYGRNDGDEAWDTLADGERAYVARYALGRDYHKLMRQRLQRLADRVAADIGPFGHRVFVDSAPVLERALARNAGLGWIGKHTCLIDKDGGSWFFLGEIYVDLPLPVDPPASAHCGSCTRCIDVCPTAAIIAPNRLDARRCISYLTIEHEGAIPEALRKPIGNRIFGCDDCQLVCPWNKFARRSDEPDFRARNNLDRATLPELFAWDEAEFLRRTEGSAIRRSGHERWLRNIAVALGNAPGTPEVVAALQSRREDASALVREHVAWALAQHGGA

SEQ ID NO: 77996 - protein, 380 aa, Lysobacter antibioticus
  REGION 1..380: note = tr|A0A0S2F9I6|A0A0S2F9I6_9GAMM Epoxyqueuosine reductase OS=Lysobacter antibioticus OX=84531 GN=queG PE=3; SV = 1
MRRFYTCRIVSQSDTRPTSPLPASADAPGSAPDYAALALRIREIAREFGFQRCGISGIELAEDEAYLLDWLEQGLHGSMDWMARHGGLRARPDELLPGTLRVISVGLDYGRRDDEDAWVTLADGERAYVARYALGRDYHKLMRQRLQRLADRLAELVGPFGHRVFVDSAPVLERALARNAGLGWIGKHTCLIDKDGGSWFFLGEIYVDLPLPIDRPASAHCGTCTRCIDICPTQAIVAPHRLDARRCISYLTIEHEGPIPVELRAPIGNRIFGCDDCQLVCPWNKFAKRNDEPDFRARNDLDRASLAQLFAWDEAEFLRRTEGSAIRRSGHERWLRNIAVALGNAPGSDEVIAGLRSRREHPSEIVREHVEWALARHGVR

SEQ ID NO: 77997 - protein, 375 aa, Lysobacter capsici
  REGION 1..375: note = tr|A0A290ZZT9|A0A290ZZT9_9GAMM Epoxyqueuosine reductase OS=Lysobacter capsici OX=435897 GN=queG PE=3 SV=1
MGRFYTCRIVSPPTARPTPPDPPPAAPDYVALAARIRAIAREFGFQRCGISGIELAQDEAHLLDWLAQGLHGSMDWMARHGELRARPNDLLPGTVRVISVGLDYGRRDDEDAWITLADGERAYVARYALGRDYHKLMRQRLQRLAERLAEVVGPFGHRVFVDSAPVLERALARNAGLGWIGKHTCLIDKDGGSWFFLGEIYVDLPLPVDTPATAHCGTCTRCIDICPTQAIIAPHRLDARRCIAYLTIEHEGAIPIELRPAIGNRIFGCDDCQLVCPWNKFAQRTDEPDFRARNDLDRASLSQLFAWDEAEFLQRTEGSAIRRSGHERWLRNIAVALGNAPATPEVIAALRTRSEHASEVVREHVAWALARHDAA

SEQ ID NO: 77998 - protein, 383 aa, Lysobacter capsici
  REGION 1..383: note = tr|A0A108U6L7|A0A108U6L7_9GAMM Epoxyqueuosine reductase OS=Lysobacter capsici AZ78 OX=1444315 GN=queG; PE = 3 SV=1
MEVSAVADMGRFYTCRIVSPPTARPTPPDPPPAAPDYVALAARIRAIAREFGFQRCGISGIELAQDEAHLLDWLAQGLHGSMDWMARHGELRARPNDLLPGTVRVISVGLDYGRRDDEDAWITLADGERAYVARYALGRDYHKLMRQRLQRLAERLAEVVGPFGHRVFVDSAPVLERALARNAGLGWIGKHTCLIDKDGGSWFFLGEIYVDLPLPVDTPATAHCGTCTRCIDICPTQAIIAPHRLDARRCIAYLTIEHEGAIPIELRPAIGNRIFGCDDCQLVCPWNKFAQRTDEPDFRARNDLDRASLSQLFAWDEAEFLQRTEGSAIRRSGHERWLRNIAVALGNAPATPEVIAALRTRSEHASEVVREHVAWALARHDAA

SEQ ID NO: 77999 - protein, 368 aa, Lysobacter concretionis
  REGION 1..368: note = tr|A0A0A0ENS6|A0A0A0ENS6_9GAMM Epoxyqueuosine reductase OS=Lysobacter concretionis Ko07 = DSM 16239; OX = 1122185 GN=queG PE=3 SV=1
MPATPTDAGCEPADPAALARRIRELAREFGFQRCGISGIDLGEDEAHLRDWLAQGLYGSMEWMARHGDARSRPAELIPGTLRVISVGLDYGRRDDQEAWQTLADGERAYVARYALGRDYHKLMRQRLQRLATRIAEVVGPFGHRVFVDSAPVLERALARNAGLGWIGKHTCLIDKDGGSWFFLGEIYLDLPLPVDAPASTHCGTCTRCIDVCPTQAITAPYRLDARRCISYLTIEHDGPIPLELREPIGNRIFGCDDCQLVCPWNKFAKRTDEPDFRARNNLDEASLAELFAWTEAEFLQRSEGSAIRRSGHQRWLRNIAVALGNAPTTPEVVAALESRRDSDDPLVREHVEWALERHGVPNGPAARG

SEQ ID NO: 78000 - protein, 350 aa, Lysobacter daejeonensis
  REGION 1..350: note = tr|A0A0A0EXC7|A0A0A0EXC7_9GAMM Epoxyqueuosine reductase OS=Lysobacter daejeonensis GH1-9 OX=1385517; GN = queG PE=3 SV=1
MAPRLRELAHEAGFQHFGIAGIELDADEVHLRDWLAKGLHGSMGWMAHHGDKRSRPDELIPGTLRVISVGLDYGRRDDAEAWQTLADGERAYVARYALGRDYHKLMRQRLQKLAERIATEIGPFGYRVFVDSAPVLERALARNAGLGWIGKHTCLIDRDGGSWFFLGEIYVDLPLPVDPPATAHCGTCTRCIEVCPTQAIVAPYRLDARRCISYLTIEHDGAIPEELRVPMGNRIFGCDDCQLVCPWNKFAKRSDEPDFRARNNLDQASLAELFAWTEDEFLRRTEGTAIRRSGHERWLRNIAVALGNAPTSPEVVAALESRREHDSALVREHVAWALQRHDTKRESAGQ

SEQ ID NO: 78001 - protein, 354 aa, Lysobacter defluvii
  REGION 1..354: note = tr|A0A0A0M8V1|A0A0A0M8V1_9GAMM Epoxyqueuosine reductase (Fragment) OS=Lysobacter defluvii IMMIB APB-9 = DSM 18482 OX=1385515 GN=N791_08565 PE=3 SV=1
GASDPAALASRIRELAREGGFQRCGITGIDLAEDEAHLADWLGRGLYGTMEWMARHGRMRARPAELLPGTLRVISVGLDYGRRDDVEAWETLGDGERAYVARYALGRDYHKMMRQRLQRLADRIAELIGPFGHRVFVDSAPVLERALARNAGLGWIGKHTCLIDKDGGSWFFLGEIYVDVPLPVDAPATHHCGTCTRCIDVCPTGAIVAPYRLDARRCISYLTIEHDGPIPEEFRAPIGNRIFGCDDCQLVCPWNKFARRSDEPDFRARNNLDEASLAELFAWTEDEFLTRTEGSAIRRSGHRRWLRNIAVALGNAPTTPGVLAALESRRDDADELVREHVAWALSQHPKPATP

SEQ ID NO: 78002 - protein, 354 aa, Lysobacter dokdonensis
  REGION 1..354: note = tr|A0A0A2WMK6|A0A0A2WMK6_9GAMM Epoxyqueuosine reductase OS=Lysobacter dokdonensis DS-58 OX=1300345; GN = queG PE=3 SV=1
MPSQPAPEGSVLAGQIRALARDLGFQRVGIAGVDLDQDEGHLRDWLAQGLYGSMDWMARHGDKRSRPGELVPGTVRVISVGLDYAQDDEFAWRTLADGERAYVARYALGRDYHKLMRNRLQTLADRIAALVGPFGHRVFVDSAPVLERALARNAGLGWIGKNTCLIDRDAGSWFFLGEVFVDIPLPIDPPASAHCGSCRRCIDVCPTQAIVAPNRLDARRCISYLTIEHEGSIDPELRPLMGNRIFGCDDCQLICPWNKFAKRTDEPDFRARNNLDTATLPELFAWSEDDFLRRTEGSAIRRSGYARWLRNIAVALGNAPTTPEVLRALESRRDVEDPVVREHVAWAIARHASR

SEQ ID NO: 78003 - protein, 359 aa, Lysobacter enzymogenes
  REGION 1..359: note = tr|A0A1T3VLA3|A0A1T3VLA3_LYSEN Epoxyqueuosine reductase OS=Lysobacter enzymogenes OX=69 GN=queG PE=3 SV=1
MPGPAGRPAPDYAALARRIRALAREFGFQRCGISGVELGEDEAYLLDWLERGLHGSMDWMARHGELRARPAQLLPGTVRVISVGLDYGRRDDEEAWATLADGERAYVARYALGRDYHKLMRQRLQRLAERLAELVGPFGHRVFVDSAPVLERALARNAGLGWIGKHTCLIDKDGGSWFFLGEIYVDLPLPVDAPASAHCGTCVRCIDVCPTQAIVAPHRLDARRCIAYLTIEHDGAIPLELREPIGNRIFGCDDCQLVCPWNKFAKRSDEPDFRARNDLDRATLAQLFAWEEDEFLRRTEGSAIRRSGHERWLRNIAVALGNAPTTPEVIAALRSRLQHPSELVREHVQWALAKHETSL

SEQ ID NO: 78004 - protein, 396 aa, Lysobacter enzymogenes
  REGION 1..396: note = tr|A0A0S2DIS0|A0A0S2DIS0_LYSEN Epoxyqueuosine reductase OS=Lysobacter enzymogenes OX=69 GN=queG PE=3 SV=1
  VARIANT 376..382: note = Xaa can be any naturally occurring amino acid
MPGFYTCRIVSQIDASPSSPLPGPAGRPAPDYAALARRIRALAREFGFQRCGISGVELGEDEAYLLDWLERGLHGSMDWMARHGELRARPAQLLPGTVRVISVGLDYGRRDDEEAWATLADGERAYVARYALGRDYHKLMRQRLQRLAERLAELVGPFGHRVFVDSAPVLERALARNAGLGWIGKHTCLIDKDGGSWFFLGEIYVDLPLPVDAPASAHCGTCVRCIDVCPTQAIVAPHRLDARRCIAYLTIEHDGAIPLELREPIGNRIFGCDDCQLVCPWNKFAKRSDEPDFRARNDLDRATLAQLFAWEEDEFLRRTEGSAIRRSGHERWLRNIAVALGNAPTTPEAIAALRSRLQHPSELVREHVQWALAKHXXXXXXXRSYRVFGRKRRTAP

SEQ ID NO: 78005 - protein, 363 aa, Lysobacter gummosus
  REGION 1..363: note = tr|A0A0S2G8J0|A0A0S2G8J0_9GAMM Epoxyqueuosine reductase OS=Lysobacter gummosus OX=262324 GN=queG PE=3; SV = 1
MSQPDARPTSPAAAPDYAALAARIRQIAREFGFQRCGISGIELAQDEAYLLDWLDQGLHGSMDWMARHGDLRARPSALLPGTLRVISVGLDYGRRDDEDAWATLADRERAYVARYALGRDYHKLMRQRLQRLADRLAEVVGPFGHRVFVDSAPVLERALARNAGLGWIGKHTCLIDKDGGSWFFLGEIYVDLPLPVDTPATAHCGTCTRCIDICPTQAIVAPHRLDARRCIAYLTIEHEGAIPIELRPAIGNRIFGCDDCQLVCPWNKFAQRTDEPDFRARNDLDKATLTQLFAWDEAEFLQRTEGSAIRRSGHERWLRNIAVALGNAEDSPEVVAALRARREDPSEVVREHVAWALARHGVA

SEQ ID NO: 78006 - protein, 354 aa, unidentified
  source 1..354: note = Lysobacter lycopersici
  REGION 1..354: note = tr|A0A516V2C5|A0A516V2C5_9GAMM Epoxyqueuosine reductase OS=Lysobacter lycopersici OX=1324796 GN=queG; PE = 3 SV=1
MPETAAKPDYPALALRFKALAREHGFQRCGISGIELAADESHLRDWLSRGLYGTMDWMARHGEKRTRPAELVPGTLRVFSVGLDYGQDEAAAWDNLRDGERAYVARYALGRDYHKLMRNRLQKLADEIAGEIGPFGHRVFVDSAPVLERALARDAGVGWIGKHTCLIDKDGGSWFFLGEIYLDLPLAVDPPATEHCGTCTRCIEICPTQAIVAPHRLDARRCISYLTIEHEGSIAEELRPLIGNRIFGCDDCQLVCPWNKFAKRTDEPDFRARNDLDRATLAELFAWSEDEFLQRTEGSAIRRSGHDRWLRNIAVALGNAPKSESVIAALQSRREDPSPIVREHVEWALRRHGS

SEQ ID NO: 78007 - protein, 352 aa, unidentified
  source 1..352: note = Lysobacter maris
  REGION 1..352: note = tr|A0A508AXV9|A0A508AXV9_9GAMM Epoxyqueuosine reductase OS=Lysobacter maris OX=1605891 GN=queG PE=3 SV=1
MAERVRELAREFGFQRCGIAGIELGEDETHLRSWLAEGLYGSMDWMARHGDKRSRPSALIPGTLRVISVGLDYGRNDGEEAWDTLADGERAYVARYALGRDYHKLMRQRLQRMAERLAVEVGAFGHRVFVDSAPVLERALARNAGLGWIGKHTCLIDKDGGSWFFLGEIYVDLPLPIDPPASAHCGTCTRCIDICPTRAIVAPNRLDARRCIAYLTIEHEGAIPEPLREPIGNRIFGCDDCQLVCPWNKFARRTDEPDFRARNDLDRASLAELFAWDEDEFLRRTEGSAIRRSGHERWLRNIAVALGNAPTTPEVLAALASRRDHPSALVREHVEWALARHAKEADLPQGRP

SEQ ID NO: 78008 - protein, 365 aa, unidentified
  source 1..365: note = Lysobacter maris
  REGION 1..365: note = tr|A0A2U9THW7|A0A2U9THW7_9GAMM Epoxyqueuosine reductase OS=Lysobacter maris OX=1605891 GN=queG PE=3 SV=1
MNTAAAPDVDYAALAERVRELAREFGFQRCGIAGIELGEDETHLRSWLAEGLYGSMDWMARHGDKRSRPSALIPGTLRVISVGLDYGRNDGEEAWDTLADGERAYVARYALGRDYHKLMRQRLQRMAERLAIEVGAFGHRVFVDSAPVLERALARNAGLGWIGKHTCLIDKDGGSWFFLGEIYVDLPLPIDPPASAHCGTCTRCIDICPTRAIVAPNRLDARRCIAYLTIEHEGAIPEPLREPIGNRIFGCDDCQLVCPWNKFARRTDEPDFRARNDLDRASLAELFAWDEDEFLRRTEGSAIRRSGHERWLRNIAVALGNAPTTPEVLAALASRRDHPSALVREHVEWALARHAKEADLPQGRP

SEQ ID NO: 78009 - protein, 354 aa, unidentified
  source 1..354: note = Lysobacter pythonis
  REGION 1..354: note = tr|A0A3M2I3F0|A0A3M2I3F0_9GAMM Epoxyqueuosine reductase OS=Lysobacter pythonis OX=2483112 GN=queG PE=3; SV = 1
MPAPRADIALLTTRIREEAASLGFTRFGISGVALGEDESHLRSWLAEGLHGTMQWMAAHGDKRSRPDELIPGTLSVISVGLDYGREHEEAWATLEDGERAYVARYALGRDYHKLMRNRLQKLAARIAEVIGPFGHRVFVDSAPVLERALARNAGLGWIGKHTCLIDKDGGSWFFLGELYVDFDLPASAPATHHCGTCTRCIDICPTRAIIAPYRLDARRCISYLTIEHAGAIPEEFRAAIGNRIFGCDDCQLICPWNKFAKRADEPDFRVRNGLDRATLVELFAWSEDEFLRRTEGSAIRRSGHERWLRNIALALGNAPRTPEVAVSLRSRRDHPSELVREHVAWALARHGIAD

SEQ ID NO: 78010 - protein, 370 aa, Lysobacter ruishenii
  REGION 1..370: note = tr|A0A562LY98|A0A562LY98_9GAMM Epoxyqueuosine reductase OS=Lysobacter ruishenii OX=686800 GN=queG PE=3; SV = 1
MARFYTAVAVSPLPTPAALADTDFDALASRIRTFAREAGFQHFGITGIELTGDEDHLRDWLAKGLHGSMGWMAQHGDKRSRPDELIPGTLRVVSVGLDYGRRDDEEAWQTLADGERAYVARYALGRDYHKLMRQRLQKLAERIAEEVGPFGYRVFVDSAPVLERALARNAGLGWIGKHTCLIDRDGGSWFFLGEIYLDLPLPVDPPATAHCGTCTRCIDICPTQAIIAPNRLDARRCISYLTIEHDGPIPEALRAPMGNRIFGCDDCQLVCPWNKFAKRTDEPDFRARNNLDQASLAELFAWSEEEFLRRTEGTAIRRSGHERWLRNIAVALGNAPSTPQVIAALQSRRDHDSAVVREHVEWALKRHGID

SEQ ID NO: 78011 - protein, 365 aa, unidentified
  source 1..365: note = Lysobacter silvestris
  REGION 1..365: note = tr|A0A2K1PYW7|A0A2K1PYW7_9GAMM Epoxyqueuosine reductase OS=Lysobacter silvestris OX=1645665 GN=queG PE=3; SV = 1
MRGFYTSRIVSTPASPVLHDSQRLRRQIDALARARGFQRFGISGIELGEDIAHLEHWLVQGRHGDMAWMERNHDKRSAPESLVPGTLRVICVGMDYGQPPDAAWATLDDGERAYVARYALGRDYHKLMRKRLQQLADDVAAVIGPLGHRVFVDSAPVLERALARNAGLGWIGKHTCLIDKDGGSWFFLGELFVDLDLPVDVPATNHCGTCTRCIDICPTQAIVAPYQLDARRCIAYLTIEHEGAIDEALRPLIGNRIFGCDDCQLVCPWNKFARRNDEPDFRARNALDTATLPQLFAWSEDEFLQRSEGSTIRRSGYRRWRRNIAVALGNAPSTPEVIAALESARNEQDELVAEHVRWALAQHLR

SEQ ID NO: 78012 - protein, 356 aa, Lysobacter soli
  REGION 1..356: note = tr|A0A3D8VK92|A0A3D8VK92_9GAMM Epoxyqueuosine reductase OS=Lysobacter soli OX=453783 GN=queG PE=3 SV=1
MPDSAPDYGALAARVRELAREFGFQRCGITGVELGEDEAYLREWLAQGLYGSMDWMARHGDLRARPDELHPGTVRVISVGLDYGRDSDEAWATLDDSERAYVARYALGRDYHKLMRQRLQRLADRIAEVVGPFGHRVFVDSAPVLERALARNAGLGWIGKHTCLIDKDGGSFFFLGEIYVDLPLPVDVPASAHCGTCRRCIDVCPTQAIVAPYRLDARRCIAYLTIEHEGAIPEDLRAPIGNRIFGCDDCQLICPWNKFAQRTDEPDFRVRNDLDKATLVDLFAWSEEEFLQRTEGSAIRRSGHERWLRNIAVALGNARSTPDVIGALRARRESASPMVREHIEWALRRHGADDAA

SEQ ID NO: 78013 - protein, 418 aa, Lysobacter sp.
  REGION 1..418: note = tr|A0A522Y5F8|A0A522Y5F8_LYSSP Epoxyqueuosine reductase OS=Lysobacter sp. OX=72226 GN=queG PE=3 SV=1
MRPARPAPSGRARPARPAPLFPACVLNRHRTVRHRRASHDFILRVVDALDSSLAPAPDLAGIVHRVRTHAWAMGFQRCGISGVELGEDESHLADWLGRGLYGSMEWMARHGLTRARPAELIPGTVRVISVGLDYGRRDDTEAWQTLDDGERAYVARYALGRDYHKLMRGRLQKLADRLAAEVGPFGHRVFVDSAPVLERALARNAGLGWIGKHTCLIDRDGGSWFFLGEIYIDMPLPVDQPATAHCGTCTRCIDICPTAAILAPHRLDARRCISYLTIEHEGSIDVALRPLIGNRIFGCDDCQLVCPWNKFAKRTDEPDFRARNRLDTATLSDLFAWTAEEFLARTEGSAIRRSGHARWLRNIAIALGNAPSTPSVLAALQSRQHTEDAMVREHVEWAMSQHAARNTSGRANRTVNVR

SEQ ID NO: 78014 - protein, 371 aa, Lysobacter sp.
  REGION 1..371: note = tr|A0A3M8SUZ9|A0A3M8SUZ9_9GAMM Epoxyqueuosine reductase OS=Lysobacter sp. ZS60 OX=1327343 GN=queG PE=3; SV = 1
MLQPSHTRTPPTAPDVDHVALARRIRELAREFGFQRCGISGIELGADELHLRDWLSQGLYGSMEWMARHGELRARPQELIPGTLRVISVGLDYGRNDDDSAWQTIADGERAYVARYALGRDYHKLMRQRLQKLADRIADVVGPFGHRVFVDSAPVLERALARNAGLGWIGKHTCLIDKDGGSWFFLGEIYVDLPLPVDVPASAHCGTCMRCIDICPTRAITAPHRLDARRCISYLTIEHEGSIPPDLREPMGNRIFGCDDCQLVCPWNKFAKRNDEPDFRARNDLDKATLAQLFAWDEDEFLRRTEGSAIRRSGHERWLRNIAVALGNAPTTPDVLAALESRREHASALVREHVQWALQRHREKTQDVPQA

SEQ ID NO: 78015 - protein, 361 aa, Lysobacter spongiicola
  REGION 1..361: note = tr|A0A1T4MQV2|A0A1T4MQV2_9GAMM Epoxyqueuosine reductase OS=Lysobacter spongiicola DSM 21749 OX=1122188; GN = queG PE=3 SV=1
MSAPAPNQPQADPAELAGRIRELAADLGFQRCGISGVDLGEDEAHLLDWLARGLHGSMDWMARHGSARSRPAELLPGTLRVISVGLDYGRRDDEEAWQTLADGERAYVARYALGRDYHKLMRQRLQKLADRIAELVGPFGYRAFVDSAPVLERALARNAGLGWIGKHTCLIDRDGGSWFFLGEIYVDLPLPVDAPATSHCGTCTRCIDVCPTGAITAPYRLDARRCISYLTIEHDGAIPEELRKPIGNRIFGCDDCQLACPWNKFAKRTDEPDFRVRNNLDEASLPELFAWTEEEFLQRTEGSAIRRSGHRRWLRNIAVALGNAPTTPAVLDALDARRDNPDGLVREHVEWALRQHREREC

SEQ ID NO: 78016 - protein, 354 aa, unidentified
  source 1..354: note = Lysobacter tolerans
  REGION 1..354: note = tr|A0A1N6VPY1|A0A1N6VPY1_9GAMM Epoxyqueuosine reductase OS=Lysobacter tolerans OX=1604334 GN=queG PE=3; SV = 1
MHAPNADIDQLIARIREEAASLGFTRFGVSGIELNEDAEHLRRWLKEGLHGTMQWMAAHGDKRMRPEELIPGTVSVISVGLDYGRDHDEAWATIEDGERAYVARYALGRDYHKLMRSRLQKLAERIEAIIGPFGHRVFVDSAPVLERALARNAGLGWIGKHTCLIDKDGGSWFFLGELYVDFALPASSPATNHCGSCRRCIDICPTQAIVAPYRLDARRCISYLTIEHEGSIPEKFRVPMGNRIFGCDDCQLVCPWNKFAERFDEPDFRTRNDLDRATLADLFAWDEAEFLRRTEGSAIRRSGHERWLRNIAIALGNAPTTPDVIAALQSRQDHPSAIVREHVQWGLMRHDAGE

SEQ ID NO: 78017 - protein, 317 aa, unidentified
  source 1..317: note = Macellibacteroides sp.
  REGION 1..317: note = tr|A0A1C2BSR8|A0A1C2BSR8_9PORP Epoxyqueuosine reductase OS=Macellibacteroides sp. HH-ZS OX=1857568; GN = queG PE=3 SV=1
MNLEQKIKEEALRLGFAACGIAELAPADSEAAYFDTWLANGMHADMTFMENYRNVRLDPTGLLEGARSIISVALNYYPACLQPQDVPQLAYYAYGRDYHYVIKEKLNELVDYIRREVNINARCFTDSAPILERYWAWKAGLGWIGKNTHLIIPGKGSYFFLGEIVTDLALIPDRPMESMCGKCTRCMESCPTKAIEAPRTLNAGKCISYLTIENRNEIPEKLAPLIGNRIYGCDTCQQVCPWNRFARPTTEESFMMKDELAEMTADKWYALSREQYTRIFKGSAVKRAKYEGLLRNIANYKAINFRKEEEQNTNTYK

SEQ ID NO: 78018 - protein, 374 aa, unidentified
  source 1..374: note = Macrococcus bohemicus
  REGION 1..374: note = tr|A0A4R5XXC9|A0A4R5XXC9_9STAP tRNA epoxyqueuosine(34) reductase QueG OS=Macrococcus bohemicus; OX = 1903056 GN=queG PE=4 SV=1
MYQQLKQEIIEYSKTIGIDAIGFTTADPFESLRPKLEAYYANNYDSGFEKGTIEERINPRLSLPEAQSIIAIAVGYPNKLPNAPKSIRGARRGIFARASWGIDYHTLLNKRLELLVAFIKERFPEAKMMNMVDTGVLSDRAVAERAGLGYAAKNGFILNKDLGTWTYLGEILVSIPFEPDHPVIDSCLDCTICIDRCPTGALLGNGQLDSNKCISFLTQTKGFMPDEYRGKIGNRLYGCDTCQQVCPKNRGINTTHEDIELEPENLKPLLVPLLKMTNKTFKAEFGHLAGAWRGKKPIQRNAILALAHFKEIDAIRDLKEVAESDPRPEIKGTAYWAIGQISRDEIDYLKARYEKEIDNDVKLEILKSIESVEK

SEQ ID NO: 78019 - protein, 374 aa, unidentified
  source 1..374: note = Macrococcus bohemicus
  REGION 1..374: note = tr|A0A328A5Z2|A0A328A5Z2_9STAP tRNA epoxyqueuosine(34) reductase QueG OS=Macrococcus bohemicus; OX = 1903056 GN=queG PE=4 SV=1
MYQQLKQEIIEYSKTIGIDAIGFTTADPFESLRPKLEAYYANNYDSGFEKGTIEERINPRLSLPEAQSIIAIAVGYPNKLPNAPKSIRGARRGIFARASWGIDYHTLLNKRLELLVAFIKERVPEAKTMNMVDTGVLSDRAVAERAGLGYAAKNGFILNKDLGTWTYLGEILVSIPFEPDHPVIDSCLDCTICIDRCPTGALLGNGQLDSNKCISFLTQKKGFMPDEYRGKIGNRLYGCDTCQQVCPKNRGINTTHEDIELEPENLKPLLVPLLKMTNKTFKAEFGHLAGAWRGKKPIQRNAILALAHFNEIDAIPDLKEVAESDPRPEIKGTAYWAIGQISRDEIDYLKARYEKEIDNDVKLEILKSIESVEK

SEQ ID NO: 78020 - protein, 377 aa, Macrococcus bovicus
  REGION 1..377: note = tr|A0A4R6C113|A0A4R6C113_9STAP tRNA epoxyqueuosine(34) reductase QueG OS=Macrococcus bovicus; OX = 69968 GN=queG PE=4 SV=1
MSQTLKEEIIAYSKTIGIDAIGFTTAEPFEELRPKLEAYYAKGYASGFEESDIELRIDPRKSMASAESIIAIAVGYPNKLPGTPKSTRGERRGMFARSSWGMDYHSLLRKRLQLLEAFIKSRLPEAECLSMVDTGVLSDRAVAERAGLGYAAKNGFILNRKLGTWTYLGELLTSIKLPPDAPVLDSCLDCTICIDRCPTGALVGNGQLNSQKCISFLTQTKGFLPDEYRSKIGNRLYGCDTCQQVCPKNRGIHTTHDDIILEPLKLKPLLEPLLTMSNKMFKNEYGHLAGSWRGKKPVQRNAIIALAHFKEESAVPTLKEVAVKDERPVIKGTAYWAIGQIAGEAERPFLEERYRMEEDAAVKNEILKGLEEITHVN

SEQ ID NO: 78021 - protein, 377 aa, Macrococcus brunensis
  REGION 1..377: note = tr|A0A4R6BAW4|A0A4R6BAW4_9STAP tRNA epoxyqueuosine(34) reductase QueG OS=Macrococcus brunensis; OX = 198483 GN=queG PE=4 SV=1
MSQTLKEEIIAYSKTIGIDAIGFTTAEPFEELRPKLEAYYAKGYASGFEESDIELRINPRKSVASAESIIAIAVGYPNRLPGAPKSVRGERRGMFARSSWGMDYHSLLRKRLQLLEAFIKSRVPEAECLSMVDTGVLSDRAVAERAGLGYAAKNGFILNKELGTWTYLGELLTSIKLPPDAPVLDSCLDCTICIDRCPTGALVGNGQLNSQKCISFLTQTKGFLPDEYRSKIGNRLYGCDTCQQVCPKNRGINTTQDDIILEPLKLKPLLEPLLTMSNKMFKNEYGYLAGSWRGKKPIQRNAIIALAHFKEESAVPTLKEVAVKDERPVIKGTAYWALGRIAGEAARPFLEERYRMEEDREVKNEILKGLEEIIHVN

SEQ ID NO: 78022 - protein, 373 aa, unidentified
  source 1..373: note = Macrococcus canis
  REGION 1..373: note = tr|A0A4V3BGC8|A0A4V3BGC8_9STAP tRNA epoxyqueuosine(34) reductase QueG OS=Macrococcus canis; OX = 1855823 GN=queG PE=4 SV=1
MNEQLKQEIIAYSKTIGIDAIGFTTAEPFHELRPKLEAYYSSGYASGFEKGSIEERIDPKLSLPEAESIIAIAVGYPNKLPNAPKSIRGARRGIFARASWGIDYHTLLNKRLSLLEAFILERVPDAKVMNMVDTGVLSDRAVSERAGLGYAAKNGFILNKALGTWTYLGEMLISIPFTPDDAVIDSCLDCTICIDRCPTGALLGDGQLDSNKCISFLTQTKGFMPDEYRGKIGNRLYGCDTCQQVCPKNRGINTMHDDIELEPETLKPLLVPLLKMNNKQFKNEFGHLAGAWRGKKPIQRNAILALAHFKEIDAIDDLKEIAENDVRPEIKGTAYWALGQMSSSTHDYLRERYTQETDNDVKIEILKSLGSVE

SEQ ID NO: 78023 - protein, 373 aa, unidentified
  source 1..373: note = Macrococcus canis
  REGION 1..373: note = tr|A0A4P9CK85|A0A4P9CK85_9STAP tRNA epoxyqueuosine(34) reductase QueG OS=Macrococcus canis; OX = 1855823 GN=queG PE=4 SV=1
MNEQLKQEIIAYSKTIGIDAIGFTTAEPFHELRPKLEAYYSSGYASGFEKGSIEERIDPKLSLPEAESIIAIAVGYPNKLPNAPKSIRGARRGIFARASWGIDYHTLLNKRLSLLEAFILERVPDAKVMNMVDTGVLSDRAVAERAGLGYAAKNGFILNKTLGTWTYLGEMLISIPFPPDHPVIDSCLDCTICIDRCPTGALLGDGQLDSNKCISFLTQTKGFMPDEYRGKIGNRLYGCDTCQQVCPKNRGINTMHDDIELEPETLKPLLVPLLKMNNKQFKNEFGHLAGAWRGKKPIQRNAILALAHFKEIDAIDDLKEIAENDVRPEIKGTAYWALGQMSSSTHDYLRERYTQETDNDVKIEILKSLGSVE

SEQ ID NO: 78024 - protein, 377 aa, Macrococcus carouselicus
  REGION 1..377: note = tr|A0A4R6BRV0|A0A4R6BRV0_9STAP tRNA epoxyqueuosine(34) reductase QueG OS=Macrococcus carouselicus OX=69969 GN=queG PE=4 SV=1
MSQALKEEIIAYSKTIGIDAIGFTTAEPFEELRPKLEAYYAKGYASGFEESDIELRIDPRKSMNAAETIIAIAVGYPNKLPDAPKSLRGERRGMFARSSWGMDYHSLLRKRLQRLEAFIRSRVPEAECLSMVDTGVLSDRAVAERAGLGYAAKNGFILNKELGTWTYLGELLTSIKLPPDAPVLDSCLDCTICIDRCPTGALVGNGQLNSQKCISFLTQTKGFLPDEYRTKIGNRLYGCDTCQQVCPKNRGINTTHDDIILEPLKLKPLLEPLLTMSNKMFKNEYGHLAGSWRGKKPIQRNAIIALAHFKEETAVPTLKEVAVKDERPVIKGTAYWAIGHIAGEAERPFLEERYHLEEETEVKSEILKGLEEITHVN

SEQ ID NO: 78025 - protein, 373 aa, Macrococcus caseolyticus
  REGION 1..373: note = tr|A0A2N0VPJ3|A0A2N0VPJ3_9STAP tRNA epoxyqueuosine(34) reductase QueG OS=Macrococcus caseolyticus OX=69966 GN=queG PE=4 SV=1
MNEQLKQEIIAYSKTIGIDAIGFTTAEPFHELRPKLEAYYNSGYASGFEKGSIEERIDPKLSLPEAQSIIAIAVGYPNKLPNAPKSMRGARRGIFARASWGIDYHTLLNRRLSLLEAFILERVPDAKVMNMVDTGVLSDRAVAERAGLGYAAKNGFILNKTLGTWTYLGEMLISIPFTPDHPVIDSCLDCTICIDRCPTGALLGDGQLDSNKCISFLTQTKGFMPDEYRGKIGNRLYGCDTCQQVCPKNRGINTTHDDIELEPQTLKPLLVPLLKMNNKEFKNEFGHLAGAWRGKKPIQRNAILALAHFKEIDAIDDLKEVAENDVRPEIKGTAYWALGQISMSTHDYLRERYTQETDNDVKIEILKSLGSVE

SEQ ID NO: 78026 - protein, 373 aa, Macrococcus caseolyticus
  REGION 1..373: note = tr|A0A5E8SGS9|A0A5E8SGS9_9STAP tRNA epoxyqueuosine(34) reductase QueG OS=Macrococcus caseolyticus subsp. hominis OX=1891096 GN=queG PE=4 SV=1
MNEQLKQEIIAYSKTIGIDAIGFTTAEPFHELRPKLEAYYNSGYASGFEKGSIEERIDPKLSLPEAQSIIAIAVGYPNKLPNAPKSMRGARRGIFARASWGIDYHTLLNRRLSLLEAFILERVPDAKVMNMVDTDVLSDRAVAERAGLGYAAKNGFILNKTLGTWTYLGEMLISIPFTPDHPVIDSCLDCTICIDRCPTGALLGDGQLDSNKCISFLTQTKGFMPDEYRGKIGNRLYGCDTCQQVCPKNRGINTTHDDIELEPQTLKPLLVPLLKMNNKQFKNEYGHLAGAWRGKKPIQRNAILALAHFKEIDAIDDLKEVAENDVRPEIKGTAYWALGQISMSTHDYLRERYTQETDNDVKIEILKSLGSVE

SEQ ID NO: 78027 - protein, 374 aa, unidentified
  source 1..374: note = Macrococcus epidermidis
  REGION 1..374: note = tr|A0A327ZQ36|A0A327ZQ36_9STAP tRNA epoxyqueuosine(34) reductase QueG OS=Macrococcus epidermidis OX=1902580 GN=queG PE=4 SV=1
MYQKLKQEIIEYSKTIGIDAIGFTTAEPFESLRPKLEAYYANNYDSGFEKGTIEERINPKLSLPEAQSIIAIAVGYPNKLPNAPKSIRGARRGIFARASWGIDYHTLLNKRLELLVAFIKERVPEAQTMNMVDTGVLSDRAVAERAGLGYAAKNGFILNKDLGTWTYLGEILVSIPFEPDHPVIESCLDCTICIDRCPTGALLGNGQLDSNKCISFLTQTKGFIPDEYRSKIGNRLYGCDTCQQVCPKNRGINTTHEDIELEPEKLKPLLVPLLKMTNKTFKAEFGHLAGAWRGKKPIQRNAILALAHFKEIDAVPDLKEVAESDPRPEIKGTAYWAIGQMSHDEIDYLKARYEKETDNDVKLEILKSIESVEK

SEQ ID NO: 78028 - protein, 374 aa, unidentified
  source 1..374: note = Macrococcus goetzii
  REGION 1..374: note = tr|A0A2G5NUC1|A0A2G5NUC1_9STAP tRNA epoxyqueuosine(34) reductase QueG OS=Macrococcus goetzii; OX = 1891097 GN=queG PE=4 SV=1
MYQKLKQEIIEYSKTIGIDAIGFTTAEPFESLRPKLEAYYANNYDSGFEKGTIEERINPKLSLPEAQSIIAIAVGYPNKLPNAPKSIRGARRGIFARASWGIDYHTLLNKRLELLVAFIKERVPEAQTMNMVDTGVLSDRAVAERAGLGYAAKNGFILNKDLGTWTYLGEILVSIPFEPDHPVIDSCLDCTICIDRCPTGALLGNGQLDSNKCISFLTQTKGFMPDEYRSKIGNRLYGCDTCQQVCPKNRGINTTHEDIELEPEKLKPLLVPLLKMTNKTFKSEFGHLAGAWRGKKPIQRNAILALAHFKEIDAVPDLKEVAESDPRPEIKGTAYWAIGQISHDEIDYLKARYEKETDNDVKLEILKSIESVEK

SEQ ID NO: 78029 - protein, 374 aa, unidentified
  source 1..374: note = Macrococcus goetzii
  REGION 1..374: note = tr|A0A4R6CA11|A0A4R6CA11_9STAP tRNA epoxyqueuosine(34) reductase QueG OS=Macrococcus goetzii; OX = 1891097 GN=queG PE=4 SV=1
MYQKLKQEIIEYSKTIGIDAIGFTTAEPFESLRPKLEAYYANNYDSGFEKGTIEERINPKLSLPEAQSIIAIAVGYPNKLPHAPKSIRGARRGIFARASWGIDYHTLLNKRLELLVAFIKERVPEAVTMNMVDTGVLSDRAVAERAGLGYAAKNGFILNKDLGTWTYLGEILVSIPFEPDHPVIDSCLDCTICIDRCPTGALLGNGQLDSNKCISFLTQSKGFMPDEYRGKIGNRLYGCDTCQQVCPKNRGINTTHEDIELEPEKLKPLLVPLLKMTNKTFKAEFGHLAGAWRGKKPIQRNAILALAHFKEIDAVPDLKEVAESDPRPEIKGTAYWAIGQMSHDEIDYLKARYEEETDNDVKLEILKSIESVEK

SEQ ID NO: 78030 - protein, 374 aa, Macrococcus hajekii
  REGION 1..374: note = tr|A0A4R6BLQ3|A0A4R6BLQ3_9STAP tRNA epoxyqueuosine(34) reductase QueG OS=Macrococcus hajekii; OX = 198482 GN=queG PE=4 SV=1
MSVALKNDIIAFSKTIGIDAIRFTTAEPFEELRPKLIDYFSKGYASGFEESDIELRIDPKKSLASAETIIAIAVGYPNKLPDAPKSVRGGRRGIFARASWGMDYHSLLRKRLEQLEAFIRERVPEAECMSMVDTGVLSDRAVAERAGLGYAAKNGFILNKELGTWTYLGELLISIKLPPDAPVLDSCLDCTICIDRCPTGALVGNGQLNSQKCISFLTQTKGFMPDEYRSKIGNRLYGCDTCQQVCPKNRGINTTHSDIVLEPLKLKPLLEPLLTMSNKMFKNEYGDLAGSWRGKKPIQRNAILALAHFKEESALPVLKEVAVNDERPVIKGTAYWAIGRIAGAGEKGFLDERFEVEQDPEVKNEILKGLEEIY

SEQ ID NO: 78031 - protein, 378 aa, Macrococcus lamae
  REGION 1..378: note = tr|A0A4R6BSX9|A0A4R6BSX9_9STAP tRNA epoxyqueuosine(34) reductase QueG OS=Macrococcus lamae; OX = 198484 GN=queG PE=4 SV=1
MSEQLKQEIIEYSRTIGIDAIGFTTAEPFEELRPKLEEYYMKGYASGFESSDIELRVNPKKSLPSARSIIAIAVGYPNRLPDAPKSTRGERRGMFARSSWGMDYHSLLRKRLTLLQSFIEERVPHAECLSMVDTGVLSDRAVAERAGLGYAAKNGFILNDKLGTWTYLGELLTSIPLPPDQPVIDSCLDCTICVDRCPTGALVGNGQLNAQKCISFLTQMKGFLPDEYRGKIGNRLYGCDTCQQVCPRNRGINTQQDDIILEPLKLKPLLEPLLTISNKMFKNEFGHLAGSWRGKKPIQRNAIIALAHYKETASIPTLKKVAVEDERPVIKGTAYWAIGRIAGQMEAPFLMERYNIEEDIEVRNEILKGLEEIEHVIN

SEQ ID NO: 78032 - protein, 372 aa, Macrococcus sp.
  REGION 1..372: note = tr|A0A4Q1AZR2|A0A4Q1AZR2_9STAP tRNA epoxyqueuosine(34) reductase QueG OS=Macrococcus sp. DPC7161 OX=2507060 GN=queG PE=4 SV=1
MENLKQEIINYSKTIGISAIGFTTAEPFEDLRPILEAYYANNYQSGFEPDDIEARIDPKLSMPNAQSIIAIAVGYPNKLKDAPASKRGARRGIFARASWGIDYHSLLRNRLNLLEAFIKERVPEAECLSMVDTGVLSDRSVAERAGLGYSAKNGFVLNENLGTWTYLGEMLVNLPFEPDTPVVDSCYDCTICIDKCPTGALVGNGQLDSKKCISFLTQTKGMIADEYRYKIGNRLYGCDTCQQVCPKNKGINVLQDDIQLEPEILKPLLRPLLTISNKDFKSTYGHLAGSWRGKKPIQRNAILALAHFKDDTAIEDLKHVAINDVRIEIKATAYWAIGQIMGDAEKGFLMNRYEIESDELVKEEILKGLEVN

SEQ ID NO: 78033 - protein, 351 aa, unidentified
  source 1..351: note = Magnetococcales bacterium
  REGION 1..351: note = tr|A0A2E3C457|A0A2E3C457_9PROT Epoxyqueuosine reductase OS=Magnetococcales bacterium OX=2026759 GN=queG; PE = 3 SV=1
MLVPMTDQPATTQKDAILAKALELGFDVAKVGTPISMKRYLDEWLELGYHGEMAWMKDRAHLRADPKALWPEVESIIAVGLNYGPDHNPLENLEHKNQGNISVYARGDDYHDVLKKRLKQLGRWMAETYNCELKVFVDTAPVMEKPLAANAGLGWQGKHTNVVSKVFGSWLFLGIVYTTLKLPADKPKPDHCGSCRKCLDVCPTKAFPKPYQLDARRCISYLTIENKGAIPLEFRKAMGNCIYGCDDCLSVCPWNKFAKESQTMALHAREELAGPSLDELLTLDDTSFRALFRKSPIKRIGVNRFLRNVLVACGNSGNTALIPQIETFLNHEDPVLQEMAQWALAELKQAT

SEQ ID NO: 78034 - protein, 387 aa, unidentified
  source 1..387: note = Magnetococcus marinus
  REGION 1..387: note = tr|A0L843|A0L843_MAGMM 4Fe-4S ferredoxin-type domain-containing protein OS=Magnetococcus marinus (strain ATCC BAA-1437 / JCM 17883 / MC-1) OX=156889 GN=Mmc1_1627; PE = 4 SV=1
MLPISHTQCTHQSHELKEEIRSKALEMGFDSVAFAPPTPPPHHECLDAWLAAGGHGDMAWMARNQERRVDPAQLMPGLATIMVVGVNYQPDPTLLTTLHKPAKGYISAYARNKDYHDILKKRLKALAQWLEKRLGHAHEGRLFVDTAPLLERPVAAHSGLGWQGKNSMLVSRHYGCWLFLGEFFLSLALPADACEPDHCGQCRRCQQACPTGALDRPYWLLAPDCLAYWTIETDLPIPHALRRAMGNRVYGCDDCVMVCPFNRFGAPTQDPLLQPQDGGQEPDLLMLAQLTEETFRSMFRQSPVKRSGRIRLQRNVAVALGNWGSAEAIAMLNQLLTHEHPLVRGHAVWGLGEHRHHIAVAEALQQAWRVEADGYVRQELARLCQGV

SEQ ID NO: 78035 - protein, 382 aa, unidentified
  source 1..382: note = Magnetococcus massalia
  REGION 1..382: note = tr|A0A1S7LH83|A0A1S7LH83_MAGMO Uncharacterized protein OS=Magnetococcus massalia (strain MO-1) OX=451514; GN = MAGMO_2127 PE=4 SV=1
MTQCTQQHVELKEEIRAKALELGFDQVGFAPPKPPPHHEKLPQWLAQEGAGDMAWLANNQARRMDPNTLMQGLACILVVGVNYQPVEDLEQQLGQVDEGYISAYARGRDYHELMKKKLKALGRWLQERLGGEHEGRVFVDTAPVLERPMAALSGVGWQGKNTMLVSRQFGCWMFLGEFFLSLPLLPDRVEQDHCGSCNRCQVACPTGALERPYWLLAPDCLAYWSIETDLPIPHAMRRAMGNRIYGCDDCVRVCPFNRFGEPTQQSHYQTPEHRQHLKLVDLVALDDAQFRQLFRQSPVKRSGVMRLQRNVAVALGNWRSEEAVEPLIRLLGHAHPIVRGHAVWGLGEHKKTPSAMAALSVFAEQETDHYVCEELARLNLAQ

SEQ ID NO: 78036 - protein, 367 aa, unidentified
  source 1..367: note = Magnetofaba australis
  REGION 1..367: note = tr|A0A1Y2K4T8|A0A1Y2K4T8_9PROT Putative iron-sulfur cluster binding protein OS=Magnetofaba australis IT-1; OX = 1434232 GN=MAIT1_04113 PE=4 SV=1
MAWMANHAERRADPRLLMDNLGVVMVLGVNYKPDGDLMEELSHGENAYISAYARNNDYHDILKKRTKALARWLAERLGQPMDGRVFVDTAPVLERPLAAQSGIGWQGKNTMLASRKFGCWLFLAEYFIALPLPPDQVEEDHCGECDRCQRACPTGALDDPYRMDARQCLAYWSIESSGVIPQKFRRLMGNRIYGCDDCIVVCPFNRFADMTRESDFVARDALKDREMISLMFARDADFREALRKTPIKRLGFSKFIRNLAIGLGNWGRESGERSAFDLLLALLDHESPMARAHAAWGVGECVAYAEEGMAALRQKLAQEPDAQAREEMRSALYLLAARNGARALMQSEPLVEVELGLDGAAPDGAAP

SEQ ID NO: 78037 - protein, 347 aa, unidentified
  source 1..347: note = Magnetospira sp.
  REGION 1..347: note = tr|W6K590|W6K590_MAGSQ Epoxyqueuosine reductase; OS = Magnetospira sp. (strain QH-2) OX=1288970 GN=queG PE=3; SV = 1
MTTSHRNQRDNIRAKALDLGFDACGFARAQSRAEDRDALRSYINQGRHMDMAWMADTADRRVDPRALWSEAKTVIALGMNYGPGHDPRDLYRHSDRGAVSVYARGKDYHDVVKKRLKALARWIHETFEAEVKVFVDTAPVMEKPLARQAGLGWIGKHTNLVSRDYGSWLFLGEVFTTLELPADRHMPDHCGSCDACVRACPTDALNVPYQMDTGRCLSFLNIEAKTPLPEAFRSLAGSRIYGCDDCLSACPWNKFQKPTNETALLPRAELTAPRLADLAQLDDAGFRKLFAGSPVKRVGRDRFLHNVLIALGNGGDQESRPVIDALLDDPSDLVRDAAGWAKARLPD

SEQ ID NO: 78038 - protein, 351 aa, unidentified
  source 1..351: note = Magnetospirillum caucaseum
  REGION 1..351: note = tr|M2ZVW3|M2ZVW3_9PROT Epoxyqueuosine reductase; OS = Magnetospirillum caucaseum OX=1244869 GN=queG PE=3 SV=1
MSGTDVKSLIRAKALELGFSDVGFARAQGLPEWKASLDAYVAEGRHGTMEWMAETAERRADPQVLWPEARSVIVLGTNYAPSGDPLKLTRLPERGNISVYARNRDYHDMVKRRLKALGRWMAEAWGAQLKVFVDTAPVMEKPLAVQAGLGWRGRHTNIVSRRFGSWLFLAEVFTTMEIEPDAPEADRCGSCRACVEACPTHALDGEGRIDARRCISYLTIESKSPIPEDLRPDLGNRLYGCDDCMAVCPWDKFAPPTREADFLPRVELTAPKLADLARLDEEGFREVFTASPVKRAGYERFMAGVMIAIGNSGRHDLAREAERRRDDPSPLIRDAARWAVSVLGGQGPGKL

SEQ ID NO: 78039 - protein, 341 aa, Magnetospirillum gryphiswaldense
  REGION 1..341: note = tr|A4U5K9|A4U5K9_9PROT Epoxyqueuosine reductase; OS = Magnetospirillum gryphiswaldense OX=55518 GN=queG PE=3; SV = 1
MKAKIRAKALELGFDAVGFAPAVADPAWRAALDQYVAEGRHGGMGWMAERMDQRANPQGLWAEVRSVVTLGSNYAPAGDALALLEQGDRGNISVYARGKDYHDVVKKRLKVLARWMVDNLGGDLKVFVDTAPVMEKPIAARSGLGWQGRHTNVVSRDFGSWLFLGEIYTTLDLPPDPVQADHCGSCRACVDACPTGALDGQGRIEPRRCISYLTIEHQGAIDPELRSRLGNRIYGCDDCMAACPWNKFAPATTDPDYLPRMEMQAPRLADLASLDDPGFRQVFAGSPVKRIGLDRLLRNVLVAMGNSGDRRLLPAARGLMAHQNPSVAESAAWAVEKLSSP

SEQ ID NO: 78040 - protein, 341 aa, Magnetospirillum gryphiswaldense
  REGION 1..341: note = tr|V6F0M3|V6F0M3_MAGGM Epoxyqueuosine reductase; OS = Magnetospirillum gryphiswaldense (strain DSM 6361 / JCM 21280 / NBRC 15271 / MSR-1) OX=431944 GN=queG PE=3 SV=1
MKAKIRAKALELGFDAVGFAPAVADPAWRAALDQYVAEGRHGGMGWMAERMDQRASPQGLWAEVRSVVTLGSNYAPAGDALALLEQGDRGNISVYARGKDYHDVVKKRLKALARWMVDNLGGDLKVFVDTAPVMEKPIAARSGLGWQGRHTNVVSRDFGSWLFLGEIYTTLDLPPDPVQADHCGSCQACVDACPTGALDGQGRIEPRRCISYLTIEYQGAIDPELRSRLGNRIYGCDDCMAACPWNKFAPATTDPDYLPRMEMQAPRLDDLASLDDPGFRQVFAGSPVKRIGLDRLLRNVLVAMGNSGDRRLLPAARALLTHQNPSVAESASWAVEKLSSP

SEQ ID NO: 78041 - protein, 340 aa, unidentified
  source 1..340: note = Magnetospirillum kuznetsovii
  REGION 1..340: note = tr|A0A364P1Y8|A0A364P1Y8_9PROT tRNA epoxyqueuosine(34) reductase QueG OS=Magnetospirillum kuznetsovii OX=2053833 GN=queG PE=4 SV=1
MKDAIRAKALDLGFAEIRFAAAEAPARWGEDLADYVADGRHGDMAWMEETVERRSAPRALWPEARSIIVLGTNYAPKGDPLAVTRLPDRGNISIYARNRDYHDTVKKRLKALGRWMAETWGCDLKVFVDTAPVMEKPLAEAAGLGWRGRHTNLVSRRWGSWLFLSEIFTTLEIEPDRPEPDHCGSCHACVDACPTGALDGAGHIEPRRCISYLTIETKSEIPAELRPMMGNRIYGCDDCLAACPWNKFATPAVEPDFLPRVELTAPRLADLAQLDEAGFREVFAASPVKRAGRDRFVANVLIAVGNSGRKDLIAVAQALRDDSSPLVRAMADWAVSALGR

SEQ ID NO: 78042 - protein, 360 aa, unidentified
  source 1..360: note = Magnetospirillum magneticum
  REGION 1..360: note = tr|Q2W991|Q2W991_MAGSA Epoxyqueuosine reductase; OS = Magnetospirillum magneticum (strain AMB-1 / ATCC 700264) OX=342108 GN=queG PE=3 SV=1
MSGADAKSLIRDDDVKAAIRRRALDLGFSDVGFARAQGLPEWKADLDAYLADGRHGTMGWMAETADRRADPQVLWPDAKSVIVLGTNYAPSGDPLKLTHLPERGNISVYARNRDYHDLLKRRLKALGRWMAETWGGELKVFVDTAPVMEKPLAAQGGLGWRGRHTNIVSRRFGSWLFLAEVFTTLEIEPDAPEADHCGSCRACVEACPTRALDGEGRIDPRRCISYLTIESKSPIPEDLRPGLGNRLYGCDDCMAACPWNKFAPPTTEPDFLPRVELTAPRLADLVQLDEAGFREVFTASPVKRAGYERLMAGVLIAAANGGQTDLLAEAERRRDDPSPLIQDAARWAVSVLGGQGPGEL

SEQ ID NO: 78043 - protein, 350 aa, Magnetospirillum magnetotacticum
  REGION 1..350: note = tr|A0A0C2V296|A0A0C2V296_MAGMG Epoxyqueuosine reductase OS=Magnetospirillum magnetotacticum MS-1; OX = 272627 GN=queG PE=3 SV=1
MSADVKALIRAKALELGFSDVGFARAQGLAQWKADLDAYLAEGRHGTMDWMAETAARRADPQILWPEARSVIVLGTNYAPAGDALKLTRMPERGNISVYARNRDYHDLLKRRLKALGRWMAETWDCQLKVFVDTAPVMEKPLAAQTALGWRGRHTNIVSRRFGSWLFLGEVFTTLEIAPDLPEADHCGSCRACVDACPTQALDGEGRIDARRCISYLTIESKAPVPEDLRPGLGNRLYGCDDCMAACPWNKFAPPTTERDFLPRVELTAPKLADLVLLDEEGFREVFTASPVKRAGYERFMAGVLMAIANGGQVGLLNEAERRQNDLSPLIRDAARWAVLLLRGQDPGKL

SEQ ID NO: 78044 - protein, 347 aa, unidentified
  source 1..347: note = Magnetospirillum marisnigri
  REGION 1..347: note = tr|A0A178MDJ2|A0A178MDJ2_9PROT Epoxyqueuosine reductase OS=Magnetospirillum marisnigri OX=1285242; GN = queG PE=3 SV=1
MEEGDSPKSLIRAKALELGFSAVGFAAATLPARFGDDLAAYVAEGRHGDMAWMAETLDRRSSPAALWPEARSAIVLGTNYAPGYDPLAATRQPDRGNISVYARNRDYHDTVKKRLKALGRWLAQTWGCELKVFVDTAPLMEKPLAEQAGLGWRGRHTNIVSRRWGSWLFLSEILTTLEVEPDPPETDHCGSCRACVDACPTGALDGDGRIEPRRCISYLTIEAKADIADELRPLMGNRIYGCDDCLAACPWNKFATPTVEPDFLSRVELGFPRLADLAGLDEAAFREVFTASPVKRAGRDRLVASVLVAVGNSGRPDLAEVARRLQQDASSQVRAMADWALRRLGFA

SEQ ID NO: 78045 - protein, 329 aa, unidentified
  source 1..329: note = Magnetospirillum moscoviense
  REGION 1..329: note = tr|A0A178MMY9|A0A178MMY9_9PROT Epoxyqueuosine reductase OS=Magnetospirillum moscoviense OX=1437059; GN = queG PE=3 SV=1
MGGVDAKSEIRAKALELGFDAVGFASAHTDPAWRDALNRFVADGRHGTMGWMAERMDQRASPQALWPDVRSVIVLGTNYAPADGAGLAPADRATISVYARGRDYHDTVKKRLKALGRWLAERTGQPLKVFVDTAPVMEKPLAARSGIGWQGRHTNIVSRRFGSWLFLAEIYTPLELEPDPPEPDHCGSCRACETACPTGALEGGKIEPRRCISYLTIEHQGDIAPELAGLMGNRVYGCDDCMAACPWNKFAPPTREADFSPRIELTMPRLTDLAELDDSSFREVFSGSPVKRIGIARMARNVRIALDNQISVGGLDLRDAPGGDDRQDD

SEQ ID NO: 78046 - protein, 346 aa, Magnetospirillum sp.
  REGION 1..346: note = tr|A0A522X4P1|A0A522X4P1_9PROT tRNA epoxyqueuosine(34) reductase QueG OS=Magnetospirillum sp.; OX = 31872 GN=queG PE=4 SV=1
MKDSIRAKAQELGFSAVGFAPATGDPAWAADLAGYLADGRHGDMGWMAESAERRVSPRALWPEARSVIVLGTNYTPKGDPLDLTRRPERGNVSVYARNRDYHDTVKKRLKALGRWLAGQYGCDLKVFVDTAPVMEKPLAELAGLGWRGRHTNIVSRRWGSWLFLAEIFTSLEIAPDPPEHDRCGSCRACVDACPTGALDGEGHIEPRRCISYLTIEAKDAIAAGLRPLMGNRVYGCDDCLAACPWNKFAMPTAEPDFLPRVELTAPLLADLAQLDEADFRQVFTASPVKRAGRERFIASVLIAIGNSGRNDLAAVAARLRDDPSSLVRVMADWAVSTLAGEGAGQL

SEQ ID NO: 78047 - protein, 351 aa, Magnetospirillum sp.
  REGION 1..351: note = tr|A0A0U5MKF7|A0A0U5MKF7_9PROT Epoxyqueuosine reductase OS=Magnetospirillum sp. XM-1 OX=1663591 GN=queG; PE = 3 SV=1
MTGADIKAAIRAKALELGFSDVGFARAQALPEWKACLETYVAEGRHGDMEWMAETAERRADPQVLWPEARSVIVLGTNYAPAGDPLKLTRMPERGNVSVYARNRDYHDLVKRRLKALGRWMAERWGCELKVFVDTAPVMEKPLAAQGGLGWRGRHTNIVSRRFGSWLFLAEVFTTLEIEPDPPETDHCGSCRACVEACPTQALDGEGRIDARRCISYLTIESKSPVPEELRPGLGNRLYGCDDCMAACPWNKFAPPTREPDFLPRVELTAPKLADLARLDEAAFREVFTASPVKRAGYERFMAGVMIAVGNSGRDDLGSEAERRRDDPSPLIRDAARWALSVLGRQGPGKL

SEQ ID NO: 78048 - protein, 343 aa, unidentified
  source 1..343: note = Magnetovibrio blakemorei
  REGION 1..343: note = tr|A0A1E5QBZ1|A0A1E5QBZ1_9PROT Epoxyqueuosine reductase OS=Magnetovibrio blakemorei OX=28181 GN=queG; PE = 3 SV=1
MATSAHDKDTIRAKALELGFDTVGFAPAKLDAHHGENLKTYIEQGRHATMAWMEGRHEQRVSPDALWPDAKSVIVLGVNYGPRTDPIAIHELTDRAAISVYAQGKDYHDVVKKRLKALGRWLVEEFACEIKVFVDTAPVMEKPLAQLAGVGWQGKHTNVVSREFGSWLFLGEVFTTLDLKPDAPEVDHCGTCTACLDACPTGAIQPYQMDARKCISYLTIEHKGPIDEDLMVNMGNHVYGCDDCLAACPWTKFSVLHTEPNFLPRVELTAPRLADIAGLGEEEFRQVFAGSPIKRTRRNALVRNALIAIANAHKPHSREIAQSLLNDLNETVRHTARWALERL

SEQ ID NO: 78049 - protein, 369 aa, unidentified
  source 1..369: note = Magnetovibrio sp.
  REGION 1..369: note = tr|A0A2E3KZ58|A0A2E3KZ58_9PROT Epoxyqueuosine reductase OS=Magnetovibrio sp. OX=2024836 GN=queG PE=3 SV=1
MNEHAVSDIKDRIRDQALREGFDAVGFTSATADQKDREGWRAFVKKGWHGDMDWLAQDDGRRGNLQAMMPDAKTAIVLAANYGPSSDPLAALESTCHGAISVYAQSARDYHDVLKKRLKSLGRWLTETEGGDLKVFVDTAPVMEKPLAQRAGIGWQGKHSNLVSRAFGSWLFLGEIVTTLEIAPDLPEADHCGSCRACMNVCPTDAIPAPYRLDATRCISYLTIEHKGAIAPELMTRMGNHIYGCDDCLAVCPWNKFAETTSDPAFLPRAELVAPRLEDLADLDDARFRELFAGSPIKRTGRNRFLRNVLIAMANSGDRNLKPLAQQLASDVSELVAETARWALAELSLPDDEVNDEAGAAGLSSSSVT

SEQ ID NO: 78050 - protein, 361 aa, unidentified
  source 1..361: note = Magnetovibrio sp.
  REGION 1..361: note = tr|A0A2E3P691|A0A2E3P691_9PROT Epoxyqueuosine reductase OS=Magnetovibrio sp. OX=2024836 GN=queG PE=3 SV=1
MSPTAPDLLKRRLIDAAKALGFDAVGVTDTRAAPRDRQALEAFLKAGHHGDMAWMADGPRGAVRGDPEAMVPGARTAIVLARNYGPPGDPMNIPGQPDKGAVSVYAQGKDYHDVIKKRLKQLARWLQAEAAQGRDTPPDVRVFVDTAPLMEKPLAQRAGIGWQGKHTNLVSRTHGSWLFLGEILTTLELPSDRPEADHCGSCDACLRACPTDAFPAPYRLDATRCISYLTIEHKDAIAPDLMARMGNHVYGCDDCLAACPWNKFAHPTDEPAFAPRPGLDGPRLADLARLDDAAFREMFTGSPVKRTGRDRFLRNVMIAVGNSGDPTLVPVAADLSADASDLVAGAARWAYERLNAAKAQR

SEQ ID NO: 78051 - protein, 252 aa, unidentified
  source 1..252: note = Maledivibacter halophilus
  REGION 1..252: note = tr|A0A1T5M1P0|A0A1T5M1P0_9CLOT Epoxyqueuosine reductase QueG (Queuosine biosynthesis) OS=Maledivibacter halophilus OX=36842 GN=SAMN02194393_03721 PE=4 SV=1
MNKKVKELIYKYVKEYSEKKEIKTKWGQPIVKFSDANDKMFIKLKEIVSPTHGLPKDFLEDAKTVISYFIPFDPSVANSNIKGKYSSKKWAQAYVETNDLIFNLNKYIKKEFEALNYKSSIIPATHNFNENSLISDWSHRHVGYIAGLGKFGLNNMLITDKGCCGRVGSIITNLKIEPTKRSDKEYCLYKSKGICKKCVKRCVNDALKVDSFDRHKCYEILLYNDKLHFDLGLTDACGKCCVSLPCSFTNPV

SEQ ID NO: 78052 - protein, 378 aa, unidentified
  source 1..378: note = Maledivibacter halophilus
  REGION 1..378: note = tr|A0A1T5LIR6|A0A1T5LIR6_9CLOT Epoxyqueuosine reductase OS=Maledivibacter halophilus OX=36842; GN = SAMN02194393_02911 PE=4 SV=1
MIFKEEIIKYSKEIGIDLIGFTESEIFHDLEAILRKREKKNLLSGFEEQNIDKRINPHLTLENSHTIIVIGMSYYVNEGDITSKDSNKPTGNVSKSSWGRDYHLVLKSKMKMLVEYIEKKTKDFQYEYFTDTGPLVDRYLAYKAGIGWYGKNNCIITKEYGSWIFIGYILSNLEININMEESKNEGCLNCNNCIKACPTGALMENQLYNPKLCISYLTQTKEDIDYKLREKMGKSLYGCDICQLVCPYNSNKTTTHKEFIPVGDNYKPNLLGLLKLSNKEFKKRFEKAALNWRGNKIIKRNALIALGNSGDKDMVKYLVEYLNSPSIMIKKYTAWAIIRLDRKKGKKILDKHLEKEKDIEMNEEIKKLYNYYLRNLHN

SEQ ID NO: 78053 - protein, 369 aa, Malikia granosa
  REGION 1..369: note = tr|A0A2S9K4H1|A0A2S9K4H1_9BURK Epoxyqueuosine reductase OS=Malikia granosa OX=263067 GN=queG PE=3 SV=1
MQAWGRELGFSQIGVAAVDLSSAEPGLQAWLEQGFHGDMHYMAAHGLKRARPAELLPGTLSVVTARMDYLPRDTPAGWQAVEWQRHDDPAQGLVSLYARGRDYHKVLRQRLQQLADRMAAQLGPFGHRVFTDSAPVLEVELASRSGLGWRGKHTLTLSRDAGSMFFLGEIFVDRALPATAPASAHCGQCSACLDACPTQAIVAPYRLDARRCISYLTIEHGGPIPPEFRPLLGNRIYGCDDCQLACPWNKFAQRAVLPDFDARTQLTGRGLLELFGWSEEQFLRQTEGSPIRRIGHERWRRNLAVALGNALRAAGMADGSDPADQAASVESSTSAAASLKAELRAALQAAIDDPSALVREHVTWALAQS

SEQ ID NO: 78054 - protein, 360 aa, Malikia spinosa
  REGION 1..360: note = tr|A0A2S9KDH2|A0A2S9KDH2_9BURK Epoxyqueuosine reductase OS=Malikia spinosa OX=86180 GN=queG PE=3 SV=1
MQAWGRELGFSQIGVAAVDLSAAEPGLLAWLEQGFHGDMHYMAAHGVKRARPAELLPGTLSVITARMDYLPRATPAGWQAVEWQRHDDPGQGLVSLYARGRDYHKVLRQRLQQLADRMAEQLGPFGHRAFTDSAPVLEVELASRSGLGWRGKHTLTLSRDAGSMFFLGEIFVDRALPATEPASAHCGQCRACLDACPTQAIIAPYRLDARRCISYLTIEHGGPIPLEFRPLLGNRIYGCDDCQLACPWNKFAQRAVLPDFDARAPLTGRGLIELFGWSEEQFLRQTEGSPIRRIGHERWRRNLAVALGNALRTAGSTDGSDPADSAAASVKAELRAALQAAMDDPSELVREHVAWALTQS

SEQ ID NO: 78055 - protein, 358 aa, unidentified
  source 1..358: note = Maliponia aquimaris
  REGION 1..358: note = tr|A0A238KEC1|A0A238KEC1_9RHOB Epoxyqueuosine reductase OS=Maliponia aquimaris OX=1673631 GN=queG_2 PE=3; SV = 1
MQDLTERLKREAAEVGFAACRVCRPGDVPQVMERLENFLARGYHGQMGWMAERVQWRGAPQVLWPEARSVVMLAENYGPDEDPLAVLEARDRAAISVYAQNRDYHDVVKKKLKRLARWLIAEGGGARHGKAVDPDTLGTPQVKVFVDTAPVPEKPLAQAAGLGWQGKHTNLVSRELGSWLFLGCIFTTLELAVDGAERDHCGSCRACLDICPTEAFPAPYQLDVRRCISYLTIEHKGPVDEALRPRLGNRIYGCDDCLAVCPWNKFARRAEEVKYHARDDLRAPPLAELAGLDDAAFRARFSGSPIKRIGRDRLVRNVCYAIGNSGSAALRPVVQALCEDADPAVRDAARWAVSRLAN

SEQ ID NO: 78056 - protein, 223 aa, unidentified
  source 1..223: note = Maliponia aquimaris
  REGION 1..223: note = tr|A0A238K9Q9|A0A238K9Q9_9RHOB Epoxyqueuosine reductase OS=Maliponia aquimaris OX=1673631 GN=queG_1 PE=4; SV = 1
MTAGRLAQIDDTAHAAGLRVRGALHPGPDDGAPEGTGTLLLLGPDEPCFWPVFTAAPEYRYGAPDPLDRWSKRVIGALATEWGGTAIFPSDGPPYAPFLTWALASGRAWSSPVGMLVQDAAGLFISYRGAVALPARLDLPPPAAKPCDACPRPCETACPVGALAPGQMYDVARCKAHLRRPEGMECRHGGCLVRRACPVAKDFERLPQQSAFHMAAFLGDPVP

SEQ ID NO: 78057 - protein, 349 aa, Mameliella alba
  REGION 1..349: note = tr|A0A0B3S8A1|A0A0B3S8A1_9RHOB Epoxyqueuosine reductase OS=Mameliella alba OX=561184 GN=queG PE=3 SV=1
MRELTERLKDEARDIGFAQARICRPGDVPEVMGRLRAFLDRGYHGQMDWLADRVHWRGAPDVLWPEARSVIMLSENYGPEHDPLEVLDRRDRAAISVYAQHRDYHDVVKKRLKRLARWLIAEAGGEVKVFVDTAPVPEKPLAQAAGLGWQGKHTNLVSRELGSWLFLGCVFTTLELEVDGAERDHCGSCRACLDICPTGAFPAPYQLDARRCISYLTIEHKGPVDEALRPALGNRIYGCDDCLAVCPWNKFARRAEEVKYHARPDLLAPPLADLAVLDDAAFRARFSGSPIKRIGRDRMVRNTCYAIGNSGRPELRPVVQSLCEDADPAVRDAARWAVLRLGSELGDGR

SEQ ID NO: 78058 - protein, 355 aa, Mameliella sp.
  REGION 1..355: note = tr|A0A2E9I0I8|A0A2E9I0I8_9RHOB Epoxyqueuosine reductase OS=Mameliella sp. OX=1924940 GN=queG PE=3 SV=1
MVDLTERLKREALDVGFADCRICRPGDVPEVMARLRGFLDKGYHGQMGWLSERVHWRGAPDVLWPEAQSVIMLAENYGPDDDPLAVLEVRDRAAISVYARNRDYHDVVKKRLKRLGRWLIDSAGGEIKVFVDTAPVPEKPLAQAAGLGWQGKHSNLVSRQLGSWLFLGCVFTTLELTPDGAERDHCGSCRACLDICPTNAFPAPYQVDARRCISYLTIEHKGPVDEGLRPGLGNRIYGCDDCLAVCPWNKFARRAEEVKYHARDDLVAPPLADLAMLDDAGFRARFSGSPIKRIGRDRFVRNVCYAIGNSGLPTLIPSVQALCEDTDEAVRDAARWAVLRLQAGVSGLSGKQDGR

SEQ ID NO: 78059 - protein, 379 aa, unidentified
  source 1..379: note = Mangrovibacter phragmitis
  REGION 1..379: note = tr|A0A1B7L1Y3|A0A1B7L1Y3_9ENTR Epoxyqueuosine reductase OS=Mangrovibacter phragmitis OX=1691903 GN=queG; PE = 3 SV=1
MSQPFVLDELVQKIKQWGKELGFQQVGICDTDLSASEPALQEWLDKQYHGEMEWMARHGMMRARPHELLPGTLRVISVRMNYLPTGAAFASTLKNPQLGYVSRYALGRDYHKLLRQRLKQLGERIREHCTELNFRPFVDSAPLLERPLAEKAGLGWTGKHSLILNKEAGSFFFLGELLVDIPLPVDKPVEEGCGRCVACMTICPTQAIVAPYTVDARRCISYLTIELEGAIPEELRPLMGNRIYGCDDCQLICPWNRFSQLTDEADFSPRKALHTPELLALFAWDETHFLKVTEGSAIRRIGHLRWLRNIAVALGNAPWESSVLDALEQRKGEHPLLDEHIEWAIAQQLAKREALSVTVSSAQQQRLVRAIEKGLSRDA

SEQ ID NO: 78060 - protein, 379 aa, Mangrovibacter plantisponsor
  REGION 1..379: note = tr|A0A317PJL0|A0A317PJL0_9ENTR Epoxyqueuosine reductase OS=Mangrovibacter plantisponsor OX=451513; GN = queG PE=3 SV=1
MSQPFVLGELAQKIKQWGKELGFQQVGICDTDLSASEPALQAWLDKQYHGEMEWMARHGMMRARPHELLPGTLRVISVRMNYLPTGAAFASTLKNPRLGYVSRYALGRDYHKLLRQRLKQLGERIREHCTELNFRPFVDSAPLLERPLAVKAGLGWTGKHSLILNKEAGSFFFLGELLVDIPLPVDQPVEEGCGRCVACMTMCPTQAIVAPYTVDARRCISYLTIELEGAIPEEFRPLMGNRIYGCDDCQLICPWNRFSQLTDEADFSPRKALHTPELLALFAWDEAHFLKVTEGSAIRRIGHLRWLRNIAVALGNAPWESAVLDALEQRRGEHPLLDEHIEWAIAQQLAKREALSVTVSSAQQQRLVRAIEKGLSRDA

SEQ ID NO: 78061 - protein, 379 aa, Mangrovibacter sp.
  REGION 1..379: note = tr|A0A071M0W2|A0A071M0W2_9ENTR Epoxyqueuosine reductase OS=Mangrovibacter sp. MFB070 OX=1224318 GN=queG; PE = 3 SV=1
MSQPFVLGELAQKIKQWGKELGFQQVGICDTDLSASEPALQAWLDKQYHGEMEWMARHGMMRARPHELLPGTLRVISVRMNYLPTGAAFASTLKNPRLGYVSRYALGRDYHKLLRQRLKQLGERIREHCTELNFRPFVDSAPLLERPLAEKAGLGWTGKHSLILNKEAGSFFFLGELLVDIPLPVDQPVEEGCGRCVACMTMCPTQAIVAPYTVDARRCISYLTIEYEGVIPEEFRPLLGNRIYGCDDCQLICPWNRFSQLTDEADFSPRKALHTPELLELFAWDETRFLKVTEGSAIRRIGHLRWLRNIAIALGNAPWESAVLNALEQRRGEHPLLDEHIEWAIAQQLAKREALSVTVSSAQQQRLVRAIEKGLSRDA

SEQ ID NO: 78062 - protein, 306 aa, unidentified
  source 1..306: note = Mangrovibacterium diazotrophicum
  REGION 1..306: note = tr|A0A419W8F6|A0A419W8F6_9BACT Epoxyqueuosine reductase OS=Mangrovibacterium diazotrophicum OX=1261403; GN = queG PE=3 SV=1
MDKHERIKQKAVELGFLACGISAAGYLVDEKERLRSWLAEGMNGEMEYMARNHEKRLDPRLLHEGTKSVISVLLNYYPKERQLDPEAPVLSKYAYGTDYHFVLKDKLNELLKFIHDEIGPCNGRAFVDSAPVLDKAWAVRSGLGWIGKNTNLISVEHGSFFFIGELLVDLELKTDDRIVSNHCGNCTRCIDACPTKAIVAPYVVDARRCISYQTIEQRGEIDKTLEGQFKDRVFGCDICQDVCPWNLKSEPHEEPAFDPHPRLMELSRLDWQNMDESLFAELFRKSAVMRTKYSGLMRNLKFIGKS

SEQ ID NO: 78063 - protein, 310 aa, unidentified
  source 1..310: note = Mangrovibacterium marinum
  REGION 1..310: note = tr|A0A2T5BYI3|A0A2T5BYI3_9BACT Epoxyqueuosine reductase OS=Mangrovibacterium marinum OX=1639118 GN=queG; PE = 3 SV=1
MDKREQREKIKRKALELGFLACGISAATYLTGEKDRLERWLAEGMNGEMEYMARNREKRLDPRLLHEGTKSVISVLLNYSPKEKQLDPQAPVLSKYAYGTDYHFVLKDKLKELLAFIHEAVAPCNARAFVDSAPVLDKAWAVRAGLGWIGKNTNLISVEHGSFFFIGELLIDLELEPDERMVSNHCGNCTRCIDACPTKAIVAPYVVDARRCISYQTIEQRGEIDESLKGQFNDRVFGCDICQDVCPWNLKAEPHDEAAFDPPPRLMELTRQEWQTMDEALFSRLFRKSAVKRTKYSGLMRNLKFLESED

SEQ ID NO: 78064 - protein, 307 aa, unidentified
  source 1..307: note = Mangrovimonas sp.
  REGION 1..307: note = tr|A0A1V1ZGT5|A0A1V1ZGT5_9FLAO Epoxyqueuosine reductase OS=Mangrovimonas sp. DI 80 OX=1779330 GN=queG; PE = 3 SV=1
MKLLQSYTKSIKNEAKRLGFLSCGISRAGFLEDEAPRLEQWLNSNMYGEMRYMENHFDKRLDPTKLVEGSKSVISLLLNYFPEKTQEDTSFKLSKYAYGTDYHFVIKDKLKQLLEFINEEIGEVNGRAFVDSAPVLDKAWAAKSGLGWIGKNSNLLTKQVGSFYFVAELIVDLELEYDAPTTDHCGSCTACIDACPTEAIVNPYVVDGSKCISYFTIELKDNIPTEFKGKFDHWMFGCDVCQDVCPWNRFSKPHSEPLFNPHQDLLSMTKKDWEEITEETFNKVFKKSAVKRTKLAGLKRNIQFLKD

SEQ ID NO: 78065 - protein, 307 aa, unidentified
  source 1..307: note = Mangrovimonas sp.
  REGION 1..307: note = tr|A0A3R9NXJ6|A0A3R9NXJ6_9FLAO Epoxyqueuosine reductase OS=Mangrovimonas sp. HN-E26 OX=2494697 GN=queG; PE = 3 SV=1
MNDKQHYTKLIKTEAKRLGFLSCGISKAEFLETEAPRLEKWLNNNMNGEMRYMENHFDKRLDPTKLVEGSKSVISLLLNYFPSETQNSESFKLSKYAYGTDYHFVIKDKLKSLLQFIQEGIGEVSGRAFVDSAPVLDKAWAAKSGLGWIGKHSNLLTQQVGSFYFIAELIIDLELDYDTPTTNHCGTCTACIDACPTEAIVEPYVVDGSKCISYLTIELKENIPTEFKDKMDDWMFGCDVCQDVCPWNRFSKPHSEPLFNPHPELLDMSKKDWEEITEDTFRKVFKKSAVKRTKFSGLTRNIDFLKD

SEQ ID NO: 78066 - protein, 306 aa, unidentified
  source 1..306: note = Mangrovimonas yunxiaonensis
  REGION 1..306: note = tr|A0A084TME7|A0A084TME7_9FLAO Epoxyqueuosine reductase OS=Mangrovimonas yunxiaonensis OX=1197477; GN = queG PE=3 SV=1
MGKEHYSALIKSEAKRLGFMSCGISKAAFLEEEAPRLENWLNEQKHGQMGYMENHFDKRLDPTKLVEGSKSVVSLLLNYYPTETQPTESYKLSKYAYGTDYHFVIKDRLKQLLQFIQEEIGEVNGRAFVDSAPVLDKAWASKSGLGWIGKHSNLLSKQVGSFFFIAELIIDLELEYDTPTTNHCGTCTACIDACPTEAIVAPYVVDGSKCISYLTIELKDSIPSEFKGKMDDWMFGCDVCQDVCPWNRFSKPHQEPLFNPHPELLDMTKRDWEEITEETFRKVFKKSAVKRTKFSGLQRNIQFIKH

SEQ ID NO: 78067 - protein, 308 aa, Maribacter aquivivus
  REGION 1..308: note = tr|A0A1M6LYB8|A0A1M6LYB8_9FLAO Epoxyqueuosine reductase OS=Maribacter aquivivus OX=228958 GN=queG PE=3; SV = 1
MSIDIKSKWTNSIKTEAKRLGFLSCGISKSDFLEEEAPRLEKWLNKNMNGEMSYMANHFDKRLDPRLLVEGSKSVISLLLNYYPEETQTDDSYKISKYAYGQDYHHIIKTKLRQLQEFITEEIGEVNGRAFVDSAPVLDKAWAAKSGLGWIGKNSNLLTQQVGSFYFIAELIVDLELEYDNAVTDHCGTCTACIDACPTQAIVDPYVVDGSKCISYFTIELKNELPNEMKGSFDDWMFGCDVCQDVCPWNRFSKPHKEPLFNPNPDLLSMTKKDWEEITVDVFQKVFKKSAVKRTKFDGLTRNIEFLK

SEQ ID NO: 78068 - protein, 308 aa, Maribacter arcticus
  REGION 1..308: note = tr|A0A1T5AWU1|A0A1T5AWU1_9FLAO Epoxyqueuosine reductase OS=Maribacter arcticus OX=561365 GN=queG PE=3; SV = 1
MSIDIKSKWTNSIKAEAKRLGFLSCGISKSDFLEEEAPRLEKWLKNNMHGEMGYMANHFDKRLDPRLLVEGSKSVISLLLNYFPDETQVADSYKISKYAYGQDYHHIIKSKLKQLQEFITEEIGEVNGRAFVDSAPVLDKAWAAKSGLGWIGKNSNLLTQQVGSFYFIAELIVDIELEYDHKVTDHCGTCTACLDACPTQAIVEPYVVDGSKCISYFTIELKNELPIDVKGSFDDWMFGCDVCQDVCPWNRFSKPHKEPLFNPNPELLSMTKKDWEEITEDVFQKVFKKSAVKRTKFSGLTRNIEFLK

SEQ ID NO: 78069 - protein, 309 aa, unidentified
  source 1..309: note = Maribacter caenipelagi
  REGION 1..309: note = tr|A0A4R7DGN3|A0A4R7DGN3_9FLAO Epoxyqueuosine reductase OS=Maribacter caenipelagi OX=1447781 GN=queG; PE = 3 SV=1
MSIDIKSKWTNSIKTEAKRLGFLSCGISKSDFLEEEAPRLEKWLNKNMNGEMSYMANHFDKRLDPRLLVESSKSVISLLLNYYPEETQIEDSYKISKYAYGQDYHHIIKTKLRQLQEFITEEIGDVNGRAFVDSAPVLDKAWAAKSGLGWIGKNSNLLTQQVGSFYFIAELIVDIELEYDHAVTDHCGTCTACIDACPTQAIVDPYVVDGSKCISYFTIELKNELPNEMKDSFDDWMFGCDVCQDVCPWNRFSKPHNEPLFNPNPDLLSMTKKDWEEITVDVFQKVFKKSAVKRTKFEGLTRNIDFLKV

SEQ ID NO: 78070 - protein, 309 aa, unidentified
  source 1..309: note = Maribacter cobaltidurans
  REGION 1..309: note = tr|A0A223VBA8|A0A223VBA8_9FLAO Epoxyqueuosine reductase OS=Maribacter cobaltidurans OX=1178778 GN=queG; PE = 3 SV=1
MSNQTKYTKMIKTEAKRLGFLSCGISKADFLEEDAPRLEKWLKQGMHGEMGYMANHFDKRLDPRLLVDGAKSVISLLLNYYPSQEQRDDTYKISKYAYGQDYHHVIKSKLRQLHEFILEKIGEVNGRAFVDSAPVLDKAWAAKSGLGWIGKNSNLLTKEVGSFYFIAELIIDLELEYDTPVTDHCGTCTACIDACPTQAIVEPYVVDGSKCISYFTIELKNEIPKEFHGKMDEWMFGCDVCQDVCPWNRFSKSHNEPLFDPKPELLSMSKKDWEEITEDVFKKIFKKSAVKRTKFSGLKRNIEFLRKDS

SEQ ID NO: 78071 - protein, 308 aa, Maribacter dokdonensis
  REGION 1..308: note = tr|A0A1H4MVR6|A0A1H4MVR6_9FLAO Epoxyqueuosine reductase OS=Maribacter dokdonensis OX=320912 GN=queG PE=3; SV = 1
MTLNLKQKNSNLIKTEAKRLGFLSCGISKADFLEEEAPRLEKWLNNNMHGEMSYMANHFDKRLDPRKLVEGSKSVISLLLNYFPEKTQREDSYKISKYAYGQDYHHIIKGKLRQLQEFITEEIGEVHGRAFVDSAPVLDKAWAAKSGLGWVGKNSNLLTQQVGSFYFIAELIVDIDLEYDHAVTDHCGTCTACLDACPTQAIVEPYVVDGSKCISYFTIELKNELPNEMKGSFDDWMFGCDVCQDVCPWNRFSKPHNEPLFNPHPELLSMTKKDWEEITVDVFQKVFKKSAVKRTKYGGLTRNIEFLK

SEQ ID NO: 78072 - protein, 308 aa, unidentified
  source 1..308: note = Maribacter flavus
  REGION 1..308: note = tr|A0A5B2TVQ3|A0A5B2TVQ3_9FLAO Epoxyqueuosine reductase OS=Maribacter flavus OX=1658664 GN=queG PE=3 SV=1
MNRSILSQRIKTEAKRLGFLSCGISRAEFLEQEAPRLERWLKKNMHGEMGYMANHFDKRLDPRLLVDGAKSVISLLLNYFPQETQEKDTFKVSKYAYGEDYHHVIKGKLRQLHDFISEEIGEVKGRAFVDSAPVLDKAWAAKSGLGWIGKNSNLLTKKVGSFYFIAELIIDLELDYDTPVTDHCGTCTACIDACPTQAIIEPYVVDGSKCISYLTIELKNEIPTEFQAKMDDWIFGCDVCQDVCPWNRFSKPHKEPLFNPHPELLSMTKKDWEEITEDVFKKVFKKSAVKRTKFSGLKRNIEFLQKES

SEQ ID NO: 78073 - protein, 308 aa, Maribacter orientalis
  REGION 1..308: note = tr|A0A1H7QXW9|A0A1H7QXW9_9FLAO Epoxyqueuosine reductase OS=Maribacter orientalis OX=228957 GN=queG PE=3; SV = 1
MSIDIKSKWTNSIKTEAKRLGFLSCGVSKSDFLEEEAPRLEKWLNNNMHGEMGYMENHFDKRLDPRLLVEGSKSVISLLLNYFPEETQVADTYKISKYAYGQDYHHIIKSKLKQLQEFITEEIGEVNGRAFVDSAPVLDKAWAAKSGLGWIGKNSNLLTQQVGSFYFIAELIVDIELEYDHAVTDHCGTCTACLDACPTQAIVEPYVVDGSKCISYFTIELKNELPIDVKGSFDDWMFGCDVCQDVCPWNRFSKPHKEPLFNPNPELLSMTKKDWEEITEDVFQKVFKKSAVKRTKFEGLSRNIKFLK

SEQ ID NO: 78074 - protein, 306 aa, Maribacter polysiphoniae
  REGION 1..306: note = tr|A0A316DZB6|A0A316DZB6_9FLAO Epoxyqueuosine reductase OS=Maribacter polysiphoniae OX=429344 GN=queG; PE = 3 SV=1
MNFASKHTQLIKTEAKRLGFLSCGISKAAFLEEEAPRLETWLNKNMNGEMQYMENHFDKRLDPTKLVEGSKSVISLLLNYYPEDKQKEGTYKVSKYAYGQDYHHIIKSKLRQLQEFITTEIGEVDGRAFVDSAPVLDKAWAAKSGLGWIGKHSNLLTQKVGSFYFIAELIVDLELDYDHPVTDHCGSCTACIDACPTQAIVEDRVVDGSKCISYFTIELKNGIPAQFQGKFDDWMFGCDVCQDVCPWNRFSRAHNEPLFNPHPDLLSNDKKDWEEITQEVFNTIFKKSAVKRTKFSGLKRNIQFLK

SEQ ID NO: 78075 - protein, 306 aa, Maribacter sp.
  REGION 1..306: note = tr|A0A3C0GEZ9|A0A3C0GEZ9_9FLAO Epoxyqueuosine reductase OS=Maribacter sp. OX=1897614 GN=queG PE=3 SV=1
MDIKSKWTHSIKTEAKRLGFLSCGISKADFLEEEAPRLEKWLNNNMHGEMSYMANHFDKRLDPRKLVEGSKSVISLLLNYYPENTQLEDSYKISKYAYGQDYHHIIKGKLRQLQEFITEEIGEVHGRAFVDSAPVLDKAWAAKSGLGWVGKNSNLLTQQVGSFYFIAELIVDIDLEYDHAVTDHCGTCTACLDACPTQAIVEPYVVDGSKLISYFTIELKNELPNEMKGSFDDWMFGCDVCQDVCPWNRFSKPHNEPLFNPHPELLSMTKKDWEEITVDVFQKVFKKSAVKRTKYGGLTRNIEFLK

SEQ ID NO: 78076 - protein, 306 aa, Maribacter sp.
  REGION 1..306: note = tr|A0A1B7ZFU0|A0A1B7ZFU0_9FLAO Epoxyqueuosine reductase OS=Maribacter sp. T28 OX=1836467 GN=queG PE=3; SV = 1
MDIKQKWTNSIKTEAKRLGFLSCGVSKANFLEEEAPRLEKWLKKNMNGEMSYMANHFDKRLDPTKLVEGSKSVISLLLNYYPEESQNEDSYKISKYAYGQDYHHIIKVKLRQLQEFISEEIGEVNGRAFVDSAPVLDKAWAAKSGLGWIGKNSNLLTQQVGSFYFIAELIVDIDLEYDHIVTDHCGTCTACLDACPTQAIVEPYVVDGSKCISYFTIELKNELPNEMKGSFNDWMFGCDICQDVCPWNRFSKPHNEPLFNPNPELLSMTKKDWEEITEDVFQKVFKKSAVKRTKFSGLTRNIDFLK

SEQ ID NO: 78077 - protein, 308 aa, unidentified
  source 1..308: note = Maribacter spongiicola
  REGION 1..308: note = tr|A0A4R7K6I0|A0A4R7K6I0_9FLAO Epoxyqueuosine reductase OS=Maribacter spongiicola OX=1206753 GN=queG; PE = 3 SV=1
MTLNLKQKNSDLIKTEAKRLGFLSCGISKADFLEVEAPRLEKWLNNNMNGEMSYMANHFDKRLDPRLLVEGSKSVISLLLNYYPEETQTDDSYKISKYAYGQDYHHIIKAKLRQLQEFITEEIGEVDGRAFVDSAPVLDKAWAAKSGLGWIGKNSNLLTQQVGSFYFIAELIVDLELEYDHAVTDHCGTCTACIDACPTQAIVDPYVVDGSKCISYFTIELKNELPNELKGSFDDWMFGCDVCQDVCPWNRFSKPHNEPLFNPDPDLLSMTKKDWEEITVDVFQKVFKKSAVKRTKFDGLVRNIKFLK

SEQ ID NO: 78078 - protein, 308 aa, Maribacter stanieri
  REGION 1..308: note = tr|A0A1I6I9U7|A0A1I6I9U7_9FLAO Epoxyqueuosine reductase OS=Maribacter stanieri OX=440514 GN=queG PE=3; SV = 1
MSIDIKSKWTNSIKAEAKRLGFLSCGISKSDFLEEEAPRLEKWLNKNMNGEMSYMANHFDKRLDPRLLVEGSKSVISLLLNYYPEETQTDDSYKISKYAYGQDYHHIIKSKLRQLQEFITEEIGEINGRAFVDSAPVLDKAWAAKSGLGWIGKNSNLLTQQVGSFYFIAELIVDIELEYDHAVTDHCGTCTACLDACPTQAIVEPYVVDGSKCISYFTIELKNELPSEMKGSFDDWMFGCDVCQDVCPWNRFSKPHNEPLFNPNPDLLSMTKKDWEEITVDVFQKVFKKSAVKRTKYDGLTRNIDFLK

SEQ ID NO: 78079 - protein, 308 aa, Maribacter ulvicola
  REGION 1..308: note = tr|A0A1N6R4G6|A0A1N6R4G6_9FLAO Epoxyqueuosine reductase OS=Maribacter ulvicola OX=228959 GN=queG PE=3; SV = 1
MSIDIKHKWTNSIKTEAKRLGFLSCGVSKADFLEEEAPRLEKWLNNNMNGEMSYMANHFDKRLDPRKLVEGSKSVISLLLNYYPEETQTEDSYKISKYAYGQDYHHVIKTKLRQLQEFISEEIGEVNGRAFVDSAPVLDKAWAAKSGLGWIGKHSNLLTQRVGSFYFIAELIVDLELEYDHAVTDHCGTCTACIDACPTQAIVEPYVVDGSKCISYFTIELKNELPNEMKGSFDDWMFGCDVCQDVCPWNRFSKPHNEPLFNPNPDLLSMTKKDWEEVTEEVFRKVFQKSAVKRTKYSGLTRNIDFLK

SEQ ID NO: 78080 - protein, 307 aa, unidentified
  source 1..307: note = Maribacter vaceletii
  REGION 1..307: note = tr|A0A495EBB9|A0A495EBB9_9FLAO Epoxyqueuosine reductase OS=Maribacter vaceletii OX=1206816 GN=queG PE=3; SV = 1
MIDIKEKHSALIKEEAKRLGFLSCGISKADFLEEEAPRLEKWLQENRHGQMQYMENHFDKRLDPRLLVEGSKSVVSLLLNYFPEEQQNTNSYKISKYAYGNDYHHVIKSKLKELQNFINTEIGEVGGRAFVDSAPVLDKAWAAKSGLGWIGKHSNLLTQQVGSFYFIAELILDIDLAYDAKVTDHCGTCTACIDACPTQAIVEPYKVDGSKCISYLTIELKNEMPSEFQNKMDDWMFGCDVCQDVCPWNRFSKPHSEPLFNPHPELLSMNKKDWEEVTEDVFKKVFQKSAVKRTKFSGLQRNIKFLK

SEQ ID NO: 78081 - protein, 360 aa, Maribius pelagius
  REGION 1..360: note = tr|A0A1H8FRS2|A0A1H8FRS2_9RHOB Epoxyqueuosine reductase OS=Maribius pelagius OX=387096 GN=queG PE=3 SV=1
MAGRTPEYLQTSDEDAAMKAELAAFAAEAGFVKMGVCRPDAIPEAAGRLRAFLDDGHHGQMGWMAERTGWRGDPAALWPAARSVVMLAESYTPGHDPLEDLEDGTRGAVSVYAQGRDYHDVVKKRLKRVGRWLLDRAGAGAEIKVFVDTAPVMEKPLAQAAGLGWQGKHTNLLGRDLGNWVFLGAIFTTVALPPDPPEAEHCGSCTRCLDICPTDAFPAPFRLDARRCISYLTIEHRGPVDEALRPGLGNRIYGCDDCLAVCPWNKFATAARDMRLAPQPGRRAPDLATLARLDDAGFRAMFAGSPIKRIGRDRMVRNVCYAIGNSGAPHLSQSVAPLTQDPDPAVADAARWARMRLAQN

SEQ ID NO: 78082 - protein, 361 aa, Maribius salinus
  REGION 1..361: note = tr|A0A1M6DLX5|A0A1M6DLX5_9RHOB Epoxyqueuosine reductase OS=Maribius salinus OX=313368 GN=queG PE=3 SV=1
MAGRPPEYFQTSDEGAAALKAELAAFAAEAGFVKMGVCRPDAIPEAAGRLRAFLDDGHHGQMGWMTERTGWRGDPAALWPAARSVVMLAESYTPGHDPLEDLEDGTRGAVSVYAQGRDYHDVVKKRLKRVGRWLLDRAGPGAEIKVFVDTAPVMEKPLAQAAGLGWQGKHTNLLGRDLGNWVFLGAIFTTVALPPDPPEAEHCGSCTRCLDICPTDAFPAPFRLDARRCISYLTIEHRGPVDEALRPGLGNRIYGCDDCLAVCPWNKFATAARDMRLAPQPGRRAPELATLARLDDAGFRAMFAGSPIKRIGRDRMVRNVCYAIGNSGAPHLSQSVAPLTQDPDPAVADAARWARMRLAQN

SEQ ID NO: 78083 - protein, 377 aa, Maricaulis maris
  REGION 1..377: note = tr|A0A495D2Q1|A0A495D2Q1_9RHOB Epoxyqueuosine reductase OS=Maricaulis maris OX=74318 GN=queG PE=3 SV=1
MNGQDLKSLALELGFSTARICRADEAWSAGERLAEYVADGHHGSMAWMEETLERRQHPTAMWADAKSAVVVGLNYGPEQDPLPLLERRSEGVVSVYAQNADYHDLLKKRLKHLARAFAEKTGKQVKVFVDTAPLMEKPLAEKAGVGWQGKHTNLVSREFGSWLFLGVMLTEAELEPDEAERDTCGSCRACLDICPTRAFPSPYRIDARRCISYLTIEHKGVIAEEFRKPMGNRIYGCDDCLAVCPWNKFAQTSVETAFHPRPELKGPLLAELAALDDAAFRQVFTASPVKRIGRDRFVRNVMIAVGNSGDPALLATVEAGLEDASALVRGMAVWALAQLDPGRARTRAERDAEAEGDEAVRAEWRAVSRSGDQTVSY

SEQ ID NO: 78084 - protein, 372 aa, Maricaulis maris
  REGION 1..372: note = tr|Q0ATH3|Q0ATH3_MARMM Epoxyqueuosine reductase; OS = Maricaulis maris (strain MCS10) OX=394221 GN=queG PE=3; SV = 1
MDADATLSLALELGFSTARICRADEAWAAGDRLAEYVADGHHGSMAWMEETLERRQHPTAMWPEAKSAVVVGLNYGPEQDPLPLLERRSEGVVSVYAQNGDYHDLLKKRLKHLARAFAGKTGKQVKVFVDTAPLMEKPLAEKAGIGWQGKHTNLVSREFGSWLFLGVMLTEAELEPDEAERDTCGSCRACLDICPTNAFPQPYRLDARRCISYLTIEHKGVIPVEYRQPMGNRIYGCDDCLAVCPWNKFAQTSTEMAFHPRPELKGPLLAELAALDDAAFRQVFTASPVKRIGRDRFVRNVMIAIGNSGDHELVSVVEAALDDGSALVRGMAVWALGQLSPLRVSEMHEMKVAAEPDLDVVTEWQALSQKIS

SEQ ID NO: 78085 - protein, 374 aa, Maricaulis salignorans
  REGION 1..374: note = tr|A0A1G9WBR3|A0A1G9WBR3_9RHOB Epoxyqueuosine reductase OS=Maricaulis salignorans OX=144026; GN = SAMN04488568_1242 PE=4 SV=1
MDADTVKSLALASGFTEARICRADDAWTAGERLAEFVAQGQHGSMAWMEDTLARRQHPTAMWPDAKSAVVVGLNYGPDIDPLAALERKSEGVISVYARNTDYHDLMKKRLKHFARAFVDKTGAEVKVFVDTAPLMEKPLAAKSGMGWQGKHTNLVSREHGSWLFLGVMLTAAELEPDAPETDHCGSCTSCLDICPTKAFPGPYKLDARRCISYLTIEHKGPIPLEFRAAMGNRIYGCDDCLAVCPWNKFAAVTAEMAFHPRPELKGPLLSELAALDDESFRQVFTASPVKRIGRGRFVRNVMIAIGNSQDLTLLPAVRANVQDEDAMVRGAAIWALSQLAPQEAHALAMAGSGDEADAGVLSEWRSVLAADAAG

SEQ ID NO: 78086 - protein, 374 aa, Maricaulis sp.
  REGION 1..374: note = tr|A0A2E2XSV7|A0A2E2XSV7_9RHOB Epoxyqueuosine reductase OS=Maricaulis sp. OX=1486257 GN=queG PE=3 SV=1
MHADTVKSLATGLGFTDVRICRADEAWEAGERLAQFVGEGLHGSMAWMEDTLERRKHPTAMWPDAKSAVVVAMNYGPGFDPLPLLERRSEGVISVYARNADYHDVMKKRLKHLARAFAQDTGEDVKVFVDTAPLMEKPLAGKAGMGWQGKHTNLVSREHGSWLFLGVMLTTADLEPDAAETDHCGSCRACLDICPTNAFPAPYRLDARRCISYLTIEHKGPIPEEFREPMGNRIYGCDDCLAVCPWNKFAAVAEETAFHPRPELKGPLLAELAALDDAEFRQVFTASPVKRIGRNRFLRNVLIAIGNSGDAALIPVVLDRLEDAAAEVRGMAVWALARLDPEGAVREAEARANTEADPHVREEWARVNKKLTSG

SEQ ID NO: 78087 - protein, 377 aa, Maricaulis sp.
  REGION 1..377: note = tr|A0A1Q8FIB6|A0A1Q8FIB6_9RHOB Epoxyqueuosine reductase OS=Maricaulis sp. W15 OX=1772333 GN=queG PE=3; SV = 1
MNGQDLKSLALELGFSTARICRADEAWSAGERLAEYVADGHHGSMAWMEETLERRQHPTAMWADAKSAVVVGLNYGPEQDPLPLLERRSEGVVSVYAQNADYHDLLKKRLKHLARAFAEKTGKQVKVFVDTAPLMEKPLAEKAGVGWQGKHTNLVSREFGSWLFLGVMLTEAELEPDEAERDTCGSCRACLDICPTRAFPSPYRIDARRCISYLTIEHKGVIAEEFRKPMGNRIYGCDDCLAVCPWNKFAQTSVETAFHPRPELKGPLLAELAALDDAAFRQVFTASPVKRIGRDRFVRNVMIAVGNSGDPALLTTVEAGLEDASALVRGMAVWALAQLDPGRARTRAERDAEAEGDEAVRAEWRAVSRSGDQTVSY

SEQ ID NO: 78088 - protein, 361 aa, Marichromatium gracile
  REGION 1..361: note = tr|A0A4R4AA48|A0A4R4AA48_MARGR Epoxyqueuosine reductase OS=Marichromatium gracile OX=1048 GN=queG PE=3; SV = 1
MTRALDPHEALELATRIKGWGMALGFQQVGITDTGLQRAEQRLLDWLDAGHHGKMDYMARHGRRRARPAELVPGTLRIVSVRMDYHPEPHEDPATLSDPARAFVSRYALGRDYHKLIRRRLQRLADQITETIGPFGYRAFVDSAPVMEKPLAEQAGLGWIGKHTNLINPRAGSWFFLGELFTDLPLPLDTPLRSHCGHCSACLEVCPTAAIIAPYRLDARRCISYLTIEHPGPIPLALRPALGNRIYGCDDCQQVCPWNRFARATAETDFLPRQGLDRATLITLIGWDEPTFLERTSGSAIRRIGHGRWLRNLAVALGNADPSPAALTALIRWRDHPDPMVREHIDWALARQREHGARDGW

SEQ ID NO: 78089 - protein, 360 aa, Marichromatium purpuratum
  REGION 1..360: note = tr|W0DYK9|W0DYK9_MARPU Epoxyqueuosine reductase; OS = Marichromatium purpuratum 984 OX=765910 GN=queG PE=3; SV = 1
MRRALDPHEALELATRIKGWGMALGFQQVGITETGLQRAEQRLLDWLDAGHHGEMDYMARHGRRRARPAELVPGTLRIVSVRMDYHPEPREDPATLSDPARAFVSRYALGRDYHKLIRRRLQRFADRITETIGPFGYRAFVDSAPVMEKPLAEQAGLGWIGKHTNLINPRAGSWFFLGELFTDLPLPLDTPLRSHCGHCSACLEVCPTAAIIAPYRLDARRCISYLTIEHPGPIPLALRPALGNRIYGCDDCQQVCPWNRFARATAETDFLPRQGLDRATLITLIGWDEPTFLERTSGSAIRRIGHGRWLRNLAVALGNAAPSPAALTALTRWRDHPDPMVREHIDWALARQREHSARDG

SEQ ID NO: 78090 - protein, 373 aa, unidentified
  source 1..373: note = Unknown
  REGION 1..373: note = tr|A0A0C1RDI7|A0A0C1RDI7_9ACTN Uncharacterized protein OS=marine actinobacterium MedAcidi-G1 OX=1550399; GN = MB52_00925 PE=4 SV=1
MSLEVNNDLGYEYFEKISKLAPKLGLSALGVTNADPFLETRIEIERRKEKELHGGMQFTFRNPERSTTPKMIMKDAKSLIVGALRTPAPRLETVSSEALRIAAYARKDYYSVLREALTEISEILKKDGWKAQVVADENSLVDRAAAIRAGIGWHGKNGNVLIPGQGSWFVLGSIVTNVELPLSEKVQQDCGVCKRCIDACPTGAIIEPGVVDARKCIAWLVQAPGIIPHEYRESIEHRIYGCDDCQEVCPEGREERNSDGEPEIKADYLASEILEAEDEELLDRFSSWYIAERNPRYLKRNALVSIGNSKETENELFKALLTEYLLNSDSLLRSHAVWASIRLGHKELVDLVKNDSDPLVVNEIMLAKAEGHL

SEQ ID NO: 78091 - protein, 387 aa, unidentified
  source 1..387: note = Unknown
  REGION 1..387: note = tr|A0A0C1RQ82|A0A0C1RQ82_9ACTN 4Fe-4S ferredoxin-type domain-containing protein OS=marine actinobacterium MedAcidi-G3 OX=1550402 GN=MB55_04870 PE=4; SV = 1
MQVPNLEDIKLVAKNAGLDDLSVTGVEPLKEARLAIEDRKRQGLHAGMHFTYGNPERATDPSQLFEGAQSVLVALRSYKSASVEGFDLRSPETEISVDGPEGSVASYVCSDEYGMLRQGLMKVVSYLESFGARAEVVMDDNRLADRAIAAKAGLGWLGRNTMLLHPDLGSWTVIGSVVTDIAFKQEVEKVPDGCGTCRRCSVDCPTGAIDEFGVLDANRCLAWLLQAKGIFPRQYRTALGDRLYGCDDCQVLCPVNDTAIEGARAAVPREAKVDIVALLHSSDDELMNQYGHWYIPRRRPEYLRRNALVVLGNSQSGDDPEVERVLANCLASTHALVRSHAVWAALRLGKRHLIGPDEMRSLTENDPEGLVRTELEEWGILADPVSS

SEQ ID NO: 78092 - protein, 321 aa, unidentified
  source 1..321: note = Unknown
  REGION 1..321: note = tr|A0A1Q3GGW5|A0A1Q3GGW5_9BACT Epoxyqueuosine reductase OS=marine bacterium AO1-C OX=1905359 GN=queG; PE = 3 SV=1
MNSIQVQKHTTLIKQKARELGFESCGVSKAEFLEEEAPRLETWLKEKMQGEMAYMANHFDKRLDPRLLVDGAKSVVSLLYNYFPKEDLAKGNGQKQNPEEESYKISKYAYGRDYHFVIKDKLKALFEFIQEEIGEVGGRVFVDSAPVMDKAWANKSGLGWIGKHSNLINRQVGSFFFIAELIIDLELTPDAPIKDYCGTCTRCVDACPTDAIVEPYVVDGSRCISYFTIELKEEIPTTVKGQFENWIFGCDICQDVCPWNRFSKPHQEPLFEPHPDLRNMRKQDWEEITEEVFRELFRKSAVKRTKLKGLKRNIRFVSSPE

SEQ ID NO: 78093 - protein, 365 aa, unidentified
  source 1..365: note = Unknown
  REGION 1..365: note = tr|A0Z0Q1|A0Z0Q1_9GAMM Epoxyqueuosine reductase; OS = marine gamma proteobacterium HTCC2080 OX=247639 GN=queG; PE = 3 SV=1
MWVCQNAQMTPNETKPDALATIRSQLHQWAQELGFQQLGITGVDLKQHEGYLQKWLDAGYQGDMHYMTRHGLTRARPAELIPGTCTVLTLRMDYLPESAADPESVLSQNDRAYISRYALGRDYHKLMRHRLARLAKKIDAELASGQYRAFVDSAPVLERALAEQSGLGWIAKNTMLINERAGSWFFLGEIYTDIPFTTDAPKTVKHCGSCTACLDICPTQAFVAPHVLDARKCISYLTIEHQGSIDPALRPLMGNRIYGCDDCQLVCPWNKFAQPTAEADFAPRHNLDDEALIHLFAWTDQEFETRMQGSPIRRIGHERWLRNIAIALGNATTTPDIITALNQRRNHPSPLVREHVSWALSQHHA

SEQ ID NO: 78094 - protein, 363 aa, unidentified
  source 1..363: note = Unknown
  REGION 1..363: note = tr|B7RW26|B7RW26_9GAMM Epoxyqueuosine reductase; OS = marine gamma proteobacterium HTCC2148 OX=247634 GN=queG; PE = 3 SV=1
MSSQGGSQITLPEPEALLAKIRLWADELGFQQLGVSDVDLGEHESYLQKWLDAGYHGSMEYMARHGNKRSRPAELVPDTCRVISLRMDYLADHSAMEVLASSEKAYISRYTLGRDYHKLIRKRLAQLAARIEKEITGGQFRAFVDSAPVLERAIAEQAGLGWIAKNTMLINPDAGSWFFLGEIYTDLPLPETRSQESKHCGTCTACLDLCPTDAFVGPFELDARRCISYLTIEHHGSIDPELRPLMGNRVFGCDDCQLVCPWTKFAQETGESDFKARHGLANAELVELFLWDKETYLSRTEGSAIRRIGHERWLRNLAVGLGNGPASNEAIAALRSRSEFPSELVREHVEWALGQLEAKSAGV

SEQ ID NO: 78095 - protein, 347 aa, unidentified
  source 1..347: note = Marinibacterium profundimaris
  REGION 1..347: note = tr|A0A225NML4|A0A225NML4_9RHOB Epoxyqueuosine reductase OS=Marinibacterium profundimaris OX=1679460; GN = queG PE=3 SV=1
MDPVAFRHSLKARALEEGFVAMGVCRPDAVPEVPERLRAFLEAGYHGQMGWLADRVTWREDPAALWPEARSIVMLAESYAPDSDPLPLLERRQEGVTSAYARGRDYHDIVKKRLKRVGRWLIDEAARQGETAQIKVFVDTAPVSEKALGQAAGLGWQGKHTNLLSRDWGNWCFLGAIFTTLELPADAPEVDHCGSCRLCQDICPTRAFPEPYRLDARRCISYLTIEHKGPVDEALRPLLGNRIYGCDDCLAVCPWNKFAQAASDLRYDGQATAPLGELAMLDDAGFRARFSGSPIKRIGRDRFVRNVLYAIGNSGKPRLADTARALLSDPDETVAEAARWAIARLDG

SEQ ID NO: 78096 - protein, 377 aa, unidentified
  source 1..377: note = Mariniblastus fucicola
  REGION 1..377: note = tr|A0A5B9PCN6|A0A5B9PCN6_9PLAN Epoxyqueuosine reductase OS=Mariniblastus fucicola OX=980251 GN=queG PE=4; SV = 1
MNTAQLTQSLKQEAKRLGFDFAAVTAALAPDGFSRLDSWVERGFHGEMDYLETRREAYQHPAGVLPAVRSVMMLGMSYHVDVASLPQQPGLGRVARYAWGQGDYHDFLHRKLKQLCRFAREAGDGIAIRGVVDTAPLLEREFAQLAGMGWHAKNTMLINRELGSWFLIAAVLTDAELEIDTPMSTSHCGTCTACLDACPTDAFVEPGTLDATKCISYLTIEHRSPIPIELRSQMGDWILGCDVCQDVCPWNNKAKVSSQEVFQPVEALRPLNLHDLFRMDDDQFRVQFRKTPLWRPKRRGILRNAAITLGNMPSGEGLESLAIGINDDEPLVRGACVWAIGQHLETFGSQAMELLRNRRTIECDADVQTELDLAMQS

SEQ ID NO: 78097 - protein, 369 aa, unidentified
  source 1..369: note = Marinicauda algicola
  REGION 1..369: note = tr|A0A4S2H0D1|A0A4S2H0D1_9RHOB Epoxyqueuosine reductase OS=Marinicauda algicola OX=2029849 GN=queG PE=3; SV = 1
MSTLTDTSRLKALAREIGFDAVRIARADEGWEAGERLKRYVGEGRHGTMAWMEETLERRVHPTAMWPEARSAVVVGLNYGPGTDPLDILQRKDRAAISVYAQNRDYHDLIKKRLKRLAREFHRETGHGVKVFVDTAPLMEKPLAHRSGLGWQGKHTNLVSREHGSWLFLGVMLTEAELTPDAPEADHCGSCRACLDICPTDAFPNPYEIDARRCISYLTIEHKGTIAEEFRGPMGNRIYGCDDCLAVCPWNKFASATAETAFHPREELTAPKLIGLAGLDDAGFRALFAASPVKRIGRDRFVRNVLIALGNSADPEAVPVVVERLGDDSALVRAMAVWALKRLDPERFQAEREKRRESERDADVRAEWT

SEQ ID NO: 78098 - protein, 378 aa, unidentified
  source 1..378: note = Marinicauda pacifica
  REGION 1..378: note = tr|A0A4S2HBQ5|A0A4S2HBQ5_9RHOB Epoxyqueuosine reductase OS=Marinicauda pacifica OX=1133559 GN=queG PE=3; SV = 1
MTATLTDTDAIKALAREIGFDAVRIARADEAWEAGERLREYVGEGRHGSMAWMEETLDRRVHPNAMWPEAKSAVVVGLNYGPDHDPLVILEQSDRAAISVYAQNRDYHDLIKKRLKRLARAFHQETGHGVKVFVDTAPLMEKPLAHKSGLGWQGKHTNLVSREHGSWLFLGVMLTEAALEPDETETDHCGSCRACLDICPTNAFPAPYQIDARRCISYLTIEHKGPIPREFRAPMGNRIYGCDDCLAVCPWNKFASRTQETAFHPRESLTAPRLADLAALDDTAFRELFTASPIKRIGRDRFVRNVLIALGNSHGPESLAAIRARLDDDSALVRGAAVWALGRLDPEAFEALKTEALAREESGEVREEWQAGPQGQLS

SEQ ID NO: 78099 - protein, 375 aa, unidentified
  source 1..375: note = Marinicauda sp.
  REGION 1..375: note = tr|A0A2U2BWK5|A0A2U2BWK5_9RHOB Epoxyqueuosine reductase OS=Marinicauda sp. WD6-1 OX=2135793 GN=queG PE=3; SV = 1
MPEAAESYDAAGVKALAREVGFDVARIARADTEWDAGERLRQFVGEGRHGEMAWMETTLERRVHPTAMWPDAKSAVVVGLNYGPAHDPLAVLERPDEAAISVYAHNADYHDLMKKRLKRLAREFHQASGHEVKVFVDTAPLMEKPLAERAGLGWRGKHTNLVSREHGSWLFLGVMLTAAELDPDAAEIDHCGSCRACLDVCPTDAFPAPYQLDARRCISYLTIEHAGPIPHEFREAMGNRIYGCDDCLAVCPWNKFASVSRETKLHARPELLDAQLADLAELDDAAFREVFSGSPIKRIGRDRFVRNVLIAIGNSADAGLVPTIVARLDDDSALVRGAAVWALARLDANRFAIERGARLPDEEETTVRAEWEAEA

SEQ ID NO: 78100 - protein, 374 aa, unidentified
  source 1..374: note = Marinicaulis flavus
  REGION 1..374: note = tr|A0A2S7K478|A0A2S7K478_9PROT Epoxyqueuosine reductase OS=Marinicaulis flavus OX=2058213 GN=queG PE=3; SV = 1
MTKTADDIAARIRALAGECGFDAVGFTPAALPDSFRERLMRFLALGRHGEMGWLEARAGERAHPQSLWKDAKSVIMLGMNYGPDHDPMAALEQKSSGVLSVYAHNRDYHDLVKKRLKRAARALAEETGAEVKVFVDTAPVMEKPLAARAGIGWQGKHTNLVSREFGSWLFLGAIFTTLELAPDEAERDHCGTCRNCLDICPTNAFPAPYQLDATRCISYLTIEHQGPIPRELRKAMGNRIYGCDDCLAVCPWNKFAQRARESAFHAREDLSRPLLSELAGLDDAAFRTKFSGSPVKRTGRNRFVRNVLIAIGNSGDERLSDCAETLIEDESPLVRGAAVWALAQLRPGDIEDLRARYHAQEDDAEVRAEWEAAG

SEQ ID NO: 78101 - protein, 372 aa, Marinicella litoralis
  REGION 1..372: note = tr|A0A4R6XS60|A0A4R6XS60_9GAMM Epoxyqueuosine reductase OS=Marinicella litoralis OX=644220 GN=queG PE=3; SV = 1
MVIHLATILPVNQQQEHIDYQQLKANIKAWAKESGFQQAGISDVNLKQAGEHLKNWLKKQHHADMEYMHKHGEKRYQPEALVPGTLSVISVRLDYMQTSLTPYEELTKQVSKAAISRYALGRDYHKVIRNKLKKLVAKISAEIGPFGHRVFTDSAPVMEKAIAEKAGLGWIGKHSNLINSKAGSYFFLGEIYTDLPLEPDRKQSFHCGSCTQCIQDCPTDAIIAPFQVDASRCISYLTIENHGPIPEEFRKAMGNRIYGCDDCQVVCPWNKFTQNTAEPDFAPRHHLDDSELLELFLWDEETFLQNTAGSPIRRIGYQSWQRNLAVGMGNSKPHANIIEALKQKVNSASPMVKEHIEWALTELSKQTSTPIA

SEQ ID NO: 78102 - protein, 312 aa, unidentified
  source 1..312: note = Marinifilaceae bacterium
  REGION 1..312: note = tr|A0A434AG24|A0A434AG24_9BACT Epoxyqueuosine reductase OS=Marinifilaceae bacterium T3-2 S1-C OX=2487017; GN = queG PE=3 SV=1
MNLTLSAKSNLIKDKAYELGFDLCGIAKADFLADEKEHFLSWLGKEYHGEMGYMANNIEKRLDPRLLVENTKSIVVVGLNYYPDKVQTDPEAPVIAKYAYGKDYHFVMKDRLNQLLDFINTDIGEIQGCAFVDSAPVLEHAWAKRAGLGWIGKNSLLLNRKIGSFLFLGELLIDMELEYENPVDADFCGGCNRCVRACPTGAITEPYVVNGSKCISYFTIELKGDIPSEMKGKFQNRVFGCDICQDVCPWNRMAKPHNIDEFTPNPNLLALSKSNWYQLDAHQFGEIFKKSAVKRTKFNGIQRNLDFLSSEE

SEQ ID NO: 78103 - protein, 310 aa, unidentified
  source 1..310: note = Marinifilum breve
  REGION 1..310: note = tr|A0A2V3ZUG2|A0A2V3ZUG2_9BACT Epoxyqueuosine reductase OS=Marinifilum breve OX=2184082 GN=queG PE=3 SV=1
MDLTLTAKSNLIKTKAHELGLDLCGIVKAEFLENEKENFLLWLDKGYHGEMGYMANNIEKRLDPRLLVENTKSIVVVGLNYYPKEQQKDVEAPVIAKYAYGKDYHFVLKDRLNQLFEYINTEIGEVSGRAFVDSAPVLEHAWAKRAGLGWIGKNSLLINRKIGSFLFLGELFLDIELEYENPTYADFCGGCNRCVRSCPTGAITEPYVVNGSKCISYYTIELKGDIPVEAKEKIQNRVFGCDICQDVCPWNRMAKPHSVPDFEPNPDLLSMSKEDWQNMDAHKFGEIFRNSAVKRTKFKGIKRNLDFLDL

SEQ ID NO: 78104 - protein, 311 aa, unidentified
  source 1..311: note = Marinifilum flexuosum
  REGION 1..311: note = tr|A0A419WXD1|A0A419WXD1_9BACT Epoxyqueuosine reductase OS=Marinifilum flexuosum OX=1117708 GN=queG PE=3; SV = 1
MNLTLTAKSNLIKSKAKEFGLDLCGIVKADFLEDEKENFLSWLDKGYHGEMGYMANNVEKRLDPRLLVENTKSIVVVGLNYFPKEQQKDPEAPVIAKYAYGKDYHFVLKDRLNQLFEYINTEIGEVSGRAFVDSAPVLEHAWAKKAGLGWIGKNSLLINRKMGSFLFLGELLLDMELEYENPTYADFCGGCNRCVRSCPTGAITEPYVVNGSKCISYYTIELKGDIPEEAKGKFENRVFGCDICQDVCPWNRMSKPHSVTDFEPNPDLLSMSKEDWQDMNAHKFGEIFRNSAVKRTKFKGIKRNLDFLKGE

SEQ ID NO: 78105 - protein, 307 aa, Mariniflexile fucanivorans
  REGION 1..307: note = tr|A0A4R1RRJ8|A0A4R1RRJ8_9FLAO Epoxyqueuosine reductase OS=Mariniflexile fucanivorans OX=264023 GN=queG; PE = 3 SV=1
MNNKQQHTNLIKTEAKRLGFLSCGISKAEFLEAEAPRLENYLNKNMHGEMQYMENHFDKRLDPTKLVENSKSVISLLLNYYPSETQNKESFKLSKYAYGTDYHFVIKNRLKTLLNFIQYEIGDVHGRAFVDSAPVLDKAWAAKSGLGWIGKHSNLITQQVGSFYFIAELIIDLELEYDTITTDHCGSCTKCIDACPTQAIIEPYVVDGSKCISYFTIELKENIPSSFKGKFEDWMFGCDICQDVCPWNRFSKAHAEPLFNPHPELLSMSKKEWNEITEDVFRKIFKDSAVKRTKFSGLKRNINFLNE

SEQ ID NO: 78106 - protein, 309 aa, Mariniflexile sp.
  REGION 1..309: note = tr|A0A385BQ17|A0A385BQ17_9FLAO Epoxyqueuosine reductase OS=Mariniflexile sp. TRM1-10 OX=2027857 GN=queG; PE = 3 SV=1
MNNKQLHAQLIKTEAKRLGFLSCGISKAQFLEAEAPRLEKWLNNNMHGQMQYMENHFDKRLDPTKLVEDSKSVISLLLNYYPSEEQNKESYKLSKYAYGTDYHFVIKEKLKSLLNFIQEEIGDVHGRAFVDSAPVLDKAWAAKSGLGWIGKHSNLLTQQVGSFYFIAELIVDLELEYDSQTTDHCGTCTACIDACPTQAITEPYVVDGSKCISYFTIELKENIPTEFKGKFDDWMFGCDVCQDVCPWNRFSKAHSEPLFNPHPELLSMTKKDWEEITEDVFEKVFKNSAVKRTKFSGLKRNIDFLKNQD

SEQ ID NO: 78107 - protein, 313 aa, Marinilabilia salmonicolor
  REGION 1..313: note = tr|A0A2T0XLK5|A0A2T0XLK5_9BACT Epoxyqueuosine reductase OS=Marinilabilia salmonicolor OX=989 GN=queG; PE = 3 SV=1
MDLIAEQRGQMIREKALDLGFDDVAFVEAQFLEREAETYDRWITKGAHAGMDYMARNREKRNDPRLLVEGTKSVVVVLQNYQPDRNTSQGDEFKISKYAYGRDYHKVLKNRLKKLMSFIRTEVADEADGRFFVDSAPVSERSLAARAGLGWRGKNTNLIHPRLGSFVFIGELFLNFELPYGTPIKEACGGCTRCLDACPTGALTSPYELDANKCISYLTIENKGEISEDFSGQFDGWIFGCDICQDVCPWNWKARPHKEPDFNLRPTFGKMTSVDWKALSEASFDELSKGSAIRRAGYAGIMRNIRFVGSVRK

SEQ ID NO: 78108 - protein, 316 aa, Marinilabilia sp.
  REGION 1..316: note = tr|A0A2U2B816|A0A2U2B816_9BACT Epoxyqueuosine reductase OS=Marinilabilia sp. WTE OX=2162893 GN=queG PE=3; SV = 1
MDLVLEQRAKLIREFAQDLGFDDVGFVSAEPMQKESDFLEQWLEKGYHAGMDYMERNFEKRTNPAKLVEGAKSVVVCLQNYAPSRKEKPSGDYKISKYAYGRDYHKVVKNRLKKLFTFIQSEVDPQADGRFFVDSAPVSERALAASAGLGWRGKNTNLIHPRLGSFIFIGEIILNIDLPSGSPIKEACGGCTRCIEACPTDALRSPYELDSNRCISYLTIENKGSISAEFAGKMEDWIFGCDICQDVCPWNWKARPHSEPDFKLWPVFKNMENQSWEELDAGCFDEISRGSPIRRAGFDGIKRNISFVVNAKDPDN

SEQ ID NO: 78109 - protein, 312 aa, unidentified
  source 1..312: note = Marinilabiliaceae bacterium
  REGION 1..312: note = tr|A0A353U130|A0A353U130_9BACT Epoxyqueuosine reductase OS=Marinilabiliaceae bacterium OX=2053574; GN = queG PE=3 SV=1
MSLIKEYIAEGIRRKASELGFAEVGFSPATELVEDKERLRAWLAKGYSAGMSYMSNYFDKRTDPSLLVQGSLSVISLLHSYKPTESPLSEHAPKISRYAYGKDYHDVIRRKLSELFSHIRDEYYPALEGRFFVDSAPLLERALAVKSGLGWIGKNSMLINRRLGSYVFLSEILVNIELPYNEGGMIDRCGGCTYCIDACPTAAILPDRVIDGNRCISYLTIENKDDIPLEFKGKLKGWTFGCDICQEVCPWNRKAPDSDEPEFRPSAALLAMNLEKWEGLSREGFSELFKGSAVKRAKYTGWIRNYKFVVEP

SEQ ID NO: 78110 - protein, 313 aa, unidentified
  source 1..313: note = Marinilabiliaceae bacterium
  REGION 1..313: note = tr|A0A4Q8RT92|A0A4Q8RT92_9BACT Epoxyqueuosine reductase OS=Marinilabiliaceae bacterium JC017 OX=2234116; GN = queG PE=3 SV=1
MDIIALKYQEMIREEALRLGFSDIGFAPVEHLCDDELHLKQWLNDGFQAGMEYMNNHFEKRVNPSLLVEGARSVISLLVNYKPDQKQRADVPQIATYAFGKDYHFTLKEKMQVLFDFIKANIFPQLDGRCFVDSAPVLDRAWAVKSGLGWIGKNTNLIHRKHGSYVFIGELITNLALPATDPIKAACGNCTRCIDACPTGALVAPYRLDANKCISFQTIENRGEIPEQLVVKFQNRVYGCDICQEVCPWNRKTPPTREADFMPHPDLLTMTREQWYALDESTYREIFRKSAVKRAKYAGLMRNLAFLKKAHGK

SEQ ID NO: 78111 - protein, 335 aa, unidentified
  source 1..335: note = Marinilabiliales bacterium
  REGION 1..335: note = tr|A0A2N5YYZ8|A0A2N5YYZ8_9BACT tRNA epoxyqueuosine(34) reductase QueG OS=Marinilabiliales bacterium OX=2053303 GN=queG PE=4 SV=1
MSLVLTPNTYISVIKHIKTTNVKLDAGLIKELAQKTGFDACGITYATPLLEDNAFLDKWIDHGKNAEMHYLKNNRELRKNPEGLLDNAKSIISVLLSYNLGYDDTIDYYISKYARGLDYHRVVKKLLNAFVNSLMESYPELNARVFVDSAPVFERAYARNSGLGFIGKNTCLINPKLGSFVFIGEIICDMRSDYDSEISLDCGNCNLCVESCPVGALSDKGLDANRCISYHTIESKNDIPENIANKITNQVFGCDICQDVCPYNKRAQLSTNVEFKRNSLIEDLNIQYLENISNSQFNKKYEETAFNRVKREKLLKNFRLVERKKNFKLQDISNY

SEQ ID NO: 78112 - protein, 74 aa, unidentified
  source 1..74: note = Marinilabiliales bacterium
  REGION 1..74: note = tr|A0A351HT76|A0A351HT76_9BACT tRNA epoxyqueuosine(34) reductase QueG (Fragment); OS = Marinilabiliales bacterium OX=2053303 GN=DCY97_22935; PE = 4 SV=1
GSFVFIGEMVINLELAYDEPYPSNYCGSCTQCIDACPTGAIVKPGTIDSNRCISYLTIENKSDSISSEFSGKFG

SEQ ID NO: 78113 - protein, 413 aa, Marinilactibacillus piezotolerans
  REGION 1..413: note = tr|A0A1I3V7T9|A0A1I3V7T9_9LACT Epoxyqueuosine reductase OS=Marinilactibacillus piezotolerans OX=258723; GN = SAMN04488569_100235 PE=4 SV=1
MKIYYSELYLILVKFTVTQLLLVRLEESSINLKLKEKIKQKANEIGIDKIGFTHAEPFYDLEDKLHKQKEKGYTSGFEHDVIEERIYPEKIFSKPRSIIAIAVAYPSKMRSKPPKVKGERRGEFARASWGTDYHDVLRKRMDLLIEFIRTETSEETSFKPMVDTGELVDVAVAQRAGLGFIGRNGLLITKEYGSYVYLGEIITNLEFEPDEEVPFGCGECTRCVKACPTGALLGDGRMNAQKCLSYQTQTKGYMPKEYRRKMGHMIYGCDICQIVCPYNKGVDSHFHEDMEPDPEKTMPLLKPILTISNREFKDTYGEMAGSWRGKKPLQRNAIIALANYRDRTAIPDLLRVIDQDPRPMIRGTAAWAISVILKREANEDVVSFLEEALSKETDLETIEEFQIAISLMKENLT

SEQ ID NO: 78114 - protein, 389 aa, Marinilactibacillus psychrotolerans
  REGION 1..389: note = tr|A0A511GYA5|A0A511GYA5_9LACT Epoxyqueuosine reductase OS=Marinilactibacillus psychrotolerans OX=191770; GN = queG PE=4 SV=1
MEESLINLELKEKIKQKAQEIGIDKIGFTHAEPFYELEEKLYIQKEKGYTSGFEHDVIEERVYPDKIFSKPRSIIAIAVAYPSKMRTKPPRVKGERRGEFARASWGSDYHDVLRKRMDLLIEFIRAEANEKANFKPMVDTGELVDVAVAQRAGLGFIGRNGLLITKEFGSYVYLGEIITNLEFAPDIEVPFGCGECTRCVTACPTGALLGDGRMNAQKCLSYQTQTKGYMPKEYRRKMGHMIYGCDICQIVCPYNKGVDSHFHEDMEPDPEKTMPLLKPILTISNREFKDTYGEMAGSWRGKKPLQRNAIIALANYRDRTAIPDLLRVIDQDPRPMIRGTAAWAISVILKREANEDVVSFLNEALSKETDDETIEEFQTAISLMKENLT

SEQ ID NO: 78115 - protein, 389 aa, Marinilactibacillus psychrotolerans
  REGION 1..389: note = tr|A0A1R4KDD3|A0A1R4KDD3_9LACT Epoxyqueuosine (OQ) reductase QueG OS=Marinilactibacillus psychrotolerans 42ea; OX = 1255609 GN=FM115_09470 PE=4 SV=1
MEESLINLELKEKIKQKAQEIGIDKIGFTHAEPFYELEEKLHIQKEKGYTSGFEHDVIEERIYPDKIFSKPRSIIAIAVAYPSKMRTKPPRVKGERRGEFARASWGSDYHDVLRKRMDLLIEFIRAEANEKANFKPMVDTGELVDVAVAQRAGLGFIGRNGLLITKEFGSYVYLGEIITNLEFAPDVEVPFGCGECTRCVTACPTGALLGDGRMNAQKCLSYQTQTKGYMPKEYRRKMGHMIYGCDICQIVCPYNKGVDSHFHEDMEPDPEKTMPLLKPILTISNREFKDTYGEMAGSWRGKKPLQRNAIIALANYRDRTAIPDLLRVIDQDPRPMIRGTAAWAISVILKREANEDVVSFLNEALSKETDDETIEEFQIAISLMKENLT

SEQ ID NO: 78116 - protein, 384 aa, Marinilactibacillus sp.
  REGION 1..384: note = tr|A0A1L4C2M8|A0A1L4C2M8_9LACT tRNA epoxyqueuosine(34) reductase QueG OS=Marinilactibacillus sp. 15R OX=1911586 GN=BKP56_10090 PE=4 SV=1
MNLKLKEKIKQKANEIGIDKIGFTHAEPFYDLEDKLHKQKEKGYTSGFEHDVIEERIYPEKIFSKPRSIIAIAVAYPSKMRSKPPKVKGERRGEFARASWGTDYHDVLRKRMDLLIEFIRTETSEETSFKPMVDTGELVDVAVAQRAGLGFIGRNGLLITKEYGSYVYLGEIITNLEFEPDEEVPFGCGECTRCIKACPTGALLGDGRMNAQKCLSYQTQTKGYMPKEYRRKMGHMIYGCDICQIVCPYNKGVDSHFHEDMEPDPEKTMPLLKPILTISNREFKDTYGEMAGSWRGKKPLQRNAIIALANYRDRTAIPDLLRVIDQDPRPMIRGTAAWAISVILKREANEDVVSFLEEALSKETDLETIEEFQIAISLMKENLT

SEQ ID NO: 78117 - protein, 371 aa, Marinimicrobium koreense
  REGION 1..371: note = tr|A0A3N1P8V2|A0A3N1P8V2_9GAMM Epoxyqueuosine reductase OS=Marinimicrobium koreense OX=306545 GN=queG; PE = 3 SV=1
MPHSVDFQQLADDIKLWGRELGFQQVGITDTHLQESEARLKQWLERGYHGTMNWFTAHGDKRSRPPELHPGTIRVISVRMDYLPADTDQIKILKDPTKAYISRYALGRDYHKLIRKRLATLAKKIEAALPPEMMEGQQRPFVDSAPVMEKPLADKAGLGWTGKHTLILNSEAGSWFFLGELFTYLPLPVDRSEQPNQCGTCSACLQVCPTDAFPEPYTLDARRCISYLTIEQKGPIPEEFREPMGNRVFGCDDCQAVCPWNRYAQHTRERDFSPRHDLDRQDLLTLFQWTEEEFLTRTEGSAIRRTGYEGWLRNLAVGLGNAPSDPDIIAALEARRPLASPMVQEHIDWALQQQARPNRRRKRKIRRKRES

SEQ ID NO: 78118 - protein, 371 aa, Marinimicrobium sp.
  REGION 1..371: note = tr|A0A2D8WHB3|A0A2D8WHB3_9GAMM Epoxyqueuosine reductase OS=Marinimicrobium sp. OX=2024837 GN=queG PE=3; SV = 1
  VARIANT 16: note = Xaa can be any naturally occurring amino acid
  VARIANT 20: note = Xaa can be any naturally occurring amino acid
  VARIANT 25: note = Xaa can be any naturally occurring amino acid
  VARIANT 32..33: note = Xaa can be any naturally occurring amino acid
  VARIANT 35..36: note = Xaa can be any naturally occurring amino acid
  VARIANT 39: note = Xaa can be any naturally occurring amino acid
  VARIANT 41: note = Xaa can be any naturally occurring amino acid
  VARIANT 48: note = Xaa can be any naturally occurring amino acid
  VARIANT 53: note = Xaa can be any naturally occurring amino acid
  VARIANT 67: note = Xaa can be any naturally occurring amino acid
  VARIANT 73: note = Xaa can be any naturally occurring amino acid
  VARIANT 76: note = Xaa can be any naturally occurring amino acid
  VARIANT 82..83: note = Xaa can be any naturally occurring amino acid
  VARIANT 92: note = Xaa can be any naturally occurring amino acid
  VARIANT 95: note = Xaa can be any naturally occurring amino acid
  VARIANT 113: note = Xaa can be any naturally occurring amino acid
MPHSVDFQQLADDIKXWGRXLGFQXVGITDTXXQXXEAXLXQWLERGXHGTMXWFTAHGDKRSRPPXLHPGTXRVXSVRMDXXPADTDQIKXLKXPTKAYISRYALGRDYHKXIRKRLATLAKKIEAALPPELIEGQQRPFVDSAPVMEKPLADKAGLGWTGKHTLILNSEAGSWFFLGELFTYLPLPVDRSEQPNQCGTCSACLQVCPTDAFPEPYTLDARRCISYLTIEQKGPIPEEFREPMGNRVFGCDDCQAVCPWNRYAQHTRERDFSPRHDLDRQDLLTLFQWTEAEFLTRTEGSAIRRTGYEGWLRNLAVGLGNAPSDPGIIAALEAKRPLASPMVQEHIDWALQQQARPNRRRKRKIRRKRES

SEQ ID NO: 78119 - protein, 380 aa, unidentified
  source 1..380: note = Marininema halotolerans
  REGION 1..380: note = tr|A0A1I6T0P5|A0A1I6T0P5_9BACL Epoxyqueuosine reductase OS=Marininema halotolerans OX=1155944; GN = SAMN05444972_108185 PE=4 SV=1
MEAETLKQFLIAEAKDIGIDKVGFATADPFTELKERLMRHREAGFESGFEEPDLDKRTEPFKSLPGAKTIIAIALAYPTRMENSPQSHPGERRGLFCRASWGVDYHHVLRQRLEALKEKLLEKVPDASCEIMVDTGALSDRAVAERAGIGWSGKNTSIITEEFGSWVYLGEMITDVWLPPDAPVTSGCGDCNACIEACPTGALVGPGQLNSQACLAYLTQTKGFLAKEYRDLLGNYLYGFETCQAVCPYNQKKNTSHHPEFQPDPEQVKPLLRPLLTISNREFRERFGVMAGSWRGKKPIQRNAIIALGKVRDHTAVPELVQLLETDPRPVIRGTAAWALGRIRGEIALQTLQQALSLEVDEAVRSEIQDALKEEVIEFG

SEQ ID NO: 78120 - protein, 379 aa, Marininema mesophilum
  REGION 1..379: note = tr|A0A1H3C711|A0A1H3C711_9BACL Epoxyqueuosine reductase OS=Marininema mesophilum OX=1048340; GN = SAMN05444487_12035 PE=4 SV=1
MAPESLKELLIAEAHNMGIDKIGFASADPFTELKERLIRHREAGYESGFEEPDLDKRIDPAKSLVGAKTIIAIALAYPSQMGNLPTSSPGEYRGLFCRASWGADYHLVLRQRLEALKAKLLEMKPEANCEVMVDTGALSDRAVAERAGIGWSGKNTSIITEEYGSWVYLGEMITDVWIPPDTPVTAGCGDCNACIDACPTGALVGPGQLNSQACLAYLTQTKGFLAKEYRDQLGTYLYGFETCQVVCPYNRNKQPSKHKEFQPDPEQVKPLLKPLLTMSNRQFRERFGTMAGSWRGKKPIQRNAIIALGRVRDHTAVPDLTHLLKNDPRPVIRGTAAWALGRIGGDVVLTALKQALSTETDEAVREEIRDALADHEQVV

SEQ ID NO: 78121 - protein, 307 aa, unidentified
  source 1..307: note = Mariniphaga anaerophila
  REGION 1..307: note = tr|A0A1M4YMI5|A0A1M4YMI5_9BACT Epoxyqueuosine reductase OS=Mariniphaga anaerophila OX=1484053; GN = SAMN05444274_103405 PE=4 SV=1
MNISQSIKAKSKELGFLDCAIIPAGFLEEESGHFHSWLDAGMNGEMGYMSRNIEKRLNPQLLVENAKTVIVVLLNYFPKATQNDDSAPVLSKYAYGIDYHFVMKDKLKELLRFIRKEITPCNGRPFVDSAPVLERAWARRGGLGWVGKNSNLISVLYGSFFFIGELILDVELPYDNPKPVADHCGTCTRCIDACPTKAIANNRVIDARKCISYQTIELKGELDKNLKGQFENRVFGCDICQDVCPWNLKSEPNNTSEFTPVPKLLELTHNEWHNMDRPLFNQLFKNSAVKRTGFKGLKRNLEFVERE

SEQ ID NO: 78122 - protein, 314 aa, unidentified
  source 1..314: note = Mariniphaga sediminis
  REGION 1..314: note = tr|A0A399D287|A0A399D287_9BACT Epoxyqueuosine reductase OS=Mariniphaga sediminis OX=1628158 GN=queG PE=3; SV = 1
MSKSKEISQRIKEQAVLLGFLECAIVPAGFLVEEKSRFQEWLDAGMHGEMGYMDRNKEKRLDPRLLIENAKTVIVVLQNYFPEKTQESTEAPVLSKYAYGTDYHFVMKDKLKKLLHFIQEEIQPCNGRPFVDSAPVLERAWARQAGLGWVGKNSNLISVRHGSYFFIGELILDTELPFDTPRPVADHCGTCTRCIDACPTKAIVANQVVDARKCISYQTIEIKGDLDENLKGQFENRVFGCDICQDVCPWNLKAHPHEEPAFTPNPKLLKLTHEDWHNMDRPLFNELFKNSAVKRAGFKGLKRNLQFLRPEQNE

SEQ ID NO: 78123 - protein, 314 aa, unidentified
  source 1..314: note = Mariniradius saccharolyticus
  REGION 1..314: note = tr|M7X5I6|M7X5I6_9BACT Epoxyqueuosine reductase; OS = Mariniradius saccharolyticus AK6 OX=1239962 GN=queG; PE = 3 SV=1
MNGLSEKYAQIVKTQAKSLGFDFCGIAKAGFLEEEAPKLEVWLNKNYHGQMSYMANHFDKRLDPTKLVEGAKSVISLIYNYFPGKRLPEGPEDLKIAKYAYGQDYHLVVKDRLKTLMENLRKEIGEIGGRAFIDSAPVMERQWAQKSGLGWVGKNSLLLNRDMGSFFFLAELIVDVEISPDPPMVKDYCGTCTRCIDACPTDAIVADGVVDASKCISYLTIELKENIPAEFKGKMENWIFGCDICQDVCPWNRFSKPHREPLFEMSPDLANMGKREWQEITEEVFQQVFAKSPLKRSKWSGLRRNVWFVESREG

SEQ ID NO: 78124 - protein, 262 aa, unidentified
  source 1..262: note = Marinirhabdus gelatinilytica
  REGION 1..262: note = tr|A0A370QIK1|A0A370QIK1_9FLAO Epoxyqueuosine reductase OS=Marinirhabdus gelatinilytica OX=1703343; GN = C8D94_10134 PE=4 SV=1
MHGEMGYMENYFDKRLDPTKLVEGSKSVISLLLNYYPSETQRDDSYKISKYAYGRDYHFVIKEKLKGLLRFIQSEIGEVHGRAFVDSAPVLDKAWAAKSGLGWIGKHSNLLTQKVGSFYFIAELIVDLELEYDTPVTDHCGSCTACIDACPTQAIVQPYVVDGSKCISYATIELKEQIPSSYSNQMDDWMFGCDVCQDVCPWNRFSKPHNEPLFNPHPELLSKSKKEWEEITKGVFNEIFKKSAVKRTKFEGLKRNIQFLKK

SEQ ID NO: 78125 - protein, 299 aa, unidentified
  source 1..299: note = Marinisporobacter balticus
  REGION 1..299: note = tr|A0A4V2S9L1|A0A4V2S9L1_9CLOT Epoxyqueuosine reductase OS=Marinisporobacter balticus OX=2018667; GN = EV214_1472 PE=4 SV=1
MKKSLIQFCQKLNIEHVGIAPVGPYKELEKILRDRVDKGYITGMEEKDLKKRTDPKEQMEDAASIIVCLFPYFTGNFENSNISKYTYSIDYHMIIKEKLEKIGEFFKAHIKGFSYKSFVDTGPLVDRYLAYLAGVGYFGLNNHIITDPYGSFVFIGYIINNYPFEEDKPLDKTCMRCGACIKKCPGGAILGGFKIDPRKCVSFITQKKEELTGEEIHILKKNNMVFGCDICQDICPHNQNIANTNMREFKTALIYTLKEEEISEMSNKAFKRIYGNRAFSWRGKKIIARNLHVLKRKDK

SEQ ID NO: 78126 - protein, 365 aa, Marinithermus hydrothermalis
  REGION 1..365: note = tr|F2NQB9|F2NQB9_MARHT 4Fe-4S ferredoxin-type domain-containing protein OS=Marinithermus hydrothermalis (strain DSM 14884 / JCM 11576 / T1) OX=869210; GN = Marky_0900 P E=4 SV=1
MDPRAVLTAEAEARGFLTAWAPARLPEPPRARYRAWIAGGKHAGMAYLERNLETRLDPTRRFPWVKSVLVLGALHAYPDPGVPRGGVRVGRVARYAWVRDYHAWFAPHLEALEALCVKLGGRGKGYVDHGPIPERSYAALGGMGWVGRNAMLIHQGCGSYFTLAVLLTSFEVEPVPAHPNRCGRCVRCVGACPTGALPGDGTLDANRCVSYWTIEHRGLIPPELWDGVGDWLFGCDACQEACPWNRKAHHFWEGVRPDPELAHPDLSAFFTLSSRAFQRRYAGSAFLRPGRVRMARNALVVLANTRDPAYLSLVRLGAEDVNPLVRATAARALALLGDARRAERLRKDPDPRVAAEATRALEALG

SEQ ID NO: 78127 - protein, 61 aa, Marinobacter adhaerens
  REGION 1..61: note = tr|A0A352IUE9|A0A352IUE9_9ALTE tRNA epoxyqueuosine(34) reductase QueG (Fragment); OS = Marinobacter adhaerens OX=1033846 GN=DC045_12395 PE=4; SV = 1
KRTEGSAIRRTGYEGWLRNLAVGLGNAPSTIPVIEALKKRADHPSEMVREHVQWALKRHGL

SEQ ID NO: 78128 - protein, 359 aa, Marinobacter adhaerens
  REGION 1..359: note = tr|E4PHY1|E4PHY1_MARAH Epoxyqueuosine reductase; OS = Marinobacter adhaerens (strain DSM 23420 / HP15); OX = 225937 GN=queG PE=3 SV=1
MSTTATCTTTHPELADLPSLIRQWAAEFGFADVGITNADTGEHADHLKDWLAAGYQGEMDYMAHHGDKRYTPASLVPGTTRVISVRMDYLPSPDSPKEALTNRESAYVTRYALGRDYHKLIRKRLAQLAAKIDEAVSGYDYRAFVDSAPVLERALAQRAGLGWIGKNNMLIHPKAGSFFFLGEIFTSAPLPIDEPFETDHCGSCSACLDLCPTDAFVGSHKLDARRCISYLTIELKGSIPEELRPLMGNRVFGCDDCQLVCPWQKFSKPTSEKDFQPRHGLDNSSLAELFLWTEEQFLKRTEGSAIRRTGYEGWLRNLAVGLGNAPSTIPVIEALKKRADHPSEMVREHVQWALKRHGL

SEQ ID NO: 78129 - protein, 354 aa, Marinobacter algicola
  REGION 1..354: note = tr|A6F3K1|A6F3K1_9ALTE Epoxyqueuosine reductase; OS = Marinobacter algicola DG893 OX=443152 GN=queG PE=3 SV=1
MTESIDQNLELLPEQIQSWALELGFSDVGITLPDTGAHGARLKDWLRKGFHGEMSYMEDHGDKRYTPTSLVEGTQRVISVRLDYLPAPDNPGRILTNPEKAYVTRYATGRDYHKLMRKRLATLAKRIDEAVSGYDYRAFVDSAPVLERALAQRAGLGWIGKNNMLIHPKAGSFFFLGEIFTSAPLPLDEPFDKEHCGSCAACLDVCPTDAFEGPHKLDARKCISYLTIELKGSIPEQLRSKMGNRVFGCDDCQLVCPWNKFSKPTAEQDFQPRHGLDNSELATLFLWTEEQFLKRTEGSAIRRTGYEGWLRNLAVGLGNAPSTIPVIEALKQRADFPSEMVREHVHWALRRHGL

SEQ ID NO: 78130 - protein, 359 aa, unidentified
  source 1..359: note = Marinobacter antarcticus
  REGION 1..359: note = tr|A0A1M6RN71|A0A1M6RN71_9ALTE Epoxyqueuosine reductase OS=Marinobacter antarcticus OX=564117 GN=queG; PE = 3 SV=1
MSTTETNTSLTPELADLPTLIRQWARELGFSDAGITTADTGEHAQHLQDWLDKGYQGEMEYMADHGDKRYTPKSLVPGTTRVISVRMDYLPAPDSPKEALTNRENAYITRYALGRDYHKLIRKRLATLAKRIDDAVSGYDYRAFVDSAPVLERALAQRAGLGWIGKNNMLIHPKAGSFFFLGEIFTSAPLPVDAAFETDHCGSCSACLELCPTDAFVGPHKLDARRCISYLTIELKGSIPEELRSLMGNRVFGCDDCQLVCPWQKFSKPAREDDFQPRHGLDNSSLAELFLWTEEQFLKRTEGSAIRRTGYEGWLRNLAVGLGNAPSTIPVIEALKKRADHPSDMVREHVQWALAQHDL

SEQ ID NO: 78131 - protein, 354 aa, unidentified
  source 1..354: note = Marinobacter confluentis
  REGION 1..354: note = tr|A0A4Z1BR56|A0A4Z1BR56_9ALTE Epoxyqueuosine reductase OS=Marinobacter confluentis OX=1697557 GN=queG; PE = 3 SV=1
MTETTDPNLSHLPDMIDKWARDLGFSDLGITYPDTGVHAQHLQQWLDDGFHGEMGYMADHGDKRYTPRSLVEGTRRVISVRLDYLPAPDSPAQVLTDPEKAYVTRYAVGRDYHKLMRKRLATLAKKIDEAVSGFEYRAFVDSAPVLERALAQRAGLGWIGKNNMVIHPKAGSFFFLGEIFTSAPLPVNEPFEKEHCGSCTACLDICPTDAFEGPHRLDARKCISYLTIELSGSIPLELREKMGNRVFGCDDCQLVCPWNKFSKPTAETDFQPRHGLDNAELATLFLWTEEEFLKRTEGSAIRRTGYQGWLRNLAVGLGNAPSTIPVIEALKQRADHPSELVREHVQWALARHGL

SEQ ID NO: 78132 - protein, 352 aa, Marinobacter daqiaonensis
  REGION 1..352: note = tr|A0A1I6HDW0|A0A1I6HDW0_9ALTE Epoxyqueuosine reductase OS=Marinobacter daqiaonensis OX=650891 GN=queG; PE = 3 SV=1
MTTALEALPEKIDQWARELGFSAVGITRPDTGVHAQRLQQWLEAGMQGQMTWMGDHGDKRYNPTSLVPGTERVISLRMDYLPAPDSPAEVLQDREKAYISRYTLGRDYHKLIRKRLSQLAKRIDEELEGHHYRAFTDSAPVMERALAQRAGLGWIGKNTMLLAPTVGSFFFLGEIFTSAPLPETAPFEKEHCGSCSACLDRCPTDAFVGPHVLDARKCISYLTIELKGSIPEELRPLMGNRVFGCDDCQLVCPWNKFSKPSAEDDFQPRHSLDNTTLAELFLWSEEEFLKRTEGSAIRRTGYEGWLRNLAVGLGNAPSTIPVIEALKARADHPSELVREHVHWALNQHNAVH

SEQ ID NO: 78133 - protein, 362 aa, Marinobacter excellens
  REGION 1..362: note = tr|A0A0P8B3K8|A0A0P8B3K8_9ALTE Epoxyqueuosine reductase OS=Marinobacter excellens HL-55 OX=1305731; GN = queG PE=3 SV=1
MTSTQNSGDTAKDHPDLHALPDQIRQWAQELGFADAGITDADTGPHAERLQQWLSAGYHGEMAYMADHGDKRYTPDSLVPGTLRVISVRLDYLSAPDNPGRVLADREAAYITRYALGRDYHKLMRKRLATLAKWIDEAVSGYDYRAFVDSAPVLERGLAQRAGLGWIGKNNMVIHPKAGSYFFLGEIFTSAPLPVDPPFESQHCGTCSACLEVCPTDAFVGAHLLDARRCISYLTIELNGPIPEELRSKMGNRVFGCDDCQLICPWNKFSKPTREADFSPRHQLDNSSLAELFLWSEQQFLTRTEGSAIRRTGYENWLRNLAVGLGNAPTTIPVTEALKQRANHPSELVREHVAWALRQHGL

SEQ ID NO: 78134 - protein, 364 aa, Marinobacter excellens
  REGION 1..364: note = tr|A0A137SF52|A0A137SF52_9ALTE Epoxyqueuosine reductase OS=Marinobacter excellens LAMA 842 OX=1306954; GN = queG PE=3 SV=1
MTSNPELRSERPEHEALHALPDQIRAWASELGFADAGITCADTGPHAERLQQWLKAGYHGDMAYMADHGDKRYTPDSLVPGTTRVISVRMDYLPAPDNPKQVLTNRETAYVTRYALGRDYHKLMRKRLATLAAKIDSAVSGYDYRAFVDSAPVLERGLAQRAGLGWIGKNNMLIHPKAGSFFFLGEIFTSAPLPVDEAFDSQHCGSCSACLEVCPTDAFVGAHLLDARRCISYLTIELKGPIPEELRSKMGNRVFGCDDCQLVCPWNKFNKPTRENDFQPRHGLDNSTLAELFLWTEDEFLKRTEGSAIRRTGYENWLRNLAVGLGNAPSTIPVIEALKQRADHSSALVREHVAWALQQHGITA

SEQ ID NO: 78135 - protein, 359 aa, Marinobacter flavimaris
  REGION 1..359: note = tr|A0A3D8H6C0|A0A3D8H6C0_9ALTE Epoxyqueuosine reductase OS=Marinobacter flavimaris OX=262076 GN=queG; PE = 3 SV=1
MSTTATCTTTHPELADLPSLIRQWAAEFGFAEVGITNANTGEHADHLKDWLAAGYQGEMDYMAHHGDKRYTPASLVPGTTRVISVRMDYLPSPDSPKEALTNREGAYVTRYALGRDYHKLIRKRLAQLAAKIDEAVSGYDYRAFVDSAPVLERALAQRAGLGWIGKNNMLIHPKAGSFFFLGEIFTSAPLPIDEPFETDHCGSCSACLDLCPTDAFVGSHKLDARRCISYLTIELKGSIPEELRPLMGNRVFGCDDCQLVCPWQKFSKPTSEKDFQPRHGLDNSSLAELFLWTEEQFLKRTEGSAIRRTGYEGWLRNLAVGLGNAPSTIPVIEALKKRADHPSEMVREHVQWALKRHGL

SEQ ID NO: 78136 - protein, 362 aa, unidentified
  source 1..362: note = Marinobacter fuscus
  REGION 1..362: note = tr|A0A2T1K796|A0A2T1K796_9ALTE Epoxyqueuosine reductase OS=Marinobacter fuscus OX=2109942 GN=queG PE=3; SV = 1
MSQPSQHSKTDTRTPSLEALPDRIRAWAKELGFADAGITRADTGPHAERLQQWLKAGYHGDMAYMADHGDKRYTPDSLVPGTTRVISVRLEYLPAPDNPKQVLTNRDQAYITRYALGRDYHKLMRKRLATLAARIDNAISGFDYRAFVDSAPVLERGLAQRAGLGWIGKNNMLIHPKAGSFFFLGEIFTNAPLPLDAPFESQHCGSCSACLEVCPTNAFVGPHLLDARRCISYLTIELKGSIPEELRPMMGNRVFGCDDCQLVCPWNKFSKPTMEDDFQPRHRLDNASLAELFLWTESEFLKRTEGSAIRRTGYENWLRNLAVGLGNAPTTIPVVEALKARAEHPSELVREHVAWALQQHGL

SEQ ID NO: 78137 - protein, 359 aa, Marinobacter gudaonensis
  REGION 1..359: note = tr|A0A1I6GKX4|A0A1I6GKX4_9ALTE Epoxyqueuosine reductase OS=Marinobacter gudaonensis OX=375760 GN=queG; PE = 3 SV=1
MSATASSNTTHPELADLPALIRQWARDLGFADVGITTPDTGEHARHLQDWLAEGYQGDMDYMGHHGDKRYTPDSLVPGTRRVISVRMDYLPAPDSPKRALTNRESAYVTRYALGRDYHKLIRKRLAQLAAKIDAAVSGFDYRAFVDSAPVLERALAQRAGLGWIGKNNMLIHPKAGSFFFLGEIFTSAPLPTDTPFETYHCGSCSACLDLCPTDAFVGPHKLDARRCISYLTIEFRGSIPEELRPLMGNRVFGCDDCQLVCPWQKFSKPTEEKDFQPRHGLDNSTLAELFLWTEEQFLKRTEGSAIRRTGYEGWLRNLAVGLGNAPSTIPVIEALKQRTDHPSELVREHVRWALKQHGL

SEQ ID NO: 78138 - protein, 359 aa, Marinobacter guineae
  REGION 1..359: note = tr|A0A2G1VK73|A0A2G1VK73_9ALTE Epoxyqueuosine reductase OS=Marinobacter guineae OX=432303 GN=queG PE=3; SV = 1
MSASSTCDKPSPELADLPALIRRWAAELGFSDVGITTPDTGEHAHHLQDWLAAGYQGEMDYMAHHGDKRYTPTSLVPGTCRVISVRMDYLPAPDNPKEALTHRDKAYVTRYALGRDYHKLIRKRLARLAEQIDAAVNGFDYRAFVDSAPVLERALAQRAGLGWIGKNNMLIHPKAGSFFFLGEIFTSAPLPIDEPFETDHCGSCSACLDLCPTDAFVGSHKLDARRCISYLTIELKGSIPEELRPLMGNRVFGCDDCQLVCPWQKFSKPTKEQDFQPRHGLDNTSLAELFLWSEEQFRKRTEGSAIRRTGYDGWLRNLAVGLGNAPSTIPVIEALKKRADHPSEMVREHVQWALRQHDL

SEQ ID NO: 78139 - protein, 362 aa, unidentified
  source 1..362: note = Marinobacter halophilus
  REGION 1..362: note = tr|A0A2T1KDR7|A0A2T1KDR7_9ALTE Epoxyqueuosine reductase OS=Marinobacter halophilus OX=1323740 GN=queG; PE = 3 SV=1
MTSTQKPDDTATETPALAALPGQIRQWAQELGFADAGITGADTGPHAERLQQWLNAGYHGEMAYMADHGGKRYTPDSLVPGTLRVISVRMDYLTSPDSPGQALADRETAYITRYALGRDYHKLMRKRLAKLAKRINEAVSGYDYRAFVDSAPVLERGLAQRAGLGWIGKNNMVIHPKAGSYFFLGEIFTSAPLPVDPPFDSQHCGSCSACLEVCPTDAFVGAHLLDARRCISYLTIELKGPIPEELRAKMGNRVFGCDDCQLVCPWNKFSKPTRETDFLPRHKLDNSALAELFLWSEQEFLERTEGSAIRRTGYENWLRNLAVGLGNAPPTIPVIEALKQRADHPSELVREHVAWALRRHGL

SEQ ID NO: 78140 - protein, 362 aa, Marinobacter hydrocarbonoclasticus
  REGION 1..362: note = tr|A0A350RTM3|A0A350RTM3_MARHY Epoxyqueuosine reductase OS=Marinobacter hydrocarbonoclasticus OX=2743; GN = queG PE=3 SV=1
MAVTPEHPASETLHTELADLPAQIRRWARELGFSDAGITQAETGPHAERLQRWLAAGYHGQMAYMADHGDKRYTPDSLVPGTTRVISVRLDYLPAPDNPKQVLTDRERAYVTRYALGRDYHKLMRKRLATLAKWIDEAVSGYDYRAFVDSAPVLERGLAQRAGLGWIGKNNMLIHPKAGSFFFLGEIFTNAPLPLDAPFDSQHCGSCAACLDVCPTDAFVGPHLLDARRCISYLTIELKGPIPEELRSQMGNRVFGCDDCQLVCPWNKFNKPTDEEDFKPRHGLDNSSLAELFLWSEQEFLKRTEGSAIRRTGYENWLRNLAVGLGNAPSTIPVVEALKARADHPSELVREHVAWALKQHGL

SEQ ID NO: 78141 - protein, 362 aa, Marinobacter hydrocarbonoclasticus
  REGION 1..362: note = tr|A1U4D1|A1U4D1_MARHV Epoxyqueuosine reductase; OS = Marinobacter hydrocarbonoclasticus (strain ATCC 700491 / DSM 11845 / VT8) OX=351348 GN=queG PE=3 SV=1
MAVTPEHPASETLHTELADLPAQIRRWARELGFSDAGITQAETGPHAERLQRWLAAGYHGQMAYMADHGDKRYTPDSLVPGTTRVISVRLDYLPAPDNPKQVLTDRERAYVTRYALGRDYHKLMRKRLATLAKWIDEAVNGYDYRAFVDSAPVLERGLAQRAGLGWIGKNNMLIHPKAGSFFFLGEIFTNAPLPLDAPFDSQHCGSCAACLDVCPTDAFVGPHLLDARRCISYLTIELKGPIPEELRSQMGNRVFGCDDCQLVCPWNKFNKPTDEEDFKPRHGLDNSSLAGLFLWTEQEFLKRTEGSAIRRTGYENWLRNLAVGLGNAPSTIPVVEALKARADHPSELVREHVAWALKQHGL

SEQ ID NO: 78142 - protein, 354 aa, Marinobacter lipolyticus
  REGION 1..354: note = tr|R8B5A6|R8B5A6_9ALTE Epoxyqueuosine reductase; OS = Marinobacter lipolyticus SM19 OX=1318628 GN=queG PE=3; SV = 1
MTAKPTTVIENLPESIRSWARELGFSDAGITLPDTGIHGERLKSWLAKGYHGEMTYMGDHGDKRYTPTSLVPGTLRVISVRLDYLASPDSPKEALTNREKAYVTRYALGRDYHKLMRKRLATLAKRIDEAVSGHDYRAFVDSAPVLERALAQRAGLGWIGKNNMVIHPKAGSFFFLGEIFTSAPLPVDEPFEADHCGSCSACLDLCPTDAFKGPHLLDARRCISYLTIELKGSIPEELRPLMGNRVFGCDDCQLVCPWNKFSKPTREPDFQPRHGLNNSELAELFMWTEEQFLKRTEGSAIRRTGYEGWLRNLAVGLGNAPSTIPVIEALKKRADYPSDLVREHVQWALRQHGL

SEQ ID NO: 78143 - protein, 359 aa, Marinobacter litoralis
  REGION 1..359: note = tr|A0A3M2RFX3|A0A3M2RFX3_9ALTE Epoxyqueuosine reductase OS=Marinobacter litoralis OX=187981 GN=queG PE=3; SV = 1
MVTSTDNTPSNASLEALPEKIRQWAKELGFADAGITYADTGPHAERLKQWLAAGYHGNMAYMADHGDKRYTPSSLVPNTQRVISVRMDYLPSPDNPKQALTNRETAYITRYALGRDYHKLMRKRLATLAKWIDEAVAGYDYRAFVDSAPVLERGLAQRAGLGWIGKNNMVIHPKAGSFFFLGEIFTSAPLPVDEPFDKQHCGSCSACLEICPTDAFVGAHLLDARKCISYLTIELKGPIPEELRSKMGNRVFGCDDCQIVCPWNKFSKPTAESDFQPRHGLNNTELAELFMWTEDEFLKRTEGSAIRRTGYENWLRNIAVGLGNAPSTIPVIEALKQRAEHPSEVVREHVVWALRQHGL

SEQ ID NO: 78144 - protein, 361 aa, Marinobacter lutaoensis
  REGION 1..361: note = tr|A0A1V2DVX2|A0A1V2DVX2_9ALTE Epoxyqueuosine reductase OS=Marinobacter lutaoensis OX=135739 GN=queG; PE = 3 SV=1
MTDRDSAPVRDSQLQELKREIRAWARELGFSDVGVTRADTGPHGERLRQWLAKGYHGEMTYMAQHGDKRYTPTSLVPGTVRVLSVRMDYLPAPDSPKQVLTNRERAYISRYTLGRDYHKLLRKRLATLARRIDEALQGFDYRAFVDSAPVLERALAQRAGLGWIGKNTMLIHPKAGSFFFLGEIFTSAPLPEDAPFERDHCGRCSACLDVCPTDAFVAPHLLDARRCISYLTIELKGPIPEALRPKLGNRVFGCDDCQLVCPWNRFSRPTAEPDFQPRHGLDNATLAELFLWSEEEFLARTEGSAIRRTGYQGWLRNLAVGLGNAPTTIPVVEALRRRADHPSELVREHVHWALRRHGLTP

SEQ ID NO: 78145 - protein, 359 aa, unidentified
  source 1..359: note = Marinobacter manganoxydans
  REGION 1..359: note = tr|G6YUK4|G6YUK4_9ALTE Epoxyqueuosine reductase; OS = Marinobacter manganoxydans MnI7-9 OX=1094979 GN=queG; PE = 3 SV=1
MSTTATCTTTHPELADLPSLIRRWAAEFGFADVGITNADTGEHADHLKDWLAAGYQGEMDYMAHHGDKRYTPASLAPGTTRVISVRMDYLPSPDSPKEALTNREGAYVTRYALGRDYHKLIRKRLAQLAAKIDEAVSGYDYRAFVDSAPVLERALAQRAGLGWIGKNNMLIHPKAGSFFFLGEIFTSAPLPIDEPFETDHCGSCSACLDLCPTDAFVGSHKLDARRCISYLTIELKGSIPEELRPLMGNRVFGCDDCQLVCPWQKFSKPTSEKDFQPRHGLDNSSLAELFLWTKEQFLKRTEGSAIRRTGYEGWLRNLAVGLGNAPSTIPVIEALKKRADHPSEMVREHVQWALKRHGL

SEQ ID NO: 78146 - protein, 361 aa, Marinobacter mobilis
  REGION 1..361: note = tr|A0A1H2T7A6|A0A1H2T7A6_9ALTE Epoxyqueuosine reductase OS=Marinobacter mobilis OX=488533 GN=queG PE=3; SV = 1
MHHSLDTLPDTIRRWAKELGFADIGITHADTGSHGDHLKRWLAEGLHGEMGYMADHGDMRYTPASLVPGTERVISVRMDYLSAPDSPRDVLANPEKAYISRYTLGRDYHKLIRKRLSTLAKRIDDAVSGFNYRAFVDSAPVLERALGTQAGLGWQGKNTMLITRQAGSFFFLGEIFTSAPLPVDTPYDKDHCGRCTACLDLCPTQAFPAPHVLDARRCISYLTIELKGAIPEELRPLMGNRVFGCDDCQLVCPWNRFAKASKEDDFKPRHHLDNTELAQLFLWNEEEFLKRTEGSAIRRTGYEGWLRNLAVGLGNAPSTIPVIEALRKRADHPSPLVREHVAWALSRHGVDPVAQPPALQS

SEQ ID NO: 78147 - protein, 357 aa, unidentified
  source 1..357: note = Marinobacter nanhaiticus
  REGION 1..357: note = tr|N6WP40|N6WP40_9ALTE Epoxyqueuosine reductase; OS = Marinobacter nanhaiticus D15-8W OX=626887 GN=queG PE=3; SV = 1
MLTDSLGANLDKLARQIPVWAEELGFQATGITEAETGRHGARLQEWLDSGMNGEMNYMADHGSKRYRPDELLPGTRRVISVRMDYMPSPDSPARTLNDPEKAYISRYTLGRDYHKLVRKRLAQLAKRIDDALEGHNHRAFVDSAPVLERALAQRAGLGWFGKNTMLIHPKAGSFFFLGEIFTSAPLPVSEPFETEHCGSCSACLDVCPTDAFDGPHRLDARRCISYLTIELKGSIPEELRSKMGNRVFGCDDCQLVCPWNKFSRPTDKDDFQARHNLDNSELAELFLWTEAEFLKRTEGSAIRRTGYEGWLRNLAVGLGNAPSTIPVIEALKKRADHPSELVREHVQWALRRHGITN

SEQ ID NO: 78148 - protein, 360 aa, unidentified
  source 1..360: note = Marinobacter nitratireducens
  REGION 1..360: note = tr|A0A072N1I7|A0A072N1I7_9ALTE Epoxyqueuosine reductase OS=Marinobacter nitratireducens OX=1137280; GN = queG PE=3 SV=1
MTAPSNTTLPDQRLEKLTAEIRTWARELGFSDIGITLPDTGVHARRLQDWLSKGYHGDMEYMGHHGDKRYTPTSLVPGTARVISVRMDYLPAPDSPKQALTNRETAYVTRYALGRDYHKLIRKRLATLASRIDEAVSGFDYRAFVDSAPVLERALAQRAGLGWIGKNNMLIHPKAGSFFFLGEIFTSAPLPIDTPFDTDHCGSCSACLDLCPTDAFVGPHLLDARRCISYLTIESKGTIPEELRPLMGNRVFGCDDCQLVCPWQKFSKPTRETDFQPRHRLENSSLAELFLWTEEQFLKRTEGSAIRRTGYEGWLRNLAVGLGNAPSTIPVIEALKKRADHPSEMVREHVLWALKRHGIN

SEQ ID NO: 78149 - protein, 361 aa, Marinobacter pelagius
  REGION 1..361: note = tr|A0A1I4URJ4|A0A1I4URJ4_9ALTE Epoxyqueuosine reductase OS=Marinobacter pelagius OX=379482 GN=queG PE=3; SV = 1
MTKPQKTPPVPPELDDLPGKIRQWARELGFADAGITLPETGPHADRLQAWLAEGYQGEMDYMGHHGDKRYTPTSLVPGTARIISVRLDYLPAPDNPKQALTDRGTAYVTRYALGRDYHKLMRKRLATLAKWIDEAVSGFEYRAFVDSAPVLERALAQRAGLGWIGKNNMVIHPKAGSFFFLGEIFTSAPLPVDPPFESEHCGSCSACLEVCPTDAFVGPHLLDARRCISYLTIELKGSIPEELRPKMGNRVFGCDDCQLVCPWNKFSKPTAEQDFQPRHGLDNSSLAELFLWTEEQFLKRTEGSAIRRTGYEGWLRNLAVGLGNAPTTIPVVEALKQRADHPSEMVREHVHWALRRHGLTP

SEQ ID NO: 78150 - protein, 361 aa, Marinobacter pelagius
  REGION 1..361: note = tr|A0A366GMR3|A0A366GMR3_9ALTE Epoxyqueuosine reductase OS=Marinobacter pelagius OX=379482 GN=queG PE=3; SV = 1
MTEPKETPPAPPELDDLPGKIRQWARELGFADAGITLPETGPHADRLQAWLAEGYQGEMEYMGHHGDKRYTPTSLVHGTARIISVRMDYLPAPDNPKQALTDRETAYVTRYALGRDYHKLMRKRLATLAKWIDEAVSGFEYRAFVDSAPVLERALAQRAGLGWIGKNNMVIHPKAGSFFFLGEIFTSAPLPVDPPFETEHCGSCSACLEVCPTDAFVGPHLLDARRCISYLTIELKGSIPEELRPKMGNRVFGCDDCQLVCPWNKFSKPTAEQDFQPRHGLDNSSLAELFLWTEEQFLKRTEGSAIRRTGYEGWLRNLAVGLGNAPTTIPVVEALKQRADHPSEMVREHVHWALRRHGLTA

SEQ ID NO: 78151 - protein, 362 aa, unidentified
  source 1..362: note = Marinobacter persicus
  REGION 1..362: note = tr|A0A1I3PU93|A0A1I3PU93_9ALTE Epoxyqueuosine reductase OS=Marinobacter persicus OX=930118 GN=queG PE=3; SV = 1
MASNTNTTDKPGTDPSLNALPEHIRQWGRELGFADIGITTAQTGPHAERLQRWLAAGYHGQMGYMADHGDKRYTPDSLVPGTTRVISVRLDYLPAPDNPKEVLTNREKAYVTRYALGRDYHKLMRKRLATLAKWIDEAVSGYDYRAFVDSAPVLERGLAQRAGLGWIGKNNMLIHPKAGSYFFLGEIFTSAPLPVDEPFEKQHCGSCSACLEVCPTDAFVGAHLLDARRCISYLTIELKGPIPEELRAKMGNRVFGCDDCQLVCPWNKFSKATAENDFQPRHGLENSELAELFLWSEEEFLKRTEGSAIRRTGYENWLRNLAVGLGNAPSTIPVIEALKQRADHPSELVREHVAWALRRHGL

SEQ ID NO: 78152 - protein, 359 aa, unidentified
  source 1..359: note = Marinobacter persicus
  REGION 1..359: note = tr|A0A2S6G9V8|A0A2S6G9V8_9ALTE Epoxyqueuosine reductase OS=Marinobacter persicus OX=930118 GN=queG PE=3; SV = 1
MATSPEDNRTHTPLADMPGRIRQWAKDLGFADAGITLADTGPHAERLQQWLKAGYHGQMGYMADHGDKRYTPDSLVPGTARVISVRLDYLPAPDNPKHTLQNREKAYITRYALGRDYHKLMRKRLATLATWIDEAVSGYDYRAFVDSAPVLERGLAQRAGLGWIGKNNMLIHPKAGSYFFLGEIFTSAPLPVDEPFEKQHCGSCSACLEVCPTDAFVGAHLLDARRCISYLTIELKGPIPEELRAKMGNRVFGCDDCQLVCPWNKFSKATAENDFQPRHGLDNSELAELFLWTEAQFLKRTEGSAIRRTGYENWLRNLAVGLGNAPSTIPVIEALKQRADHPSELVREHVAWALRRHGQ

SEQ ID NO: 78153 - protein, 368 aa, Marinobacter psychrophilus
  REGION 1..368: note = tr|A0A0H4I2J4|A0A0H4I2J4_9ALTE Epoxyqueuosine reductase OS=Marinobacter psychrophilus OX=330734 GN=queG; PE = 3 SV=1
MTASLATSTTCAKNSDQTANLQALVQQIRDWAQELGFADLGITSADTGEHAQRLQHWLEQGYHGTMDYMANHGDKRYTPASLVPGTARVISVRMDYLTLPDNPEQALRNRENAYISRYTLGRDYHKLMRKRLAQLAKRIDSALEGHQHRAFVDSAPVLERALAQRAGLGWIGKNNMVIHPKAGSFFFLGEIYTSAPLPIDAPFTTDHCGSCSACLQLCPTNAFVDAHMLDARRCISYLTIELKESIPEELRPLMGNRVFGCDDCQLVCPWNKFSKHSEEDDFKPRHGLDNTSLAALMMWSEEQFLQRTEGSAIRRTGYHGWLRNLAVGLGNAPTTIPVLEALRARQDYPSEMVREHVEWALAQHGLAL

SEQ ID NO: 78154 - protein, 361 aa, unidentified
  source 1..361: note = Marinobacter salarius
  REGION 1..361: note = tr|A0A1W6K7M5|A0A1W6K7M5_9ALTE Epoxyqueuosine reductase OS=Marinobacter salarius OX=1420917 GN=queG PE=3; SV = 1
MPLDWHSMTESIDQNLEHLPEHIQSWARELGFSDVGITLPDTGAHGARLKDWLRKGFHGEMSYMEDHGDKRYTPTSLVEGTQRVISVRLDYLPAPDNPGRILTNPEKAYITRYATGRDYHKLMRKRLATLAKRIDEAVSGYDYRAFVDSAPVLERALAQRAGLGWIGKNNMLIHPKAGSFFFLGEIFTSAPLPLDEPFEKEHCGSCAACLDICPTDAFEGPHKLDARKCISYLTIELKGSIPEELRPKMGNRVFGCDDCQLVCPWNKFSKPTAEKDFQPRHGLDNSELATLFLWTEEQFLKRTEGSAIRRTGYEGWLRNLAVGLGNAPPTIPVIEALKQRADFPSEMVREHVHWALRRHGL

SEQ ID NO: 78155 - protein, 354 aa, unidentified
  source 1..354: note = Marinobacter salarius
  REGION 1..354: note = tr|W5YMU6|W5YMU6_9ALTE Epoxyqueuosine reductase; OS = Marinobacter salarius OX=1420917 GN=queG PE=3 SV=1
MTESIDQNLEHLPEHIQSWARELGFSDVGITLPDTGAHGARLKDWLRKGFHGEMSYMEDHGDKRYTPTSLVEGTQRVISVRLDYLPAPDNPGRILTNPEKAYITRYATGRDYHKLMRKRLATLAKRIDEAVSGYDYRAFVDSAPVLERALAQRAGLGWIGKNNMLIHPKAGSFFFLGEIFTSAPLPLDEPFEKEHCGSCAACLDICPTDAFEGPHKLDARKCISYLTIELKGSIPEELRPKMGNRVFGCDDCQLVCPWNKFSKPTAEKDFQPRHGLDNSELATLFLWTEEQFLKRTEGSAIRRTGYERWLRNLAVGLGNAPSTIPVIEALKQRADFPSEMVREHVHWALRRHGL

SEQ ID NO: 78156 - protein, 359 aa, unidentified
  source 1..359: note = Marinobacter salinus
  REGION 1..359: note = tr|A0A1D9GHQ7|A0A1D9GHQ7_9ALTE Epoxyqueuosine reductase OS=Marinobacter salinus OX=1874317 GN=queG PE=3; SV = 1
MSIATNNPDTAQALAELTESIRRWAEELGFSDLGITLPETGEHGQHLQDWLEQGYQGEMAYMGHHGDKRFTPRSLVPGTDRIISVRMDYLPAPDSPKEALTNRTKAYITRYALGRDYHKLIRKRLATLAKRIDDAVSGYDYRAFVDSAPVLERALAQRAGLGWIGKNNMLIHPKAGSFFFLGEIFTSAPLPLSEPFDTDHCGSCTSCLDLCPTDAFVGPHKLDARRCISYLTIELNGSIPEELRPLMGNRVFGCDDCQLVCPWQKFSKPTIENDFQPRHGLDNSSLAELFLWTEEQFLKRTEGSAIRRTGYEGWLRNLAVGLGNAPSTIPVIEALKKRTDHPGDMVREHVQWALRQHGL

SEQ ID NO: 78157 - protein, 372 aa, Marinobacter santoriniensis
  REGION 1..372: note = tr|M7CSC1|M7CSC1_9ALTE Epoxyqueuosine reductase; OS = Marinobacter santoriniensis NKSG1 OX=1288826 GN=queG; PE = 3 SV=1
MIFSPTPVHCSMNDLTSEQPPTPPLADLPGTIRQWARELGFADAGITLPDTGEHARYLKSWLASGYQGEMEYMGHHGNKRYTPTALVPGTARVISVRMDYLPSPDNPKQALTDRETAYITRYALGRDYHKLMRKRLATLAKWIDDAVTGHDHRAFVDSAPVLERALAQRAGLGWIGKNNMLIHPKAGSFFFLGEIFTSAPLPVDPPFESDHCGSCSACLEVCPTDAFVGPHLLDARRCISYLTIELKGSIPEELRPLMGNRVFGCDDCQLVCPWNKFSKPTDEQDFQPRHGLDNASLAELFLWSETEFLKRTEGSAIRRTGYEGWLRNLAVGLGNAPSTISVIEALKKRADHPSEVVREHVQWALARHGIKP

SEQ ID NO: 78158 - protein, 351 aa, Marinobacter segnicrescens
  REGION 1..351: note = tr|A0A1I0B0L3|A0A1I0B0L3_9ALTE Epoxyqueuosine reductase OS=Marinobacter segnicrescens OX=430453 GN=queG; PE = 3 SV=1
MTSALEDFPARIREWARELGFSDIGITRPETGVHAQRLQQWLEQGLQGEMEWMGHHGDKRYTPTALVPGTERVISVRMDYRNAPDNPQQVLQDPEKAYVTRYALGRDYHKLIRKRLTHLAKRIDSELHGYDYRAFTDSAPVMEKALAQRAGLGWIGKNTLVLNPKAGSYFFLGEIFTSAPLPVTPAFEKDHCGSCTACLDTCPTNAFAGPYVLDARRCISYLTIELKGAIPEDLRPLMGNRVFGCDDCQLACPWNRFSKPTREEDFSPRHNLDNSTLAELFRWTEDEFLKRTEGSAIRRTGYEGWLRNLAVGLGNAPSTIPVIEALKSRVDHPSELVREHVHWALARHGIE

SEQ ID NO: 78159 - protein, 364 aa, unidentified
  source 1..364: note = Marinobacter shengliensis
  REGION 1..364: note = tr|A0A2T1KRQ2|A0A2T1KRQ2_9ALTE Epoxyqueuosine reductase OS=Marinobacter shengliensis OX=1389223 GN=queG; PE = 3 SV=1
MTSNPELRSERPEHEALHALPDQIRAWASELGFADAGITCADTGPHAERLQQWLKAGYHGDMAYMADHGDKRYTPDSLVPGTTRVISVRMDYLPAPDNPKQVLTNRETAYVTRYALGRDYHKLMRKRLATLAAKIDSAVSGYDYRAFVDSAPVLERGLAQRAGLGWIGKNNMLIHPKAGSFFFLGEIFTSAPLPVDEAFDSQHCGSCSACLEVCPTDAFVGAHLLDARRCISYLTIELKGPIPEELRSKMGNRVFGCDDCQLVCPWNKFNKPTRENDFQPRHGLDNSSLAELFLWTEDEFLKRTEGSAIRRTGYENWLRNLAVGLGNAPSTIPVIEALKQRADHPSALVREHVAWALQQHGITA

SEQ ID NO: 78160 - protein, 359 aa, unidentified
  source 1..359: note = Marinobacter similis
  REGION 1..359: note = tr|W5YPN4|W5YPN4_9ALTE Epoxyqueuosine reductase; OS = Marinobacter similis OX=1420916 GN=queG PE=3 SV=1
MSAASDQPSTTEDFSDLVTRIRGWARELGFADLGITLPDTGEHGQHLQDWLAEGYHGEMEYMGYHGDKRYTPRSLVPGTARVISVRMDYLPSPDSPKEALTNREGAYVTRYALGRDYHKLIRKRLATLANRIDEALSGYEYRAFVDSAPVLERALAQRAGLGWIGKNNMLIHPKAGSFFFLGEIFTSAPLPVDAPFETDHCGSCTACLDLCPTDAFVGPHQLDARRCISYLTIELRGSIPEELRPLMGNRVFGCDDCQLVCPWQKFSKPTGEDDFQPRHGLDNSSLAELFLWTEEQFLKRTEGSAIRRTGYSGWLRNLAVGLGNAPSTIPVIEALKQRADHPDDMVREHVQWALKQHGL

SEQ ID NO: 78161 - protein, 359 aa, Marinobacter sp.; identical to SEQ ID NO: 78145
  REGION 1..359: note = tr|A0A2D7WX63|A0A2D7WX63_9ALTE Epoxyqueuosine reductase OS=Marinobacter sp. OX=50741 GN=queG PE=3 SV=1

SEQ ID NO: 78162 - protein, 360 aa, Marinobacter sp.
  REGION 1..360: note = tr|A0A5B0VQQ3|A0A5B0VQQ3_9ALTE Epoxyqueuosine reductase OS=Marinobacter sp. ZYF650 OX=2604327 GN=queG; PE = 3 SV=1
MTTTSDATNTADALTSVASDIRAWATELGFSDAGITHPDTGIHGQHLQDWLAAGYQGEMEYMGHHGDKRYTPKSLVPGTARVISVRMDYMPTPDSPKEALTNRENAYVTRYALGRDYHKLIRKRLATLAKRIDDAVSGYDYRAFVDSAPVLERALAQRAGLGWIGKNNMLIHPKSGSFFFLGEIFTSAPLPLDAPFETDHCGSCSACLDLCPTDAFVGPHKLDARRCISYLTIELRGSIPEELRAPMGNRVFGCDDCQLVCPWQKFSKPTKEDDFHPRHGLDNTSLAELFMWTEEQFLKRTEGSAIRRTGYEGWLRNIAVGLGNAPSTIPVIEALRKRADHPSEMVREHVQWALRRHGIQ

SEQ ID NO: 78163 - protein, 359 aa, unidentified
  source 1..359: note = Marinobacter subterrani
  REGION 1..359: note = tr|A0A0J7JCZ0|A0A0J7JCZ0_9ALTE Epoxyqueuosine reductase OS=Marinobacter subterrani OX=1658765 GN=queG; PE = 3 SV=1
MNATSTCDKATTELADLPALIRQWASDYGFADVGITMPDTGEHARHLQDWLAAGYQGEMEYMDHHGDKRYTPASLVPGTARVISVRMDYLPSPDSPKEALTDREGAYVTRYALGRDYHKLIRKRLAQLAAKIDEAVSGYSHRAFVDSAPVLERALAQRAGLGWIGKNNMLIHPKAGSFFFLGEIFTSAPLPVDEPFATDHCGSCSACLEMCPTDAFVGPHKLDARRCISYLTIELKGSIPEELRPLMGNRVFGCDDCQLVCPWQKFSKPAEEKDFQPRHGLDNSSLAELFLWTEEQFLKRTEGSAIRRTGYEGWLRNLAVGLGNAPSTIPVIEALKKRTDHPSEMVREHVQWALTRHGL

SEQ ID NO: 78164 - protein, 364 aa, Marinobacter vinifirmus
  REGION 1..364: note = tr|A0A558BGA2|A0A558BGA2_9ALTE Epoxyqueuosine reductase OS=Marinobacter vinifirmus OX=355591 GN=queG; PE = 3 SV=1
MTSQPETTENHPSGTELTTLPGQIRQWAKDLGFADAGITLADTGPHAERLQRWLAAGYHGDMAYMADHGDKRYTPDSLVPGTLRVISVRMDYLPSPDNPKQALTNRETAYITRYALGRDYHKLMRKRLATLAKQIDEAVSGYDYRAFVDSAPVLERGLAQRAGLGWIGKNNMLIHPKSGSYFFLGEIFTSAPLPVDEPFEKQHCGSCSACLEVCPTDAFVGAHLLDARRCISYLTIELKGPIPEELRSKMGNRVFGCDDCQLVCPWNKFSKPTREDDFQPRHGLDNTNLAELFLWTEEQFLKNTEGSAIRRTGYENWLRNLAVGLGNAPSTIPVIEALKQRADHPSELVREHVTWALRRHGLTA

SEQ ID NO: 78165 - protein, 361 aa, Marinobacter zhejiangensis
  REGION 1..361: note = tr|A0A1I4QHW8|A0A1I4QHW8_9ALTE Epoxyqueuosine reductase OS=Marinobacter zhejiangensis OX=488535 GN=queG; PE = 3 SV=1
MHQSLDTLPDIIRRWAQELGFADVGISTPDTGDHGSHLKRWLANGLHGEMSYMADHGNKRFTPTELVPGTQRVISVRMDYLTTPDSPGDVLSNPEKAYISRYTLGRDYHKLMRKRLATLAKRIDDAVSGFDYRAFVDSAPVLERALARQAGLGWQGKNTMLLTRKAGSFFFLGEIFTSAPLPLDTPYDKDHCGRCTSCLDLCPTQAFPAPHVLDARRCISYLTIELKGAIPEELRPLMGNRVFGCDDCQLVCPWNRFSKPSAEEDFKPRHHLDNTELAQLFRWTEEEFLTRTEGSAIRRTGYEGWLRNLAVGLGNAPSTIPVIEALKYRTNHPSPLVREHVLWALQQHGVDTDATPPATQS

SEQ ID NO: 78166 - protein, 386 aa, unidentified
  source 1..386: note = Marinobacterium aestuarii
  REGION 1..386: note = tr|A0A1A9F2K6|A0A1A9F2K6_9GAMM Epoxyqueuosine reductase OS=Marinobacterium aestuarii OX=1821621 GN=queG; PE = 3 SV=1
MNRLSPEQLSQLAAQIKNWAQELGFQQCGITGTDLSAEGPKLQAWLDQGYQGDMGYLENHFEKRLDPSLLVPGTQRIISVRMDYLPPDTQTLKILKQPDKAYIARYTLGRDYHKTLRKRLTRLGQRIEEACETLGYRAFVDSAPVLERPLAREAGIGWQGKHSLILNREAGSWFLLGELFIDLPLPVDAPYTEDHCGRCSACMDVCPTQAFPAPHVLDARRCISYLTIEYKGSIDPELRPLMGNRIFGCDDCQLICPWNRFASHSTETDFKPRHQLDDIDLTELFGWDEAQFLHKTEGSAIRRTGYQGWLRNIAIALGNSNGGAEVIAALQARLSDPSPLVQEHVQWALAQLQERAATHTTEVARAVGMHPAHPILDHPRARKLAD

SEQ ID NO: 78167 - protein, 376 aa, Marinobacterium georgiense
  REGION 1..376: note = tr|A0A1H4GTP5|A0A1H4GTP5_9GAMM Epoxyqueuosine reductase OS=Marinobacterium georgiense DSM 11526; OX = 1122198 GN=queG PE=3 SV=1
MSDYTTAQLQQLSLALKEKARELGFHDCAITLPDASAESESYTRWLEAGYQADMAYLNENLDKRFDPTLLLPGTRRIIMLRMNYLPTEAPITGVLRNPDKAYIARYTLGRDYHKLMRKRLKQLGQWFNSQIEGIEVQFRPFVDSAPVLERPLARNAGLGWIGKHTLLLNRHAGSWFLLGELFIDLPLPVDAPETEQHCGRCRACLDVCPTNAFPEPYVLDARRCISYLTIEHKGSIPHELRPLMGNRIFGCDDCQLICPWNRFARRSSEPDFQPRHGLDTASLLELFLWDEATFLKRTEGSAIRRTGYEGWQRNLAVALGNSNGSDAVMEALRNRRATASEMLIEHIDWALQQLSERHAPRSLPLLDHPGAGRLPE

SEQ ID NO: 78168 - protein, 376 aa, Marinobacterium halophilum
  REGION 1..376: note = tr|A0A2P8F3P4|A0A2P8F3P4_9GAMM Epoxyqueuosine reductase OS=Marinobacterium halophilum OX=267374 GN=queG; PE = 3 SV=1
MSQFSTEQLDALARALKLQARTLGFQDCAITLPDAHQEAEAIQHWLDKGYQGSMDYLTQNVEKRLDPTLLVPGTQRIIMLRMDYLPAGAPITGILRNPDKAYVARYTLGRDYHKLIRKRLKQLGQWLDAQVEGAEVRFRPFVDSAPVLERPLARNAGLGWIGKHTLLLNRQAGSWFLLGELFIDLPLPIDPPETESHCGRCSACIDICPTQAFPEPGVLDARRCISYLTIEHRGSIPPELRPLMGNRIFGCDDCQLICPWNRFAKRSDEPDFQPRHGIDQAGLLELFAWDEETFLKRTEGSAIRRTGYEGWQRNLAVALGNSRGGDAVTKALQGRREQSSALVQEHIDWALQQLRNAAGPSPLPILDHPGARRLPE

SEQ ID NO: 78169 - protein, 382 aa, Marinobacterium lutimaris
  REGION 1..382: note = tr|A0A1H6DMS9|A0A1H6DMS9_9GAMM Epoxyqueuosine reductase OS=Marinobacterium lutimaris OX=568106 GN=queG; PE = 3 SV=1
MEQPSANANQPEPLESLAQRLKQRARELGFQQCAITLPDASAEAEHLQQWLDTGYQGEMGYLEQHFDKRIDPKLLVPGCERIVMVRMDYLPPETTTLKTLANPDKAYIARYTLGRDYHKLIRKRLKQLGQWLAAEAGDEAAVQFRPFVDSAPVLERPLARNAGIGWIGKHTLLLNRQAGSLFFLGELFTNLPLPIDAPETESHCGRCSACLDICPTKAFPEAGVLDARRCISYLTIEYSGSIPEELRPLMGNRIFGCDDCQLICPWNRFAKRTPEEDFKPRHSLDDVDLLTLFNWDEETFLKNTEGSAIRRTGFEGWQRNLAVALGNSRGGDKVEEALRSRRESVSALVQEHIDWALERLASKAGPVPLPIQQHPGARRIKD

SEQ ID NO: 78170 - protein, 382 aa, unidentified
  source 1..382: note = Marinobacterium mangrovicola
  REGION 1..382: note = tr|A0A4R1GC89|A0A4R1GC89_9GAMM Epoxyqueuosine reductase OS=Marinobacterium mangrovicola OX=1476959; GN = queG PE=3 SV=1
MEQPIANANQPEPLSSLAVRLKQRARELGFQQCAITLPDASAEAEHLQQWLDAGYQGEMGYLEQHFDKRIDPKLLVPGCERIVMVRMDYLPPETTTLKTLANPDKAYIARYTLGRDYHKLIRKRLKQLGQWLAAEAGDEAAVQFRPFVDSAPILERPLARNAGIGWIGKHTLLLNRQAGSLFFLGELFTNLPLPIDAPETESHCGRCNACLDICPTNAFPEAGVLDARRCISYLTIEYDGSIPEELRPLMGNRIFGCDDCQLICPWNRFAKRTAEEDFKPRHNLDDVDLLTLFNWDEETFLKNTEGSAIRRTGFEGWQRNLAVALGNSRGGERVESALRQRRGSASALVQEHIDWALERLASRAGPAPLPIQQHPGARRIKD

SEQ ID NO: 78171 - protein, 382 aa, Marinobacterium sp.
  REGION 1..382: note = tr|A0A081G240|A0A081G240_9GAMM Epoxyqueuosine reductase OS=Marinobacterium sp. AK27 OX=1232683 GN=queG; PE = 3 SV=1
MANTNPNPLSDARLRQLADALKQRARELGFQQCAVTLPDASMEAETLDRWLAQGYNGEMHYLEQHREKRLNPRLLVPGSERIVMVRMDYLPPETTTLRTLTNPDKAYIARYTLGRDYHKLIRKRLKQLGQWLQQEAGSGADVQFRPFVDSAPVLERPLARNAGMGWIGKHTLLLNRSAGSLFFLGELFTNIPLPIDAPETESHCGRCTACLDVCPTQAFPEPGVLDARRCISYLTIEYSGSIPLELRPMMGNRIFGCDDCQLICPWNRFARRTPEDDFKPRHALDNADLLTLFNWDEETFLRKTEGSAIRRTGFEGWQRNLAVALGNSAGGDKVIAALKAKRDHASPLVQEHIDWAVDNLGRAAQPQPLPILAHRGARRLND

SEQ ID NO: 78172 - protein, 383 aa, Marinobacterium stanieri
  REGION 1..383: note = tr|A0A1N6TUG8|A0A1N6TUG8_9GAMM Epoxyqueuosine reductase OS=Marinobacterium stanieri OX=49186 GN=queG; PE = 3 SV=1
MPEFSATQLEHLKAELKQEALRLGFADCAVTLPDASAEAEHLQHWLEQGYQGSMDYLNQNIDKRLDPTLLVPGTQRIIMLRMNCLPEGAPVTGVLRNPDKAYIARYTLGRDYHKTMRKRLKQLGQWLEKQLGDREVRFRPFVDSAPVLERPLARNAGLGWIGKHTLLLNRSAGSWFLLGELFIDLPLPIDPPETESHCGRCSACIDICPTKAFPEPGVLDARRCISYLTIESKAAIPPELRPLMGNRIFGCDDCQLICPWNRFAKRSDETDFQPRHGLEQADLLELFLWDEPTFLKRTEGSAIRRTGYEGLQRNLAVALGNSRGGKAIIDALRARRTDASELVREHIDWALAQLAERQEASSDKEPSAALPILAHPGARRMPK

SEQ ID NO: 78173 - protein, 381 aa, Marinococcus halophilus
  REGION 1..381: note = tr|A0A510Y6A8|A0A510Y6A8_MARHA Epoxyqueuosine reductase OS=Marinococcus halophilus OX=1371 GN=queG PE=3; SV = 1
MRTAQELKEEIQAFAESIGIDKVGFASASPFVTLKARLKEQQRLNYQSGFEEDDIDKRTHPELLLTEATTIISIALAYPTKLPEAPKNRPGARRGQFCRASWGKDYHDVLRDKLNQLEAFIQETVPGAECKSMVDTGELSDRAVAERAGIGWSGKNCAIITPEFGSYVYLGEMITTLYLPEDTPLIDQCGTCNRCVDLCPTDALIQGGQLDAKKCIAYLTQTKEALPERYRHKLGNRLYGCDTCQQVCPENKGVDFHNHPEFEPEPEVVKPLLEPLLTISNREFKEKFGYIAGSWRGKKPIQRNALIALGHMKEKSSIPTIVQLLCNDPRPVIRGACAWALGEMPTQEGVEALHHADSREKDEEVLEEISKALDKTSPERV

SEQ ID NO: 78174 - protein, 381 aa, Marinococcus luteus
  REGION 1..381: note = tr|A0A1H2SDY2|A0A1H2SDY2_9BACI Epoxyqueuosine reductase OS=Marinococcus luteus OX=1122204 GN=queG PE=3; SV = 1
MRTAQELKEEIQGFAESIGIDKVGFASASPFVTLKARLKEQQRLNYQSGFEEDDIEKRTHPELLLTEATTIISIALAYPTKLPEAPKNRPGARRGQFCRASWGKDYHDVLRDKLNQLEAFIQETVPGAECKSMVDTGELSDRAVAERAGIGWSGKNCAIITPEFGSYVYLGEMITTLYLPEDTPLMDQCGTCNRCVDLCPTDALIQGGQLDAKKCIAYLTQTKEALPERYRHKLGNRLYGCDTCQQVCPENKGVDFHNHPEFEPDPEVVKPLLEPLLTISNREFKEKFGYIAGSWRGKKPIQRNALIALGHMKEKSSIPTIIQLLRNDPRPVIRGACAWALGEMPTQEGMEALHSANGREEEAEVLEEITKALDKTSPERV

SEQ ID NO: 78175 - protein, 354 aa, Marinomonas alcarazii
  REGION 1..354: note = tr|A0A318UTE8|A0A318UTE8_9GAMM Epoxyqueuosine reductase OS=Marinomonas alcarazii OX=491949 GN=queG PE=3; SV = 1
MILSSPEELNQLADDIKSWAIEFGFAEARIVEPDLAQHKDDYNKWLDNGYQAGMDYLANHGDMRFYPEQLHPGTRRVISLRMHYLPQSVETVERLKTKDKAYIARYALGRDYHKLIRKRLTQLAKKIEQTVGDHGYRAFVDSAPILERQIAEQAGMGWIGKNTLLLTPKAGSWFLLGEIFTNLPLPVDAPTATRHCGSCTACLTQCPTDAFVEPWVLDAGKCISYLTIEHKGSIPEELRSKMGNRIFGCDDCQLVCPWTKFAKYTAEDDFQPRHSLDSADLVELFEWDEETFLKNTEGSPIRRTGFENWRRNIAVALGNAPTSPTTIQALENALPHSSELVKEHIVWALKQHNH

SEQ ID NO: 78176 - protein, 379 aa, Marinomonas aquimarina
  REGION 1..379: note = tr|A0A1A8SYP9|A0A1A8SYP9_9GAMM Epoxyqueuosine reductase OS=Marinomonas aquimarina OX=295068 GN=queG PE=3; SV = 1
MSHSYFTFLKGRIALHLLSNDFIVSSLSDSELHQLAQDIKQWAHEFGFSECRIVDPSLEQYREEFQAWLEQGYHGEMDYLANHSDLRFAPANLHEGTQRVLSLSMAYLPESVETIKRLQTKDQGYIARYALGRDYHKLIRKRLTQLAKRIEQAIGEHGYRAFVDSAPILERQIAEQAGMGWIGKNTLLLSPKAGSWFLLGEIFTNLPLPVDQATQKRHCGSCSACLDKCPTDAFVEPWVLDASKCISYLTIEYDGIIPEELRAKMGNRIFGCDDCQLVCPWTKFAKYTQEPDFQPRHNLDSEDLLTLFSWDEATFLKNTEGSPIRRTGYENWRRNIAVALGNAPTRVDLIEVLEQARLEASPKLLVHLEWALKQHQAPQ

SEQ ID NO: 78177 - protein, 358 aa, Marinomonas aquiplantarum
  REGION 1..358: note = tr|A0A366D4X2|A0A366D4X2_9GAMM Epoxyqueuosine reductase OS=Marinomonas aquiplantarum OX=491951 GN=queG; PE = 3 SV=1
MLPSSLSTPDDLAKLVSDIKTWATEFGFADARIVDPDLGQHKDEFNNWLDKGYHAGMDYLANHGDMRFYPEQLHPGTRRVISLRMHYLPQSVETVKRLQTKDKAYIARYALGRDYHKLIRKRLTQLAKKIQEHVGDHGYRAFVDSAPVLERQIAEQAGMGWIGKNTLLLTPKAGSWFLLGEIFTNLPLPVDKPTASRHCGSCDACLTQCPTDAFVEPWVLDAGKCISYLTIEHKGPIPEALRSKMGNRIFGCDDCQLVCPWTKFAKHTEEEDFQPRHNLDSADLIDLFLWDEETFLKNTEGSPIRRTGYENWQRNIAVALGNAPTTEKTIKALQQALEHSTPLVQEHIQWALTQHQSQ

SEQ ID NO: 78178 - protein, 360 aa, Marinomonas balearica
  REGION 1..360: note = tr|A0A4R6M520|A0A4R6M520_9GAMM Epoxyqueuosine reductase OS=Marinomonas balearica OX=491947 GN=queG PE=3; SV = 1
MLSSNLNSPRDLADLAQQIKDWAFELGFAEAKIVQPSLEQYKAQYQQWIDRGYHGSMGYLADHGDLRFKPEELHEGTQRVISLRMHYLPESVETVKRLKTPTKAYVARYALGRDYHKIIRKRLTTLAKRIEEVVGDHGYRAFVDSAPILERQIAEQAGMGWIGKNTLLLSPKAGSWFLLGELFTNLPLPVDAPSKSRHCGSCDACIQKCPTDAFVEPWVLDASKCISYLTIEHKGSIPVELRSKMGNRIFGCDDCQLVCPWTKFSKNTQENDFQPRHQLDQADLMDLFLWSEDEFLDKTAGSPIRRTGYESWLRNVAIALGNAPYDEKIIEALKIKQLSCTELVREHVEWALERQLNNPQ

SEQ ID NO: 78179 - protein, 361 aa, Marinomonas communis
  REGION 1..361: note = tr|A0A4R6X7G2|A0A4R6X7G2_9GAMM Epoxyqueuosine reductase OS=Marinomonas communis OX=28254 GN=queG PE=3; SV = 1
MSSLSELELQQLAQDIKSWALEFGFSECRIVDPELEQYREGFQAWLDKGYHGEMEYLANHSDLRFSPASLHSGTQRVISLNMAYLPESVETVKRLQTKDKGYVARYALGRDYHKLIRKRLTQLAKKIELAVGEHGYRAFVDSAPILERQIAEQAGMGWIGKNTLLLSPKAGSWFLLGEVFTNLPLPVDKPTAKRHCGSCSACLDKCPTNAFVEPWVLDASKCISYLTIEYDGIIPEELRSKMGNRIFGCDDCQLVCPWTKFAKHTQEQDFQPRHNLDNEDLLTLFKWDEDTFLKNTEGSPIRRTGYENWRRNIAVALGNAPTRIDIIEALEDAKSTASEKLRIHLDWALSQHQTPQQTPPL

SEQ ID NO: 78180 - protein, 357 aa, Marinomonas foliarum
  REGION 1..357: note = tr|A0A368ZMX7|A0A368ZMX7_9GAMM Epoxyqueuosine reductase OS=Marinomonas foliarum OX=491950 GN=queG PE=3; SV = 1
MLPSFLSSPKELNQLADDIKSWATEFGFADARIVEPDLAQHKDDFNKWLDNGYHAGMDYLANHGDIRFYPEQLHPGTRRVISLRMHYLPQSVETVKRLQTKDKAYIARYALGRDYHKLIRKRLTQLAKKIEQQVGDHGYRAFVDSAPILERQIAEQAGMGWIGKNTLLLTPKAGSWFLLGEIFTNLPLPVDKPTEARHCGSCTACLTQCPTDAFVEPWVLDAGKCISYLTIEHKGSIPEELRGKMGNRIFGCDDCQLVCPWTKFAKYTEEDDFQPRHNLDSADLVELFEWDETTFLKNTEGSPIRRTGFENWRRNIAVALGNAPTSPDTIQTLKNALPHSSELVKEHIIWALKQHNL

SEQ ID NO: 78181 - protein, 356 aa, unidentified
  source 1..356: note = Marinomonas fungiae
  REGION 1..356: note = tr|A0A0K6IJ56|A0A0K6IJ56_9GAMM Epoxyqueuosine reductase OS=Marinomonas fungiae OX=1137284 GN=queG PE=3; SV = 1
MSSFSDCDLHQLTQDIKQWAKEFGFNECRIVDPELEQYRTDFNAWLEQGYHGEMDYLANHADLRFAPANLHEGTQRVLSLSMAYLPESVETVKRLQTKDKGYIARYALGRDYHKLIRKRLTQLAKKIEQTVGDHGYRAFVDSAPILERQIAEQAGMGWIGKNTLLLSPKAGSWFLLGEIFTNLPLPVDAPTSKRHCGSCSACLDKCPTDAFVEPWVLDASKCISYLTIEYDGIIPEELRPKMGNRIFGCDDCQLVCPWTKFAKHTQELDFQPRHNLDNEDLLTLFNWDEDTFLKNTEGSPIRRTGYENWRRNIAVALGNAATRIDIIESLEQARMGASEKLLVHIDWALTQHRRPQ

SEQ ID NO: 78182 - protein, 356 aa, unidentified
  source 1..356: note = Marinomonas gallaica
  REGION 1..356: note = tr|A0A1C3JLT2|A0A1C3JLT2_9GAMM Epoxyqueuosine reductase OS=Marinomonas gallaica OX=1806667 GN=queG PE=3; SV = 1
MPSFDEASLQDIANNIKTWAKEFGFSECRIVNPELEQYREDFHAWLEQGYHGEMDYLANHDDLRFQPANLHAGTQRVISLSMPYLPESVETVKRLKTPEKAYIARYALGRDYHKLIRKRLTQLAKRIEEEFGDHGYRAFVDSAPVLERQIAEQAGMGWIGKNTLLLSPKAGSWFLLGEVFTNLPLPVDPPTPQRHCGSCSACLDKCPTNAFVKPWVLDASKCISYLTIEYDGIIPEELRAKMGNRIFGCDDCQLVCPWTKFAKNTQEDDFQPRHNLDSEDLLTLFEWDEDTFLSNTAGSPIRRTGYENWRRNIAVALGNAPYSKATVDALDRAKKNASEKLLVHLEWALAQHQTPQ

SEQ ID NO: 78183 - protein, 357 aa, unidentified
  source 1..357: note = Marinomonas hwangdonensis
  REGION 1..357: note = tr|A0A3M8Q2F2|A0A3M8Q2F2_9GAMM Epoxyqueuosine reductase OS=Marinomonas hwangdonensis OX=1053647 GN=queG; PE = 3 SV=1
MLPSFLSSPDDLNSLVDDIKSWAIDLGFADARVVEPDLAQYKDEFNQWLNNQYHAGMDYLANHGDMRFYPEQLHPGTRRVISLRMHYLPQSVATVERLQTKHKAYIARYALGRDYHKLIRKRLTQLAKKIEEKVGDHGYRAFVDSAPILERQIAEQAGMGWIGKNTLLLTPKAGSWFLLGEIFTNLPLPVDKPTESRHCGSCTACLTQCPTDAFVEPWVLDAGKCISYLTIEHKGPIPEELRSKMGNRIFGCDDCQLVCPWTKFAKYTEEDDFQPRHNLDSANLIELFEWDEATFLKNTEGSPIRRTGFENWRRNIAVALGNAPTNQATIQTLQSALPHSSELVKEHILWALKQHDR

SEQ ID NO: 78184 - protein, 361 aa, Marinomonas mediterranea
  REGION 1..361: note = tr|F2JUQ3|F2JUQ3_MARM1 Epoxyqueuosine reductase; OS = Marinomonas mediterranea (strain ATCC 700492 / JCM 21426 / NBRC 103028 / MMB-1) OX=717774 GN=queG PE=3 SV=1
MLPSNLHSADELNNFAQKIKDWALELGFADAKIVKPSLEQYKAQYQQWIDSGYHGTMEYLADHGDLRFKPEELHEGTQRVISLRMHYLPESVETVKRLQTPEKAYIARYALGRDYHKVIRKRLTTLAKRIEDVIGDHGYRAFVDSAPVLERQIAEQAGMGWIGKNTLLLSPKAGSWFLLGELFTNLPLPVDAPTQTRHCGSCDACIQKCPTDAFVEPWVLDASKCISYLTIEYKGSIPVDLRSKMGNRIFGCDDCQLVCPWTKFSKHTQENDFQPRHKLDQADLIELFLWTEDEFLDKTAGSPIRRTGYESWRRNIAIALGNAPYNEVAIKALESQKPASSELLQEHIEWALDMQQRKQHR

SEQ ID NO: 78185 - protein, 357 aa, Marinomonas polaris
  REGION 1..357: note = tr|A0A1M5C897|A0A1M5C897_9GAMM Epoxyqueuosine reductase OS=Marinomonas polaris DSM 16579 OX=1122206; GN = queG PE=3 SV=1
MLPSFLSSPEELNQLVDDIKSWAVELGFAEARIVEPDLAQYKDEFNEWLNNQYHAGMDYLANHGDMRFYPEQLHPGTRRVISLRMHYLPQSVETVERLKTKDKAYIARYALGRDYHKLIRKRLTQLAQKIEQKVGDHGYRAFVDSAPILERQIAEQAGMGWIGKNTLLLTPKAGSWFLLGEIFTNLPLPVDKPTETRHCGSCTACLTQCPTDAFVEPWVLDAGKCISYLTIEHKGPIPEELRSKMGNRIFGCDDCQLVCPWTKFAKYTQEDDFQPRHNLDSADLIELFEWDEATFLKNTEGSPIRRTGFENWRRNIAVALGNAPSNEATIQTLENALSHSSELVKEHIVWALKQHKP

SEQ ID NO: 78186 - protein, 362 aa, Marinomonas pollencensis
  REGION 1..362: note = tr|A0A3E0DVB9|A0A3E0DVB9_9GAMM Epoxyqueuosine reductase OS=Marinomonas pollencensis OX=491954 GN=queG; PE = 3 SV=1
MLPPSFSDPQDLVSLVDDIKSWAIEFGFAEARIVEPDLEQYRDGFNNWLAQDYHAGMDYLANHGDIRFQPNKLHPGTRRVISLRMHYLPQSVATVERLKTKKQAYIARYALGRDYHKLIRKRLTQLAKKIEERVGEHGYRAFVDSAPILERQVAEQAGMGWIGKNTLLLTPKAGSWFLLGEIFTNLPLPVDPPTKTRHCGSCDACLTQCPTDAFVEPWVLDAGKCISYLTIEHKGAIPVDLRAKMGNRIFGCDDCQLVCPWTKFAKHTTEQDFQPRHNLDAEDLVSLFLWDETTFLKNTEGSPIRRTGYENWRRNIAVALGNAPTEAAIIAALESAADSNSELVNEHVRWALEQHDIRLKGA

SEQ ID NO: 78187 - protein, 357 aa, Marinomonas posidonica
  REGION 1..357: note = tr|F6CXK3|F6CXK3_MARPP Epoxyqueuosine reductase; OS = Marinomonas posidonica (strain CECT 7376 / NCIMB 14433 / IVIA-Po-181) OX=491952 GN=queG PE=3 SV=1
MLPSSLSNPDDLAQLAVDIKAWATEFGFAEARIVDPDLGQHKDQFNNWLDKGYHAGMDYLANHGDMRFYPEQLHPGTRRVISLRMHYLPQSVETVKRLHTKEKAYIARYALGRDYHKLIRKRLTQLAKKIEAKIGDHGYRAFVDSAPILERQIAEQAGMGWIGKNTLLLTPKAGSWFLLGEIFTNLPLPVDGATKTRHCGSCDACLTQCPTDAFVEPWVLDASKCISYLTIEHKGPIPEELRDKMGNRIFGCDDCQLVCPWTKFAKYTEEEDFQPRHNLDSSDLVELFQWNEETFLKNTEGSPIRRTGYENWQRNIAVALGNAKTTDDILDALKKALKHSSPLVQEHIEWALKQHNH

SEQ ID NO: 78188 - protein, 357 aa, Marinomonas primoryensis
  REGION 1..357: note = tr|A0A2Z4PRG4|A0A2Z4PRG4_9GAMM Epoxyqueuosine reductase OS=Marinomonas primoryensis OX=178399 GN=queG; PE = 3 SV=1
MLPSFLSSSDDLNLLADDIKSWAIDFGFAEARIVEPDLAQYKDEFNEWLNNQYHAGMDYLANHGDMRFYPEQLHPGTRRVISLRMNYLPQSVETVGRLKTKNKAYIARYALGRDYHKLIRKRLTQLAKKIEQRVGDHGYRAFVDSAPILERQIAEQAGMGWIGKNTLLLTPKAGSWFLLGEIFTNLPLPVDAPTQTKHCGSCTACLTQCPTDAFVEPWVLDAGKCISYLTIEHKGPIPEELRSKMGNRIFGCDDCQLVCPWTKFAKYTEEDDFQPRHNLDSAGLIELFEWDEETFLKNTEGSPIRRTGYENWRRNIAVALGNAPTNKETTETLKRALISSSDLVKEHVIWALQQHKE

SEQ ID NO: 78189 - protein, 359 aa, unidentified
  source 1..359: note = Marinomonas profundimaris
  REGION 1..359: note = tr|W1RS41|W1RS41_9GAMM Epoxyqueuosine reductase; OS = Marinomonas profundimaris OX=1208321 GN=queG PE=3 SV=1
MLPSFLSSPDELNQLADDIKSWAIEFGFAEARIVEPDLAQYKDEFNQWLNNQYHAGMDYLANHGDMRFYPEQLHPGTRRVISLRMHYLPQSVETVDRLKTKNKAYIARYALGRDYHKLIRKRLTQLAKKIEQRVGDHGYRAFVDSAPILERQIAEQAGMGWIGKNTLLLTPKAGSWFLLGEIFTNLPLPVDEPTQTRHCGSCTACLTQCPTDAFVEPWVLDAGKCISYLTIEHKGPIPVELRRKMGNRIFGCDDCQLVCPWTKFAKYTEEEDFQPRHNLDSADLVELFEWDEETFLKNTEGSPIRRTGYENWRRNIAVALGNAPTDHATTYALENALTHSSDLVKEHVIWALAQHKIPR

SEQ ID NO: 78190 - protein, 357 aa, Marinomonas rhizomae
  REGION 1..357: note = tr|A0A366J684|A0A366J684_9GAMM Epoxyqueuosine reductase OS=Marinomonas rhizomae OX=491948 GN=queG PE=3; SV = 1
MLPSFLSSPEELKQLADEIKSWAVEFGFAEARIVEPDLAQYKDEFNEWLNNQYHAGMDYLANHGDMRFYPEKLHPGTRRVISLRMHYLPQSVETVERLKTKDKAYIARYALGRDYHKLIRKRLTQLAKKIEQKVGNHGYRAFVDSAPILERQIAEQAGMGWIGKNTLLLTPKAGSWFLLGEIFTNLPLPVDKPTETRHCGSCTACLTQCPTDAFVEPWVLDARKCISYLTIEHKGPIPEELRSKMGNRIFGCDDCQLVCPWTKFAKYTEENDFQPRHNLDSANLVELFEWDEETFLKNTEGSPIRRTGFENWRRNIAIALGNAPTSQATTQTLENALPHASELVKEHIVWALKQHNL

SEQ ID NO: 78191 - protein, 362 aa, Marinomonas sp.
  REGION 1..362: note = tr|A0A432RXJ4|A0A432RXJ4_9GAMM Epoxyqueuosine reductase OS=Marinomonas sp. OX=1904862 GN=queG PE=3 SV=1
MVSSLSELELQQLAQDIKSWALEFGFSECRIVDPELEQYREGFQAWLDKGYHGEMEYLANHSDLRFSPASLHSGTQRVISLNMAYLPESVETVKRLQTKDKGYVARYALGRDYHKLIRKRLTQLAKKIELAVGEHGYRAFVDSAPILERQIAEQAGMGWIGKNTLLLSPKAGSWFLLGEVFTNLPLPVDKPTAKRHCGSCSACLDKCPTNAFVEPWVLDASKCISYLTIEYDGIIPEELRSKMGNRIFGCDDCQLVCPWTKFAKHTQEQDFQPRHNLDNEDLLTLFKWDEETFLKNTEGSPIRRTGYENWRRNIAVALGNAPTRIDIIEALEDAKLTASEKLRIHLDWALSQHQTPQQTPPL

SEQ ID NO: 78192 - protein, 359 aa, Marinomonas sp.
  REGION 1..359: note = tr|A0A370U4I5|A0A370U4I5_9GAMM Epoxyqueuosine reductase OS=Marinomonas sp. YLB-05 OX=2213058 GN=queG; PE = 3 SV=1
MLPSDLNSPTSLSDLATQIKQWASEFGFSDCRIVDPKLEQFRDPYNKWLASGYHGTMDYLANHGDLRFTPENLHVGTQRVISLSMPYLPESVETVKRLQTKNKAYIARYALGRDYHKLIRKRLTQFAKRIEEEVGDHGFRAFVDSAPVLERQIAEQAGMGWIGKNTLLLSPKAGSWFLLGEVFTNLPLPVDDAMPSRHCGSCSACLDLCPTNAFVEPWVLDATKCISYLTIEYDGIIPEELRSKMGNRIFGCDDCQLVCPWTKFAKYTQENDFQPRHHLDNEELITLFQWDERTFLKNTEGSPIRRTGYENWQRNLAVALGNAPTSMAIIEALEKGKEGASEKLLIHIDWALAQHPILR

SEQ ID NO: 78193 - protein, 357 aa, unidentified
  source 1..357: note = Marinomonas spartinae
  REGION 1..357: note = tr|A0A1A8TQ76|A0A1A8TQ76_9GAMM Epoxyqueuosine reductase OS=Marinomonas spartinae OX=1792290 GN=queG PE=3; SV = 1
MLPPALSHPDDLTNLANQIKHWAVEFGFADARIVAPDLEQYKEGFKKWLDNGYHAGMDYLANHGDMRFHPEQLHAGTRRVISLRMHYLPQSVETVERLKTKEKAYIARYALGRDYHKLIRKRLNQLAKKIQEVIGDHGYRAFVDSAPVLERQIAEQAGMGWIGKNTLLLTPKAGSWFLLGEIFTNLPLPVDQPTRTRHCGSCSACLTQCPTDAFVEPWVLDAGKCISYLTIEHKGPIPVELRSKMGNRIFGCDDCQLVCPWTKFAKHTEEDDFQPRHDLDSEDLITLFAWDEETFLKNTEGSPIRRTGYENWRRNIAVALGNAPSNKETIDALKKGLVSSSELVNEHIHWALKQHQQ

SEQ ID NO: 78194 - protein, 357 aa, Marinomonas ushuaiensis
  REGION 1..357: note = tr|X7E461|X7E461_9GAMM Epoxyqueuosine reductase; OS = Marinomonas ushuaiensis DSM 15871 OX=1122207 GN=queG; PE = 3 SV=1
MLPSFLSSPDDLQKLADDIKSWAINFGFAEARIVEPDLAQYKDEFNEWIDNQYHAGMDYLANHGDMRFYPEQLHPGTRRVISLRMHYLPQSVETVGRLKTKDKAYIARYALGRDYHKLIRKRLTQLAKKVEQQVGDHGYRAFVDSAPILERQIAEQAGMGWIGKNTLLLTPKAGSWFLLGEIFTNLPLPVDKPTTDRHCGSCTACLTQCPTDAFVEPWVLDAGKCISYLTIEHKGPIPEPLRSKMGNRIFGCDDCQLVCPWTKFAKYTKEEDFQPRHDLDSAGLVELFKWDEATFLKKTEGSPIRRTGYENWQRNIAVALGNAPTSDLTVQTLEAALHTSSELVKEHIIWALEQHKR

SEQ ID NO: 78195 - protein, 308 aa, Marinoscillum furvescens
  REGION 1..308: note = tr|A0A3D9LKZ4|A0A3D9LKZ4_9BACT Epoxyqueuosine reductase OS=Marinoscillum furvescens DSM 4134 OX=1122208; GN = queG PE=3 SV=1
MIPEKHTATVKKIASELGFSFCGIGKAEFLEEEAPKLEEWLKRGYQGKMGYLENHFDKRLDPTKLVPGAKSVVSLLYNYYPEPDHNKDSSYKIAKYAYGKDYHFVIKDKLKEFMQSLQEEVGAVEGRVFVDSAPVHERAWAAKSGLGWVGKNSLLLNRNLGSFFFIAELIIDLELEPDPPTKDYCGTCTACMDACPTDAIPEPYVVDGSRCISYLTIELKDEIPAEFKDKMEGWAFGCDICQDVCPWNRFAKPHHEPAFTSQGWEDFSKQDWEEMTEEVFRRVFKKSPVKRTKYTGLKRNIDFIRKSD

SEQ ID NO: 78196 - protein, 305 aa, Marinoscillum sp.
  REGION 1..305: note = tr|A0A2D7THS6|A0A2D7THS6_9BACT tRNA epoxyqueuosine(34) reductase QueG OS=Marinoscillum sp.; OX = 2024838 GN=queG PE=4 SV=1
  VARIANT 15: note = Xaa can be any naturally occurring amino acid
  VARIANT 26: note = Xaa can be any naturally occurring amino acid
  VARIANT 72: note = Xaa can be any naturally occurring amino acid
  VARIANT 114..115: note = Xaa can be any naturally occurring amino acid
  VARIANT 122: note = Xaa can be any naturally occurring amino acid
  VARIANT 128: note = Xaa can be any naturally occurring amino acid
  VARIANT 136: note = Xaa can be any naturally occurring amino acid
  VARIANT 142: note = Xaa can be any naturally occurring amino acid
  VARIANT 145: note = Xaa can be any naturally occurring amino acid
  VARIANT 167: note = Xaa can be any naturally occurring amino acid
  VARIANT 175: note = Xaa can be any naturally occurring amino acid
  VARIANT 216: note = Xaa can be any naturally occurring amino acid
  VARIANT 232: note = Xaa can be any naturally occurring amino acid
MTKNNTELIKIKAKXLGFTSCGISKXRHLHEEEDNFEKWLSRGNQGSMSYLEKNFDKRLDPRKLVPGSKSVXSLSYNYYPQKKIDQKNNFIISKYAYGKDYHNVIRKKLKKLFXXIKEKIGXVEGRVXVDSAPVHXRAWAKXSGXGWIGKNSLLINEKRGSYFFLAXIICDLKLXYDSPAINRCGKCTQCIDACPTDAITSAQVINANKCISYLTXENKDQIPDELKDNLNXAIFGCDICQDVCPWNKFSKPHDEKEFIPNDELSSFKKSDWLELTEETFNKIFEGSAVKRSKYKGIIRNIKASN

SEQ ID NO: 78197 - protein, 377 aa, Marinospirillum alkaliphilum
  REGION 1..377: note = tr|A0A1K1W1Y9|A0A1K1W1Y9_9GAMM Epoxyqueuosine reductase OS=Marinospirillum alkaliphilum DSM 21637; OX = 1122209 GN=queG PE=3 SV=1
MIADSHLQPDLQRLADHIRQLARELGFSACGITGVDLGEHPAYLKKWLAAGYHGQMQWMENHLDKRCNPALLEPGTLSIISVRLDYLPPETQAIKVLNNPEQAYVSRYALGRDYHKLIRKRLAQLAEQINQHLQQLPALQAAFGELKSRAFTDSAPVLERGIAQQAGLGWIGKNCMLITPRAGSLFFLGELYLNLPLPPDPAFVKDHCGQCNACHTACPTQAFVADGVLDAQRCISYLTIELEGSIPLELRPLIGNRIFGCDDCQLVCPWTRFAPSTREKDFHPRHDLDSASLLELFNWDENTFLKNTEGSAIRRTGYTNWLRNLAVALGNAPHSNAVIQALKEKSQHPEAVVREHVEWALEGQLGKTATSGGVTTQ

SEQ ID NO: 78198 - protein, 372 aa, Marinospirillum celere
  REGION 1..372: note = tr|A0A1I1IUA3|A0A1I1IUA3_9GAMM Epoxyqueuosine reductase OS=Marinospirillum celere OX=1122252 GN=queG; PE = 3 SV=1
MILDSEQQAGLKALAVTIKELATDLGFADCGITDVDLGEHPAYLKKWLDAGYEGDMQWMHNHLEKRCNPALLEPGTLSVITLRMDYLPPETQAIKILANPEKAYVSRYALGRDYHKLIRKRLGQLAKKINQHLDDNAALRAAFPEFRSRAFTDSAPVLERALALQGGLGWIGKNCMLITPKAGSWFFLGEIYLNLPLPKDKAFVKDHCGQCSACHTACPTQAFVADGVLDAKRCISYLTIELKGSIPEELRPLMGNRIFGCDDCQLFCPWNRFAKSTQEKDFHPRHQLDTADLVDLFNWDEASFLKNTEGSPIRRTGYISWLRNLAVALGNAPPSETVLSALKARQTHPDPVVREHVLWALQRHQAGPAKDH

SEQ ID NO: 78199 - protein, 346 aa, unidentified
  source 1..346: note = Marinosulfonomonas sp.
  REGION 1..346: note = tr|A0A2G2BF10|A0A2G2BF10_9RHOB Epoxyqueuosine reductase OS=Marinosulfonomonas sp. OX=2030815 GN=queG; PE = 3 SV=1
  VARIANT 286: note = Xaa can be any naturally occurring amino acid
MPAVLKERLVERALAEGFARVGVTTPDAVPEAAVRLKEYVAEGRHGQMGWMAERMNWRGNPAALWPEAKSVVMLAEMYTPGHDPMAVLGQADRGAISVYAQNRDYHDIVKKRLKRVGRWLLEQAPGESIKVFVDTAPVMEKPLAAAAGLGWQGKHTNLVSRELGSWFFLGAIFTTVELPVDAPGEDHCGNCRACLDVCPTGAFPAPYQLDARRCISYLTIEHHGPVEEELRGLLGNHIYGCDDCLAACPWNKFAVAASEARYLAREELTAPRLAELAALDDAAFRXMFSGSPVKRVGRDRFVRNVLYAIGNSGIEELLPVAAGLADDADETVADAARWAAGRLVSR

SEQ ID NO: 78200 - protein, 345 aa, unidentified
  source 1..345: note = Marinosulfonomonas sp.
  REGION 1..345: note = tr|A0A2G2BGP1|A0A2G2BGP1_9RHOB Epoxyqueuosine reductase OS=Marinosulfonomonas sp. OX=2030815 GN=queG; PE = 3 SV=1
MTADLKARLFEFAHAEGFSNMGVCRTSDVPQIAARLKTYVEKGHHGQMGWMAERMNWRGSPQDLWPEAKSVIMLAEPYTPDHDPMDVIGMPDRGAISVYAQNRDYHDIVKKRLKRVGRWLLEQAPGEQIKVFVDTAPVMEKPLAQAAGLGWQGKHTNLVGRNLGSWFFLGSIFTTIELPTDGAEPENCGSCTACLDVCPTDAFPAPYQLDARRCISYLTIEHDGPVDEEFRPLLGNRIYGCDDCLAVCPWNKFAAEAREMRYVARADLVAPKLAELAVLDDAAFREMFSGSPVKRIKRGRFVRNVLYAIGNSGDASLCAVAAGLVADADAVVADAARWAVERLTP

SEQ ID NO: 78201 - protein, 347 aa, Marinovum algicola
  REGION 1..347: note = tr|A0A0H4KYK1|A0A0H4KYK1_9RHOB Epoxyqueuosine reductase OS=Marinovum algicola DG 898 OX=988812 GN=queG; PE = 3 SV=1
MDALKDRLLREARDQGFSAARICRPEAVPEVAERLAGFLAAGYHGQMSWLAERSNWRGDPAALWPEARSVIMLAENYGPAHDPLAVLEQSDRAAISVYAQHRDYHDVVKKRLKRLARWLIAEADTDPPAEVKVFVDTAPVPEKALGQAAGLGWQGKHTNLVSRQLGSWFFLGAVFTTLELPVDPGEVDHCGSCRKCLDICPTAAFPAPYQLDARRCISYLTIEHKGPVDVALRPLLGNRIYGCDDCLAVCPWNKFAERAAEVKYHARDDLMAPDLAELAGLADAAFRARFSGSPIKRIGRGRFVRNVLYAIGNSGEARLLPAAQALCEDADPQVADAARWAVERLQR

SEQ ID NO: 78202 - protein, 345 aa, Marinovum sp.
  REGION 1..345: note = tr|A0A2E8JH07|A0A2E8JH07_9RHOB Epoxyqueuosine reductase OS=Marinovum sp. OX=2024839 GN=queG PE=3 SV=1
  VARIANT 87: note = Xaa can be any naturally occurring amino acid
  VARIANT 92: note = Xaa can be any naturally occurring amino acid
  VARIANT 115: note = Xaa can be any naturally occurring amino acid
  VARIANT 339: note = Xaa can be any naturally occurring amino acid
MQQLKADLEFKAREEGFDDLRICRPWEVPDVLEQLEAFLQKGYHGQMHWLAERRAWRGDPSQLWPEAKSVIMLAENYAPQDNPMTVXGQSDXGAISVYARGKDYHDLVKKRLKRXARWLLSEAGGEVKVFVDTAPVPEKPLAQAAGLGWQGKHTNLVSRTLGNWFFIGSIFTTLDLPVDAAEIDHCGSCTACLMACPTDAFPKPYQLDARRCISYLTIEHKGPVVPELRPKLGNRIYGCDDCLAVCPWNKFAQSARELRYQARDDLAAPKLRDLVALTDAAFREKFSGSPIKRIGRDRFVRNVLYAIGNSKDPSLISAARALCGDPDTTVADAANWAVXQLTASS

SEQ ID NO: 78203 - protein, 346 aa, Marinovum sp.
  REGION 1..346: note = tr|A0A2E7WHX3|A0A2E7WHX3_9RHOB tRNA epoxyqueuosine(34) reductase QueG OS=Marinovum sp.; OX = 2024839 GN=queG PE=4 SV=1
MSSSALKHRLVDQAKDQGFAACRLCRPWDVPQMPEQLASFLARGYHGQMSWLEERAHWRAAPQVLWPGAQTVIMLAESYTPQHDPRAILTQSEAGAISVYAQNRDYHDTVKKRLKRLARWLIAEGGGEVKVFVDTAPVPEKPLGQAAGLGWQGKHTNLVSRDLGNWFFIGSVFTTLDLPVDAAEVDHCGSCRACLTACPTEAFPAPYQLDARRCISYLTIEHKGPVDLGLRSKMGNRIYGCDDCLAACPWNKFAVTAQEIRYHARDDLLAPALAELAVLDDAQFRSMFSGSPIKRIGRDRFVRNVLYAIGNSGQGRLRAVAQSLCADPDPAVADAARWAVERLTKK

SEQ ID NO: 78204 - protein, 399 aa, unidentified
  source 1..399: note = Mariprofundus aestuarium
  REGION 1..399: note = tr|A0A2K8KZK6|A0A2K8KZK6_9PROT Epoxyqueuosine reductase OS=Mariprofundus aestuarium OX=1921086; GN = Ga0123461_0929 PE=4 SV=1
MPVLCQTAAMVSNGLKDRVRAKAKECGFALCHVTRPEVGGQHADALQRWSDAGMQGDMVWMAEEMRMQRRKSPETMLQGVNSVITVAMHYTPPDYSLDEADAQKLCGVISAYAHGDDYHDIMKKRLKALALELDAMLGVHDQRVFVDTAPVLEHALAASAGLGWQGKHTLTIQRQLGSWFLLGEIFTTAEFEPDQPAINHCGSCTACIDICPTRAIVAPYVVDARRCISYLTIEFDDFIPAEFRPLMGNRIYGCDDCQMVCPWNAHATKDKDAVVDLLMPKGENNLPDLASLLLLDEEAFRIRFRKSPIKRTKRRGLLRNVCIAMGNSGNVHCIPALLDALNDGESLIRGHAAWALARLTDQGNRERVLAALNLLSEQENDPAVLHEFMSAIQGIREES

SEQ ID NO: 78205 - protein, 399 aa, unidentified
  source 1..399: note = Mariprofundus ferrinatatus
  REGION 1..399: note = tr|A0A2K8L573|A0A2K8L573_9PROT Epoxyqueuosine reductase OS=Mariprofundus ferrinatatus OX=1921087 GN=queG; PE = 3 SV=1
MDRPICKNSDMDAVSLKNMIRDKAKAHGFSLCHVTRPEIRNIHRGALEYWTNAGMQGEMAWMAEPVRLDRRKDPATMLDGVKSVISLAMRYTPPEHSLDEARSRKHSGVITAYAHGADYHDIMKKQLKALAFELDTLLGVHNQRIFVDTAPVLEHAIAESAGLGWQGKHSLTIQKNLGSWFLLGEIFTTAELEPDQPASNHCGSCSACIDICPTQAIVAPYVVDARRCISYLTIEFDGFIPRDLRPLMGNRIYGCDDCQVICPWNGHAAKEGVQFDDLLTPKGENILPDLVSLLQLDEEAFRIRFRKSPIRRTRRRGLLRNVCIAMGNSGEADFIVVLLDALHDGEPLIRGHAAWALARLTAPVNRQMVLSALAEQADHEKEPAVEQEIQSAINDIRGV

SEQ ID NO: 78206 - protein, 397 aa, Mariprofundus ferrooxydans
  REGION 1..397: note = tr|Q0F2C2|Q0F2C2_9PROT Iron-sulfur cluster binding protein OS=Mariprofundus ferrooxydans PV-1 OX=314345; GN = SPV1_01732 PE=4 SV=1
MCQDSAMNSDCVKSTVQAKALEHGFDLCRVTQPVVAREHAEALHRWVDAGMQGEMDWMAEEVRLQRRSDPTSMLAGVRSVVTVAMRYTPPEYGLNEACSGTRRGVITAYAHGDDYHEVMKKRLKALARDLDTLLGRHDQRVFVDTAPVLEHALAERAGLGWQGKHTLTIHRGVGSWFLLGEIFTTAEIVPDAQAANHCGSCTACIDICPTGAIVAPYVVDARLCISYLTIEFDGFIPHPLRPLMGNRIYGCDDCQMICPWNEHAGKGTTLGDDLLTPRGENHLPDLVSILQLDEDAFRHRFMKSPIRRTKRRGLLRNVCIAMGNSGHAGFMPDLIAVLDDVEPLIRGHAVWALGQLVGQENRADILAVLVQMNVAEKDDAVREEISLTMRHIRMNDE

SEQ ID NO: 78207 - protein, 389 aa, unidentified
  source 1..389: note = Mariprofundus micogutta
  REGION 1..389: note = tr|A0A1L8CRA0|A0A1L8CRA0_9PROT Epoxyqueuosine reductase OS=Mariprofundus micogutta OX=1921010; GN = MMIC_P2333 PE=4 SV=1
MQGEQLKTLIRSKASQHGFDLCHVTRPEIGSKHAEALEQWVAADMQGDMSWMGEATRLERRKDPQSMLDAVKSVITLAMRYTPPAYAIEAAESACGKGVITAYAHGDDYHDVMKKRLKALALDLDLLLGKHDQRVFADTAPVLEHALAESAGLGWQGKHSLTIHREVGSWLLLGEIFTTAALQPDEPATNHCGTCSACIEICPTQAIVAPYVVDARLCISYLTIEFDGFIPRQLRAKMGNRIYGCDDCQQTCPWNQHAARAACLKNDLLNPRGENVLPDLARILQIDGEEFRKIYRKSPIKRTKRAGLLRNVCIAMGNSGDTRFISDLVAVLNDEEPLIRGHAVWALAQLADDENCHDISALLECLQKEEKEVMVHEEITHAITHIRNL

SEQ ID NO: 78208 - protein, 405 aa, Mariprofundus sp.
  REGION 1..405: note = tr|A0A498DMM8|A0A498DMM8_9PROT tRNA epoxyqueuosine(34) reductase QueG OS=Mariprofundus sp. EBB-1 OX=2650971 GN=queG PE=4 SV=1
MCQSAAMVNDGVKEMIKAKALAHGFALCRISSPVVDQKHVQGLQHWVQSDMQADMAWMAEEVRMQRRMQPESMLQDVRSVITVAMTYSPPAYQLDEANEATEQGVISAYAHGDDYHDVMKKRLKALAADLDVLLGKHDQRVFVDTAPVLEHALAESSGLGWQGKHSLTIHRELGSWFLLGEIFTTAEIDADEAANNHCGTCSACLDVCPTQAIVAPYVVDARLCISYLTIEFDGFIPHPLRSLMGNHIYGCDDCQMVCPWNQHAAKVVLRLQDLNTWCDPLTPRGENHLPNLASLLRLDDDGFRQLFRKSPIKRTKRAGLLRNVCIAMGNSGNDLFVDDLLPALTDKEALVRGHAAWALGRLSCAENHQCISAALQHQLVDEVDVNAREEIILTIEYLRSKYDDA

SEQ ID NO: 78209 - protein, 381 aa, unidentified
  source 1..381: note = Marisediminitalea aggregata
  REGION 1..381: note = tr|A0A1M5E1Z9|A0A1M5E1Z9_9ALTE Epoxyqueuosine reductase OS=Marisediminitalea aggregata OX=634436 GN=queG; PE = 3 SV=1
MSELQSIDLYKLVDDIKAWANALGFQQVGISDIDLSQHEAALQSWLDNQYHGDMAFMANHGMKRARPVELVPGTLRVISVRMDYLPPDASFAKHLNNPDIGYISRYALGRDYHKVLRSKLKKLGEKIQAELADTQFRPFVDSAPVLEHAIAEKAGIGWTGKHSLTLNKQAGSWFFLGELFINLPLPVDEPTSEEHCGTCTACMTICPTQAIVAPYVVDARRCISYLTIEYDGVIPEVFREPMGNRLYGCDDCQLICPWNRYAPLTDEADFHPRKVLHGQSLATLFSWDEATFLRNTEGSPIRRIGYTKWRRNVSVAIGNASYDEHYIHLLTEALPDACEILRPHLEWALERQQQKNGDALSRPRQITRLVRTIEKGLPRDA

SEQ ID NO: 78210 - protein, 333 aa, unidentified
  source 1..333: note = Marispirochaeta aestuarii
  REGION 1..333: note = tr|A0A1Y1RX60|A0A1Y1RX60_9SPIO 4Fe-4S ferredoxin-type domain-containing protein; OS = Marispirochaeta aestuarii OX=1963862 GN=B4O97_11110; PE = 4 SV=1
MIMTRTDILLGKFLENGFRSPGIAWIAPGLVGETPGDRTYLVIMGIFPIPDPAPSADPGKVLVAPFAAAHYYRDCVKRLKALVSELQRGTGVSKQHVRLFSNSRLPERSIAAALGIGWVGRNGLLMNREYGSSFVLAGILASLDEGEISRLRGNEDLARISSLEAPADPHGECGSCRACVSACPTGAIAESGGVRLERCLQYLATTREDLPDFARKVWGRRLYGCMDCQNSCPVNRRRSVHADGDSLGREEYPIRDLLPKFASPAEKGLKKIFPDTALEASWIPREAILRNLLTAAGNSGDPSLEQLIRPFLEEKHPVVKTAAARALDRIFSK

SEQ ID NO: 78211 - protein, 377 aa, Maritalea mobilis
  REGION 1..377: note = tr|A0A4R6VQH5|A0A4R6VQH5_9RHIZ Epoxyqueuosine reductase OS=Maritalea mobilis OX=483324 GN=queG PE=3 SV=1
MTLSPEKLRQTIETRARELGFVAFGIGDANGHPEAPERLSQALAQDFHGDMHWLKETLDRRATPKHMWPEAKSAIVLGYNYGPDQNPLEQLDDTENGLISVYARHRDYHDIIKGKLKEIAGLLARQGNCEVKVFVDTAPLMEKPLGEQAGIGWQGKHTVLVSRDHGCWLFLGTILTDFAFEPDQPGKDRCGNCRRCLDVCPTNAFPAPYQLDARRCIAYLTNEYKGVIPVEFRKPIGNRIYGCDDCLAVCPWNKFASVARDEKLRSRDELRSPELVELATFDDAAFRAFFKGSPIKRLGRDAFIRNVLIALGNAPNKPDIVAAIEALLTDESPLVRASAVWAMDQHCDQTAFDQLRQAHYAAEQEQVVRAEWDRTAQ

SEQ ID NO: 78212 - protein, 377 aa, Maritalea myrionectae
  REGION 1..377: note = tr|A0A2R4MIK7|A0A2R4MIK7_9RHIZ Epoxyqueuosine reductase OS=Maritalea myrionectae OX=454601 GN=queG PE=3; SV = 1
MTQSAEKLRQTIEARARDLGFVSFGVAQANGHPEAPERLNEALARDFHGDMHWLKDTLDRRTSPQHMWPEAKSALVLGYNYGPDQNPLDQLDDTENGLISVYARHRDYHDIIKGKLKEIAGLLARQGNCEVKVFVDTAPLMEKPLGEQAGIGWQGKHTVLVSRDHGCWLFLGTILTDMEFAPDAAGTDRCGNCRRCLDVCPTNAFPAPYQLDARRCIAYLTNEYKGIIPVEFRKPIGNRIYGCDDCLAVCPWNKFASVARDEKLRSREDLRAPSLVELAKFDDADFRAFFKGSPIKRLGRDAFIRNVLIALGNAPRKDDIVAAIKPHLSDESALVRAAAVWAIDQHYDSEAFDQLRQAHYPSENDHDVCAEWDRTAP

SEQ ID NO: 78213 - protein, 344 aa, Maritimibacter alkaliphilus
  REGION 1..344: note = tr|A3VHC2|A3VHC2_9RHOB Epoxyqueuosine reductase; OS = Maritimibacter alkaliphilus HTCC2654 OX=314271 GN=queG; PE = 3 SV=1
MTLTEKLKAQALAEGFSAVGVTRPDAVPELADRLAAFVEAGRHGDMGWMAERMHWRGAPDALWPEAKSVIMLAELYTPEHDPMAVIGEPERGAISVYAQNRDYHDIVKKRLKRVGRWLIDAAGPDTEIKVFVDTAPVMEKPLAQAAGLGWQGKHTNLLSRDLGSWFFLGAIFTTAELEPDRPGRENCGRCTACLDVCPTKAFPAPFQLDARRCISYLTIEHKGPVDEALRPLLGNRIYGCDDCLAVCPWNKFAAEASEARYLARDDLAAPRLAGLAALDDAAFREKFSGSPIKRIGRNRFLRNVAYAMGNSGDPSFAPQLQRLAGEPDPVLADAATWALTRIAR

SEQ ID NO: 78214 - protein, 347 aa, Maritimibacter sp.
  REGION 1..347: note = tr|A0A2D9YJD7|A0A2D9YJD7_9RHOB Epoxyqueuosine reductase OS=Maritimibacter sp. OX=2003363 GN=queG PE=3; SV = 1
MSPDLKARLVAQARSEGFAKCRITTPDAVPEIAGRLAEFVDAGYHGQMAWMAERMNWRGDPAALWPEARSIIMLAEPYTPETDPLEVLDRSDRGAVSVYAQGRDYHDVVKKRLKRLGRWLIEAGGGTPEIKVFVDTAPVMEKPLGQAAGLGWQGKHTNLLSRDLGNWFFLGAIFTTAALPPDAPEAQKCGSCTACLDICPTDAFPAPFQLDARRCISYLTIEHRGPVPVELRERMGNRIYGCDDCLAICPWNKFAQTGRDAKLSARPDLVAPDLETLVKLDDAGFRERFSGSPIKRIGRDRFVRNVLYAIGNSGLPRLIPAARALTDDADETVREAARWAVERLHKV

SEQ ID NO: 78215 - protein, 345 aa, Maritimibacter sp.
  REGION 1..345: note = tr|A0A1X7P9X5|A0A1X7P9X5_9RHOB Epoxyqueuosine reductase OS=Maritimibacter sp. HL-12 OX=1162418 GN=queG; PE = 3 SV=1
MTSGLRQKLIDHAQAEGFAKVGITRPDVLPTLGRRLADFVDKGRHGDMGWMAERMHWRGNPAALWPEARSVIMLAEVYSPEHDPREVLRHPDKAAISVYAQNRDYHDIVKKRLKRVGRWLIDEAGRDTEIKVFVDTAPVMEKPLAAAAGLGWQGKHTNLLARDLGNWFFLGAIFTTLELEPDAPAADHCGACTACLDACPTRAFPAPYQLDARRCISYLTIEHKGPIDEALRPALGNRIYGCDDCLAACPWNKFAAVASEVRYRARDDLAAPDLAALAALDDAGFREKFSGSPIKRIGRARFLRNVAYAIGNSGDSRLKEAVRPLAADPDPVLAEAARWALARLG

SEQ ID NO: 78216 - protein, 312 aa, unidentified
  source 1..312: note = Marivirga lumbricoides
  REGION 1..312: note = tr|A0A2T4DV73|A0A2T4DV73_9BACT Epoxyqueuosine reductase OS=Marivirga lumbricoides OX=1046115 GN=queG; PE = 3 SV=1
MQNSHAKNSSIIKAIASELGFQFCGIAKAEFLEEEAPRLESWLKKNYQGKMAYMSNHFDKRLDPTKLVEGAKSVVSLLYNYYPSEDISSNGSYKIAKYAYGKDYHFVIKEKLKDFMARIHEEIGEVGGRAFVDSAPVMERQWAAKSGLGWLGKNSLLLNKQRGSFFFLAELIIDLPLEPDGPVKDYCGTCTKCIDACPTDAIVGNQVIDASKCISYLTIELKDEIPDAFSGKMDDWMFGCDICQDVCPWNRFSSPHNEKAFKPHAQLREMNKSEWKELTREVFNEIFKKSAVKRTKYEGLMRNVKFLEESAK

SEQ ID NO: 78217 - protein, 309 aa, Marivirga sericea
  REGION 1..309: note = tr|A0A1X7JZ77|A0A1X7JZ77_9BACT Epoxyqueuosine reductase OS=Marivirga sericea OX=1028 GN=queG PE=3 SV=1
MSFRKEKNTKIIKSIAAELGFDFCGVSKAGFLEEEAPKLENWLKKGYHGKMQYMENHFDKRLDPTKLVEGAKSVVSLMYNYYPEQDIAKSDSYKLAKYAYGKDYHFVVKDKLKDFMSRIHEEIGEVDGRVFVDSAPVMERQWAAKSGLGWLGKNSLLLNKQRGSFYFLAELIIDLDLQEDGPMQDYCGTCTKCIDACPTDAIVGDTIVDASKCISYLTIELKDDLPKEFSDKMESWVFGCDICQDVCPWNRFSRPHKEKAFQPHPLLKEMDKNDWKEMTKEVFNEVFRKSAVKRTKYTGLMRNIDYINS

SEQ ID NO: 78218 - protein, 309 aa, Marivirga tractuosa
  REGION 1..309: note = tr|E4TL50|E4TL50_MARTH Epoxyqueuosine reductase; OS = Marivirga tractuosa (strain ATCC 23168 / DSM 4126 / NBRC 15989 / NCIMB 1408 / VKM B-1430 / H-43) OX=643867; GN = queGPE=3 SV=1
MSLPKEKNTKIIKSIASDLGFDFCGVSKAGFLEEEAPKLEDWLKKGYHGKMHYMENHFDKRLDPSKLVEGAKSVVSLMYNYYPEQDLAKSDSYKIAKYAYGKDYHFVIKDKLKDFMTRLHEKIGEVGGRVFVDSAPVMERQWAAKSGLGWLGKNSLLLNKQRGSFYFLAELIIDLELEEDGPMQDYCGTCTKCIDACPTDAIVGDGIVDASKCISYLTIELKDDLPTEFSDKMEDWVFGCDICQDVCPWNRFSKSHQEYSFQPHPVLAEMDKKDWEEMTKEVFNEVFRKSAVKRTKYSGLKRNIKYINS

SEQ ID NO: 78219 - protein, 352 aa, Marivita cryptomonadis
  REGION 1..352: note = tr|A0A1X4NTJ9|A0A1X4NTJ9_9RHOB Epoxyqueuosine reductase OS=Marivita cryptomonadis OX=505252 GN=queG PE=3; SV = 1
MDFTARLKEQALNEGFSACRICRPWDVPDVPGRLQAFLEAGFHGQMGWLAERSRWRGAPQVLWPEARSVIMLAENYGPEHDPLEVLERPELAAISVYAQNRDYHDVVKKRLKRLARWLIADAGGEVKVFVDTAPVPEKPLGQAAGLGWQGKHTNLVSRELGSWFFIGSIFTTLDLTPDAAEVDHCGSCRACLDVCPTDAFPAPYQLDARRCISYLTIEHNGPVDEELRGLMGNRIYGCDDCLAVCPWNKFASRASEVKYHARDDLKAPDLADLAQLDDAAFRERFSGSPIKRIGRNRFVRNVLYAIGNSGSPRLRAVAQVLVDDPDETVADAARWAAMRLADVANTRAGSGD

SEQ ID NO: 78220 - protein, 352 aa, unidentified
  source 1..352: note = Marivita geojedonensis
  REGION 1..352: note = tr|A0A1X4NR12|A0A1X4NR12_9RHOB Epoxyqueuosine reductase OS=Marivita geojedonensis OX=1123756 GN=queG; PE = 3 SV=1
MDLTEQVKAQAMAEGFSACRICRPWDVPEVPERLQAFLDAGYHGQMGWLAERAHWRGAPQVLWPEARSVIVLAENYGPEHDPLEVLQHPEQAAISVYAQNRDYHDVVKKRLKRLARWLIAEAGGGVKVFVDTAPVPEKPLGQAAGLGWQGKHTNLVSRDLGSWFFIGSVFTTLDLTPDAAEVDHCGSCRACLDVCPTDAFPGPYRLDARRCISYLTIEHHGPVDEDLRALMGNRIYGCDDCLAVCPWNKFASRAAEVKYHAREDLLAPDLAELAQLDDTAFRARFSGSPIKRIGRNRFVRNVLYAISNSGSPRLRSVAQALVDDPDETVADAARWAAMRLADVANARAGAGD

SEQ ID NO: 78221 - protein, 346 aa, Marivita hallyeonensis
  REGION 1..346: note = tr|A0A1M5TRK2|A0A1M5TRK2_9RHOB Epoxyqueuosine reductase OS=Marivita hallyeonensis OX=996342; GN = SAMN05443551_2337 PE=4 SV=1
MTLTARVKAQAVAEGFSLCRVCRPWDVPEVPNRLRAFLEAGYHGQMGWLAERSHWRGAPHVLWPEARSVIMLAENYGPDHDPLDVLHQPERAAISVYAQNRDYHDVVKKRLKRLARWLISEAGGEVKVFVDTAPVPEKALGQASGLGWQGKHTNLVSRELGSWFFIGSVFTTLELDTDATEVDHCGSCRACLEVCPTDAFPAPYHLDARRCISYLTIEHHGPVDEDLRPLMGNRIYGCDDCLAVCPWNKFAERAAEVKYHAREDLLAPDLADMAQLDDGAFRARFSGSPIKRIGRNRFVRNVLYAIGNSGSARLREVARGLVDDADPTVSDAARWALGRLAHVEET

SEQ ID NO: 78222 - protein, 352 aa, Marivita sp.
  REGION 1..352: note = tr|A0A316KQ77|A0A316KQ77_9RHOB Epoxyqueuosine reductase OS=Marivita sp. XM-24bin2 OX=2133951 GN=queG; PE = 3 SV=1
MSLTARLKAQAAAEGFSACRICRPSDVPEVPTRLTAFLDAGYHGQMGWLAERAHWRGAPDVLWPEAQSVIVLAENYGPDHDPLQILEQPEKAAISVYAQNRDYHDVVKKRLKRLARWLIAEAGGEVKVFVDTAPVPEKPLGQAAGLGWQGKHTNLVSRELGSWFFIGSVFTTLDLTPDKPEVDHCGSCRACLDICPTNAFPAPYQLDARRCISYLTIEHHGPVDEDLRALMGNRIYGCDDCLAVCPWNKFASRAAEVKYHARDDLLAPGLAELARLDDTAFRARFSGSPIKRIGRNRFVRNVLYAIGNSGLPHLRAVAQDLVEDPDATVADAARWAVMRLADVANTRAGSGD

SEQ ID NO: 78223 - protein, 342 aa, unidentified
  source 1..342: note = Marivivens niveibacter
  REGION 1..342: note = tr|A0A251WYU8|A0A251WYU8_9RHOB Epoxyqueuosine reductase OS=Marivivens niveibacter OX=1930667 GN=queG; PE = 3 SV=1
MISKDQIRAFALDAGFAKMGVCRPDAVPDIAARLQDFVDAGRHGDMAWMADRMHWRGNPAELWPEAKSVIMLAEPYTPDHDPMAVIDQHDRAAISVYAQNRDYHDVVKKRLKKVGRWMLEQQRDEAIKVFVDTAPVMEKPLGQAAGLGWQGKHTNLLGRDLGSWFFLGAIFTTIELEPDDAEVSYCGSCTACLTSCPTDAFPAPYQIDARRCISYLTIEFGGQVPHDLREKMGNRIYGCDDCLAACPWNKFAADAREVKYAARDDLIAPKLSELVTLDDPSFRAMFSGSPIKRIGRNRFVRNVLYAIGNSGDPALIESAKALTHDPDPVVAEAATWAVSRLV

SEQ ID NO: 78224 - protein, 307 aa, Marixanthomonas ophiurae
  REGION 1..307: note = tr|A0A3E1QBS9|A0A3E1QBS9_9FLAO Epoxyqueuosine reductase OS=Marixanthomonas ophiurae OX=387659 GN=queG; PE = 3 SV=1
MSIKEQNTKLIKTEAKRLGFLSCGISKAEFLEEEAPRLETWLKQNMHGEMSYMENYFDKRLDPTKLVPDSKSVISLLLNYYPSETQNEDSYKISKYAYGRDYHFVIKDKLKQLLNHIQEEIGDVHGRAFVDSAPVLDKAWAAKSGLGWIGKHSNLLTKQTGSFYFIAELIVNLDLEYDTPVTDHCGSCTACIDACPTQAIVDPYVVDGSKCISYLTIELKNEIPTEFSKKMDDWMFGCDICQDVCPWNRFSKPHNEPLFNPHPELLENTKKDWEEITKELFNEIFRKSAVKRTKYEGLKRNIQYLKN

SEQ ID NO: 78225 - protein, 307 aa, Marixanthomonas sp.
  REGION 1..307: note = tr|A0A2U0I844|A0A2U0I844_9FLAO Epoxyqueuosine reductase OS=Marixanthomonas sp. HN-E44 OX=2174845 GN=queG; PE = 3 SV=1
MNSKEEHTKLIKAAAKRLGFLSCGISKAEFLEDEAPRLETWLNKNMNGEMGYMENYFDKRLDPTKLVPGSKSVISLLLNYYPSEKQKSDTYKISKYAYGRDYHFVIKDKLKQLMHVIQEEIGEVNGRAFVDSAPVLDKAWAAKSGLGWIGKHSNLLTKQTGSFYFIAELIIDLDLEYDTPVTDHCGSCTACIDACPTQAIVDPYVVDGSKCISYLTIELKNEIPNEFSGKMEDWMFGCDICQDVCPWNRFSKPHNEPLFNPHPALLENSKQDWEEITKEVFNEIFRKSAVKRTKYEGLKRNIQFLKN

SEQ ID NO: 78226 - protein, 379 aa, unidentified
  source 1..379: note = Martelella endophytica
  REGION 1..379: note = tr|A0A0D5LV20|A0A0D5LV20_9RHIZ Epoxyqueuosine reductase OS=Martelella endophytica OX=1486262 GN=queG; PE = 3 SV=1
MAERGDKLKRFIKDEARALGFSDCRIARAEDMPEAAARLRDGVARGYYGEMAWMAETLERRSSPLALWPEARSVIMLSMNYGPDEDPRPLLARRDRANISVYARNRDYHDVVKGKLKQMAGRFAARTGAEVKVFVDTAPVMEKPIAEKAGIGWQGKHTNLVSRSQGSWFFLGSIFTTEELDPDAAERDHCGSCRACLDACPTDAFPAPYRLDARRCISYLTIEHHGTIPLEFRQAMGNRIYGCDDCLAACPWNKFAKAASEMKLAAREDLKAPEIARFLAFDDAGFRSFFTGSPVKRIGRDRFVRNCLIAAGNSGLASLIAPCRALLDDESPAVRAMAVWALSRLLPADAFATLARTRKPEHDKTVLEEWSGAGETLCI

SEQ ID NO: 78227 - protein, 379 aa, Martelella mediterranea
  REGION 1..379: note = tr|A0A2T0JSR1|A0A2T0JSR1_9RHIZ Epoxyqueuosine reductase OS=Martelella mediterranea OX=293089 GN=queG; PE = 3 SV=1
MAERREKLKRFVQAEAKAIGFDACRIARAEDMPEAAAALGEFVAKGYYGQMKWMAETLERRSSPLKLWPDARSVIMLAMNYGPEEDPRPLLKQPDRANISVYARNRDYHDVIKGKLKQMAGRFAARSGADVKVFVDTAPVMEKPIAAKAGIGWQGKHTNLVSREFGSWLFLGSIFTTEELEPDRAEKDFCGSCRACLDACPTAAFPAPYKLDARRCISYLTIEHHGVIPEEFREAMGNRIYGCDDCLAACPWNKFAQSASEMKLAARDDLKAPELSMFLGFDDAAFRKFFTGSPIKRIGRNRFVRNCLIAAGNSGHGFLADQCRVLADDESPEVRAMAVWALARLLPQAEFAALARARPRDTDEDVRREWQREEEMLCI

SEQ ID NO: 78228 - protein, 379 aa, Martelella mediterranea
  REGION 1..379: note = tr|A0A1U9Z750|A0A1U9Z750_9RHIZ Epoxyqueuosine reductase OS=Martelella mediterranea DSM 17316 OX=1122214; GN = queG PE=3 SV=1
MNERSEKLKYFLREEALSQGFSACRIARAEDMPEAANALAEGIAKGHYGEMAWMAETFERRSSPLKLWPEARSVIMLAMNYGPEDDPRPLLKRKDRANISVYARNRDYHDVIKGKLKQIAGRFAARSGADVKVFVDTAPVMEKPLAEKAGIGWQGKHTNLVSRQFGSWLFLGSIFTTEDIAPDTAERDHCGSCRACLDVCPTKAFPRPYRLDARRCISYLTIEHHGVIPLEFREAMGNRIYGCDDCLAACPWNKFAEQSSEMKLIARDDLKAPRLSQFLGFDDADFRAFFSGSPIKRIGRDRFVRNCLIAAGNSGDAALVPLCRRLIDDDSAAVRAMAVWALARLLPGKEFAALARTRLHESDETVRHEWQREEETLCI

SEQ ID NO: 78229 - protein, 379 aa, Martelella sp.
  REGION 1..379: note = tr|A0A2E1BE45|A0A2E1BE45_9RHIZ Epoxyqueuosine reductase OS=Martelella sp. OX=1969699 GN=queG PE=3 SV=1
MDERTEKLKQFLREEALSQGFSACRIARAEDMPEAAQALAEGIAKGHYGEMAWMAETFERRSSPLKLWPEARSVIMLAMNYGPEDDPRPLLKRKDRANISVYARNRDYHDVIKGKLKQIAGRFAARSGADVKVFVDTAPVMEKPLAEKAGIGWQGKHTNLVSRQFGSWLFLGSIFTTEDLAADAAERDHCGSCRACLDVCPTNAFPAPYRLDARRCISYLTIEHHGVIPLEFREAMGNRIYGCDDCLAACPWNKFAEQSSEMKLIARDDLKAPRLSQFLGFDDAAFRAFFTGSPIKRIGRDRFVRNCLIAAGNSGDATLAPLCRLLIDDDSAAVRAMAVWALARLLPGKEFAALARTRLHESDETVRHEWQREEETLCI

SEQ ID NO: 78230 - protein, 379 aa, Martelella sp.
  REGION 1..379: note = tr|A0A5C4JQQ7|A0A5C4JQQ7_9RHIZ Epoxyqueuosine reductase OS=Martelella sp. GH2-6 OX=2583532 GN=queG PE=3; SV = 1
MAERQDRLKRFLKDEARAIGFDACRIARADDMPDSAAALRDFVENGYHGQMAWMNETLERRSSPLSLWPEARSVIMLAMNYGPDEDPRPLLERRDRANISVYARNRDYHDVIKGKLKQMAGRFAARSGADVKVFVDTAPVMEKPLAEKAGIGWQGKHTNLVSRDYGSWLFLGSIFTTEALDPDSAEKDHCGSCRACLDVCPTDAFPAPYRLDARRCISYLTIEHHGVIPEEFRSAMGNRIYGCDDCLAACPWNKFAETASEMKLSARADLKAPELSMFLGFDDAAFRKFFTGSPVKRIGRDRFVRNCLIAAGNSGHPHLAAHCRSLLEDDSAAVRAMAVWALARLLSKTEFAALAKSRLRDTDEDVRREWKREEEVPCI

SEQ ID NO: 78231 - protein, 362 aa, Massilia albidiflava
  REGION 1..362: note = tr|A0A411WTD5|A0A411WTD5_9BURK Epoxyqueuosine reductase OS=Massilia albidiflava OX=321983 GN=queG PE=3; SV = 1
MSLSPEVLSTLAAAIKRWGRELGFAEVRIADIDLAAAEAGLQAWLDAGMHGEMDYMAAHGMKRARPAELVPGTVRVITARMDYLPASHDAGWRAREQARLADPQAAVISVYARGRDYHKVLRARLQQLADRVRSEVGEFGYRVFTDSAPVMELPLAEKSGLGWRGKHTLLINREAGSMFFMGEILVDLPLPVDPPTEAHCGACSACITVCPTGAILGPGRLDARRCISYLTIELKGSIPEDLRPLLGNRVYGCDDCQTACPWNKFAGRATLPDFDERHGLGHASMITLFGWSEEEFNRNMEGSPIRRIGHERWLRNLAVGLGNAAALGARGDAAILAALRSRLDHPSALVREHVAWALARHG

SEQ ID NO: 78232 - protein, 380 aa, unidentified
  source 1..380: note = Massilia armeniaca
  REGION 1..380: note = tr|A0A2R4CIT2|A0A2R4CIT2_9BURK Epoxyqueuosine reductase OS=Massilia armeniaca OX=2072590 GN=queG PE=3; SV = 1
MSPSPEELTALAAAIKAWGQELGFAEVRIADIDLAAAEAGLQAWLDAGMHGEMDYMATHGMKRARPAELVPGTVRVITARMNYLPASAGADWREREGARLADPEAAVISVYARGRDYHKVLRARLQQLADRIQGAIGAFGYRVFTDSAPVMELPLAEKSGLGWRGKHTLLLNRAAGSMFFMGEILVDLPLPVDAPTAAHCGQCSACITACPTQAILGPGRLDARRCISYLTIELKGAIPEELRPLLGNRVYGCDDCQTACPWNKFAQRATLPDFDERHGLGTASMLALFAWSEEEFNRNMEGSPIRRIGHERWLRNLAVGLGNAADAGARGDAAIVAALLARAEHPSELVREHAVWALARHGVETGVTHRPAAYPASAAD

SEQ ID NO: 78233 - protein, 365 aa, Massilia aurea
  REGION 1..365: note = tr|A0A422QIS7|A0A422QIS7_9BURK Epoxyqueuosine reductase OS=Massilia aurea OX=373040 GN=queG PE=3 SV=1
MPTSPDPAPDLPQLARAIKAWGKELGFADVRIADVDLGHLEAGLQAWLDAGYHGEMDYMASHGMKRARPAELVPGTVRAIVARMDYLPASQDADWRAGERLRQQDPDAAVVSVYARGRDYHKVLRNRLQSLAGKIQEAIGPFGFRVFTDSAPVMELPLAEKAGLGWRGKHTLLLSRAAGSTFFIGEILVDLPLPVDPPTGAHCGQCQACIDLCPTGAILGPGKLDARRCISYLTIELKSSIPEELRPLIGNRIYGCDDCQVACPWNKFAQRASVPDFDERNGLGEGDLVGLFAWDEEEFNRRMEGSPIRRIGHERWLRNLAVGLGNAAEKKRGDTAIVAALQSRRDHPSELVREHVAWALARHAA

SEQ ID NO: 78234 - protein, 368 aa, unidentified
  source 1..368: note = Massilia eurypsychrophila
  REGION 1..368: note = tr|A0A2G8TKC6|A0A2G8TKC6_9BURK Epoxyqueuosine reductase OS=Massilia eurypsychrophila OX=1485217 GN=queG; PE = 3 SV=1
MLPAQPDLPELARAIKQWGAELGFADLRITDADLAHAEPGLQAWLDEGHHGEMDYMASHGMKRARPSELVPGTVRVISARMDYLPAATPPDWRERETARLADPGAAVVSLYARGRDYHKVLRARLQQLAARIEAAAGQFGYRVFTDSAPVMEIPLAEKAGLGWRGKHTLMLNREAGSMFFLGEILVDLPLPIDAPASAHCGQCSACIDVCPTGAIIGPGRLDARRCISYLTIELKSSIPVELRPLIGNRIYGCDDCQTMCPWNKFAQRATVPDFDQRNGLGEASLVALFGWSEEQFERRMEGSPIRRIGHERWLRNLAVGLGNAADSIKGDAAIVAALEARAQHPSAMVREHVEWALARHARCDQHGV

SEQ ID NO: 78235 - protein, 362 aa, Massilia flava
  REGION 1..362: note = tr|A0A562PVU2|A0A562PVU2_9BURK Epoxyqueuosine reductase OS=Massilia flava OX=871742 GN=queG PE=3 SV=1
MSLSPEVLSTLAGAIKAWGRELGFAEVRIADIDLAAAEAGLQAWLDAGMHGEMDYMASHGMKRARPAELVPGTVRVITARMNYLPVSHDEGWRERERARLDDPQAAVISVYARGRDYHKVLRARLQQLADRIRAEVGEFGYRVFTDSAPVMELPLAEKSGLGWRGKHTLLINRDAGSLFFMGEILVDLPLPVDAPTTSHCGQCSACIDVCPTSAILGPGRLDARRCISYLTIELKGAIPLELRPLIGNRVYGCDDCQTVCPWNKFAQRATLPDFDERHGLGTAGMVELFAWSEDDFNRKMEGSPIRRIGHERWLRNLAVGLGNAAAAGARGDSAIVAALQARQAHPSELVREHVAWALAQHG

SEQ ID NO: 78236 - protein, 366 aa, unidentified
  source 1..366: note = Massilia glaciei
  REGION 1..366: note = tr|A0A2U2I7M4|A0A2U2I7M4_9BURK Epoxyqueuosine reductase OS=Massilia glaciei OX=1524097 GN=queG PE=3 SV=1
MPAVQPDLDALARAIKQWGAELGFADVRIADADLAHAEEGLLAWLAEGRHGEMDYMASHGLKRARPAELVPGTVRVISARMDYLPSATPADWRGREAARLADPDAAVVSLYARGRDYHKVLRARLQQLAARIEAAAGPFGYRVFTDSAPVMELPLAEQAGLGWRGKHTLLLNREAGSMFFLGEILVDLPLPVDAPASAHCGQCRACIDVCPTQAILGPGRLDARRCISYLTIELKGSIPLELRPLIGNRVYGCDDCQTACPWNKYARRAVVPDFDERNELGSAGMVALFGWTGDEFERRLEGSPIRRIGHERWLRNLAVGLGNAAGKKRGDANIVAALRARAGHPSALVREHVEWALALHGADAGS

SEQ ID NO: 78237 - protein, 368 aa, unidentified
  source 1..368: note = Massilia lurida
  REGION 1..368: note = tr|A0A562R7A9|A0A562R7A9_9BURK Epoxyqueuosine reductase OS=Massilia lurida OX=1036180 GN=queG PE=3 SV=1
MSSSAGLSSEALAALAAAVKGWGRELGFAEVRIADADLSAAEPGLQAWLDAGMHGEMDYMASHGMKRARPAELVPGTVRVITARMNYLPASHQGDWRARERARLDDPQAAVISVYARGRDYHKVLRARLQGLAERIQKEIGAFGYRVFTDSAPVMELPLAEKSGLGWRGKHTLLLNRAAGSMFFMGEILVDLPLPVDAPAEAHCGQCSACIAVCPTQAIVAPGRLDARRCISYLTIELKSAIPVELRPLIGNRVYGCDDCQTICPWNKFAQRATLPDFDERHGLGSASMIELFAWSEDDFNRRMEGSPIRRIGHERWLRNLAVGLGNAATLGAAGDPAIVAALRSRLDHPSELVREHVTWALDQHGYC

SEQ ID NO: 78238 - protein, 362 aa, Massilia lutea
  REGION 1..362: note = tr|A0A4P6KZH6|A0A4P6KZH6_9BURK Epoxyqueuosine reductase OS=Massilia lutea OX=321985 GN=queG PE=3 SV=1
MSLSPEVLSSLAAAVKRWGHELGFAEVRIADIDLATAEAGLQAWLDAGMHGEMDYMAAHGMKRARPAELVPGTVRVITARMDYLPPSHDADWRLRERGRLEDPNAAVISVYARGRDYHKVLRARLQQLADRIRGEVGEFGYRVFTDSAPVMELPLAEKSGLGWRGKHTLLINRDAGSMFFMGEILVDLPLPVDAPTDAHCGQCSACITACPTGAILGPGRLDARRCISYLTIELKGSIPEELRPLLGNRVYGCDDCQTACPWNKFAGRATLPDFDERHGLGSAGMVTLFAWSEDDFNRNMEGSPIRRIGHERWLRNLAVGLGNAAALGARGDAAIVATLRSRLDHPSELVREHVQWALAQHG

SEQ ID NO: 78239 - protein, 366 aa, unidentified
  source 1..366: note = Massilia namucuonensis
  REGION 1..366: note = tr|A0A1I7FVR9|A0A1I7FVR9_9BURK Epoxyqueuosine reductase OS=Massilia namucuonensis OX=1035707 GN=queG; PE = 3 SV=1
MSAVSPGSVNNLVELAASIKEWGGELGFAEVRVADVDLSAAEAGLQAWLDAGMHGEMDYMAAHGMKRARPAELVPGTVRAITARMNYLPQSAGEDWREREAARLADPSAAVVSIYARGRDYHKVIRARLQQLADRIQAAIGPFGYRVFTDSAPVMELPLAEKSGLGWRGKHTLLLSRSAGSMFFMGEILVDLPLPVDEPTGAHCGQCGACITACPTQAILGPGRLDARRCISYLTIELKGAIPEELRPLVGNRVYGCDDCQTACPWNKFAQRATLPDFDERHGLGAAGMVELFGWSEEEFNRRMEGSPIRRIGHERWLRNIAVGLGNAAALGARGDAAIVAALEARRDHPSELVREHVEWALARHG

SEQ ID NO: 78240 - protein, 365 aa, Massilia oculi
  REGION 1..365: note = tr|A0A2S2DKZ4|A0A2S2DKZ4_9BURK Epoxyqueuosine reductase OS=Massilia oculi OX=945844 GN=queG PE=3 SV=1
MPTSPDPAPDLPQLARAIKAWGKELGFADVRIADVDLGHLEAGLQAWLDAGYHGEMDYMASHGMKRARPAELVPGTVRAIVARMDYLPANGDGDWRAGERLRQQDPDAAVVSVYARGRDYHKVLRNRLQSLAGRIQDAIGPFGFRVFTDSAPVMELPLAEKAGLGWRGKHTLLLSRAAGSTFFIGEILVDLPLPVDPPTGAHCGQCQACIDLCPTGAILGPGKLDARRCISYLTIELKSSIPEALRPLIGNRIYGCDDCQVACPWNKFAQRASVPDFDERNGLGEGDLVGLFAWDEEEFNRRMEGSPIRRIGHERWLRNLAVGLGNAAEKKRGDTAIVAALQSRRDHPSELVREHVAWALARHAA

SEQ ID NO: 78241 - protein, 363 aa, unidentified
  source 1..363: note = Massilia phosphatilytica
  REGION 1..363: note = tr|A0A2S8HEQ5|A0A2S8HEQ5_9BURK Epoxyqueuosine reductase OS=Massilia phosphatilytica OX=2026176 GN=queG; PE = 3 SV=1
MSAQLPVQPDLPALAQAIKAWGAELGFADVRIADIDLAEHEAGLQAWLDAGHHGEMDYMASHGMKRARPAELVPGTVRVISARMDYLPMATPADWRARERLRQDDPEAAVVSIYARGRDYHKVLRNRLQALAEKVRAAVGEYGYRVFTDSAPVMELPLAQKAGLGWRGKHTLLLSREAGSMFFIGEILVDLPLPVDEPTGTHCGQCSACIDVCPTGAILGPGRLDARRCISYLTIELKGAIPEEFRPLIGNRIYGCDDCQLACPWNKFAQRATVPDFDERNGLGTAGLVELFGWSEDDFNRRLEGSPIRRIGHERWLRNLAVGLGNAITSDEIVAALRARADHPSALVREHVAWALARHGRTV

SEQ ID NO: 78242 - protein, 364 aa, Massilia plicata
  REGION 1..364: note = tr|A0A4P7BDL1|A0A4P7BDL1_9BURK Epoxyqueuosine reductase OS=Massilia plicata OX=321984 GN=queG PE=3 SV=1
MSPSQEELASLAAAIKGWGIALGFAEVRIADVDLSAAETGLQAWLDAGMHGEMDYMASHGMKRARPAELVPGTVRVITARMNYLPESAGADWRAREQARLADPNAAVISVYARGRDYHKVLRARLQQLADKVRAAVGEFGYRVFTDSAPVMELPLAEKSGLGWRGKHTLLLNRAAGSMFFMGEILVDLPLPVDAPIDAHCGQCSACITACPTGAIVAPGRLDARRCISYLTIELKGAIPPELRSLIGNRVYGCDDCQTACPWNKFAQRATLPDFDERHGLGSAGMLELFAWSEEEFNRRMEGSPIRRIGHERWLRNLAVGLGNAAAAGLRGDAAIVAALRSRADHPSELVREHVSWALALHGPQ

SEQ ID NO: 78243 - protein, 369 aa, unidentified
  source 1..369: note = Massilia psychrophila
  REGION 1..369: note = tr|A0A2G8T374|A0A2G8T374_9BURK Epoxyqueuosine reductase OS=Massilia psychrophila OX=1603353 GN=queG PE=3; SV = 1
MPTQSPDVPNLLPDMHDLARAIKQWGVELGFADLRITDIDLAHAEPGLQAWLDAGHHGEMDYMASHGMKRARPGELVPGTVRVISARMDYLPAATPGDWRAREAARLDDPRAAVVSLYARGRDYHKVLRARLQQLASRIEAQAGQFGYRVFTDSAPVMELPLAEKAGLGWRGKHTLMLNREAGSMFFLGEILVDLPLPVDTPTGAHCGQCRACIDACPTAAILGPGRLDARRCISYLTIELKTSIPVELRPLIGNRIYGCDDCQIVCPWNKFAQRASLPDFDERNAMGDATLTDLFGWSEEQFGRRTEGSPIRRIGHERWLRNLAVALGNAADRAKGDAAIVSALRARERHPSALVREHVEWALARHLN

SEQ ID NO: 78244 - protein, 364 aa, Massilia sp.
  REGION 1..364: note = tr|A0A354ITV7|A0A354ITV7_9BURK Epoxyqueuosine reductase OS=Massilia sp. OX=1882437 GN=queG PE=3 SV=1
MIPASPDLHELARAIKMWGRELGFADVRIADVDLAHAEEGLQAWLAAGHHGEMDYMASHGMKRARPAELVPGTVRAIVARMDYLPKNNEPGSAWRARETARQADPGAAVVSVYARGRDYHKVLRNRLAQLAERVKREIGEYGYRVFTDSAPVMELPLAAKAGLGWRGKHTLLLSREAGSTFFIGEILVDLPLPVDEATSGHCGQCSNCIDLCPTQAILGPGRLDARRCISYLTIELKGSIPLELRPLIGNRIYGCDDCQLACPWNKFAQRAVLPDFDERNGLGDASLVELFAWEEEEFNRRTEGSPIRRIGHERWLRNLAVGLGNAASSRAGDPAIVAALRARAEHPSALVREHVRWALGQHGA

SEQ ID NO: 78245 - protein, 397 aa, Massilia sp.
  REGION 1..397: note = tr|A0A344JP81|A0A344JP81_9BURK Epoxyqueuosine reductase OS=Massilia sp. YMA4 OX=1593482 GN=queG PE=3 SV=1
MSPSPEELTALAAAIKAWGQELGFAEVRIADIDLAAAEAGLQAWLDAGMHGEMDYMATHGMKRARPAELVPGTVRVITARMNYLPESAGAGWRERERARLADPQAAVISVYARGRDYHKVLRARLQQLADRIQGAIGAFGYRVFTDSAPVMELPLAEKSGLGWRGKHTLLLNRAAGSMFFMGEILVDLPLPIDPPTEAHCGQCSACITACPTQAILGPGRLDARRCISYLTIELKGAIPEELRPLLGNRVYGCDDCQTACPWNKFAQRATLPDFDERHGLGSASMLALFAWSEEEFNRNMEGSPIRRIGHERWLRNLAVGLGNAADAGARGDAAIVAGLLARAEHPSALVREHVAWALARHGAERCVGGREGLGSDPAGPTPGVTRPPAAHPGCAAD

SEQ ID NO: 78246 - protein, 365 aa, Massilia timonae
  REGION 1..365: note = tr|A0A1S2N957|A0A1S2N957_9BURK Epoxyqueuosine reductase OS=Massilia timonae OX=47229 GN=queG PE=3 SV=1
MPTSPNPAPDLPELARAIKAWGKELGFADVRVADVDLGHLEAGLQAWLDAGYHGEMDYMASHGMKRARPAELVPGTVRAIVARMDYLPAAQDADWRARERLRQQDPEAAVVSVYARGRDYHKVLRNRLQSLAGRIQDAIGPFGFRVFTDSAPVMELPLAEKAGLGWRGKHTLLLSRAAGSTFFIGEILVDLPLPVDPPTGAHCGQCQSCIDLCPTGAILGPGKLDARRCISYLTIELKNSIPEELRPLIGNRIYGCDDCQVACPWNKFAQRAAVPDFDERNGLGGGDLLELFAWDEEEFNRRMEGSPIRRIGHERWLRNLAVGLGNAAEKKRGDAVIVAALQSRLDHPSELVREHVAWALARHAA

SEQ ID NO: 78247 - protein, 365 aa, Massilia timonae
  REGION 1..365: note = tr|K9DWW3|K9DWW3_9BURK Epoxyqueuosine reductase; OS = Massilia timonae CCUG 45783 OX=883126 GN=queG PE=3 SV=1
MPTSPNPAPDLPELARAIKAWGKELGFADVRVADVDLGHLEAGLQAWLDAGYHGEMDYMASHGMKRARPAELVPGTVRAIVARMDYLPAAQDADWRARERLRQQDPEAAVVSVYARSRDYHKVLRNRLQSLAGRIQDAIGPFGFRVFTDSAPVMELPLAEKAGLGWRGKHTLLLSRAAGSTFFIGEILVDLPLPVDPPTGAHCGQCQSCIDLCPTGAILGPGKLDARRCISYLTIELKNSIPEELRPLIGNRIYGCDDCQVACPWNKFAQRAAVPDFDERNGLGGGDLLELFAWDEEEFNRRMEGSPIRRIGHERWLRNLAVGLGNAAEKKRGDAVIVAALQSRLDHPSELVREHVAWALARHAA

SEQ ID NO: 78248 - protein, 362 aa, unidentified
  source 1..362: note = Massilia umbonata
  REGION 1..362: note = tr|A0A4P8HRE0|A0A4P8HRE0_9BURK Epoxyqueuosine reductase OS=Massilia umbonata OX=864828 GN=queG PE=3 SV=1
MSLSPEVLSTLAAAIKRWGRELGFAEVRIADIDLAAAEPGLQAWLDAGMHGEMDYMAAHGMKRARPAELVPGTVRVITARMDYLPPSQDADWRARERARLDDPQAAVISVYARGRDYHKVLRARLQQLADRVRNEIGEFGYRVFTDSAPVMELPLAEKSGLGWRGKHTLLLNRDAGSMFFMGEILVDLPLPVDAPADAHCGQCSACITACPTNAILGPGRLDARRCISYLTIELKGSIPEEMRPLLGNRVYGCDDCQTACPWNKFAQRATLPDFDERHGLGSASMVALFGWTEEEFNRNMEGSPIRRIGHERWLRNLAVGLGNAATLGARGDAAIVAALRSRLDHPSDLVREHVGWALAQHG

SEQ ID NO: 78249 - protein, 363 aa, unidentified
  source 1..363: note = Massilia violaceinigra
  REGION 1..363: note = tr|A0A2D2DV65|A0A2D2DV65_9BURK Epoxyqueuosine reductase OS=Massilia violaceinigra OX=2045208 GN=queG; PE = 3 SV=1
MHSSHAEPDLSALAQSIKHWGAELGFADVRISDADLSHAEAGLQAWLDAGRHGEMDYMASHGMKRARPAELVPGTVRVISARMDYLPAATPDDWREREAARLRDPGAAVISIYARGRDYHKVLRSRLQQLAERIERETGQLGFRVFTDSAPVMELPLAEKAGIGWRGKHTLILNRDAGSMFFIGEILVDLALPVDAPASAHCGQCSACITACPTQAILAPGRLDARRCISYLTIELKNSIPEELRPLIGNRVYGCDDCQTACPWNKFAQRAVVPDFDERNELGSADMVSLFGWSEEEFGRKLEGSPIRRIGHERWLRNLAVGLGNAAEGARGDARIVAALQARADDASPMVREHVAWALKRHA

SEQ ID NO: 78250 - protein, 372 aa, unidentified
  source 1..372: note = Massilia yuzhufengensis
  REGION 1..372: note = tr|A0A1I1V1K2|A0A1I1V1K2_9BURK Epoxyqueuosine reductase OS=Massilia yuzhufengensis OX=1164594 GN=queG; PE = 3 SV=1
MTTSPDLPELARAIKAWGRELGFADVRIADVDLAHAEAGLQAWLDAGFHGEMDYMASHGMKRARPNELVPGTVRAIVARMDYLPATRGDGWRAEEAARQLEPGAAVVSVYARGRDYHKVLRNRLQALAERVKLAVGELGYRVFTDSAPVMELPLAEKSGLGWRGKHTLLLSRAAGSTFFIGEILVDLPLPVDPPTGAHCGQCQACIDVCPTQAILGPGRLDARRCISYLTIELKGSIPEELRPLIGNRIYGCDDCQLACPWNKFAQRAALPDFDERNGLGAAGMVDLFAWDEDEFNRRMEGSPIRRIGHERWLRNLAVGLGNAAASAAGRGDAAIVAALRARAAHPSSLVREHVAWALARHGVLLDALEAQA

SEQ ID NO: 78251 - protein, 318 aa, unidentified
  source 1..318: note = Massilimicrobiota sp.
  REGION 1..318: note = tr|A0A1Y4WD78|A0A1Y4WD78_9FIRM Uncharacterized protein OS=Massilimicrobiota sp. An105 OX=1965540; GN = B5E48_06090 PE=4 SV=1
MKEILMKGDTLGKSIYQAAIEAGFDNCGIISLDDMIPYETRLQERIEKVPESKAFYEGIYTNANIKKCYPWAKSLVICTIWYGKYRYPKNLQNKYAKGFFLSYESDKSTKLYKQTQSLNTWFDKQGIRWSNKKIYGLRYAAMQAGLGIIRRNNFFYDEKGSWLELVGFVIDQECRLYQNKQLRPCSPNCNLCIKNCPTRSLFAPYTMNPFKCISYCTTFGKGNIPKDVEENSFSTWIVGCDRCQDVCPYNRNDWDEDEDFPNLEELVPLLEPEILLKLSDEQLRNLIIPKTVGHIDTKDVETLRKNAIRFLKIQNKIH

SEQ ID NO: 78252 - protein, 318 aa, Mastigocladus laminosus
  REGION 1..318: note = tr|A0A4D9CQZ7|A0A4D9CQZ7_MASLA Epoxyqueuosine reductase OS=Mastigocladus laminosus UU774 OX=1594576; GN = queG PE=3 SV=1
MNQFPGTNSAEVKQQAVELGFHKVGIVAVNGIDEQQMERLQAWIELGYHADIKWMTSPKRQDIKLVMSEVRSLICVALNYYTPHQRPRGEEYAKISRYAWGRDYHKVMHKKLKALSGWLHRQGENIQARYYADTGPVQDKVWAQKAGIGWIAKNGNVITREYGSWVFLGEVLTNLELEPDKPHTQHCGNCTRCLEACPTDAITSPFVVDANRCIAYHTIENRQEKLPEAIASNLQGWVAGCDICQDVCPWNQRFASPTDVEEFQPYPGNIAPKLVELAQISDHEWDERFPASALRRIKPEMLRRNARANLNAFQQAQE

SEQ ID NO: 78253 - protein, 316 aa, Mastigocoleus testarum
  REGION 1..316: note = tr|A0A0V7ZFN5|A0A0V7ZFN5_9CYAN Epoxyqueuosine reductase OS=Mastigocoleus testarum BC008 OX=371196; GN = queG PE=3 SV=1
MNQFTFISSTQIKQKVLEIGFHKVGIADIDIIDNQVQRLRAWLALGYHADMEWMNSPKRQDIKLVMPEVRSLICVALNYYTPHQRPKGLEYAKISRYAWGRDYHKVMHKKLKVLCRWLESFSPEIKTRYYADTGPIQDKVWAQKAGIGWIAKNGNLITREYGSWVFLGEVLTNIELTPDNPHTEHCGSCTRCLDACPTNAITQPFVVDANRCIAYHTIENRQKQLPEDIKANLRNWVAGCDICQDVCPWNERFAHTTDVEEFNPYSGNLAPKLVELAKISNEEWDRQFPASALRRIKPEMLRRNARANLDTLGAPE

SEQ ID NO: 78254 - protein, 318 aa, Megasphaera cerevisiae
  REGION 1..318: note = tr|A0A0J6WP78|A0A0J6WP78_9FIRM 4Fe-4S ferredoxin; OS = Megasphaera cerevisiae DSM 20462 OX=1122219; GN = AB840_14965 PE=4 SV=1
MEYNELSEKIYEMAIQCGFENCGIIPLSEVDGYKQRLNERREKIPQSVQFYKKMEKFTCLEKRYPWGKSIVVCTSWLGKYQYPKSLQGKYAKAFMLSGDTVPDSEEHKNKKRFEAWMRDQKIYFEGGETNAPLRDVPLRHAAVAAGLGIFRKNNFFYTEKGSYYALEGYIIDKTCVHKHVNNIKSCSDTCLLCQQACKTQALSSPYTMNPLACVSFWTTFGKGRIPKSLDEGQFEDWVCGCDSCQDACPYNRRDWSVGEKFPGLEELTELLRPQNIVKASDAVLCEKVIPKTERHIPPDQVETLRITAVRVLRQSRKT

SEQ ID NO: 78255 - protein, 297 aa, Megasphaera cerevisiae
  REGION 1..297: note = tr|A0A0J6WTE4|A0A0J6WTE4_9FIRM (Fe-S)-binding protein OS=Megasphaera cerevisiae DSM 20462 OX=1122219; GN = AB840_11495 PE=4 SV=1
MNSYDIKKFAASLGLKCTGIAPADLKGPAEEADICPLAAGEGQDRYAPERLLPGCRSVIVILFPYYVSEDTAANLAMYCRCPDYHLVIRTYLHRIESFLQELCPESRQYSIIDTSPLADRWLAYKAGLGFFGDNHCFINVTYGSYCFIGSILTTLRLEPDLPLEKECLHCGACKTACPGHCFTSASGYDYRFCKSFLTQKKGSLTPPEITVLQKTPLIFGCDECQQVCPHNANIADTPLPEFRQDRLSLLHRSDIADMSNRQFQTAYSRRAFAWRGKKLLLRNLDYISKTASETFED

SEQ ID NO: 78256 - protein, 317 aa, Megasphaera elsdenii
  REGION 1..317: note = tr|A0A2S0M483|A0A2S0M483_MEGEL Epoxyqueuosine reductase OS=Megasphaera elsdenii OX=907 GN=C6Y28_00650; PE = 4 SV=1
MDTDKLGQVIYEKALACGFDDCGIIPIDDMDGFQQRLQEREEKVPSSAFFYQGMGDFANIKKRFPWAKSVIIGTYWLGKYRFPPSLQGKYGKAFFLSPSNSVCKESLTARRDFETWFKEQGIRCEGGDQFGHPSIGPLRYAAMMAGLGIIRKNNFFYTKKGSFVELVGYVIDQKAWCHHVPDIRPCAESCHLCQTHCPSGALKGPFTMSPLECVSFITTFAKGELTPGLNDKNCSTWICGCDSCQDACPYNRQHDWNQGDAYPGLEELAPQLQPKKLLAQSDTFIQEKVIPYTDYHIAADEAKTLKRCAARSLDNQM

SEQ ID NO: 78257 - protein, 317 aa, Megasphaera elsdenii
  REGION 1..317: note = tr|G0VQ86|G0VQ86_MEGEL Putative 4Fe-4S ferredoxin; OS = Megasphaera elsdenii DSM 20460 OX=1064535 GN=MELS_1393; PE = 4 SV=1
MDTDKLGQVIYEKALACGFDDCGIIPIDDMDGFQQRLQEREEKVPSSAFFYQGMGDFANIKKRFPWAKSVIIGTYWLGKYRFPPSLQGKYGKAFFLSPSNSVCKESLTARRDFETWFKEQGIRCEGGDQFGHPSIGPLRYAAMMAGLGIIRKNNFFYTKKGSFVELVGYVIDQKAWCHHVPDIRPCAESCHLCQTHCPSGALKGPFTMSPLECVSFITTFAKGELTPGLNDKNCSTWICGCDSCQDACPYNRQHDWNQGDAYPGLEELAPQLQPEKLLAQSDTFIQEKVIPYTDYHIAADEAETLKRCAARSLDNQM

SEQ ID NO: 78258 - protein, 317 aa, unidentified
  source 1..317: note = Megasphaera genomosp.
  REGION 1..317: note = tr|D3LUH3|D3LUH3_9FIRM Putative iron-sulfur cluster-binding protein OS=Megasphaera genomosp. type_1 str. 28L OX=699218 GN=HMPREF0889_0163 PE=4 SV=1
MNSLHIKQFIYQLGIPCVGIAPGQFPAPPPPARPCPLAAGQGAERYEPERLLSPCRSIIVMLFPYYVADPPTANLSLYCRSTDYHLLIRRYLQTVEAYLHQHYPSCRTLSVADTSPLADRYLAYLAGLGFIGDNDCFIHERYGSYCFIGSILTTLPLTPDTPLHRECYHCGACRHACPGHCFDGADYDYRLCKSYLTQKKGSLSLPEIEVLRKTPLIFGCDMCQAVCPHNAEIPETPLNDFKENRIYTLSHEAIASLSNREFQRKYGNRAFAWRGKKILLRNMEYLRLPPSMPEQAHGYTQQQHADENRRTYNKRNE

SEQ ID NO: 78259 - protein, 310 aa, unidentified
  source 1..310: note = Megasphaera genomosp.
  REGION 1..310: note = tr|A0A2J8B8K6|A0A2J8B8K6_9FIRM (Fe-S)-binding protein OS=Megasphaera genomosp. type_2 OX=699193; GN = CAL30_06685 PE=4 SV=1
MERDTNLIKQYIYTLGIPCVGIAPGTFSIPSYPQDICPLAAGEGDARYQPTTLLPSCQSVIVLLFPYYVKDPHPYNLSLYCRSIDYHTIIHHYLNEVTCFLTQTYPHQDFLSIVDTAPLSDRYLAYLAGLGFIGDNNCFINETYGSFCFIGSILTSLPLKPDHPQQRECFHCGACKRSCLGHCLDTAEYDYHLCKSYLTQKKGELSPMEIQVIQKTPLVFGCDICQDVCPHNHDIPETPIKEFHQSRIAYLKKSDLQELSNRQFQQLYKNRAFSWRGKGILLRNIQYLEEVQSNSEQRQNPNTKNDPSHK

SEQ ID NO: 78260 - protein, 304 aa, unidentified
  source 1..304: note = Megasphaera hexanoica
  REGION 1..304: note = tr|A0A344MJD9|A0A344MJD9_9FIRM Uncharacterized protein OS=Megasphaera hexanoica OX=1675036 GN=ACT01_07130; PE = 4 SV=1
MDTDKLGQVIYDKALACGFDDCGIIPIDDMDGFQQRLQEREEKVPSSAFFYQKMGDFANIKKRFPWAKSVIIGTYWLGKYRFPASLRGKYGKAFFLSPSNGVCKESLAARRDFETWFKEQGIRCEGGSQFGHRSIGPLRYAAMMAGLGIIRKNNFFYTKKGSFVELVGYVTDQKAWCHHVPDIRPCAESCHLCQAHCPSGALKGPFTMSPLECVSFITTFAKGKLTPGLDDKSCGTWICGCDSCQDACPYNRQHDWNQGDAYPGLEELAPQLQPEKLLAQSDTFIQEKVIPYTDYHIAADEAKH

SEQ ID NO: 78261 - protein, 290 aa, unidentified
  source 1..290: note = Megasphaera hexanoica
  REGION 1..290: note = tr|A0A344MHN7|A0A344MHN7_9FIRM (Fe-S)-binding protein OS=Megasphaera hexanoica OX=1675036 GN=ACT01_03765; PE = 4 SV=1
MNTDFIKDAARRLGLTCTGIASAHLPVPETEQPVCPLASGKGMERYDLTSLLPDCKAAVVILFPYYNKETEKTNLSLYCQLEDYHLIVPAYLEKLSAILTSYGGTQRCIADTSPLTERLLAVEAGLGFVGDNQCLIHPVYGSYCFIGAILTTLPLTPDAPMDRECLHCGACQRICPGGCLSEGTYDYHLCKSYLTQKKELLTDREMEVIARTPLIFGCDECQRVCPHNKGVPITPIVEFRQNRLTMLRKEDIESLTNRQFRTTYGNRPFSWRGKKILLRNLDIVHAKTGL

SEQ ID NO: 78262 - protein, 175 aa, Megasphaera micronuciformis
  REGION 1..175: note = tr|E2ZAJ4|E2ZAJ4_9FIRM 4Fe-4S ferredoxin-type domain-containing protein OS=Megasphaera micronuciformis F0359 OX=706434 GN=HMPREF9429_00457 PE=4 SV=1
MAVTAGLGFIGDNGCLIHETYGSYCFIGAVLTTADLEVDEPTKKECFHCGNCEKICPGNCFSGTAYNFVTCKSYLTQKKGDLTSQEQKIVAKTPYIFGCDECQRVCPHNKDIPVTPLADFRTDLLSYVDTRSFKNLTNRQFKETYGKRAFSWRGKAILIRNFTYIEQENTPESKK

SEQ ID NO: 78263 - protein, 290 aa, Megasphaera paucivorans
  REGION 1..290: note = tr|A0A1G9V2R7|A0A1G9V2R7_9FIRM Epoxyqueuosine reductase QueG (Queuosine biosynthesis) OS=Megasphaera paucivorans OX=349095 GN=SAMN05660299_01314 PE=4 SV=1
MDSNRLKKYARSLGLDCLGITSSELIIPAEGKKICPLAAGQGIERYTPQALLKNCRAVIVVLFPYYVPTAEPSNLSIYTQSLDYHLIIQNYLKLLQHFMEQEYPQSNHYLCADTSPLCDRYLAHQAGLGFIGDNNCFIHPIYGSYCFIGSLLTTVPLIPDKPLTKECFHCGACRKICPGNCFINSDYNYECCKSYLTQKKGDLTPPEIAIIKKTSLIFGCDECQRVCPHNRYIPITPISEFRKDRILQLRRTELLSLTNTQFRRTYGNRAFAWRGKSILLRNLEYMDKEL

SEQ ID NO: 78264 - protein, 290 aa, Megasphaera sp.
  REGION 1..290: note = tr|A0A3C1CQH2|A0A3C1CQH2_9FIRM DUF1730 domain-containing protein OS=Megasphaera sp. OX=2023260; GN = DCP59_04300 PE=4 SV=1
MNTDFIKDAARRLGLTCTGIASAHLPVPETEQPVCPLASGKGMERYDLTSLLPDCKAAVVILFPYYNRETEKTNLSLYCQLEDYHLIVPAYLEKLSAILTSYGGTQRCIADTSPLTERLLAVEAGLGFVGDNQCLIHPVYGSYCFIGAILTTLPLTPDAPMDRECLHCGACQRICPGGCLSEGTYDYHLCKSYLTQKKEPLTDREMEVIARTPLIFGCDECQRVCPHNKGVPITPIVEFRQNRLTMLRKEDIESLTNRQFRTTYGNRPFSWRGKKILLRNLDIVHAKTGL

SEQ ID NO: 78265 - protein, 310 aa, Megasphaera sp.
  REGION 1..310: note = tr|F9MNS4|F9MNS4_9FIRM Putative iron-sulfur cluster-binding protein OS=Megasphaera sp. UPII 135-E; OX = 1000569 GN=HMPREF1040_1203 PE=4 SV=1
MERDTNLIKQYIYTLGIPCVGIAPGTFSIPSYPQDICPLAAGEGDARYQPTTLLPSCQSVIVLLFPYYVKDPHPYNLSLYCRSIDYHTIIHHYLNEVTCFLTQTYPHQDFLSIVDTAPLSDRYLAYLAGLGFIGDNNCFINETYGSFCFIGSILTSLPLKPDHPQQRECFHCGACKRSCLGHCLDTAKYDYHLCKSYLTQKKGELSPMEIQVIQKTPLVFGCDICQDVCPHNHDIPETPIKEFHQSRIAYLKKSDLQELSNRQFQQLYKNRAFSWRGKGILLRNIQYLEEIQSNSEQRQNPNTKNDPSHK

SEQ ID NO: 78266 - protein, 305 aa, unidentified
  source 1..305: note = Megasphaera stantonii
  REGION 1..305: note = tr|A0A346B2L6|A0A346B2L6_9FIRM tRNA epoxyqueuosine(34) reductase QueG OS=Megasphaera stantonii; OX = 2144175 GN=queG PE=4 SV=1
MDSTDMKRFAAALGLDCVGVAPADLPRPPYAEDPPCPLAAGTGDERYEPRRLLPSCRSVVVVLVPYYTAQAEPGNLSLYCRSADYHVVVRSYLEQIAAYLQRQYPGSEQRCVVDTSPLSDRWLAYQAGLGFFGDNRCLINDTYGSYVFIGSVLTSLPFAPDQPLQQECSHCGACQSACPGQCFSGGAYDYSRCKSYITQKKGSFTLPEIQCMEKTPLIFGCDVCQESCPHNAGVKATPLPEFYRNRLSQLCPSDIESLSNKQFQQAFGDRAFAWRGKKVLLRNLEYAANPAAASAENRNDGKDDV

SEQ ID NO: 78267 - protein, 326 aa, unidentified
  source 1..326: note = Megasphaera stantonii
  REGION 1..326: note = tr|A0A346AYN7|A0A346AYN7_9FIRM Epoxyqueuosine reductase OS=Megasphaera stantonii OX=2144175; GN = DKB62_05040 PE=4 SV=1
MSRSSLVQAIYETALSCGFDNCGIIPVSALDGYKQRLQEREEAVPQSRPVYQDIEHLAAVRELYPWAKSVVVCITWLGAYRYPLSLQGLYGKAFLLSPDTVPDCEAHRQKLHFETWLAEQGLRFEGGETNAPARIIPLRYAAVAAGLGIFRKNNFFYGEKGSYYELEGYLIDQPCEYTHECRLRPCADSCTLCQKACRTKALSAPYTMNPLSCTSFWTTFGQGAVPPHLTADQFTTWLCGCDACQDVCPYNRHDWSQGKDFPGLQELEPLLQPETIVAASDAELCDKVIPKTDLHISPDQVQTLRTSALRILAYLKKRGDTPARKE

SEQ ID NO: 78268 - protein, 355 aa, unidentified
  source 1..355: note = Mehylophilales bacterium
  REGION 1..355: note = tr|A0A258LMQ6|A0A258LMQ6_9PROT Epoxyqueuosine reductase OS=Mehylophilales bacterium 35-46-6 OX=1970535; GN = queG PE=3 SV=1
MNDTANYAMQKLSASIKQWGLDLGFSQIGITDTDLQSAESEHQAWIEKGLHGEMDYMAKHGTKRSRPAELVPNTIRVISARLDYQPPNAADSEAILNDSNKAFISRYALGRDYHKVMRNKLQKLCEKIQAEFTSFEYRVFTDSAPVLEVALAEKAGLGWRGKHTLLINKDRGSWFFLGEIYTNLPLEIDAIATNHCGTCSSCIDVCPTQAITAPYEVDARRCISYLTIELKGSIPLEFRPLIGNRVYGCDDCQLFCPWNKFAEITKESDFAVRNGLDTISLIACFNWTEAEFKTNLAGSAIYRIGYEQWLRNIAIGLGNAKTSPEIIAALQQHCNHDNAIVREHVAWALAQHHTV

SEQ ID NO: 78269 - protein, 365 aa, Meiothermus cateniformans
  REGION 1..365: note = tr|A0A399E1H8|A0A399E1H8_9DEIN Epoxyqueuosine reductase OS=Meiothermus cateniformans OX=482825 GN=queG; PE = 4 SV=1
MQVAEALTQAAQERGFLTAWAGLELPQETQQRYRDWLAEGKQAGMAYLPRNLETRLNPSRRFDWAQSVLVLAASHAYPPPPKPPGGLRVGRVARYAWVRDYHLLLQPHLEALEHLAQRLGVQARGYVDTGPLSERSYAVLGGLGWIGRNAMLMRMGEGSYLTLAVLLTSLEAPPAEPYPNRCGRCSRCLAHCPTQALLGDGTLDARLCISYWTIEHRGPIPDGLWAGLGDWLLGCDLCQEVCPWNRKAQSFWEGFVPEPELAYPNLEDFFYLSSKAFERKYAGTVFLRPGRTRMARNALVVLANLNNPDYLPLVRRAAQDVNPLVRATAAQALARLGDFVSLESLRRDPVPQVAGLAQGLLERQG

SEQ ID NO: 78270 - protein, 361 aa, Meiothermus granaticius
  REGION 1..361: note = tr|A0A399FF82|A0A399FF82_9DEIN Epoxyqueuosine reductase OS=Meiothermus granaticius NBRC 107808; OX = 1227551 GN=queG PE=4 SV=1
MEPWFTLRQEAQQRGFLAEWAPLGLPEEAQRRYRAWLEAGNHASMDYLLPSTRLEPAQRFAWARSVLVLAAPQAYPDPGPPEGGVRLGRVARYAWVRDYHVLLEPYLRELEDCAAKLGVQAKGYVDTGPFSERSYAVLSGLGWVGRNAMLMRMGEGAYLSLALLLTSLEPPEPAPPYPNRCGRCTRCLTACPTGALLGDGTLDARRCISYWTIEHRGLIPAPLWPLIGDWLFGCDLCQEVCPWNRKPQVFWSGFRPEPELAHPDLEEFFSLSSRAFARRYERTVFLRPGRTRMARNALIVLANRQEHLPLVRRAAGDVNPVVRATAARALARFGDWDAVARLGHDPQPEVAQEAQAVLAGR

SEQ ID NO: 78271 - protein, 366 aa, Meiothermus hypogaeus
  REGION 1..366: note = tr|A0A511QYP1|A0A511QYP1_9DEIN Epoxyqueuosine reductase OS=Meiothermus hypogaeus NBRC 106114 OX=1227553; GN = MHY01S_02830 PE=4 SV=1
MNAALILTQAAQEQGFLTAWAGIELPEATQDRYQAWLAQGRQAEMAYLNQNLSTRLSPRSRFGWAKSVLVLAAPHAYPPPKRPLGGVRIGRVARYAWVRDYHLLIQPYLQDLERLAQSLGLQAKGYVDTGPLSERSYAAWGGLGWIGRNAMLMRMGEGTYLTLAMLLTSLPPPAGEGLYPNRCGTCRRCVTGCPTGALLGDGTLDSKRCISYWTIEHRGPIPAELWTGMGDWLFGCDICQEVCPWNRKARAFWQGFVPEPELAYPNLEDFFTLSSKAFERKYAGTVFLRPGRTRMARNALVVLANLGNPDYLPLVRRGARDVNPLVRATAAEALARLGDFDSLVLLLQDPEPSVAGVARGWLERQC

SEQ ID NO: 78272 - protein, 176 aa, unidentified
  source 1..176: note = Meiothermus luteus
  REGION 1..176: note = tr|A0A399EJS6|A0A399EJS6_9DEIN Epoxyqueuosine reductase OS=Meiothermus luteus OX=2026184 GN=queG PE=4; SV = 1
MGGCPTGALLGDGTLDARRCISYWTIEHRGTIPLELWSGLGDWLFGCDVCQEVCPWNRKARAFWAGFSPEADLAYPNLLDFFELSSRAFERRYAGTAFLRPGRTRMARNALVVLSNLAYPELLPLALKAAQDVNPVVRATAAQALARLGERALLERFFQDPDPKVAGVARGLREAL

SEQ ID NO: 78273 - protein, 369 aa, unidentified
  source 1..369: note = Meiothermus roseus
  REGION 1..369: note = tr|A0A399EYR3|A0A399EYR3_9DEIN Epoxyqueuosine reductase OS=Meiothermus roseus OX=1644118 GN=queG PE=4; SV = 1
MDAQGALESYAREQGLLTAWAALELPEGVRRRYRDWIEQGAHAGMGYLGQRLEERLEPSRRFTWARSVLVLAAAHAYPDPGLPEGGLRLGRVARYAWVRDYHGLLRPHLAALESLARQAGVRAKGYVDHGPLSERSYAALGGLGWIGKNGMWMRMGEGSYLTLAVLLTELEAPPAPPHPNRCGRCTRCHSACPTQALPGDGTLDARRCVSYWTIEHRGLIPQALWAGIGDWLLGCDICQEVCPWNRKATAFWRGFTPEPELAHPDLWAFLVLSSRAFARRFEGTVYTRPGRSALARNALIVLCNTGDEAHLPYIRRALQDVNPVVRATAAAAMVRLGRAAEAESALRDPDPAVTRYVREALERAPAAGG

SEQ ID NO: 78274 - protein, 365 aa, Meiothermus ruber
  REGION 1..365: note = tr|D3PR19|D3PR19_MEIRD 4Fe-4S ferredoxin-type domain-containing protein OS=Meiothermus ruber (strain ATCC 35948 / DSM 1279 / VKM B-1258 / 21) OX=504728; GN = K649_05345PE=4 SV=1
MQVAEALTQAAQERGFLTAWAGLDLPQETQQRYRDWLAEGKQAGMAYLPRNLETRLNPSQRFTWARSVLVLAAPHAYPPPPKPPGGLRLGRVARYAWVRDYHRLMQPHLEALEHLAQRLGAQAKGYVDTGPLSERSYAALGGLGWIGRNAMLMRMGEGTYLTLAVLLTSLEAPPAEPYPNRCGRCSRCVAHCPTQALLGDGTLDSRRCISYWTIEHRGPIPGELWAGIGDWLFGCDICQEVCPWNRKARSFWQDFVPEPELAYPNLEDFFFLSSKAFERKYAGTVFLRPGRTRMARNALVVLANLGNPDYLPLVRRAAQDVNPLVRATAARALARLGDFVSLEPLRRDPVLQVAGLARGLLERQG

SEQ ID NO: 78275 - protein, 365 aa, Meiothermus ruber; identical to SEQ ID NO: 78274
  REGION 1..365: note = tr|A0A0S7AQE9|A0A0S7AQE9_MEIRU 4Fe-4S ferredoxin-type domain-containing protein OS=Meiothermus ruber H328 OX=1297799 GN=MrH_1145 PE=4 SV=1

SEQ ID NO: 78276 - protein, 364 aa, Meiothermus silvanus
  REGION 1..364: note = tr|A0A4Q4L3Q1|A0A4Q4L3Q1_9DEIN tRNA epoxyqueuosine(34) reductase QueG OS=Meiothermus silvanus; OX = 52022 GN=queG PE=4 SV=1
MEARERIEAEARERGFLTAWAAVDLPEGVRSRYREWLVAGYQAGMAYLEARIEDRLEPTRRFAWAKSALVLAASHAYPDPGLPEGGVRIGRVARYAWVRDYHALLQPHIESLENLARRLGLEAKGYVDHGPLSERSYAVWGGLGWIGKNAMLMRMEEGSYLTLAVLLTSLALEERPKKLYENRCGRCTRCFTGCPTQALPGDGTLDARRCISYWTIEHRGWIPTELWPGLGDWILGCDICQHVCPWNRKAREFWRGFTPEAELAHPDIQDFFFLSGHAFARKYAGTVFLRPGRTRLARNALIALANAQDERYLPLVRRAAEDVSPLVRATAAHALVRLGDLASARKLLFDPDAEVVRQARSALD

SEQ ID NO: 78277 - protein, 385 aa, Meiothermus silvanus
  REGION 1..385: note = tr|D7BEL2|D7BEL2_MEISD 4Fe-4S ferredoxin-type domain-containing protein OS=Meiothermus silvanus (strain ATCC 700542 / DSM 9946 / VI-R2) OX=526227 GN=Mesil_1362; PE = 4SV=1
MDARARIESEARARGFLVAWAPVDLPEEARLGYMDWLAAGNQAGMGYLEARIEDRLAPTRRFSWAKSVLVLAASHAYPDPGLPEGGVRIGRVARYAWVRDYHTLLQPHIESLENLARRLGLEAKGYVDHGPLSERSYAVLAGLGWIGKNAMLMRMEEGSYLTLAVLLTSLVLEDLPEERYPNRCGRCTRCFTACPTNALPGNGSLDARRCISYWTIEHRGWIPTELWPGLGDWILGCDICQQVCPWNRKAREFWQDFTPEAELAHPDVQDFFFLSGHAFARKYAGTVFLRPGRTRLARNALIALANAQDERYLPLVRRAAEDVSPLVRATAAHTLARLGDTAAAEKRLTDPDENVIREARAALDQALCRVSPLATPETVPGGSRR

SEQ ID NO: 78278 - protein, 364 aa, Meiothermus sp.; identical to SEQ ID NO: 78276
  REGION 1..364: note = tr|A0A323UBC1|A0A323UBC1_9DEIN tRNA epoxyqueuosine(34) reductase QueG OS=Meiothermus sp. Pnk-1; OX = 873128 GN=queG PE=4 SV=1

SEQ ID NO: 78279 - protein, 366 aa, Meiothermus sp.
  REGION 1..366: note = tr|A0A370JZA7|A0A370JZA7_9DEIN tRNA epoxyqueuosine(34) reductase QueG OS=Meiothermus sp. QL-1; OX = 2058095 GN=queG PE=4 SV=1
MDPLVRLTQAAEERGLLAAWAPVELPPGVQARYQDWLAQGHQAGMAYLAEQAPTRLMPTRRFAWARSVLVLAASHAYPPPPKPFGGLRVGRVARYAWVRDYHHLLRPHLEALEGLAQSLGLEARGYVDTGPLSERSYAVLGGLGWVGRNAMLIRMGAGSYLTLAVLLTSAPLPEAPTPHPHRCGRCTRCLAGCPTGALLGDGTLDARLCISYWTIEHRGLVPLERWSGMGEWLFGCDVCQEVCPWNRRARTFWAGFTPEPELAYPDLRDFFTLSSRAFARKYAATAFLRPGRTRMARNALIVLSNLDHPELLPLARQAAGDVNPVVRATAAQALARHGLKAPLEPLLRDPEPQVAQLARGLLEALG

SEQ ID NO: 78280 - protein, 369 aa, unidentified
  source 1..369: note = Meiothermus terrae
  REGION 1..369: note = tr|A0A399EIS6|A0A399EIS6_9DEIN Epoxyqueuosine reductase OS=Meiothermus terrae OX=1408545 GN=queG PE=4; SV = 1
MEAREVLEGYAREQGFLTAWAPLELPQPVRQRYRDWLGQGAHAGMGYLERGVEERLEPVRHFPWARSVLVLAAPHAYPDPGVPAGGLRVGRVARYAWVRDYHGLLEPHLAALEGLARQAGVRAKGYVDHGPLSERSYAALGGLGWIGKNGMWMRMGEGSYLTLAVLLTELEATPLPLHPDRCGRCARCFTACPTQALPGDGTLDARRCVSYWTIEHRGLIPQELWPGVGEWLLGCDICQEVCPWNRKAAALWQGFTPDPELAHPDLWAFLTLSGRAFARRFAGTVLTRPGRTALARNALIVLSNTGDDAHLPYFRRALQDVNPAVRATAAAGLVRLGKAAEAGAALGDPDPEVARYVREALERVSLAER

SEQ ID NO: 78281 - protein, 361 aa, unidentified
  source 1..361: note = Melaminivora alkalimesophila
  REGION 1..361: note = tr|A0A317RFZ4|A0A317RFZ4_9BURK Epoxyqueuosine reductase OS=Melaminivora alkalimesophila OX=1165852; GN = queG PE=3 SV=1
MVASSSQLLPLLRQWARELGFSQIGIAGVDLSSAEPGLMQWLAEGFHGDMHYMEAHGARRARPAELVPGTVSVITARMDYLPRNTPEDWQALEFARLQRPGEAIVSVYARGRDYHKVLRSRLQKLSERIAEALGPFGHRVFTDSAPVLEAELASRSGQGWRGKHTLVLSREAGSMFFLGEIYVDVALEPTEAVSAHCGSCTACMDVCPTGAIVAPYRVDARRCISYLTIEHHGAIDPQLRPLMGNRIYGCDDCQLACPWNKFAQVSSLPDFDARAGLVGAQLVELFAWDEATFLRATEGSPIRRIGHERWLRNIAVALGNALRSADPLQAEGLRVALSSRLGHHSETVREHVQWALAQRPD

SEQ ID NO: 78282 - protein, 350 aa, unidentified
  source 1..350: note = Melaminivora sp.
  REGION 1..350: note = tr|A0A2P1NQ25|A0A2P1NQ25_9BURK Epoxyqueuosine reductase OS=Melaminivora sp. SC2-7 OX=2116657 GN=queG; PE = 3 SV=1
MRQWARELGFSQIGVAGVDLSSAEPGLMQWLAQGFHGEMHYMAAHGTKRARPAELVPGTVSVITARMDYLPRDTPPEWQAVEWSRLQRPDEAIVSVYARGRDYHKVLRSRLQKLSERIAQALGPFGHRVFTDSAPVLEAELARRSGQGWRGKHTLVLSREAGSMFFLGEIYVDMALQPTEPVTAHCGSCQACIQVCPTQAIVAPHRVDARRCISYLTIEHAGPIPLELRPLMGNRIYGCDDCQLVCPWNKFAQASSLPDFDLRCGLVGQQLVALFAWDEPTFLRVTEGGPIRRIGHERWLRNIAVALGNALRAADVQQAQPLRMALQSRLGHHSEIVREHVHWALAQRPD

SEQ ID NO: 78283 - protein, 350 aa, unidentified
  source 1..350: note = Melaminivora sp.
  REGION 1..350: note = tr|A0A2R3QH84|A0A2R3QH84_9BURK Epoxyqueuosine reductase OS=Melaminivora sp. SC2-9 OX=2109913 GN=queG; PE = 3 SV=1
MRQWARELGFSQIGVAGVDLSSAESGLGQWLAAGFHGGMQYMEAHGMRRARPAELVPGTVSVITARMDYLPRSTPAGWQAVEFERLGRAHEGVVSVYARGRDYHKVLRARLQKLSDRIAEALGPFGHRVFTDSAPVLEAELASRSGQGWRGKHTLVLSREAGSMFFLGEIYVDMALHPTEPVTAHCGSCSACIDVCPTGAIVAPHRVDARRCISYLTIEHHGPIPLELRCLMGNRIYGCDDCQLICPWNKYAQVSSLPDFDQRAGLTGQHLATLFAWDEATFLRMTEGGPIRRIGHERWLRNIAVALGNALRTGDAQQAPALRAALQTRLEHPSALVVEHVRWALAQRPG

SEQ ID NO: 78284 - protein, 378 aa, unidentified
  source 1..378: note = Melghiribacillus thermohalophilus
  REGION 1..378: note = tr|A0A4R3N3K9|A0A4R3N3K9_9BACI Epoxyqueuosine reductase OS=Melghiribacillus thermohalophilus OX=1324956; GN = queG PE=3 SV=1
MTYDNLKQEVIEYSREIGIDKIGFASADVFSTLKERLKIQASLGYQSGFEKGSIEERTEPERLLPEAKSIISIAMAYPSRMKNAPRGTRKERRGIFCRASWGKDYHHILRERLEKLSQFLKDKNPDVLTRIMVDTGELSDRAVAERAGIGFSGKNCSIITPEFGSYVYLGEMITNIPFPPDQPVEDSCGDCHICVDACPTGALVQGGQLNARRCIAFLTQTKDFLPDEFRGKIGNRLYGCDTCQQVCPKNKGKDVHLHPEMEPEPENVKPKLIPLLKLSNREFRERFGSMSGSWRGKKPIQRNAILALAHYKDKSAVNDLIAMMNEDPRPVIRGTAAWALGKIGGNKAEEAIKEAMQKETDMQVIQEMKKGLDLLKKS

SEQ ID NO: 78285 - protein, 389 aa, unidentified
  source 1..389: note = Melghirimyces algeriensis
  REGION 1..389: note = tr|A0A521FA98|A0A521FA98_9BACL Epoxyqueuosine reductase OS=Melghirimyces algeriensis OX=910412; GN = SAMN06264849_11546 PE=4 SV=1
MGPGDIKKTLQEEAKRLNIDKIGFASADPFTELKERLKDHRKAGYESGFEEPDLEKRTDPRKTLPNARSIIAIALAYPTRLENPPDSKPGAYRGVFCRASWGEDYHRVLKRKLEGLKVKLLELVPDAKVEIMVDTGALSDRAVAERAGIGWSGKNTSIITPEFGSWVYLGEMITDVYLPPDQPLTQSCGECTACLDACPTGALVAPGQLNSQACLAYLTQTKGMLAEEYRNKLGGYLYGYETCQAVCPYNRKKNFTQHEEFHPDPDQVKPLLKPLLRMSNREFRQRFGKMAGSWRGKKPIQRNAIIALGRYRDRTAVPDLIHLLENDPRPVIRGTAAWALGRIGGSEAEEALYRVKEKESNEQVMVEIEKALHECGIQETANHRTYREA

SEQ ID NO: 78286 - protein, 391 aa, unidentified
  source 1..391: note = Melghirimyces profundicolus
  REGION 1..391: note = tr|A0A2T6C4Q8|A0A2T6C4Q8_9BACL Epoxyqueuosine reductase OS=Melghirimyces profundicolus OX=1242148; GN = C8P63_104156 PE=4 SV=1
MKMEAAEIKKALQMEAKRLKIDKIGFASAEPFTELKERLKRHREAGFESGFEEPDLDKRTDPRKILPEARSIIAIALAYPTKMEQPPVSKPGAYRGVFCRASWGEDYHNVLKRKLEGLKAKLLELVPGAAATVMVDTGALSDRAVAERAGIGWSGKNTSIITPEFGSWVYLGEMITDVHLPPDQPVTEACGDCTACLDACPTGALVAPGQLNSRACLAYLTQTKGFLAPEYRDLLGGYLYGFETCQAVCPYNRKKNFTHHEEFTPDPEKVRPLLKPLLQLSNREFRERFGSMAGSWRGKKPIQRNAIIALGRFRDRTAVPDLIRLLKEDPRPVIRGTAAWALGRIGGPEAADALSLAGKTERDQKVKEEIEKALDECRGEETANHRTYREA

SEQ ID NO: 78287 - protein, 389 aa, unidentified
  source 1..389: note = Melghirimyces thermohalophilus
  REGION 1..389: note = tr|A0A1G6RCI9|A0A1G6RCI9_9BACL Epoxyqueuosine reductase OS=Melghirimyces thermohalophilus OX=1236220; GN = SAMN04488112_12717 PE=4 SV=1
MKPADIKAALQEAAKELNIDKIGFAAADPFDELKERLRKHRKAGYESGFEEPDLEKRTDPQKSLPGARSIIAIALAYPTKMDNAPVSKPGAYRGVFCRASWGEDYHHVLKRKLEALRRKLVEWVPDAKAEIMVDTGALSDRAVAERAGIGWSGKNTSIITPEFGSRVYLGEMLTDVYLPPDQPIENACGECTACLDACPTGALVGPGQLNSQACLAYLTQTKGFLAEEYRDKLGNFLYGFETCQAVCPYNRGKNFTHHPEFQPEAENVKPLLKPLLHMSNRQFRQRFGSMAGSWRGKKPIQRNAIIALGRYRDRTAVPDLVRLLEEDPRPVIRGTAAWALGRIGGGEAAEALNRAQEVEPDEQVAVEIEHAIEMCRMRETADHRTYREA

SEQ ID NO: 78288 - protein, 310 aa, unidentified
  source 1..310: note = Melioribacter roseus
  REGION 1..310: note = tr|I6Z3C3|I6Z3C3_MELRP Epoxyqueuosine reductase; OS = Melioribacter roseus (strain JCM 17771 / P3M-2); OX = 1191523 GN=queG PE=3 SV=1
MKLTNEIVIEKAREIGFDLIGFAPYQTLQEETERLNRWLDRKYHAGMKYMEKNIDKRCDVKNILPEAKSIISLGLNYYINEKHSNLPGHGKISRYAWGKDYHLIVWDKLELLEEELKKLDEGFVAKSYVDTGPVMDKVWAIKSGIGWMGKHSNIINRNMGSWFFIATLINNREFEYSEPAYELCGACRACIDACPTSAIVEDFVVDSNKCISYLTIENKGEIPGEFKGKFDNWLFGCDVCQDVCPWNKKFSMPANEEAFKPAASKEYLLEDIMNMTEEEFKEKFNVSPIKRSKLKGLKRNAQFLIDSESN

SEQ ID NO: 78289 - protein, 313 aa, unidentified
  source 1..313: note = Melioribacter sp.
  REGION 1..313: note = tr|A0A1G1BBI5|A0A1G1BBI5_9BACT Epoxyqueuosine reductase OS=Melioribacter sp. GWF2_38_21 OX=1801612; GN = queG PE=3 SV=1
MKVKISNEIVIHKAHELGFDLVGFSRSEILSEESSHLQMWLDNGFNASMEYMKRNFEKRQDVKQILPSAKSVISLALNYYTPNQHSTDSNTGKISRYAWGRDYHLVIWDKLSLLEEYLSSLDENFESKSYVDTGPVMDKAWAVRSGIGWLGKNSNVINKEIGSWFFIANIITNCEFNYSEPIADLCGSCTACLDACPTNAIVQPYIVDANRCISFLTIENKGEISNEFKGKFDNWIFGCDVCQDVCPWNKKFSEPTMLQEFQPKGTNLVLDEVINMNEEEFKAKLETSPIKRAKLSGLKRNAAFLFGESLPQE

SEQ ID NO: 78290 - protein, 443 aa, Melissococcus sp.
  REGION 1..443: note = tr|A0A374JDV2|A0A374JDV2_9ENTE tRNA epoxyqueuosine(34) reductase QueG OS=Melissococcus sp. OM08-11BH OX=2293110 GN=queG PE=4 SV=1
MLTHNHLFFFIDCNKHIFTSFKLHSQIAEKSLKYKKVCLILSKESNWRDNALDTHLLKQKIIEASKEIGIDKIGFTTAEPFDHLKDSLIEQKENHHTTGFEHGNIDERLFPELIFDQPQSIISIALAYPTRMNNRLKSVRGEKRGKFARASWGIDYHDILKDRLNKLIDFIKEEASQNLNVTFKPMVDTGELIDVVVAQRAGLGFIGKNGLLITEEFGSYVYLGEIITNIPFEPDMPIENQCGDCTKCIDQCPTSALLGDGRMNAQKCLSYQTQTKGFMPEEYRPKIRSIIYGCDICQEVCPFNKGKNFHFHKEMEPDPEIVTPLLKPILTISNREFKERFGYLAGSWRGKKPIQRNAIIALANVRDKTSIPNLLSCIENDPRPVIRGTAAWSLSVIDPNNRAILDFLIEYFNKETDDEAKEEMRKAIDRMRIQKKNKIIDDF

SEQ ID NO: 78291 - protein, 336 aa, Melittangium boletus
  REGION 1..336: note = tr|A0A250IAN0|A0A250IAN0_9DELT Epoxyqueuosine reductase OS=Melittangium boletus DSM 14713 OX=1294270; GN = MEBOL_001633 PE=4 SV=1
MPTAHLRQLATEVGFDLVGFARAEPIPPRFFLEWLEAGCAADMDWLGSRAAERLDVSQLLPGARSVIAFATNYYRDASEAADSPIARYARGRDYHSTLRDSLKAFRKRLGRAYPEVHDYGSVDSGPLMEKVWAARAGLGYVGKNGCFITERFGSWVMLAVLILDAEVDAYADGPATDRCGSCRKCLMSCPTGALLGEGRVDARACLSYQTVENRHAEVPESFRVQMDNLIFGCDICQDVCPLNRHPVPTPNERFVPRAVAQLGVMELAALTPEDYDRLVPGTALARAKYDGLRRNAVYALGAAKKAEARSLLERLREDPSEPVRRAALWALLHLNA

SEQ ID NO: 78292 - protein, 307 aa, Meridianimaribacter sp.
  REGION 1..307: note = tr|A0A4Q9RNQ1|A0A4Q9RNQ1_9FLAO Epoxyqueuosine reductase OS=Meridianimaribacter sp. CL38 OX=2213021; GN = queG PE=3 SV=1
MNNQTSKYTKLIKEESKRLGFLSCGISKAEFLEAEAPRLEKWLNANMHGEMRYMENHFDKRLDPTKLVDGSKSVVSLLLNYFPSQTQNTESYKLSKYAYGTDYHFVIKDKLKQLLQFIQDEIGEVSGRAFVDSAPVLDKAWAAKSGLGWIGKHSNLLTQKVGSFYFIAELIIDLELDYDTPTTDHCGSCTACIDACPTEAIVRPYVVDGSKCISYLTIELKDNIPSDFKNKTDDWMFGCDVCQDVCPWNRFSKPHNEPLFNPHPELLEMTKKDWDEITEDTFKKVFKKSAVKRVKFEGLQRNIKFLK

SEQ ID NO: 78293 - protein, 314 aa, Merismopedia glauca
  REGION 1..314: note = tr|A0A2T1C0F9|A0A2T1C0F9_9CYAN Epoxyqueuosine reductase OS=Merismopedia glauca CCAP 1448/3 OX=1296344; GN = queG PE=3 SV=1
MVTEITSDAIKQKALEIGFHKVGIAAIDVSRQNEAANYLQNWLELGYQGDMEWMQNPKRQDIYLTMPQVSSVIAVALNYYTPHQRLEGEEYAKISRYGWGRDYHKIMHKKLKFLCSWLEDRGEGILTKYYADTGPISDKFWAQQAGLGWVAKNGNLITREYGSWVFLGEVLTNLELTDDTPHTQHCGSCTRCLEACPTGAITSPYVVDANRCIAYHTIENREEKLPEDITPHLSGWVAGCDICQDVCPWNQRFSQPTNVREFEPYPENLAPKLIELAEISEEKWHQQFTASALRRIKPEMWQRNAKANLKNLDK

SEQ ID NO: 78294 - protein, 306 aa, unidentified
  source 1..306: note = Mesoflavibacter aestuarii
  REGION 1..306: note = tr|A0A2T1NE31|A0A2T1NE31_9FLAO Epoxyqueuosine reductase OS=Mesoflavibacter aestuarii OX=1266046 GN=queG; PE = 3 SV=1
MSNASTYTKLIKAEAKRLGFLSCGISKAGFLEEEAPRLERWLKSNAHGEMQYMENHFDKRLDPTKLVEDSKSVVSLLLNYYPSEEQNENSYKISKYAYGQDYHHIIKSKLKELHQFIETEIGEVSGRAFVDSAPILDKAWAAKSGLGWIGKHSNLLTQKVGSFYFIAELIIDLELEYDHITTDHCGSCTACIDACPTQAITEPYVVDGSKCISYLTIELKNQIPTEFKSKMDDWMFGCDVCQDVCPWNRFSKPHQEPLFHPKPELLSMSKKDWEEITEDVFKKVFQKSAVKRTKFSGLRRNINFLK

SEQ ID NO: 78295 - protein, 306 aa, unidentified
  source 1..306: note = Mesoflavibacter sabulilitoris
  REGION 1..306: note = tr|A0A2T1NIH6|A0A2T1NIH6_9FLAO Epoxyqueuosine reductase OS=Mesoflavibacter sabulilitoris OX=1520893; GN = queG PE=3 SV=1
MNTKTKYTQLIKTEAKRLGFLSCGISKAQFLEEEAPRLEKWLNKNMHGQMSYMQNHFDKRLDPTKLVEDSKSVISLLLNYYPEQTQIEDSYKLSKYAYGTDYHFVIKDKLKQLLAFINEEIGEVYGRAFVDSAPVLDKAWAAKSGLGWIGKHSNLLSQKTGSFYFIAELIIDLELDYDNPTTDHCGTCTACIDACPTQAIVEPYVVDGSKCISYFTIELKDELPSNMKDKFDDWMFGCDVCQDVCPWNRFSKPHNEPLFNPHPELLSMTKNDWQDITKDVFNKLFKKSAVKRTKFSGLQRNINFLK

SEQ ID NO: 78296 - protein, 307 aa, Mesoflavibacter sp.
  REGION 1..307: note = tr|A0A2T1NPH6|A0A2T1NPH6_9FLAO Epoxyqueuosine reductase OS=Mesoflavibacter sp. HG96 OX=2109944 GN=queG; PE = 3 SV=1
MNNTSKHTRLIKEEAKRLGFLSCGISKAQFLDEEAPRLEQWLNNNMHGKMQYMENHFDKRLDPTKLVEDSKSVISLLLNYYPDQTQTEDSYKLSKYAYGTDYHFVIKDKLKQLLQFIKENIGDVNGRAFVDSAPVLDKAWAAKSGLGWIGKHSNLLSKQTGSFYFIAELIIDLDLDYDNPTTDHCGTCTACIDACPTQAIVQPYVVDGSKCISYFTIELKEELPSTMKNKFDDWMFGCDVCQDVCPWNRFSKPHSEPLFNPHPDLLSMTKKDWDEITEDTFRKIFKKSAVKRTKLSGLNRNINFLKD

SEQ ID NO: 78297 - protein, 308 aa, Mesonia algae
  REGION 1..308: note = tr|A0A2W7I9E2|A0A2W7I9E2_9FLAO Epoxyqueuosine reductase OS=Mesonia algae OX=213248 GN=queG PE=3 SV=1
MLNNTSRYTKLIKDEAKRLGFMSCGISKAEFLEEEAPRLENWLHENRNGKMGYMENYFDKRLDPTLLVDDSKSVVSLLLNYYPQNFQTENTYKVSKYAYGQDYHFVIKDKLKHLLNFIKDEIGEVGGRAFVDSAPVLDKAWAAKSGLGWIGKNSNLLSKKTGSFFFIAELIIDLELDYDTPVTDHCGSCTACIDACPTDAIYEPYKVDGSKCISYYTIELKESIPESEKGKFEDWMFGCDICQDVCPWNRFSKPHNEPLFNPHPDLLQMTKDDWEEITKETFQEIFKKSAVKRTKYDGLKRNINFLET

SEQ ID NO: 78298 - protein, 309 aa, Mesonia phycicola
  REGION 1..309: note = tr|A0A1M6EUX8|A0A1M6EUX8_9FLAO Epoxyqueuosine reductase OS=Mesonia phycicola OX=579105 GN=queG PE=3 SV=1
MLLTNSEKYTKLIKDEALRLGFMSCGISKAGFLEDEAPRLEKWLNENRNGEMQWMENHFDKRLNPTLLVDDAKSIVSVLLNYYPHEIQQEDSYHLSKYAYGQDYHFVIKDKLKHLLQFIKKEIGEVSGRAFVDSAPVLDKAWAAKSGLGWIGKNSNLLSKKTGSFFFIAELIIDLELEYDTPVTDHCGSCTACIDACPTDAIYEPYKVDGSKCISYYTIELKDSIPASERGKFNDWMFGCDICQDVCPWNRFSKPHTEPLFNPHPDLLQMTKEDWKEITKETFQEIFKKTAVKRTKYDGLKRNINFLES

SEQ ID NO: 78299 - protein, 307 aa, Mesonia sp.
  REGION 1..307: note = tr|A0A2D8UKY3|A0A2D8UKY3_9FLAO Epoxyqueuosine reductase OS=Mesonia sp. OX=1960830 GN=queG PE=3 SV=1
MLNQSEKYTKLIKEEALQLGFMSCGISRAEFLEEEAPRLEQWLNENRNGEMSYMENHFDKRLNPSLLVPGAKSVVSLLLNYYPNEFQREDSYKVSKYAYGRDYHFVIKDKLKSLLHFINEEIGEVHGRAFVDSAPVLDKAWAAKSGLGWVGKNSNLLSKKVGSFFFIAELIIDLELEYDTPVTDHCGSCTACIDACPTDAIYEPYKVDGSKCISYYTIELKDSIPESEKGKFEDWMFGCDICQDVCPWNRFSKPHSEPLFDPHPDLLQMTKQDWEEITRETFSEIFRKSAVKRTKYQGLKRNINFLD

SEQ ID NO: 78300 - protein, 312 aa, Mesonia sp.
  REGION 1..312: note = tr|A0A2W1KH60|A0A2W1KH60_9FLAO Epoxyqueuosine reductase OS=Mesonia sp. K7 OX=2218606 GN=queG PE=3 SV=1
MLFTSTQEKYTHFIKQEAKNLGFMSCGISKAKFLEEEAPRLEKWLNENRHGQMTYMENHFDKRLDPTKLVEGSKSVISLLLNYFPEKKQNPTSYKISKYAYGKDYHFVIKEKLKSLLTKMQEEIGEIHGRAFVDSAPVLDKAWAAKSGLGWMGKHSNLLTKQVGSFYFIAELIVDIELDYDTPVTDHCGSCTACIDACPTDAIYEPYKVDGSKCISYFTIELKDEIPTSQQGHFQDWMFGCDICQDVCPWNRFSQSHREPLFNPHPELLNFSKEEWEEITKETFNEIFRKSAVKRTKFEGLKRNIAFLKNDI

SEQ ID NO: 78301 - protein, 394 aa, Mesorhizobium albiziae
  REGION 1..394: note = tr|A0A1I3WWX4|A0A1I3WWX4_9RHIZ Epoxyqueuosine reductase OS=Mesorhizobium albiziae OX=335020 GN=queG PE=3; SV = 1
MRTAGAIADPARLRDLIDREAKKAGFDLVAVTTPDAIPLAPERLAQFVAEGLHGSMEWLAETAPRRGDPSILWPEVRSIIVLAMNYGPDSNPLDILDRPDRGAISVYARNRDYHDVIKGRLKEIAGKLAVRGGADVKVFVDTAPVMEKPLAEAAGIGWQGKHTNLVSREFGSWLFLASIFTTAELTPDTPEGDHCGSCRACLDICPTNAFPAPYRLDARRCISYLTIENKGPIPHEFRKAIGNRIYGCDDCLAACPWNKFARSASEMKLASRDELREPALAQLLQLDDAAFRALFSGSPVKRIGRDRFIRNVLIAAGNSGEPSLVESCRELARDPSPLVRGAAVWALSCLLPPPAFADLASDRAGEETDAEVLAEWDAARGAAAGSPARHGIHA

SEQ ID NO: 78302 - protein, 389 aa, Mesorhizobium albiziae
  REGION 1..389: note = tr|A0A5D4GT64|A0A5D4GT64_9RHIZ Epoxyqueuosine reductase OS=Mesorhizobium albiziae OX=335020 GN=queG PE=3; SV = 1
MAAALNPVRPDRLRAFLDEEARRQGFDAIAVTRPDAVPLAPERLAAYVEKGRHGSMDWIAETAARRGDPRNLWPQVRSIVMLAMNYGPDRDPLDLMSRKDRAAISVYARHRDYHDVIKGRLKEIAQKLASRSGAEVKVFVDTAPVMEKPLAEAAGIGWQGKHTNLVSREFGSWLFLGSIFTAAELPPDDPERDHCGSCRACLDICPTDAFPAPYQLDARRCISYLTIEHKGPIPHEFREPMGNRIYGCDDCLAVCPWNKFAQAASEARLVARQDLLEPRLADLLTLDDAGFRAFFSGSPVKRIGRDRFIRNVLIAAGNSGERSLATQAEKLLADPSPLVRGAAVWALSRLLPAERLVAALRDLRAVEADGDVLAEIDTVLPAGTTKELS

SEQ ID NO: 78303 - protein, 374 aa, Mesorhizobium alhagi
  REGION 1..374: note = tr|H0HJC3|H0HJC3_9RHIZ Epoxyqueuosine reductase; OS = Mesorhizobium alhagi CCNWXJ12-2 OX=1107882 GN=queG PE=3; SV = 1
MIDREARLAGFDAVAVVSPDAIPLAPARLAEFVSDGFHGSMGWIEETMLRRANPRTLWPDVRSIIVLAMNYGPDHDPREVLEKPDRGAISVYAQNRDYHDVMKGRLKQIAGKIAAQAGGDVKVFVDTAPVMEKPLAEAAGLGWQGKHTNLVSREHGSWLFLGSIFTTAELAPDAREEDHCGSCRACLDVCPTDAFPAPYRLDARRCISYLTIENKGPIPHEFRQAIGNRIYGCDDCLAVCPWNKFARTASEAKLAARDDLREPALADLLSLDDAAFRTFFSGSPIKRIGRDRFLRNVLIAAGNSGDAALTGQCKAHLDDASALVRGAAVWALSRLLDARGFAYLAAGRVAEEGDADVISEWNQALEAGRIKSHA

SEQ ID NO: 78304 - protein, 395 aa, Mesorhizobium amorphae
  REGION 1..395: note = tr|A0A2W5BH46|A0A2W5BH46_9RHIZ Epoxyqueuosine reductase OS=Mesorhizobium amorphae OX=71433 GN=queG PE=3; SV = 1
MRTSISEPRSGARPEPEGAALRRLIETEARAQGFEAFAVADPDAIPLAATRLESFVEQGRHGSMAWMAETLARRGHPRGLWPAVRSVVVLGLNYGPASDPREGLAKRDRALISAYARNRDYHEVIKGRLKAIAQKLAVRSGAEVKVFVDTAPVMEKPLAEAAGLGWQGKHTNLVSRAHGSWLFLGTIFTDAALPFDRADADRCGSCHACLSACPTDAFPAPYQIDARRCLSYLTIENKGPIPPEFREAMGNRVYGCDDCLAACPWNKFAQAASEAKLQARADMVEPELAEFLRLDDAGFRLRFSGSPVKRIGRDRFLRNVLVAAGNSGEGALGPLVLALLDDPHPLVRGAAVWAGSRLAPESLQTLASTRLESETDPDVIAEWRLALPEPLPCAS

SEQ ID NO: 78305 - protein, 386 aa, Mesorhizobium amorphae
  REGION 1..386: note = tr|G6YHX1|G6YHX1_9RHIZ Epoxyqueuosine reductase; OS = Mesorhizobium amorphae CCNWGS0123 OX=1082933 GN=queG; PE = 3 SV=1
MRTSTSDAAKLRALIDREAQRAGFDAVAVTTPDAIPLAPTRLAEFVADGFHGSMGWIAETLERRSEPAALWPEVRSIVVLAMNYGPEHDPRKLQAKCDRGAISAYAQNRDYHEVMKGRLKEIAGKIVARAGGDVKVFVDTAPVMEKPLAEAAGLGWQGKHTNLVSREHGSWLFLGTIFTTAELVPDTAEDDHCGSCRACLDACPTDAFPAPYRLDARRCISYLTIENKGPIPHEFREKIGNRIYGCDDCLAACPWNKFARTASEAKLVARADLREPPLAELLLLDDAAFRSFFTGSPIKRIGRDRFVRNVLIAAGNSGDFWLTASVRDLLGDASPLVRGAAIWALSRLVPEAEFAERAAAAAQTERDEGVRREWLVAQSNPIEMHA

SEQ ID NO: 78306 - protein, 388 aa, Mesorhizobium australicum
  REGION 1..388: note = tr|A0A1X7N7U3|A0A1X7N7U3_9RHIZ Epoxyqueuosine reductase OS=Mesorhizobium australicum OX=536018 GN=queG; PE = 3 SV=1
MRAAPASRPDTLRPFIDREARRLGFSTVAVTTPDSIPLARERLAAALSAGHHGDMDWLAETFERRAAPAVLWPEVRSVIMLAMNYGPDENPLGLLDRKDRAAISVYARNRDYHDIIKGRLKELAGKIASRAGGDVKVFVDTAPVMEKPLAAAAGLGWQGKHTNLVSREFGSWLFLGSIFTTAELPADTPEVDHCGSCRACLDICPTNAFPAPYRLDARRCISYLTIENKGLIPREFRVAIGNRIYGCDDCLAACPWNKFAAAASEAKLVARDDLKAPHIADLLALDDGAFRAFFSGSPVKRIGRDRFVRNVLVAAGNSGDTSLIPPCRNLLDDPSALVRGAAVWALSRLMGDKAFQALSSDMEAGESDASVREEWAAALGERRERLTA

SEQ ID NO: 78307 - protein, 384 aa, Mesorhizobium australicum
  REGION 1..384: note = tr|L0KE07|L0KE07_MESAW Epoxyqueuosine reductase; OS = Mesorhizobium australicum (strain HAMBI 3006 / LMG 24608 / WSM2073) OX=754035 GN=queG PE=3 SV=1
MRISTSDASKLRALIDAEARRAGFDAVAVTTPNAIPLAPARLAEFVADGFHGSMDWIAETIARRGEPSTLWPDVRSIIVLAMNYGPDHDPRDVLARRDRGAISVYAKNRDYHEVMKGRLKEIAGKIVARAGGDVKVFVDTAPVMEKPLAEAAGLGWQGKHTNLVSREHGSWLFLGTIFTTAELEPDKPEIDHCGSCRACLDACPTDAFPAPYRLDARRCISYLTIENKGPIPHEFREKIGNRIYGCDDCLAACPWNKFARAASEAKLAARDDLREPPLADLLALDDAGFRAFFSGSPIKRIGRDRFVRNVLIAAGNSCDGALVGVVRDLLGDASPLVRGAAIWALARLVPETEYAERAANGLNSEDDAAVREEWRLARPSRAHA

SEQ ID NO: 78308 - protein, 384 aa, Mesorhizobium ciceri
  REGION 1..384: note = tr|A0A143NL62|A0A143NL62_9RHIZ Epoxyqueuosine reductase OS=Mesorhizobium ciceri OX=39645 GN=queG PE=3; SV = 1
MRTSTSDAAKLRALIDAEAQRAGFDAVAVTSPDAIPLAPARLAEFVADGFHGSMDWIAETLQRRSEPTALWPQVRSIVVLAMNYGPDHDLREVLAKRDRGAISVYAQNRDYHDVMKGRLKEIAGKLVARAGGDVKVFVDTAPVMEKPLAEAAGLGWQGKHTNLVSREHGSWLFLGTIFTTAELVPDRAEIDHCGSCRACLDACPTDAFPAPYRLDARRCISYLTIENKGPIPHEFREKIGNRIYGCDDCLAACPWNKFARAASEAKLAARDDLREPPLADLLGLDDAAFRAFFSGSPIKRIGRDRFIRNVLIAAGNSGDASLADTVRALLDDASQLVRGAAIWALARLVPDAEYSERAALGLKTESDEAVRDEWRLARPTRANA

SEQ ID NO: 78309 - protein, 384 aa, Mesorhizobium ciceri
  REGION 1..384: note = tr|E8TFP6|E8TFP6_MESCW Epoxyqueuosine reductase; OS = Mesorhizobium ciceri biovar biserrulae (strain HAMBI 2942 / LMG 23838 / WSM1271) OX=765698 GN=queG PE=3 SV=1
MRTSTSDAAKLRALIDAEAQRAGFDAVAVTSPDAIPLAPARLAEFVADGFHGSMDWIAETLQRRSEPTALWPQVRSIVVLAMNYGPDHDLREMLAKRDRGAISVYAQNRDYHDVMKGRLKEIAGKLVARAGGDVKVFVDTAPVMEKPLAEAAGLGWQGKHTNLVSREHGSWLFLGTIFTTAELVPDRAEIDHCGSCRACLDACPTDAFPAPYRLDARRCISYLTIENKGPIPHEFREKIGNRIYGCDDCLAACPWNKFARAASEAKLAARDDLREPPLADLLGLDDAAFRAFFSGSPIKRIGRDRFIRNVLIAAGNSGEASLSGAVLALLGDPSPLVRGAAIWALARLVPDAEYSERAALGLKTESDEAVRDEWRLARPTRANA

SEQ ID NO: 78310 - protein, 386 aa, unidentified
  source 1..386: note = Mesorhizobium delmotii
  REGION 1..386: note = tr|A0A2P9AAG7|A0A2P9AAG7_9RHIZ Epoxyqueuosine reductase OS=Mesorhizobium delmotii OX=1631247 GN=queG; PE = 3 SV=1
MRTSISRAQNLRALIDREARRAGFDAVAVTTPHAIPQAPARLAEFVADGFHGSMGWIAETLERRGEPTALWPEVRSIIVLAMNYGPDHDPRAVLVKRERGAISVYALNRDYHDVMKGRLKEIAGKIVARAGGDVKVFVDTAPVMEKPLAEAAGLGWQGKHTNLVSREHGSWLFLGTIFTTAELSPDTPEDDHCGSCRACLDVCPTDAFPAPYRLDARRCISYLTIENKGPIPHEFREKIGNRIYGCDDCLAACPWNKFAQTASEAKLVARADLREPPLADLLALDDAAFRSFFTGSPIKRIGRDRFIRNVLIAAGNSGEPSLGNAVCALLSDASPLVRGAAVWALSRLVPETEFAKCASSALKAEGDEAVRREWRLALANQIEAHA

SEQ ID NO: 78311 - protein, 387 aa, unidentified
  source 1..387: note = Mesorhizobium ephedrae
  REGION 1..387: note = tr|A0A2P7RIC1|A0A2P7RIC1_9RHIZ Epoxyqueuosine reductase OS=Mesorhizobium ephedrae OX=2116701 GN=queG; PE = 3 SV=1
MRTSTSEAPASVRRFLEREAKLAGFDCVAVTSPDAIPLAAERLADFVRQGLHGSMAWMEEKLARRGDPRTLWPEVRSIVMLAMNYGPAHDPLAVLEQKDSAAISVYAQNRDYHDVVKGRLKGVAGKLAARTGCDVKVFVDTAPVMEKPLAQAAGIGWQGKHTNLVSREHGSWLFLGTIFTTAALAPDRPETDHCGSCRACLDACPTDAFPAPYRLDARRCISYLTIENKGPIPREFREKIGNRIYGCDDCLAVCPWNKFAREASEAKLRAREDLREPKLADLLALDDAAFRTLFSGSPVKRIGRDRFLRNVLVAAGNSDDASLIAPCTGLLDDASPLVRAAAVWALSRLLKAEVLLELMRDRTDADPLVLDELRAAVEAAERQVEDA

SEQ ID NO: 78312 - protein, 384 aa, unidentified
  source 1..384: note = Mesorhizobium erdmanii
  REGION 1..384: note = tr|A0A4Q1VC45|A0A4Q1VC45_9RHIZ Epoxyqueuosine reductase OS=Mesorhizobium erdmanii OX=1777866 GN=queG; PE = 3 SV=1
MRTSTSDAAKLRALIDAEAHRAGFDAIAVTTPDAIPLAPARLAEFVADGFHGSMDWIAETIARRSEPATLWPEVRSIIVLAMNYGPDHDPRALQARHDRGAISVYAQNRDYHDVMKGRLKEIAGKIVARAGGDVKVFVDTAPVMEKPLAQAAGLGWQGKHTNLVSREHGSWLFLGTIFTTAELAPDRAEIDHCGSCRACLDACPTDAFPAPYRLDARRCISYLTIENKGPIPHEFREKIGNRIYGCDDCLAACPWNKFARAASEAKLAARDDLRAPPLADLLELDDAAFRVFFSGSPIKRIGRDRFIRNVLIAAGNSGDVDLAVPVRALVGDPSPLVRGAAIWALARLVPDAEYSERAATGLKTENDAAVREEWRLARPDRAHA

SEQ ID NO: 78313 - protein, 383 aa, unidentified
  source 1..383: note = Mesorhizobium hawassense
  REGION 1..383: note = tr|A0A330HMY3|A0A330HMY3_9RHIZ Epoxyqueuosine reductase OS=Mesorhizobium hawassense OX=1209954 GN=queG; PE = 3 SV=1
MRTSTSENLRALIDAEAHRAGFEAVAVTRPDAIPLAPARLAEFVSDGFHGSMEWIAETVQRRAEPSTLWPEVRSIIVLAMNYGPDHDPRGLQARRDRGAISVYAQNRDYHDVMKGRLKEIAGKIVARVGGDVKVFVDTAPVMEKPLAEAAGLGWQGKHTNLVSRAHGSWLFLGTIFTTAELEPDTAEIDHCGSCRACLDACPTDAFPAPYRLDARRCISYLTIENKGPIPREFREKMGNRIYGCDDCLAACPWNKFASAAAEAKLAARADLREPQLSELLALDDASFRAFFSGSPVKRIGRDRFVRNVVIAAGNSSDASLTPIARRLLDDASPLVRGAAIWALSRLLPDREFGDLAATASKTETDVVVRQEWLAALTPPVGAD

SEQ ID NO: 78314 - protein, 384 aa, unidentified
  source 1..384: note = Mesorhizobium helmanticense
  REGION 1..384: note = tr|A0A2T4IPC5|A0A2T4IPC5_9RHIZ Epoxyqueuosine reductase OS=Mesorhizobium helmanticense OX=1776423; GN = queG PE=3 SV=1
MRTSISKNENLRALIDREAKRAGFDAVAVTTPDAIPLAPARLAAFVADGFHGSMDWIAETLKRRGEPAALWPEVRSIVVLAMNYGPDHDPRAVLARRDCGAISVYAQNRDYHEVMKGRLKEIAGKIVARAGGDVKVFVDTAPVMEKPLAEAAGLGWQGKHTNLVSREHGSWLFLGTIFTTAALAPDTAEEDHCGSCRACLDACPTDAFPAPYRLDARRCISYLTIENKGPIPHEFRERIGNRIYGCDDCLAACPWNKFARAASEAKLVARADLREPPLAELLSLDDAAFRAFFTGSPIKRIGRDRFVRNVLIAAGNSGDSSLGNAVRALLDDASPLVRGVAVWALSRLVPNRELAKCAVAGLKTEADETVRNEWRLALAIEAHA

SEQ ID NO: 78315 - protein, 384 aa, Mesorhizobium huakuii
  REGION 1..384: note = tr|A0A068DEM8|A0A068DEM8_9RHIZ Epoxyqueuosine reductase OS=Mesorhizobium huakuii 7653R OX=763057 GN=queG; PE = 3 SV=1
MRTSTSDAAKLRALIDAEAQRAGFDAIAVATPDAIPLAPARLAEFVADGFHGSMDWIAETIARRSEPSTLWPEVRSIVVLAMNYGPDHDPRALQARRDRGAISVYAQNRDYHDVIKGRLKEIAGKIVARAGGDVKVFVDTAPVMEKPLAQAAGLGWQGKHTNLVSREHGSWLFLGTIFTTVELAPDRAEIDHCGSCRACLDACPTDAFPAPYRLDARRCISYLTIENKGPIPHEFREKIGNRIYGCDDCLAACPWNKFARAASEAKLAARDDLRKPPLADLLELDDAAFRAFFSSSPIKRIGRDRFIRNVLIAAGNSGDAALAVPVRALLGDPSPLVRGAAIWALARLVPDAEYAKWAATGLKTENDAAVREEWRLAPPDGAHA

SEQ ID NO: 78316 - protein, 384 aa, unidentified; identical to SEQ ID NO: 78312
  source 1..384: note = Mesorhizobium japonicum
  REGION 1..384: note = tr|A0A3M9X9N8|A0A3M9X9N8_9RHIZ Epoxyqueuosine reductase OS=Mesorhizobium japonicum OX=2066070 GN=queG; PE = 3 SV=1

SEQ ID NO: 78317 - protein, 384 aa, unidentified
  source 1..384: note = Mesorhizobium japonicum
  REGION 1..384: note = tr|Q98DM5|Q98DM5_RHILO Epoxyqueuosine reductase; OS = Mesorhizobium japonicum (strain LMG 29417 / CECT 9101 / MAFF 303099) OX=266835 GN=queG PE=3 SV=1
MRTSTSDAAKLRALIDAEAHRAGFDAIAVTTPDAIPLAPARLAEFVADGFHGSMDWIAETIARRSEPSTLWPDVRSIVVLAMNYGPDHDPRVLQARHDRGAISVYAQNRDYHDVMKGRLKEIAGKIVARAGGDVKVFVDTAPVMEKPLAQAAGLGWQGKHTNLVSREHGSWLFLGTIFTTAELAPDRAEIDHCGSCRACLDACPTDAFPAPYRLDARRCISYLTIENKGPIPHEFREKIGNRIYGCDDCLAACPWNKFARAASEAKLAARDDLRAPPLADLLELDDAAFRVFFSGSPIKRIGRDRFIRNVLIAAGNSGDVVLAVPVRALVGDPSPLVRGAAIWALARLVPDAEYSERAATGLKAENDAAVREEWRLARPDRAHA

SEQ ID NO: 78318 - protein, 384 aa, unidentified; identical to SEQ ID NO: 78315
  source 1..384: note = Mesorhizobium jarvisii
  REGION 1..384: note = tr|A0A3A5KBX1|A0A3A5KBX1_9RHIZ Epoxyqueuosine reductase OS=Mesorhizobium jarvisii OX=1777867 GN=queG; PE = 3 SV=1

SEQ ID NO: 78319 - protein, 384 aa, unidentified
  source 1..384: note = Mesorhizobium kowhaii
  REGION 1..384: note = tr|A0A2W7CNA1|A0A2W7CNA1_9RHIZ Epoxyqueuosine reductase OS=Mesorhizobium kowhaii OX=1300272 GN=queG PE=3; SV = 1
MRTSTSDPVKLRALIDAEAHRAGFDAVAVTTPDAIPLAPARLAEFVADGFHGSMDWIAETLQRRGEPTALWPQVRSIIVLAMNYGPDHDPREVLAKRDRGAISVYAQNRDYHEVMKGRLKEIAGKLVARAGGDVKVFVDTAPVMEKPLAEAAGLGWQGKHTNLVSREHGSWLFLGTIFTTAELLPDRAEIDHCGSCRACLDVCPTDAFPAPYRLDARRCISYLTIENKGPIPHEFREKIGNRIYGCDDCLAACPWNKFARAASEAKLAARDELREPPLAELLQLDDAAFRAFFSGSPIKRIGRDRFVRNVLIAAGNSGDAALAGAVRVLLDDASPLVRGAAIWALARLVPDAEYSERAATGLKTEGDAAVRDEWRVARPTRAHA

SEQ ID NO: 78320 - protein, 386 aa, Mesorhizobium mediterraneum
  REGION 1..386: note = tr|A0A271L4C6|A0A271L4C6_9RHIZ Epoxyqueuosine reductase OS=Mesorhizobium mediterraneum OX=43617 GN=queG; PE = 3 SV=1
MRTSISKAENLRALIDREARRAGFDAVAVTTPDAIPQAPARLAEFVADGFHGSMGWIAETLERRSEPTALWPEVRSIIVLAMNYGPDHDPRAVLVKRDRGAISVYAQNRDYHDVMKGRLKEIAGKIVARAGGDVKVFVDTAPVMEKPLAEAAGLGWQGKHTNLVSRAHGSWLFLGTIFTTAELAPDTPEDDHCGSCRACLDVCPTDAFPAPYRLDARRCISYLTIESKGPIPHEFREKIGNRIYGCDDCLAACPWNKFAQTASEAKLAARADLREPPLADLLALDDAAFRSLFTGSPIKRIGRDRFVRNVLIAAGNSGDSSLGNAVRALLGDASPLVRGAAVWALSRLVPETEFARRATAAVKAESDDAVQREWRLALANQIEAHA

SEQ ID NO: 78321 - protein, 386 aa, Mesorhizobium metallidurans
  REGION 1..386: note = tr|M5EIV0|M5EIV0_9RHIZ Epoxyqueuosine reductase; OS = Mesorhizobium metallidurans STM 2683 OX=1297569 GN=queG; PE = 3 SV=1
MRTSISKNEPLRALIEREAKRAGFDAIAVTTPDAIPLAPARLAAFVADGFHGSMGWIAETLERRGEPAALWPAVRSIIVLAMNYGPDRDPRAVLAKRDRGAISVYAQNRDYHEVMKGRLKEIAGKIVARAGGDVKVFVDTAPVMEKPLAEAAGLGWQGKHTNLVSREHGSWLFLGTIFTTAELAPDGAEEDHCGSCRACLDACPTDAFPAPYRLDARRCISYLTIENKGPIPQEFRESIGNRIYGCDDCLAACPWNKFARMASEAKLVARADLREPPLAELLSLDDAAFRALFAGSPIKRIGRDRFVRNVLIAAGNSDDFSLADAVRALLGDASPLVRGAAVWALSRLVPGTEFAERARAAMKIESEAAVRDEWLLALPKPIEAHA

SEQ ID NO: 78322 - protein, 376 aa, unidentified
  source 1..376: note = Mesorhizobium muleiense
  REGION 1..376: note = tr|A0A1G8P1A4|A0A1G8P1A4_9RHIZ Epoxyqueuosine reductase OS=Mesorhizobium muleiense OX=1004279 GN=queG; PE = 3 SV=1
MRALIDREARRAGFDAVAVTTPDAIPQAPARLAAFVADGFHGSMGWIAETLERRGEPMALWPEVRSIIVLAMNYGPDHDPRAVLGRRQRGAISVYAQNRDYHDVMKGRLKEIAGKIVGHSGSDVKVFVDTAPVMEKPLAEAAGLGWQGKHTNLVSREHGSWLFLGTIFTTAELASDTPEDDHCGSCRACLDACPTDAFPAPYRLDARRCISYLTIENKGPVPHEFREKIGNRIYGCDDCLAACPWNKFARAASEAKLVARADLREPPLADLLALDDASFRSFFSGSPVKRIGRDRFVRNVLIAAGNSGEPSLGNAVRALLGDASPLVRGAAVWALSRLVPTSEFAKSASAAVKAEGDEAVRREWRLALANQIEAHA

SEQ ID NO: 78323 - protein, 390 aa, unidentified
  source 1..390: note = Mesorhizobium oceanicum
  REGION 1..390: note = tr|A0A1L3SMI7|A0A1L3SMI7_9RHIZ Epoxyqueuosine reductase OS=Mesorhizobium oceanicum OX=1670800 GN=queG; PE = 3 SV=1
MSPTAAQADTGRLRAFIEGEAVKAGFDVVRITHPAATPQAAGRLSEFLAEGRHGSMDWLAETAERRGAPARLWPDARSVIMLGMNYGPSHDPLSVLSERSAGAVSVYAQNRDYHDVMKGRLKLVASKLAARTGADVKVFVDTAPVMEKPLAEAAGLGWQGKHTNLVSRDLGSWLFLGSIFTTAQLPPDEPEKDHCGSCRACLDVCPTDAFPAPYQLDARRCISYLTIENKGPIPHEFREAIGNRIYGCDDCLAVCPWNKFARTASEAKLAGRDDRRAPALADLLELDDAAFRQTFSGSPIKRIGRDRFLRNVLIAAGNSGDARLAERCAELMRDASALVRGAAIWACGRLLAPEEFERRHVDRVTDPEDEREWEWARRMRATRRSERVDA

SEQ ID NO: 78324 - protein, 384 aa, Mesorhizobium opportunistum
  REGION 1..384: note = tr|F7Y8X2|F7Y8X2_MESOW Epoxyqueuosine reductase; OS = Mesorhizobium opportunistum (strain LMG 24607 / HAMBI 3007 / WSM2075) OX=536019 GN=queG PE=3 SV=1
MRTSTSDAAKLRALIDAEARRAGFDAVAVTSPDAIPLAPARLAEFVADGFHGSMDWIAETLARRSEPSTLWPEVRSIIVLAMNYGPDHDPRDLLARRDRGAISVYAQNRDYHEVMKGRLKEIAGKIVARAGGDVKVFVDTAPVMEKPLAEAAGLGWQGKHTNLVSREHGSWLFLGTIFTTAELVPDSAEIDHCGSCRACLDACPTDAFPAPYRLDARRCISYLTIENKGPIPHEFREAIGNRIYGCDDCLAACPWNKFARVASEAKLAARDDLREPAIADLLELDDAAFRAFFSGSPIKRIGRDRFVRNVLIAAGNSGDAALAGAVRGLLDDASPLVRGAAIWALARLVPETEYAERAAIGLATENDAAVREEWRLARPNRAQA

SEQ ID NO: 78325 - protein, 387 aa, Mesorhizobium plurifarium
  REGION 1..387: note = tr|A0A2T3EVG9|A0A2T3EVG9_MESPL Epoxyqueuosine reductase OS=Mesorhizobium plurifarium OX=69974 GN=queG; PE = 3 SV=1
MPGDAGKAENQGRKRQTLTVFLKEEAAAKGFDICRITHPDAIPHAPERLKQFLAAGAHGTMDWLAETAERRAAPRVLWGEVRSIALFGMNYAPEDDPRDILARRDRGAISVYARNRDYHDVVKGRLKEIATRFAARAGEDVKVFVDTAPVMEKPLAEKAGIGWQGKHTNLVSREFGSWLFLGSLFTTAELKLDEPERDHCGSCRSCLDVCPTNAFPAPYRIDARRCISYLTIEHKGPIETELRPLIGNRIYGCDDCLAACPWNKFARSASELKLQARDDLKEPELSFLLTLDDTGFRAFFSGSPVKRIGRDRFVRNALIAAGNSREKSLIPICKTLAADASPTVRGMAVWALSRLISPADLAAFALQCGPETDNEVLSEWKMAGVSR

SEQ ID NO: 78326 - protein, 383 aa, Mesorhizobium plurifarium
  REGION 1..383: note = tr|A0A0K2W4I7|A0A0K2W4I7_MESPL Epoxyqueuosine reductase OS=Mesorhizobium plurifarium OX=69974 GN=queG; PE = 3 SV=1
MRTSTSENLRALIDAEARRAGFEAIAVTRPDAIPLAPARLAEFVADGFHGSMAWIAETLERRAEPSTLWPEVRSIIVLAMNYGPDRDPRDILARSDRGAISVYAQNRDYHEVMKGRLKEIAGKIVARAGGDVKVFVDTAPVMEKPLAEAAGLGWQGKHTNLVSREHGSWLFLGTIFTTAELEPDQAETDHCGSCRACLDACPTNAFPAPYRLDARRCISYLTIENKGPIPREFREKIGNRIYGCDDCLAACPWNKFATAASEAKLAARADLREPPLSELLALDDAAFRAFFSGSPVKRIGRDRFIRNVLIAAGNSGDASLMPAVRGLLDDGSPLVRGAAIWALSRLLSGREFGDLAAKASKTETDAMVLDEWLAAAANPAKAD

SEQ ID NO: 78327 - protein, 386 aa, unidentified
  source 1..386: note = Mesorhizobium prunaredense
  REGION 1..386: note = tr|A0A1R3V3X7|A0A1R3V3X7_9RHIZ Epoxyqueuosine reductase OS=Mesorhizobium prunaredense OX=1631249 GN=queG; PE = 3 SV=1
MRTSISRAQNLRALIDRAARRAGFDAVAVTTPDAIPQAPARLAAFVADGFHGSMDWIAETLERRGEPMALWPEVRSIIVLAMNYGPDHDPRAVLDKRQRGAISVYAQNRDYHDVIKGRLKEIAGKIVARSGSDVKVFVDTAPVMEKPLAEAAGLGWQGKHTNLVSREHGSWLFLGTIFTTAELAPDTPEDDHCGSCRACLDVCPTDAFPAPYRLDARRCISYLTIENKGPIPHAFREKIGNRIYGCDDCLAACPWNKFARAASEAKLVARADLREPPLADLLALDDAAFRSFFSGSPVKRIGRDRFVRNVLIAAGNSGQPSLGNAVRALLDDASPLVRGAAVWALSRLVPVSEFAKSATAAVKAEGDEAVRREWRLALADQIEAHA

SEQ ID NO: 78328 - protein, 386 aa, unidentified
  source 1..386: note = Mesorhizobium qingshengii
  REGION 1..386: note = tr|A0A1G5VX46|A0A1G5VX46_9RHIZ Epoxyqueuosine reductase OS=Mesorhizobium qingshengii OX=1165689 GN=queG; PE = 3 SV=1
MRTSTSDASKLRALIDAEAHRAGFDAVAVTTPDAIPLAPARLAEFVADGFHGSMDWIAETIARRGEPTALWPQVRSIIVLAMNYGPDHDPRGVLAKRDRGAISVYAQNRDYHDVMKGRLKEIAGKIVARAGGDVKVFVDTAPVMEKPLAEAAGLGWQGKHTNLVSREHGSWLFLGTIFTTAELVPDRAEIDHCGSCRACLDACPTDAFPAPYRLDARRCISYLTIENKGPIPHEFRDKIGNRIYGCDDCLAACPWNKFARVASEAKLAARDDLREPPLADLLQLDDAAFRALFSGSPIKRIGRDRFVRNVLIAAGNAGDASLARAVLVLLDDASPLVRGAAIWALARLVPEAEYSQRAATGLKTESDGAVREEWRLARPNPTGAHA

SEQ ID NO: 78329 - protein, 384 aa, unidentified
  source 1..384: note = Mesorhizobium sanjuanii
  REGION 1..384: note = tr|A0A2A6FCT3|A0A2A6FCT3_9RHIZ Epoxyqueuosine reductase OS=Mesorhizobium sanjuanii OX=2037900 GN=queG; PE = 3 SV=1
MRTSISKNEPLRALIDREAKRAGFDAIAVTTPDAIPLAPARLAAFVADGFHGSMGWIAETLKRRGEPAALWPEVRSIVVLAMNYGPDGDPRAVLNKRGRGAISVYAQNRDYHEVMKGRLKEIAGKIVARAGGDVKVFVDTAPVMEKPLAEAAGLGWQGKHTNLVSREHGSWLFLGTIFTTAALAPDTAEEDHCGSCRACLDACPTDAFPAPYRLDARRCISYLTIENKGPIPHEFRERIGNRIYGCDDCLAACPWNKFARAASEAKLVARADLREPPLAELLSLDDAAFRAFFSGSPIKRIGRDRFVRNVLIAAGNSGDSSLGNAVRALLDAPSPLVRGAAVWALSRLVPDRELAKCAAAGLKTEADETVRNEWRLALAIEAHA

SEQ ID NO: 78330 - protein, 397 aa, unidentified
  source 1..397: note = Mesorhizobium soli
  REGION 1..397: note = tr|A0A2P7S644|A0A2P7S644_9RHIZ Epoxyqueuosine reductase OS=Mesorhizobium soli OX=1295366 GN=queG PE=3; SV = 1
MRTSISDRPERGKPGEGDRLRQMIDREAARAGFDAIAVTTPDSIPQAPALLAEFLDAGFHGSMGWMAETLERRAAPKALWGDVRSIIVLAMNYGPGEDPRALQAMPERGAISVYARNRDYHDVIKGRLKELAGKIVARAGGDVKVFVDTAPVMEKPLAEAAGIGWQGKHTNLVSRQFGSWLFLGTIFTTAEIAPDGREVDHCGSCRACLDACPTHAFPAPYKLDARRCISYLTIENKGPIPHEFRAAMGNRIYGCDDCLAACPWNKFARAASEMKLAARDDLLAPRLADFLSLDDAAFRAFFSGSPVKRIGRDRFVRNALIAAGNSNDRGLIPACESLLSDPSPLVRGAAVWALSCLMEPADFTALAAARQNGEDDAEVREEWALASGRAQAIGEQA

SEQ ID NO: 78331 - protein, 385 aa, Mesorhizobium sp.
  REGION 1..385: note = tr|A0A439H3G5|A0A439H3G5_9RHIZ Epoxyqueuosine reductase OS=Mesorhizobium sp. OX=1871066 GN=queG PE=3 SV=1
MRTSTSDRTRLRALIDAEARRAGFEAIAVTRPDAIPLAPARLAEFVADGFHGSMDWIAETVLRRAQPSTLWPEVRSIIVLAMNYGPDRDPRDVLEKRDRGAISVYAQNRDYHDVMKGRLKEIAGKIVARAGGDVKVFVDTAPVMEKPLAEAAGLGWQGKHTNLVSRAHGSWLFLGTIFTTAELEPDKAEIDHCGSCRACLDVCPTDAFPAPYRLDARRCISYLTIENKGPIPVEFREKIGNRIYGCDDCLAVCPWNKFASAAAEAKLAARDDLREPPLSKLLLLDGAAFRAFFSGSPIKRIGRDRFVRNVLIAAGNSGDASLTPIVRGLLDDSSPLVRGAAVWALSRLMPARDFAARAAAALQTEGDATVRDEWFLVLSDPTKDH

SEQ ID NO: 78332 - protein, 396 aa, Mesorhizobium sp.
  REGION 1..396: note = tr|A0A1I6ZNG0|A0A1I6ZNG0_9RHIZ Epoxyqueuosine reductase OS=Mesorhizobium sp. YR577 OX=1884373 GN=queG; PE = 3 SV=1
MRTSISDKAQRGKPDEAGRLRQLIDREAARAGFAAVAVTTPDAIPQAPMRLAEFVADGFHGSMAWISETLQRRADPSTLWPEVRSIIVLAMNYGPESDPRSLQTQRDRGAISVYAQNRDYHDVMKGRLKEIAGKIVARAGGDVKVFVDTAPVMEKPLAESAGIGWQGKHTNLVSREFGSWLFLGTIFCTAELTPDKADEDHCGSCRACLDACPTDAFPAPYRLDARRCISYLTIENKGPIPQEFRAAIGNRIYGCDDCLAACPWNKFASAASEAKLAARDDLRAPALADFLAMDDAGFRAFFTGSPVKRIGRDRFLRNVLIAAGNSGDVSLVAACESLSVDPSPLVRGAAVWALSRLMEPAAFSALATSARQDDDADVRREWLMATGNHPEIRTHA

SEQ ID NO: 78333 - protein, 383 aa, unidentified
  source 1..383: note = Mesorhizobium tamadayense
  REGION 1..383: note = tr|A0A3P3FA12|A0A3P3FA12_9RHIZ Epoxyqueuosine reductase OS=Mesorhizobium tamadayense OX=425306 GN=queG; PE = 3 SV=1
MRTSTSDKARLRALIDTEARRAGFDAVAVARPDAIPLAPARLAEFVADGFHGSMEWIAETIERRAEPSTLWPEVRSIIVLAMNYGPDHDPRGALAKRDRGAISVYAQNRDYHDVMKGRLKEIAGKIVARAGGDVKVFVDTAPVMEKPLAEAAGLGWQGKHTNLVSRAHGSWLFLGTIFTTAELEPDKPEEDHCGSCRACLDVCPTDAFPAPYRLDARRCISYLTIENKGPIPHEFREKIGNRIYGCDDCLAVCPWNKFASVASEAKLAARNDLREPPLSELLRLDDATFRSFFSGSPIKRIGRDRFVRNVLIAAGNSGDASLAPIVRGLLDDASPLVRGAAVWALSRLAPRRDFAKLAASALQAEDDATVRDEWLSALPDHAK

SEQ ID NO: 78334 - protein, 386 aa, Mesorhizobium temperatum
  REGION 1..386: note = tr|A0A271LE90|A0A271LE90_9RHIZ Epoxyqueuosine reductase OS=Mesorhizobium temperatum OX=241416 GN=queG; PE = 3 SV=1
MRTSISKTENLRALIDREARRAGFDAVAVTTPDAIPQAPARLAEFVADGFHGSMGWIADTLKRRGEPTALWPEVRSIIVLAMNYGPDHDPRAVLAKRDRGAISVYAQNRDYHDVMKGRLKEIAGKIVARAGGDVKVFVDTAPVMEKPLAEAAGLGWQGKHTNLVSREHGSWLFLGTIFTTAELAPDTPEDDHCGSCRACLDVCPTDAFPAPYRLDARRCISYLTIENKGPIPHEFREKIGNRIYGCDDCLAACPWNKFAQAASEAKLVARADLREPPLTDLLALDDAAFRSFFTGSPIKRIGRDRFVRNALIAAGNSGEPSLRDAVCALLGDASPLVRGAAVWALSRLVPETEFAKCASAALKAEGDEAVRREWRLALANQIEAHA

SEQ ID NO: 78335 - protein, 386 aa, Mesorhizobium tianshanense
  REGION 1..386: note = tr|A0A562N3H1|A0A562N3H1_9RHIZ Epoxyqueuosine reductase OS=Mesorhizobium tianshanense OX=39844 GN=queG; PE = 3 SV=1
MRTSISRAENLRALIDREAQRAGFDAVAVTTPDAIPQAPARLAEFVADGFHGSMGWIAETLERRGEPTALWPEVRSVIVLAMNYGPDHDPRAVLAKHDRGAISVYAQNRDYHDVMKGRLKEIAGKIVARSGSDVKVFVDTAPVMEKPLAEAAGLGWQGKHTNLVSREHGSWLFLGTIFTTAELAPDTPEDDHCGSCRACLDVCPTDAFPAPYRLDARRCISYLTIENKGPIPHEFREEIGNRIYGCDDCLAACPWNKFARAASEVKLAARDDLREPRLADLLALDDTAFRSFFSGSPIKRIGRDRFVRNVLIAAGNSGDSSLGSAVRALLSDASPLVRGAAVWALSRLVPASGFAKCAAAAVKAESDEAVQREWRLALAKQIEAHA

SEQ ID NO: 78336 - protein, 386 aa, unidentified
  source 1..386: note = Mesorhizobium waimense
  REGION 1..386: note = tr|A0A3A5KEF9|A0A3A5KEF9_9RHIZ Epoxyqueuosine reductase OS=Mesorhizobium waimense OX=1300307 GN=queG; PE = 3 SV=1
MRTSTSDAAKLRGLIDREAQRAGFDAVAVTTPNAIPLAPARLAEFIADGFHGSMGWIAETLERRGEPAALWPEVRSIVVLAMNYGPDHDPRALQEKRDRGAISAYAQNRDYHEVMKGRLKEIAGKIVARAGGDVKVFVDTAPVMEKPLAEAAGLGWQGKHTNLVSREHGSWLFLGTIFTTAALVPDKAEDDHCGSCRACLDACPTDAFPAPYRLDARRCISYLTIENKGPIPHEFREKIGNRIYGCDDCLAACPWNKFAQAASEAKLVARADLREPPLAELLLLDDAAFRSFFAGSPIKRIGRDRFVRNVLIAAGNSGDYSLAGPVRELLGDASPLVRGAAIWALSRLVPEAEFAEHAAASAQTERDEAVRREWLLAQSNPIEIHA

SEQ ID NO: 78337 - protein, 386 aa, unidentified
  source 1..386: note = Mesorhizobium wenxiniae
  REGION 1..386: note = tr|A0A271KNV7|A0A271KNV7_9RHIZ Epoxyqueuosine reductase OS=Mesorhizobium wenxiniae OX=2014805 GN=queG; PE = 3 SV=1
MRTSISRAQNLRALIDREARRAGFDAVAVTTPNAIPQAPARLAEFVADGFHGSMGWIAETLERRGQPTALWPEVRSIIVLAMNYGPDHDPRAVLAKRDRGAISVYAQNRDYHDVMKGRLKEIAGKIVVRAGGDVKVFVDTAPVMEKPLAEAAGLGWQGKHTNLVSREHGSWLFLGTIFTTAELAPDTPEDDHCGSCRACLDVCPTDAFPASYRLDARRCISYLTIENKGPIPHEFREKIGNRIYGCDDCLAACPWNKFARAASEVKLAARDDLREPPLADLLALDDAAFRSFFSGSPIKRIGRDRFVRNVLIAAGNSGEPSLGNAVRALLDDASPLVRGAAVWALSRLVPAQEFAKWATAAVKAERDEAVQREWRMALANQIETHA

SEQ ID NO: 78338 - protein, 395 aa, unidentified
  source 1..395: note = Metakosakonia sp.
  REGION 1..395: note = tr|A0A348DKM2|A0A348DKM2_9ENTR Epoxyqueuosine reductase OS=Metakosakonia sp. MRY16-398 OX=2487150; GN = queG PE=3 SV=1
MECGILAAYFFIVWSVMSEPLDLNQLAHSIKQWGSELGFQQVGIADTDLSASEPKLQAWLDKQYHGEMEWMARHGMMRARPHELLPGTLRVISVRMNYLPANAAFASTLKNPALGYVSRYALGRDYHKLLRNRLKQLGEKIQQHCASLNFRPFVDSAPILERPLAEKAGLGWVGKHSLILNRQAGSFFFLGELLIDLPLPVDQPVEEDCGRCVACLTICPTGAIVEPYTVDARRCISYLTIELEGAIPEEFRPLIGNRIYGCDDCQLICPWNRFSQLTDEADFSPRKALHSPELIELFAWSESWFLKVTEGSAIRRIGHLRWLRNIAVALGNAPWDEANIRALEQRRGEHPLLDEHIEWAIAQQVEKRNACVVEVQTPKKQRLVRVIEKGLIRDA

SEQ ID NO: 78339 - protein, 377 aa, unidentified
  source 1..377: note = Metallibacterium scheffleri
  REGION 1..377: note = tr|A0A4V6RR99|A0A4V6RR99_9GAMM Epoxyqueuosine reductase OS=Metallibacterium scheffleri OX=993689 GN=queG; PE = 3 SV=1
MSPAPAVPQAILPDYPALRAEIAGWALELGFTALGVSGIELPEDAAHLADWLAQGQHGGMEYMSRHAALRSDPAALHPGTLRVISVRMDYWPESAHDAWQVLGDGTRAYIARYALGRDYHGLMRKRLQALADRIAARIGAFGYRAFVDSAPVLEKALARNAGLGWIGKHTLLLSREAGSYFFLGELFTDLPLPIDAEPGAHCGSCSRCIDICPTQAIVAPRRLDARRCIAYLTIEHKGAIPEELRPMLGNRVFGCDDCQLVCPWNRYARASMLPDFAPRHGLDAALLCELIAWDEATWNARTEGMALRRAGYAGWLRNLAVALGNAPHSARVMQALAARAQHASALVREHVAWALAAQQQKAARGVDQGNNSEAPVV

SEQ ID NO: 78340 - protein, 304 aa, unidentified
  source 1..304: note = Unknown
  REGION 1..304: note = tr|A0A1X7ML51|A0A1X7ML51_9GAMM Epoxyqueuosine reductase OS=methanotrophic bacterial endosymbiont of Bathymodiolus sp. OX=280772 GN=queG PE=3 SV=1
MDTTNNELPQKIKQWGYELGFQQVGITDTNLQQAEQRLQDWLAQGYHADMEYMHKHGLKRSRPALLQPETVSIISVRMDYLPEAHEPMETTLNNPVAAFISRYALGRDYHKVLRKRLQKLAQRIEQEVGVFGYRAFVDSAPVLEKAIAEKAGLGWIGKHSNIINKKAGSWFFLGEIYTTLALPSDIPSHNHCGQCVACIDICPTQAIVAPYQVDARRCISYLTIELKGSIPEELRPLMGNRIYGCDDCQLICPWNRFARISKEADFSPRHNLNSQHLIELFNWTESEFLQKTEGSAIRRIGYQQ

SEQ ID NO: 78341 - protein, 353 aa, unidentified
  source 1..353: note = Unknown
  REGION 1..353: note = tr|A0A1D3RNG5|A0A1D3RNG5_9BACT Epoxyqueuosine reductase OS=methanotrophic endosymbiont of Bathymodiolus azoricus (Menez Gwen) OX=343232 GN=queG PE=3 SV=1
MDKAMNELSQQIKHWGLELGFQQVGITDTDFHQAEQRLQHWVAQGYHADMEYMHKHGLKRSRPALLQPGTVSIISVRMDYLPEAQEPIENTLNNPVAGFISRYALGRDYHKVLRKRLQKLAQRIEQEIGIFGYRAFVDSAPVLEKAIAEKAGLGWIGKHSNIINKKAGSWFFLGEIYTSIPLTIDSPSHNHCGQCTACINICPTQAIIAPYQVDARKCISYLTIELKGSIPEALRSLMGNRIYGCDDCQLICPWNRFARLSTETDFSPRYNLNAQHLIELFNWSETEFLTKTEGSAIRRIGYEQWQRNIAVALGNAPASTEIKAVLNHKISYHSELVKEHVLWALKQEHVLKQ

SEQ ID NO: 78342 - protein, 375 aa, Methylarcula marina
  REGION 1..375: note = tr|A0A3R7LNT7|A0A3R7LNT7_9RHOB Epoxyqueuosine reductase OS=Methylarcula marina OX=72022 GN=queG PE=3 SV=1
MPSWTSDRTGGRGARPATAGGQPPDPRGIFTKKKIKAALALEAEAVGFAGMRITTPDAAPEIARRLQSFLEADRHGQMSWMAERTHWRGNPAALWPEARSVIMLAELYTPDHDPLAVLAQPDRAAISVYAQGRDYHDLVKKRLKRLGRWLLEQEPGHEIKVFVDTAPVMEKPLAEAAGLGWQGKHTNLLSRELGSWFFLGAIFTTQELPPDEPEREHCGSCRACLDICPTKAFPAPFQLDARRCISYLTIEHKGPVDPELRELMGNRIYGCDDCLAVCPWNKFAQTGTEMRYRGIVDAPPLEELAILDDAGFRARFSGSPIKRIGRDRFVRNVLYAIGNSGEPRLAEAARPLVNDPDEAVADAARWALLRLARQP

SEQ ID NO: 78343 - protein, 349 aa, Methylibium petroleiphilum
  REGION 1..349: note = tr|A2SHE4|A2SHE4_METPP Epoxyqueuosine reductase; OS = Methylibium petroleiphilum (strain ATCC BAA-1232 / LMG 22953 / PM1) OX=420662 GN=queG PE=3 SV=1
MAGLRREARELGFSQIGVADVDLRSAEPGLLAWLAQGFHGSMHYMALHGLKRARPGELVPGTVRVITARMDYLPAALPEGWQTIEFERLRRPEAATVSLYARGRDYHKVLRARLQTLADRLGERLGPFGHRVFTDSAPVLEVELASRSGIGWRGKHTLALSREAGSMFFLGEIYVDLALPLTEPVDAHCGSCRACIDVCPTQAIVGERRVDARRCISYLTIEHDGPIPAELRAPMGNRIYGCDDCQLVCPWNKYATRAVLPDFDTREVFDAPTLLGLWAWSEAEFLKRTEGSAIRRIGPARWRRNLAVALGNAWREQGDPAVAQALQAARYGASELLREHIDWALAQRA

SEQ ID NO: 78344 - protein, 376 aa, Methylibium sp.
  REGION 1..376: note = tr|A0A0L6TDV9|A0A0L6TDV9_9BURK Epoxyqueuosine reductase OS=Methylibium sp. NZG OX=1686064 GN=queG PE=3; SV = 1
MTDALRVDEPDLDGQALLSDLRSWAATLGFSQIGVADVDLTSAEPGLLAWLDNGFHGSMAYMAAHGLKRARPAELVPGSVRVITARMDYLPRDTPEGWQAVEWRGLHDPARANVSIYARGRDYHKVLRQRLQQLADRLAEAVGPFGHRVFTDSAPLLEVELAARSGIGWRGKHTLALDREAGSMFFLGEICVDLALPLTPPVQPHCGSCSACIDVCPTQAIVDAYRLDARRCISYLTIEHDGPIPVGLRAPIGNRIYGCDDCQLVCPWNKYARKSTLPDFDVRADPGHASLLQLWAWSEADFLRLTEGSAIRRIGFVRWQRNLAVALGNALRGEACEAPGDAVSEGTGQHMRHALSARRDAAGALVREHIDWALER

SEQ ID NO: 78345 - protein, 253 aa, Methylibium sp.
  REGION 1..253: note = tr|W7WTY5|W7WTY5_9BURK Epoxyqueuosine reductase; OS = Methylibium sp. T29-B OX=1437443 GN=queG PE=4 SV=1
MSLYARGRDYHKVLRARLQTLADRLGEQLGPFGHRVFADSAPVLEVELASRSGIGWRGKHTLALSREAGSMFFLGEIYVDLALPLTEPVDAHCGSCRACIDVCPTQAIVGERRVDARRCISYLTIEHDGPIPAELRAPMGNRIYGCDDCQLVCPWNKYATRAVLPDFDTREVFDAPTLLGLWAWSEAEFLKRTEGSAIRRIGPARWRRNLAVALGNAWREQGDPVVAQALQAARDGASELLREHIDWALAQRA

SEQ ID NO: 78346 - protein, 355 aa, Methylobacillus flagellatus
  REGION 1..355: note = tr|Q1H1J0|Q1H1J0_METFK Epoxyqueuosine reductase; OS = Methylobacillus flagellatus (strain KT / ATCC 51484 / DSM 6875) OX=265072 GN=queG PE=3 SV=1
MPQTLNNWESLAEDIKRWGVTLGFSQIGITDTDLSAAEPHHREWIAQGFHGAMDYMAKHGDKRTRPAELVPGTIRIISARMDYMPPNARDSEVVMQDSRLAFISRYALGRDYHKVLRNRLQKLSDMIAQQVGEFGYRVFTDSAPVLEVELAQKAGLGWRGKHTLLLSRNAGSWFFLGEIYTDLPLPIDKPISGHCGKCTACIDVCPTQAIIAPYQVDARRCISYLTIELKDSIPEHLRPLIGNRVYGCDDCQLTCPWNRFAQVTQQDDFHVRHGLDNISLVELFKWDEVTFNEKMAGSAIYRIGHIQWLRNLAVGLGNAATTPEVIEALEHRRNHPSELVREHVAWALNQHKKKR

SEQ ID NO: 78347 - protein, 355 aa, unidentified
  source 1..355: note = Methylobacillus rhizosphaerae
  REGION 1..355: note = tr|A0A238YMN1|A0A238YMN1_9PROT Epoxyqueuosine reductase OS=Methylobacillus rhizosphaerae OX=551994; GN = queG PE=3 SV=1
MSQILNNLQTLAADIKRWGLELGFGQIGITDTDLSAAEPRHREWLEKGFHGAMDYMAKHGEKRTRPAELVPGTVRIISARMDYMPPEARDSEEVIQDSNLAFISRYALGRDYHKVLRNRLQKLSEKIAEAIGPFGYRVFTDSAPVLEVELAQKAGLGWRGKHTLLLSRSAGSWFFLGEIYIDLPLPVDEPSSGHCGKCTACIDICPTQAIVAPYQVDARRCISYLTIELKDSIPEQLRPLIGNRVYGCDDCQLTCPWNRFSHLTEQPDFQVRHGLDNISLVELFSWDEATFKDRMAGSAIYRIGHVQWLRNIAVGLGNARTTPEVVQALEDRRHDPSELVREHVAWALKQHEIQS

SEQ ID NO: 78348 - protein, 356 aa, Methylobacillus sp.
  REGION 1..356: note = tr|A0A1A9NN46|A0A1A9NN46_9PROT Epoxyqueuosine reductase OS=Methylobacillus sp. MM3 OX=1848039 GN=queG; PE = 3 SV=1
MQGHLSYDPQQLAADIKAWGKALGFQHIGITDTDLSTAEPRYREWLEQGFHGAMDYMAKHGSKRTRPGELVPGTVRVISVRMDYRPPEARDSWEVMENADQAFISRYALGRDYHKVLRTRLQQLCDHIASEIGEFGYRAFTDSAPVLEVQLAEKAGLGWRGKHTLLLSREAGSWFFLGEIYTDLPLPVDTPGKNHCGTCQACIDICPTKAIVAPYSVDARRCISYLTIELKESIPEELRPLIGNRVYGCDDCQLVCPWNRFAQLTGEADFQVRHGLDDVTLVELFGWEEEDFRTKMAGSAIYRIGHEQWLRNIAVGLGNAPTTPEVIAALQKRADHPSPLIREHVAWALARHGVIG

SEQ ID NO: 78349 - protein, 360 aa, Methylobacter sp.
  REGION 1..360: note = tr|A0A522WQJ8|A0A522WQJ8_9GAMM Epoxyqueuosine reductase OS=Methylobacter sp. OX=2051955 GN=queG PE=3 SV=1
MGISSQQMITLALQIKQWGLELGFQQVGITDTALPEAEAHLQNWLVNNFHGEMDYMQRHGLKRSRPELLYPGTVRIISVRMDYQTESAMAMNQALADPASAYISRYALGRDYHKLMRGRLQKLADKIQAETGSLLPDSMRAFVDSAPVLEKALAEKAGLGWIGKHSNVINRKAGSWFFLGELFTNLPLPLDTPATAHCGECRACLDICPTQAIVAPYQIDARRCVSYLTIELHGSIPEPLRPLLGNRIYGCDDCQIICPWNRFSKLTGEKDFNPRHRLNTRQLLEVFAWTETEFLANTEGSAIRRIGHQRWLRNIAVALGNAPASGLIVDALKPMLKHDSEMVREHVHWALAQQIPNDSA

SEQ ID NO: 78350 - protein, 357 aa, Methylobacter sp.
  REGION 1..357: note = tr|A0A2P5MDY3|A0A2P5MDY3_9GAMM Epoxyqueuosine reductase OS=Methylobacter sp. OX=2051955 GN=queG PE=3 SV=1
MHTFDTEKMAQLVLQIKAWGQALGFQQVGITDTQLSEAEQHLQNWLEKGFHGDMDYMHKHGLKRSRPALLEPGTRSIISVRMDYLPESASSMQAQLDDPFTAYISRYSLGRDYHKLMRNRLQKLAERIQQHIGPFGYRAFVDSAPVLEKALAEKAGLGWIGKHSNLINRQAGSWFFLGEIYTDLALPTDSKTGTHCGDCTACLTICPTQAIVAPYQVDAGRCVSYLTIELKGAIPEALRPLIGNRIYGCDDCQLVCPWNRFARLTDEQDFKPRHQLDNTQLVAAFAWSEAEFLAKTEGSAIRRIGYERWLRNLAVALGNAKGSETIVTALKTRMEHVSALVREHVLWALNQQRAKSN

SEQ ID NO: 78351 - protein, 361 aa, Methylobacter tundripaludum
  REGION 1..361: note = tr|A0A2S6HBV5|A0A2S6HBV5_9GAMM Epoxyqueuosine reductase OS=Methylobacter tundripaludum OX=173365 GN=queG; PE = 3 SV=1
MDTSSQKMADLALQIKQWGLELGFQQVGITDTALPEAEAHLQNWLDNGFHGEMDYMQRHGLKRSRPELLHPGTVRIISVRMDYQTESATTMNQALADPASAYISRYALGRDYHKLMRNRLQKLADKIQAGIGSQLPGSMRAFVDSAPVLEKALAEKAGLGWIGKHSNVINRKAGSWFFLGELFTNLPLPVDSPATAHCGACRACLDVCPTQAIIAPYQVDARRCVSYLTIELHGSIPEDLRPLIGNRIYGCDDCQIICPWNRFAKPTGEQDFNPRHRLNTQQLLEVFAWSEAEFLAKTEGSAIRRIGHQRWLRNIAVALGNAPSSPLIIDALKPMLAHESEMVKEHVTWALAQQAANDSAE

SEQ ID NO: 78352 - protein, 361 aa, Methylobacter tundripaludum
  REGION 1..361: note = tr|G3IYG1|G3IYG1_METTV Epoxyqueuosine reductase; OS = Methylobacter tundripaludum (strain ATCC BAA-1195 / DSM 17260 / SV96) OX=697282 GN=queG PE=3 SV=1
MDTSSQKMADLALQIKQWGLELGFQQVGITDTDLPEAEAHLKNWLDNNFHGEMDYMQRHGLKRSRPELLHPGTLRIISVRMDYQTESAITMNQALADPASAYISRYALGRDYHKLMRNRLQKLADKIQAEIGSQLPGPMRAFVDSAPVLEKALAEKAGLGWIGKHSNVINRKAGSWFFLGELFTNLPLPVDSPATAHCGECRACLDICPTQAIIAPYQVDARRCVSYLTIELHGSIPEDLRPLIGNRIYGCDDCQIICPWNRFAKPTGEQDFNPRHRLNTQQLLEVFAWSEVEFLAKTEGSAIRRIGHERWLRNIAVALGNAPSSPLIIDALKPMLAHESEMVKEHVTWALAQQAANDSAE

SEQ ID NO: 78353 - protein, 361 aa, Methylobacterium aquaticum
  REGION 1..361: note = tr|A0A0J6S5V1|A0A0J6S5V1_9RHIZ 4Fe-4S ferredoxin; OS = Methylobacterium aquaticum OX=270351 GN=VP06_25595 PE=4; SV = 1
MTRPDAVPALPERLAAWLAAGHHGGMAWMAERTAERAGPARLWPAVRSIVMLGINAGPDGDPLAALQDSSRGAIAVYARRRDYHDVIKGKLKELGGAFAAKAGAEIKVFVDTAPVMEKPLAAAAGLGWQGKHSVLVSRDAGNWLLLGALYTTAALPVDEPEGDHCGRCRRCLDACPTGAFPAPYRLDARRCLAYLTIEHAGPIPEEFRVPMGNRVFGCDDCLAVCPWNKFAVATREARLAARADLAAPPLAELARLDDAAFRRRFAGTPIKRTGRDRFLRNVLIAVGNAGDQSLAGEAERLLEDPSPLVRGMAVWALARLGRLPPAPPDEPDPDVRVEWSRAKNPGVQRASPLAGAGRRPA

SEQ ID NO: 78354 - protein, 362 aa, Methylobacterium aquaticum
  REGION 1..362: note = tr|A0A0C6FDQ0|A0A0C6FDQ0_9RHIZ 4Fe-4S ferredoxin; OS = Methylobacterium aquaticum OX=270351 GN=Maq22A_c08420; PE = 4 SV=1
MTRPDAVPALPERLSAWLSAGHHGEMAWMEERAAERAEPARLWPAIRSIVMLGMNAGPEGDPLASLADPTRGSVAVYARRRDYHDVIKGKLKELGGAFAAKAGAKVKVFVDTAPVMEKPLAEAAGLGWQGKHSVLVSRKFGNWLLLGAIYTTADLAVDASEPDRCGSCRRCLDACPTNAFPAPYRLDARRCLAYLTIEHEGPIPAEFREPMGNRVFGCDDCLAACPWNKFAAAAREARLAARADLAAPPLAELARLDEASFRQRFAGTPIKRTGRDRFLRNVLIAVGNSGDPDLAGEALRLLDDASPLVRGMAVWALARLGRLPPGPAPDEHDPDVLAEWAAAKNRGVPRASPLAGAEQRPA

SEQ ID NO: 78355 - protein, 381 aa, Methylobacterium brachiatum
  REGION 1..381: note = tr|A0A3G2VEQ8|A0A3G2VEQ8_9RHIZ tRNA epoxyqueuosine(34) reductase QueG OS=Methylobacterium brachiatum OX=269660 GN=queG PE=4 SV=1
MRRLVEARAQHLGFCGLRITRPDRLPDLPDRLSRWLEEGAHGTMDWMAERADQRASPVGLWPGLRSILVLAMSYRPEDDPLDLVARTDRGAVAAYARRRDYHEVLKGRLKELGGYLSAKGDVRVKVFCDTAPVMEKTLAEAAGLGWQGKHTVLLSREHGNWLLLGAIYTSAEFEPDAPGRGHCGSCRACLDICPTDAFPAPYRLDARRCISYLTIEHAGPIADEFRTAIGNRVFGCDDCLAVCPWNKFARQAADARLAARADLEAPALADLAELDDASFRKLFAGTPVKRTGRDRFLRNVMIAVGNSGDPRLAGSAIARLDDASPLVRGMAVWACGRLLEPDAVRALHRRHGVAETDSHVRDEWKAATALTELRLGETSPA

SEQ ID NO: 78356 - protein, 381 aa, Methylobacterium brachiatum
  REGION 1..381: note = tr|A0A1I3H8C2|A0A1I3H8C2_9RHIZ Epoxyqueuosine reductase OS=Methylobacterium brachiatum OX=269660; GN = SAMN02799642_01523 PE=4 SV=1
MRRLVEARAQHLGFCGLRITRPDRLPDLPDRLSRWLEEGAHGTMDWMAERADQRASPVGLWPGLRSILVLAMSYRPEDDPLDLVARTDRGAVAAYARRRDYHEVLKGRLKELGGYLSAKGDVRVKVFCDTAPVMEKTLAEAAGLGWQGKHTVLLSREHGNWLLLGAIYTSAEFEPDAPGRGHCGSCRACLDICPTDAFPAPYRLDARRCISYLTIEHAGPIADEFRTAIGNRVFGCDDCLAVCPWNKFARTAADARLAARADLEAPALADLAELDDASFRKFFAGTPVKRTGRDRFLRNVMIAVGNSGDPRLADSAIARLDDASPLVRGMAVWACGRLLEPDAVRALHRRHGVAETDSHVRDEWSAATALTELHLGETSPA

SEQ ID NO: 78357 - protein, 427 aa, unidentified
  source 1..427: note = Methylobacterium currus
  REGION 1..427: note = tr|A0A2R4WFC0|A0A2R4WFC0_9RHIZ Epoxyqueuosine reductase OS=Methylobacterium currus OX=2051553 GN=queG; PE = 3 SV=1
MGRGRDGAELVRAGEVAPLLPQPAHRPGGRDGAGRSLRGSGLLTPHALRHFLETRARALGFDALAITRPDAVPALPERLAAWLASGHHGDMAWMEERTGERADPARLWPEVRSIVMLGVNAGPESDPLAALRDPSRGSIAVYARRRDYHDVIKGKLKELGGAFAVKAGAAIKVFVDTAPVMEKPLAAAAGLGWQGKHSVLLSRDFGNWLLLGALYTTAELPADAPEGDHCGRCRRCLDACPTDAFPAPYQLDARRCLAYLTIEHAGPIPPEFRVPMGNRVFGCDDCLAVCPWNKFATATREARLTARDDLAAPPLAELARLDDAAFRRRFAGTPIKRTGRDRFLRNVLIAIGNSGDEGLSGEAERLLGDPSPLVRGMAVWALARLGRLPPAPPPGERDPDVLAEWDLAKNSGVRRASPLAGAGQRPA

SEQ ID NO: 78358 - protein, 356 aa, unidentified
  source 1..356: note = Methylobacterium dankookense
  REGION 1..356: note = tr|A0A564FQV6|A0A564FQV6_9RHIZ Epoxyqueuosine reductase OS=Methylobacterium dankookense OX=560405; GN = queG PE=4 SV=1
MTRPEAVPHLPGRLGAWLAAGAQGDMAWMAERADQRASPPELWPAVRSILVLAMSYRPESDPLALLEARDRGAIAAYAQRRDYHDVLKGKLKELGGYLSAKAGRPVKVFVDTAPVMEKPLAEAAGLGWQGKHTVLISREHGNWLLLGAIYTAAVLDPDAPGRDRCGSCRACLDICPTDAFPGPYRLDARRCISYLTIEHAGPIAPEFRAPMGNRVFGCDDCLAICPWNKFAREAAETRMAARDDLASPPLAELAALDDAGFRARFAGTPVKRTGRDRFVRNVLIAIGNAGDPALCAAALARLDDPAPLVRGMAVWAASRYLGAEALTALHARHGATEADPHVRAEWDAALSAEPAA

SEQ ID NO: 78359 - protein, 391 aa, unidentified
  source 1..391: note = Methylobacterium frigidaeris
  REGION 1..391: note = tr|A0A2G8M8G4|A0A2G8M8G4_9RHIZ Epoxyqueuosine reductase OS=Methylobacterium frigidaeris OX=2038277; GN = queG PE=3 SV=1
MTPHAPLKPDVLRQFLETRARALGFDALAVTRPDAVPALPERLAAWLAAGHHGDMAWMDERTGERADPARLWPDVRSIVMLGVNAGPDGDPLAALQDPARGSIAVYARRRDYHDVIKGKLKELGGAFAVKAGAEIKVFVDTAPVMEKPLAAAAGLGWQGKHSVLLSRDFGNWLLLGAIYTTAELPADAPEGDHCGRCRRCLDACPTNAFPAPYQLDARRCLAYLTIEHAGPIPPEFRVPMGNRVFGCDDCLAVCPWNKFATATREARLIARDDLAAPPLADLARLDDAAFRTRFAGTPIKRTGRARFLRNVLIAIGNSGDEGLAGEAERLLEDASPLVRGMAVWALARLGRLPPAPPPDEHDPDVLSEWTSAKNSGVQRASPLAGAGQRPA

SEQ ID NO: 78360 - protein, 383 aa, unidentified
  source 1..383: note = Methylobacterium gnaphalii
  REGION 1..383: note = tr|A0A512JN46|A0A512JN46_9RHIZ Epoxyqueuosine reductase OS=Methylobacterium gnaphalii OX=1010610 GN=queG; PE = 4 SV=1
MVEDRARKLGFDTFAVTRPDSVPGLPDRLARWLVDGHHGDMAWMGDRADQRAAPSALWDDVRSIVMLGLNAAPDQDPLDNLARKDRGTIASYAQRRDYHEVIKGKLKEIGGLLSARSGRPAKVFVDTAPVMEKPLAAAAGLGWQGKHTVLISREFGNWMLLGAIYSAAELEPDAPGRDSCGTCRRCLDICPTGAFPEPYRLDARRCISYLTIEHAGPIPHEFREAIGNRIFGCDDCLAVCPWNKFAERAGEAKMAVRADLASPSLAELARLDDAAFRAFFAGTPVKRTGRDRFLRNVLIAIGNSGDPALAEEAARCLDDPAPVVRGAAVWACGQLLDDDRVGALRAMHAPIERDATVREEWHALNPCPSSAKGREPGAVTSRL

SEQ ID NO: 78361 - protein, 390 aa, Methylobacterium gossipiicola
  REGION 1..390: note = tr|A0A1I2R4T4|A0A1I2R4T4_9RHIZ Epoxyqueuosine reductase OS=Methylobacterium gossipiicola OX=582675; GN = queG PE=3 SV=1
MKGRPPKKVWAGAELRRAVEARARHLGFDSLRITRPDAVPALMQRLPAWLAAGHHGGMAWMQDRADQRADPATLWPGVRSVIVLAMSYTPEESPLDVLTRRDRGAIAAYAQRRDYHEVMKGKLKELGGYLSAKGDVRVKVFVDTAPVMEKPLAEAAGLGWQGKHTVLISRTHGNWLLLGAIYTSAAFDADTPEADHCGSCRRCLDICPTNAFPAPYRLDARRCISYLTIEHQGPIPREFRAAIGNRIFGCDDCLAVCPWNKFAERAGEARLAARDDLAAPPLAELARLDDAAFRVRFAGTPIKRTGRDNILRNVLIAIGNSGSAALAEEAVRCLTDPSPVVRGAAVWAIGRLFGAADLHTIFARAGTDEADDAVRGEWQNALAQQAQNHP

SEQ ID NO: 78362 - protein, 465 aa, unidentified
  source 1..465: note = Methylobacterium haplocladii
  REGION 1..465: note = tr|A0A512IQX7|A0A512IQX7_9RHIZ Epoxyqueuosine reductase OS=Methylobacterium haplocladii OX=1176176; GN = queG PE=3 SV=1
MVRAPEVAPVLPRDPRRPGAGHGPSRALRGSGFLKTTGRTLTGSDLRAVIEARAKKLGFDTFAVTRPDAVPGLPDRLAQWLAEGHHGEMAWMTERSDERAAPAALWGGVRSIVMVGLNAGPEQDPLASLTRKDRGTIASYAQRRDYHEVIKGKLKEIGGLLSARSGRSAKVFVDTAPVMEKPLAEAAGLGWQGKHTVLVSREHGNWLLLGAIYTAADLEPDAPGRDSCGSCRRCLDICPTDAFPAPYRLDARRCISYLTIEHEGPIPHEFREAIGNRIFGCDDCLAVCPWNKFAAQAGEAKMAARADLASPPLADLVRLDDAGFRARFAGTPIKRTGRDRFLRNVLIAIGNSGDEVLAEEAVACLADPAPVVRGAAVWACGRLLDGQRAGALYAEHAPGESDADVTREWLALNPLPSAGEGGHRVSEGREGAAPSPDPLRGPPSPAEGGGDRHDTSFEKPGTPAA

SEQ ID NO: 78363 - protein, 389 aa, unidentified
  source 1..389: note = Methylobacterium indicum
  REGION 1..389: note = tr|A0A0J6RC08|A0A0J6RC08_9RHIZ Epoxyqueuosine reductase OS=Methylobacterium indicum OX=1775910 GN=queG; PE = 3 SV=1
MTAAPTPDKLRHFLETRARTLGFDALAVTRPDAVPALPGRLSAWLAAGHHGEMTWMEERTAERADPARLWPDLRSIVMLGMNAGPEGDPLAALADPARGSIAVYARRRDYHDVIKGKLKELGGAFAAKAGAKVKVFVDTAPVMEKPLAEAAGLGWQGKHSVLVSRKFGNWLLLGAIYTTAELSVDAPESDHCGRCRRCLDACPTNAFPAPYRLDARRCLAYLTIEHEGPIPAEFREPMGNRVFGCDDCLAVCPWNKFAAAAREARLSARTDLAAPPLAELARLDEASFRQRFAGTPIKRTGRDRFLRNVLIAVGNSGDPDLAVEALRLLDDAAPLVRGMAVWALARLGRLPPGPPPGETDRDVLAEWDLAKNPGVQRASPLAGAGRRPA

SEQ ID NO: 78364 - protein, 380 aa, unidentified
  source 1..380: note = Methylobacterium indicum
  REGION 1..380: note = tr|A0A147FLC2|A0A147FLC2_9RHIZ Epoxyqueuosine reductase OS=Methylobacterium indicum OX=1775910 GN=queG; PE = 3 SV=1
MRHFLETRARTLGFDALAVTRPDAVPALPGRLSAWLTAGHHGEMTWMEERTAERADPARLWPDLRSIVMLGMNAGPEGDPLAALADPARGSIAVYARRRDYHDVIKGKLKELGGAFAAKAGAKVKVFVDTAPVMEKPLAEAAGLGWQGKHSVLVSRKFGNWLLLGAIYTTAELSVDAPESDHCGRCRRCLDACPTNAFPAPYRLDARRCLAYLTIEHEGPIPAEFREPMGNRVFGCDDCLAVCPWNKFAAAAREARLSARTDLAAPPLAELVRLDEARFRQRFAGTPIKRTGRDRFLRNVLIAVGNSGRQDLAGEALRLLDDAAPLVRGMAVWALARLGRLPPGPPPDETDRDVLAEWDLAKNPGVQRASPLAGAGRRPA

SEQ ID NO: 78365 - protein, 338 aa, Methylobacterium mesophilicum
  REGION 1..338: note = tr|M7YUU2|M7YUU2_9RHIZ Uncharacterized protein; OS = Methylobacterium mesophilicum SR1.6/6 OX=908290; GN = MmSR116_0474 PE=4 SV=1
MDWMSERADQRARPTGLWPGLRSIVVVAMNYRPENDPLALVALKDRGAVAAYAQRRDYHEVLKGKLKELGGYLSAKGDVRVKVFCDTAPVMEKTLAEAAGLGWQGKHTVLISRAHGNWLLLGAIYTSAEFEPDVSGRDHCGSCRACLDICPTDAFPAPYRLDARRCISYLTIEYAGPIPVGFRPAIGNRVFGCDDCLAVCPWNKFARTSAETRLAARVELDAPPLADLAALDDAAFRSLFAGTPVKRTGRDRFLRNVMIAVGNSGARDLADPAIARLADDSSLVRGMAVWACGQLLEPEVVRALHRRYGPGEADPHVRAEWRAAAGLTEPWADETSAA

SEQ ID NO: 78366 - protein, 389 aa, Methylobacterium nodulans
  REGION 1..389: note = tr|B8IMS3|B8IMS3_METNO 4Fe-4S ferredoxin-type domain-containing protein OS=Methylobacterium nodulans (strain LMG 21967 / CNCM I-2342 / ORS 2060) OX=460265; GN = Mnod_54 22 PE=4 SV=1
MTRDGAGLRRLLEERARALGFDALAVTGPEAVPDLPARLSAWLDAGHQAGMGWMGERVAERASPAALWPAVRSIVMLGVNAGPQEDPRAVLAARDRGAIAVYAQRRDYHDVIKGKLKELGGILAARGGADLKVFVDTAPVMEKPLAAAAGLGWQGKNTLLVSREFGTWLLLGAIYTNAELPRDSGIGDRCGSCRRCLDVCPTDAFPAPYRLDANRCIAYLTIEHAGPIAPEFREAMGNRVFGCDDCLAVCPWNKFAQAAREARLSARQDLASPALAELARLDEAAFRARFAGTPVKRTGRARVLRNVLIAIGNSGDATLAAEAERLLDDPSPLVRGMAVWALARLAPERLPPGPPPGEEDPDVLREWRLALNQGVQRASPLAGAGQRPA

SEQ ID NO: 78367 - protein, 363 aa, Methylobacterium organophilum
  REGION 1..363: note = tr|A0A2U1EXX1|A0A2U1EXX1_METOR Epoxyqueuosine reductase OS=Methylobacterium organophilum OX=410; GN = C7388_106139 PE=4 SV=1
MTRPDRLPDLPGRLSAWLAEGAQGTMDWMAERADQRASPIALWPGVRSILVLAMSYRPEHDPLDLVGRRDRGAVAAYAQRRDYHEVLKGRLKELGGYLSAKGDVRVKVFCDTAPVMEKTLAEAAGLGWQGKHTVLISRGHGNWLLLGAIYTSAEFEPDAPERDHCGSCRACLDVCPTDAFPAPYRLDARRCISYLTIEHAGPIPAAFRAAIGNRVFGCDDCLAVCPWNKFARTAAESRLAARAELASPALADLAELDDAAFRAFFAGTPVKRTGRDRFLRNVMIAIGNSGDPSLAEAAVARLRDPSPLVRGMAVWACGRLLEPETVRALRRQQGEREKDAHVRDEWRAATGLTGSRTDETSAA

SEQ ID NO: 78368 - protein, 335 aa, Methylobacterium oryzae
  REGION 1..335: note = tr|A0A089NZM2|A0A089NZM2_9RHIZ Putative iron-sulfur cluster binding protein OS=Methylobacterium oryzae CBMB20; OX = 693986 GN=MOC_3513 PE=4 SV=1
MAERADQRASPVDLWPGLRSILVLAMSYRPEHDPLDLVARPDRGAIAAYAQRRDYHEVLKGRLKELGGYLSAKGDVRVKVFCDTAPVMEKTLAEAAGLGWQGKHTVLISRGHGNWLLLGAIYTSAEFEPDPPERDHCGSCRACLDICPTDAFPAPYRLDARRCISYLTIEHAGPIPAAFRPAIGNRVFGCDDCLAVCPWNKFARTAAENRLAARADLAAPALADLAGLDDAAFRSFFAGTPVKRTGRDRFLRNVMIAIGNSGDPDLAGAAVAALDDASPLVRGMAVWACGRLLAPDAVHALCRLHGDHETDTHVRDEWTAAAALTESPVGETSAP

SEQ ID NO: 78369 - protein, 354 aa, unidentified
  source 1..354: note = Methylobacterium oxalidis
  REGION 1..354: note = tr|A0A512J727|A0A512J727_9RHIZ Epoxyqueuosine reductase OS=Methylobacterium oxalidis OX=944322 GN=queG; PE = 4 SV=1
MPGLPERLSAWLAAGAHGEMAWMAERTAERTAPAGLWPEVRSVVMLGLSYAPGTNPLDLLARRDRAAIAAYAQRRDYHEVVKGKLKELGGLLAARSGRPVKVFVDTAPVMEKPLAEAAGLGWQGKHTVLISREHGNWLLLGAIYSAAELEPDAPEPEHCGTCRRCLDICPTAAFPEPFRLDARRCLSYLTIEHAGPIPAEFRAPMGNRVFGCDDCLAICPWNKFAQDARATRLAARDDLAAPPLADLARLDDAAFRRLFAGTPVKRTGRDRFLRNVLIAIGNSGDRALAAEAARLLDDPAPLVRGMAVWACGRLLDRNACADLHARSGRGEADPHVLAEWRAALATRDEETPLP

SEQ ID NO: 78370 - protein, 354 aa, unidentified
  source 1..354: note = Methylobacterium phyllostachyos
  REGION 1..354: note = tr|A0A1G9WRD9|A0A1G9WRD9_9RHIZ Epoxyqueuosine reductase OS=Methylobacterium phyllostachyos OX=582672; GN = SAMN05216360_10483 PE=4 SV=1
MDWMEERADQRARPTALWPGLRSILVLAMSYRPEQDPLALVAQRERGAVAAYAQRRDYHEVLKGKLKELGGYLSAKGDVRVKVFCDTAPVMEKTLAEAAGLGWQGKHTVLISRDHGNWLLLGAIYTSAEFEPDGPGRDHCGSCRACLDVCPTDAFPAPYRLDARRCISYLTIEHAGPIPVAFRPAIGNRVFGCDDCLAVCPWNKFARTAAETRLAARSDLAAPPLADLAALDDAAFRGLFAGTPVKRTGRDRFLRNVMIAVGNSGSPALAEAAVARLTDASPLVRGMAVWACGRLLEPAAVRTLHRRHGPGEADLHVRDEWRTALGLAHGDLGSKHVAHDGARCSPLPGGRGLG

SEQ ID NO: 78371 - protein, 379 aa, Methylobacterium platani
  REGION 1..379: note = tr|A0A179S009|A0A179S009_9RHIZ Epoxyqueuosine reductase OS=Methylobacterium platani OX=427683 GN=queG; PE = 3 SV=1
MRGFLETRARALGFDALAVTRPDAVPALPERLAAWLAAGHHGDMGWMEERTGERADPRRLWPEVRSIVMVGANAGPDGDPLAALGDPSRGSISVYARRRDYHDVVKGKLKELGGAFAAKAGVKVKVFVDTAPVMEKPLAAAAGLGWQGKHSVLVSRDFGNWLLLGAIYTTAELAPDAPEADRCGRCRRCLDACPTDALPAPYRLDARRCLAYLTIEHEGPIPEEFRAPMGNRVFGCDDCLAVCPWNKFAQAAREARLSARADLAAPALAELARLDDAGFRARFAGTPVKRTGRDRFLRNVLIAIGNSGDAALAGEALRLLDDPAPLVRGMAVWALARLGRLPPAPDDERDPDVLAEWARAKNPGVRRASPLAGAGRRPA

SEQ ID NO: 78372 - protein, 335 aa, unidentified
  source 1..335: note = Methylobacterium pseudosasicola
  REGION 1..335: note = tr|A0A1I4PCZ7|A0A1I4PCZ7_9RHIZ Epoxyqueuosine reductase OS=Methylobacterium pseudosasicola OX=582667; GN = SAMN05192568_102414 PE=4 SV=1
MEERADQRASPIGLWPGLRSILVLAMSYRPEDDPLDLVTRTDRGAVAAYARRRDYHEVLKGRLKELGGYLSAKGDVRVKVFCDTAPVMEKTLAEAAGLGWQGKHTVLLSREHGNWLLLGAIYTSAEFEPDAPGRGHCGSCRACLDICPTDAFPAPYRLDARRCISYLTIEHVGPIADEFRTAIGNRVFGCDDCLAVCPWNKFARTAADARLAARADLEAPALADLAELDDASFRKLFAGTPVKRTGRDRFLRNVMIAVGNSGDPRLAESAIARLNDDSPLVRGMAVWACRRLLEPGAVQALHRRHAPTETDSHVRDEWIAATALTETRAGETSPA

SEQ ID NO: 78373 - protein, 363 aa, Methylobacterium radiotolerans
  REGION 1..363: note = tr|B1M6M3|B1M6M3_METRJ 4Fe-4S ferredoxin-type domain-containing protein OS=Methylobacterium radiotolerans (strain ATCC 27329 / DSM 1819 / JCM 2831 / NBRC 15690 / NCI MB 10815 / 0-1) OX=426355; GN = Mrad2831_3132 PE=4
MTRPDRLPDLPGRLSAWLAEGAQGTMDWMAERADQRASPIALWPGVRSILVLAMSYRPEHDPLDLVGRRDRGAVAAYAQRRDYHEVLKGRLKELGGYLSAKGDVRVKVFCDTAPVMEKTLAEAAGLGWQGKHTVLISRGHGNWLLLGAIYTSAEFEPDAPERDHCGSCRACLDVCPTDAFPAPYRLDARRCISYLTIEHAGPIPAAFRAAIGNRVFGCDDCLAVCPWNKFARTAAESRLAARAELAAPSLADLAGLDDAAFRAFFAGTPVKRTGRDRFLRNVMIAIGNSGDPSLAEAAVARLRDPSPLVRGMAVWACGRLLEPETVRALRRQQGERETDAHVRDEWRAATGLTGSRTDETSAA

SEQ ID NO: 78374 - protein, 111 aa, Methylobacterium sp.
  REGION 1..111: note = tr|A0A519XQU5|A0A519XQU5_9RHIZ DUF1730 domain-containing protein (Fragment) OS=Methylobacterium sp. OX=409 GN=EOO66_21865 PE=4 SV=1
MAQDKLEDRIKAKAAELGFAACGIARADAAPRAGERLREWLAEGRHGDMIWMESRAEQRSSPKGLWPEVRSVIALGMSYAPAQDPMALAEHPTRGRISVYAQGGDYHDVVK

SEQ ID NO: 78375 - protein, 363 aa, Methylobacterium sp.
  REGION 1..363: note = tr|A0A1I6TWR9|A0A1I6TWR9_9RHIZ Epoxyqueuosine reductase OS=Methylobacterium sp. yr668 OX=1761801; GN = SAMN04487845_11075 PE=4 SV=1
MTRPDRLPDLPGRLSAWLAEGEQGTMDWMAERADQRASPIALWPGVRSILVLAMSYRPEHDPLDLVARRDRGAVAAYAQRRDYHEVLKGRLKELGGYLSAKGDVRVKVFCDTAPVMEKTLAEAAGLGWQGKHTVLISRGHGNWLLLGAIYTSAEFEPDPPEPDCCGSCRACLDVCPTDAFPAPYRLDARRCISYLTIEHAGPIPAAFRAAIGNRVFGCDDCLAVCPWNKFARTAAESRLAARADLAAPALADLAGLDDAAFRTFFAGTPVKRTGRDRFLRNVMIAIGNSDDPSLAEAAVARLRDPSPLVRGMAVWACGRLLAPEAVRALGRQHGDSETDAHVRDEWRAATGLTEPRTDETSAA

SEQ ID NO: 78376 - protein, 362 aa, unidentified
  source 1..362: note = Methylobacterium tarhaniae
  REGION 1..362: note = tr|A0A0J6TFR5|A0A0J6TFR5_9RHIZ 4Fe-4S ferredoxin; OS = Methylobacterium tarhaniae OX=1187852 GN=VQ03_01335; PE = 4 SV=1
MTRPDAVPDLPGRLASWLAAGHHGGMGWMEERSGERADPARLWPEVRSIVMLGVNAGPDGDPLAALAEPSRGSIAVYARRRDYHDVIKGKLKELGGAFAAKAGAEIKVFVDTAPVMEKPLAAAAGLGWQGKHSVLLSRDFGNWLLLGALYTTAELPADEPEGDHCGRCRRCLDACPTDAFAGPYRLDARRCLAYLTIEHAGPIPAEFRVPMGNRVFGCDDCLAVCPWNKFAAATREARLMAREELAAPPLAELARLDDAAFRTRFAGTPIKRTGRDRFLRNVLIAIGNSGDASLAGEAGRLLEDPSPLVRGMAVWALARLGRLPPAPPAEEQDADVLAEWALAKNQGVQRAGPLAGAGPRPA

SEQ ID NO: 78377 - protein, 356 aa, Methylobacterium variabile
  REGION 1..356: note = tr|A0A0J6V6V2|A0A0J6V6V2_9RHIZ 4Fe-4S ferredoxin; OS = Methylobacterium variabile OX=298794 GN=VQ02_18970 PE=4; SV = 1
MPALPERLSAWLAAGHHGGMAWMEERTGARADPAVLWPDVRSIVMLGVNCGPEGDPLAALSDPLRGSIAVYARRRDYHDVIKGKLKELGGAFAARAGAEIKVFVDTAPVMEKPLAAAAGLGWQGKHSVLVSREFGNWLMLSAIYTTADLPVDAPEGDRCGRCRRCLDACPTDAFAGPYRLDARRCLAYLTIEHAGPIPPEFRAPMGNRVFGCDDCLAVCPWNKFAAATREARLMAREDLSAPPLAELARLDDAAFRTRFAGTPIKRTGRDRFLRNVLIAIGNSGDETLAGEAERLLEDASPLVRGMAVWALARLGRLPPAPPPGEQDLDVLAEWDLAKNPGAQRASPLAGAGQRPA

SEQ ID NO: 78378 - protein, 388 aa, unidentified
  source 1..388: note = Methylobrevis pamukkalensis
  REGION 1..388: note = tr|A0A1E3H287|A0A1E3H287_9RHIZ Epoxyqueuosine reductase OS=Methylobrevis pamukkalensis OX=1439726; GN = queG PE=3 SV=1
MTADPLRAARDRAERLGFGALRVTTPERVAEAGLRLREAIAEGHHGTMDWLADTADRRADPRLVWPDVRSVVMLGLNYGPEGDALANLADPSVANISVYARGRDYHDVIKGKLKEIAGLVERDTGAKVKVFVDTAPVMEKPLAASAGLGWQGKHTNLVSRDFGSWLFLGAIFCAAELVPDAPEDDRCGSCRACLDACPTNAFPAPYRLDARRCISYLTIEHAGPIPAEFRAAIGNRIYGCDDCLAVCPWNKFAQTGAEMKLSARADLMAPPIADLLGFDDTAFRERFSGSPVKRIGRNRFLRNLLIAAGNSGTGALGGKVTALLDDPDPVVRGTAVWAAGRLLPAEDLAALGASRLDQETDPEVRAEWDAVLGPRPADETGDRGGKAC

SEQ ID NO: 78379 - protein, 366 aa, unidentified
  source 1..366: note = Methylocaldum marinum
  REGION 1..366: note = tr|A0A286P3P2|A0A286P3P2_9GAMM Epoxyqueuosine reductase OS=Methylocaldum marinum OX=1432792 GN=queG PE=3; SV = 1
MTSSALDYSALAAKIKTWGRELGFQQVGVADTDLSAAEKRLRAWLKDGFHGEMDYMARHGTKRSRPDELVPGTLRVISVRMDYLPEERTAVRERLQDPAAAFISRYVLGRDYHKVLRRRLQQLAGRVAAEIGPFGYRVFVDSAPVLEKPLAAKAGLGWIGKHTNLINRKAGSMFFLGEIYTDVPLPTDAETSDHCGSCTACIDVCPTRAIVAPYRLDARRCISYLTIELRGQIPEEFRPAIGNRIYGCDDCQLVCPWNRYARLTEEADFMPRHGLDVAGLIELFHWDEATFLHRTEGSAIRRIGYECWIRNVAVALGNAPPPIEVLETLASRMDDPSPLIREHVRWALQRNRSRGKPALVADSPAR

SEQ ID NO: 78380 - protein, 369 aa, Methylocaldum sp.
  REGION 1..369: note = tr|A0A4R7A000|A0A4R7A000_9GAMM Epoxyqueuosine reductase OS=Methylocaldum sp. 0917 OX=2485163 GN=queG; PE = 3 SV=1
MTSSARDYSALAAKIKTWGKELGFQQVGIADTDLSAAEQQLQEWIDEGFHGEMDYMARHGTKRSRPEELVPGTLRVISVRMDYLPENRTTVRERLDDQTAAFISRYALGRDYHKVLRKRLQQLAERIAVEIGPFGYRVFVDSAPVLEKALAAKAGLGWIGKHTNLINRKAGSMFFLGEIYTDLPLPIDAETTNHCGSCTACMEVCPTQAIVAPYRLDARRCISYLTIELRGPIPEEFRAAIGNRIYGCDDCQLVCPWNRYARLTEEADFMPRHGLDTAGLIEFFHWDEATFLQKTEGSAIRRIGYECWIRNVAVALGNAATSTEIVDALRARTDDSSPLIREHVRWALARHSSNERQPHRAGHPASSTS

SEQ ID NO: 78381 - protein, 383 aa, unidentified
  source 1..383: note = Methylocapsa palsarum
  REGION 1..383: note = tr|A0A1I3XJM3|A0A1I3XJM3_9RHIZ Epoxyqueuosine reductase OS=Methylocapsa palsarum OX=1612308; GN = SAMN05444581_103194 PE=4 SV=1
MCKIAPPQAPEGAPARLDAWLLSGAAGDMDWMAAEQARRADPRVLWPEVESIIVVGMNYGPPDNPLAALEHKSAGGISVYARHRDYHDVLKGKLKLLASWFASAAQRDGMNGAEVKVFVDTAPVMEKPLAQAAGLGWQGKHTNLVSRELGSWLFLGSMFTNLALAPDPPEADHCGHCRACLDSCPTGAFPRPYVLDARRCISYLTIEHKGHIGAELRPLIGNRIYGCDDCLAVCPWNKFAEAAREAKLQARPELCAPPLADLLRLDDAAFRTFFAGSPIKRIGSARFLRNVLIAAGNSGESSLIEPVADKLAAASPLVRAMAVWALGRLVSPERLREWARAQRAQRAREQDGAVAAEWSLALGPGVGACLTFDATEPEDKRPS

SEQ ID NO: 78382 - protein, 376 aa, unidentified
  source 1..376: note = Methyloceanibacter caenitepidi
  REGION 1..376: note = tr|A0A0A8JYW7|A0A0A8JYW7_9RHIZ Epoxyqueuosine reductase OS=Methyloceanibacter caenitepidi OX=1384459; GN = queG PE=3 SV=1
MGQSLKQTIAERAEALGFDVMRITGADAPARIGSELDAFLAQGREGDMGWLKDTAERRKSPQALWPDVRSVILLGTNYGGPEDPLASLRDASRGAVSIYAKRADYHDVIKGKLKQLARQIQALAGGDVKVFVDTAPVMEKPLAAKAGLGWQGKHTNLVSREFGSWLFLGSIFTTADIEADAPEIDHCGACCRCLDACPTKAFTAPYEIDARRCISYLTIEHKGHIAREFRAAMGNRIYGCDDCLAVCPWNKFAQASHETKLAIRPETDDPPLAEILALDDAAFRERFRGTPIKRTGRDRFVRNALIAAGNAADTSLVPHVEALIDDASPLVRAMAAWALQRLDPARSDTMRAERLAAETDSAVRAEWQETAGALVP

SEQ ID NO: 78383 - protein, 376 aa, unidentified
  source 1..376: note = Methyloceanibacter methanicus
  REGION 1..376: note = tr|A0A1E3W242|A0A1E3W242_9RHIZ Epoxyqueuosine reductase OS=Methyloceanibacter methanicus OX=1774968; GN = queG PE=3 SV=1
MVQSLKARIAERAEALGFDAMRITTADSPDAMGTALDAFLAQGREGDMGWLKDTAERRKSPRALWPDARSIILLGLNYGGPAGPFAALRNASHGAVSIYAKRADYHDVIKGKLKQLAGHVQALAGGDVKVFVDTAPVMEKPLAAKAGLGWQGKHTNLVSRAFGSWLFLGSIFTTAGLEPDVPEIDHCGACRRCLDACPTDAFTAPYEIDARRCISYLTIEHKGHIAPEFREAMGNRIYGCDDCLAVCPWNKFAKTGHDAKLAIRPQADDPPLAEILALDDAGFRDRFRGTPIKRTGRDRFVRNALIAAGNAADASLTCPVETLLDDASPLVRAMAVWALQRLDPDRSAALVSARLSTETDPHVRAEWQAGAGKGAS

SEQ ID NO: 78384 - protein, 402 aa, unidentified
  source 1..402: note = Methyloceanibacter sp.
  REGION 1..402: note = tr|A0A353IMC8|A0A353IMC8_9RHIZ Epoxyqueuosine reductase OS=Methyloceanibacter sp. OX=1965321 GN=queG; PE = 3 SV=1
MPISISESRPDLRVPMRHAAGGASPVMARSLKARIAERAEALGFDAMRITTADGPDAMGAALDAFLADEREGDMGWLRDTAERRKSPRALWPDARSIILLGMNYGAPKDPFAALQNAAHGTVSIYAKRADYHDVIKGKLKQLAGQVLALAGGDVKVFVDTAPVMEKPLAAKAGLGWQGKHTNLVSREFGSWLFLGSIFTTVGLEPDAPETDHCGACRSCLDACPTNAFTAPYEIDARRCISYLTIEHKGHIAPEFREAMGNRIYGCDDCLAVCPWNKFAKDSHEVKLAVLPQADDPPLAEILGLDDAAFRDRFRGTPIKRTGRDRFVRNALIAAGNANDASLVRHVEALIDDASPLVRAMAVWAILRLDPDRSAALRLARLRGETDRQVRAEWQAGASVSTP

SEQ ID NO: 78385 - protein, 376 aa, unidentified
  source 1..376: note = Methyloceanibacter stevinii
  REGION 1..376: note = tr|A0A1E3VQ62|A0A1E3VQ62_9RHIZ Epoxyqueuosine reductase OS=Methyloceanibacter stevinii OX=1774970; GN = queG PE=3 SV=1
MGQSLKRIIAERAEALGFDAVRITGADAPERMGPALDAFLAQGREGDMGWLKDTAQRRKSPHALWPHARSIILLGTNYGGSADPLASLQDASRGAVSIYAKRADYHDVIKGKLKQLAGQIQALAGGDVKVFVDTAPVMEKPLAAKAGLGWQGKHTNLVSRDFGSWLFLGSIFTTADIEADAPEIDHCGACRRCLDACPTKAFTAPYEIDARRCISYLTIEHKGHIAPEFRAAMGNRIYGCDDCLAVCPWNKFAQASHETRLAIRPETDDPPLAEILALDDAEFRTRFRGTPIKRTGRDRFVRNALIAAGNARDSSLVPHVEALIDDASPLVRAMAAWALQRLDPAKSDTLRVERLAAETDGAVRAEWQVTESALVP

SEQ ID NO: 78386 - protein, 372 aa, unidentified
  source 1..372: note = Methyloceanibacter superfactus
  REGION 1..372: note = tr|A0A1E3W7H5|A0A1E3W7H5_9RHIZ Epoxyqueuosine reductase OS=Methyloceanibacter superfactus OX=1774969; GN = queG PE=3 SV=1
MAQSLKSKIADAAKALGFDAVRFTAADAAPDAGANLDAFLAEGRHGDMGWLADTADRRKTPRALWADARSVILLGLNYGRGGDPLAILDERSRGAISIYAQGADYHDAIKTKLKSLAVQVQMLAGGEVKVFVDTAPVMEKPLAAEAGLGWQGKHTNLVSREFGSWLFIGSIFTSVEIAPDEAEDDHCGACRRCLDICPTGALPSPHRMDARACISYLTIEHKGHIAPRYRAAMGNRIFGCDDCLAVCPWNKFAQASHEAKLAVRAESDNPKLAELLTLDDAAFRLRFRGTPIKRTGRDRFVRNVLIAAGNSRDVDLVPLVEARLDDDSPLVRAMAVWALARLAPARLQALRSAFAANETDPAVRDEWLAVAA

SEQ ID NO: 78387 - protein, 386 aa, Methylocella silvestris
  REGION 1..386: note = tr|A0A2J7TMQ4|A0A2J7TMQ4_METSI Epoxyqueuosine reductase OS=Methylocella silvestris OX=199596 GN=queG; PE = 3 SV=1
MNERLAARLEAKAKELGFDVLKITQPSVGGAGARLAEWIEAGFAGEMDWMAETAERRADPALIFPQARSAIMLGVNYGPAANPLAGLAQKSAGNLSVYARNRDYHDLIKGRLKQLAGFLSAAARAAGLEAPQIKVFVDTAPVMEKPLAQAAGLGWQGKHTNLVSREFGSWLFLGSIFTSLELPADQPERDHCGNCSACLDICPTQAFPAPHVLDARRCISYLTIEHKGHIAPEFREKIGNRIYGCDDCLAVCPWNKFAQDAREIRLQPRDDMSAPPLAKLLRLNEAAFRDLFSGSPVKRIGFARFMRNVLIAAGNSGAPELGPEALRHLDAASPLMRAMAVWALSRLAPDLLADHNALAARETDVGARREWAAAQNAPDIEKGRLS

SEQ ID NO: 78388 - protein, 366 aa, Methylocella silvestris
  REGION 1..366: note = tr|B8EJ74|B8EJ74_METSB Iron-sulfur cluster binding protein OS=Methylocella silvestris (strain DSM 15510 / CIP 108128 / LMG 27833 / NCIMB 13906 / BL2) OX=395965 GN=Ms il_3682 PE=4 SV=1
MKITRPSVGGAGARLAEWVEAGFAGEMDWMAETAERRAEPARIFPQARSAIMLGVNYGPAEDPLAGLAQKSAGNLSVYARNRDYHDLIKGRLKQLAGFLSAAARGAGLDAPQIKVFVDTAPVMEKPLAQAAGLGWQGKHTNLVSREFGSWLFLGSIFTSLDLPANEPERDHCGNCSACLDICPTQAFVGPYVLDARRCVSYLTIEHKGHIAREFRDKIGNRIYGCDDCLAVCPWNKFAQDAREIALQSRDDLRAPPLAKLLRLNEAAFRTLFSGSPVKRIGFARFMRNVLIAAGNSGAAELSEEVVRHLPSPSPLVRAMAVWALSRLAPDSLADHGALATRETDVDVRREWAAAQSAADIKKGRLS

SEQ ID NO: 78389 - protein, 339 aa, Methylocella tundrae
  REGION 1..339: note = tr|A0A4U8Z1I4|A0A4U8Z1I4_METTU Epoxyqueuosine reductase OS=Methylocella tundrae OX=227605 GN=queG PE=4; SV = 1
MDWLEETQERRSDPRSLWPEAASIVMLAANYGPPGDPLAALADRSAGNISVYARHRDYHDVIKGRLKQLASWLASAAEGQGFEAPQFKVFVDTAPVMEKPLAQAAGLGWQGKHTNLVSRDFGSWLFLGSIFTNLPLTEDAPERDHCGQCRACLDICPTQAFPRPYALDARRCISYLTIEHKGHIAEEFRAAIGNRIYGCDDCLAVCPWNKFAKTARDIKLLPRGDLLAPALSDLLRLDDAAFRALFAGGPVKRIGFSRFSRNVLIAAGNSGDFSLAELVAEKLGDVSPLVRAMAVWALARLAPEGIAGLARVWLPRETDADVRREWAAAMALSEENAPD

SEQ ID NO: 78390 - protein, 358 aa, unidentified
  source 1..358: note = Methylococcaceae bacterium
  REGION 1..358: note = tr|A0A351KUD2|A0A351KUD2_9GAMM Epoxyqueuosine reductase OS=Methylococcaceae bacterium OX=1933926 GN=queG; PE = 3 SV=1
MDLKQIQTDIKAWAAEFGFDRLGVARLQTQEALKFLDDWLARGRHGEMAYMARHRALRADPSQWVPGALSVLSVRMDYLPMQLEDAMARLDDGEQAAVSVYALGRDYHKLMRRRLQRLASRMEAEIGPFGYRVFSDSAPLFEKSFAQDAGLGWIGKHTNLIDRDAGSFFFLGEIVTDLPLPEDRPVSAHCGSCSACITACPTAAILAPYQLDARRCISYLTIELKGTIPLEFRQSIGNRIYGCDDCQLVCPWNRYAQITREADFLPRQGLDRIAMVELFAWSEDEFQQKLEGSSIRRIGYESWLRNLAIGLGNGPPTSRGIAALKSRSDDVSPVVREHVAWALGELAVRAKELGNSDI

SEQ ID NO: 78391 - protein, 366 aa, unidentified
  source 1..366: note = Methylococcaceae bacterium
  REGION 1..366: note = tr|A0A1Z8WUR6|A0A1Z8WUR6_9GAMM Epoxyqueuosine reductase OS=Methylococcaceae bacterium TMED69 OX=1986766; GN = queG PE=3 SV=1
MRKNQVKHPKRLNALIQKFELLAKDLGFDRLAICDASVRFDKETYVDWIEKKFNGSMKYLEKNIEMRLAPRQIRPSTRSIICVTANYLTKPLSELISKIQDDRKGYISAYATGRDYHKIIRKQLVKLSKKLEEEIEPSGYRVFTDSAPIFEKPLARYAGLGWIGKNTLLINKEVGSFFFLGEIFTDLKLPTETNDLVDLCGTCTNCMDVCPTKAIVAPYKLDSRKCISYLTIESKDRIPIELREKIGNRIFGCDDCQIFCPWNKYAKIKGKNIFSPANDLDNQTLGDLFLISEVDFKVITAGTALKRINYDQWIRNLAVAIGNSEPDINLLNVLKAKLDYPNQSVREHIEWAIKKQYDKIKVEEIG

SEQ ID NO: 78392 - protein, 370 aa, unidentified
  source 1..370: note = Methylococcales bacterium
  REGION 1..370: note = tr|A0A418RFV2|A0A418RFV2_9GAMM Epoxyqueuosine reductase OS=Methylococcales bacterium OX=2304002 GN=queG; PE = 3 SV=1
MLSQNQKLDLSKQLSNQELAKLALKIKQWGLELGFQQVGIADTDLSVAEAHLHNWLAKGFHGDMDYMQRHGIKRSRPELLHEGTLRVISVRMDYLPETREVLQQCLEDPTSAYISRYALGRDYHKMLRNRLQKLADKIQEEFKADAESLKMRAFVDSAPVLEKALAEKAGLGWIGKHSNLINRKAGSWFFLGELFTDLPLPIDEQTSEHCGVCNACLDVCPTQAIVAPYQVDARRCVSYLTIELHGSIPVELRSLIGNRIYGCDDCQIICPWNRFAKITAEQDFNPRQQLNSQQLLAVFAWTEAQFLAKTEGSAIRRIGYERWLRNIAVALGNAPSSVLVIEALTDKLNHPSELVKEHVLWALEQQQQKR

SEQ ID NO: 78393 - protein, 370 aa, unidentified
  source 1..370: note = Methylococcales bacterium
  REGION 1..370: note = tr|A0A3A2J1E8|A0A3A2J1E8_9GAMM Epoxyqueuosine reductase OS=Methylococcales bacterium OX=2304002 GN=queG; PE = 3 SV=1
MLNQEQELDLSSRLTSSELADLALQIKQWGLELGFQQVGITDTDLSVAESHLQNWLLQDFHGNMDYMQRHGLKRSHPELLHEGTLRVISVRMDYQSDTRTAMQQGLDDPTSAYISRYALGRDYHKMMRNRLQKLADKIQAECKLDAEPLRMRAFVDSAPVLEKALAEKAGLGWIGKHSNLINRKAGSWFFLGELFTDLPLPIDEQTTAHCGGCTACLSICPTQAIVGPYQVDARRCVSYLTIELQGSIPVDLRALIGNRIYGCDDCQIICPWNRFAKITAEQDFNPRQQLNSQQLLAVFAWSEALFLVKTEGSAIRRIGHERWLRNIAVALGNAPKSDTIIEALTDKLSHPSELVQEHVQWALEQQYQKR

SEQ ID NO: 78394 - protein, 373 aa, Methylococcus capsulatus
  REGION 1..373: note = tr|Q609D3|Q609D3_METCA Epoxyqueuosine reductase; OS = Methylococcus capsulatus (strain ATCC 33009 / NCIMB 11132 / Bath) OX=243233 GN=queG PE=3 SV=1
MLHAAISSPDLAELKDRIREWGRAQGFQQIGFAGIDLGGHEARLLDWLAAGFHGEMDYMARHGLKRSRPAELEPGTLSVISVRMDYLPEPMQDMKETLADPAAAYVSRYAVGRDYHKLMRRRLQRLAATIARYAGPFGYRVYTDSAPVLEKALAENAGLGWIGKHTNLVNREAGSWFFLGEIYTDLPLPPDQPATNHCGQCRACIDVCPTQAIVAPYRLDARRCVSYLTIELKGSIPAALRPGIGNRIYGCDDCQMVCPWNRFARMTEEADFLPRRGLDRGLLLEFFGWDEAEFLRCTEGSAIRRIGHERWLRNLAVAIGNAPPHPDLAEALRRRLDDASPLVREHVAWGLERQTETAPALPTGGDGAVPLQR

SEQ ID NO: 78395 - protein, 373 aa, Methylococcus sp.
  REGION 1..373: note = tr|A0A432RPB4|A0A432RPB4_9GAMM Epoxyqueuosine reductase OS=Methylococcus sp. OX=39769 GN=queG PE=3 SV=1
METTGVPTHIPDYSLLANRVKQWGQELGFQKIGITDCDLSQAEAQLVEWLRKSFHGEMDYMQRHGTMRTRPEELVPGTIRIISARLDYLPESMSNCEEVLENPTLGYISRYALGRDYHKVIRKKLQRLANRISIETGPFGYRAFTDSAPVMEKVLAEKAGLGWIGKHTNLIDKQSGSWFFLGEIYTDLPLPVDSVSTDHCGSCTACIDICPTQAIVAPYQLDARRCISYLTIELHGSIPVEFRPQIGNRIYGCDDCQIVCPWNSFARMTQETGFAARHELDSPRLVDLFAWDEGLFLARTEGTALRRLGHERWLRNIAVAMGNSPFSTEIVKSLRARLEHPSELVREHVRWALDQQSNRGSPDQPGIAVISGW

SEQ ID NO: 78396 - protein, 357 aa, Methylococcus sp.
  REGION 1..357: note = tr|A0A3N9V8K5|A0A3N9V8K5_9GAMM Epoxyqueuosine reductase OS=Methylococcus sp. OX=39769 GN=queG PE=3 SV=1
MNASPFSPEALKVRIQDWGRELGFQRIGIAGLDLRQAEQRLIDWLAAGFHGEMDYMARHGTRRSRPAELVPGTVSVISARMDYLPEPREAVWAQLERPGAAFVSRYALGRDYHKLMRQRLQKLADWVAGEIGPFGYRVFTDSAPVLEKPLAANAGLGWIGKHTNLIDRRAGSFFFLGEIYTDLTLPADAAVTNHCGSCRACLDVCPTQAIVAPYRLDARRCISYLTIELHGPIPEALRPGLGNRIYGCDDCQLVCPWNRYARLTGENDFLPRHGMDRAGLIELFGWDEVTFLRLTEGSAIRRLGHERWLRNIAVALGNQPPSAPVAAALRERLEHPSELVRDHVLWALNRLGEIASP

SEQ ID NO: 78397 - protein, 383 aa, unidentified
  source 1..383: note = Methylocystaceae bacterium
  REGION 1..383: note = tr|A0A395CWH0|A0A395CWH0_9RHIZ Epoxyqueuosine reductase OS=Methylocystaceae bacterium OX=2052174 GN=queG; PE = 3 SV=1
MLRRPRLLSLTPAIRQKARELGFDQCRITPAGAPPLAGERLADWLKSGAHGDMEWMETTAERRASPEVLWAEARSIVMLGANYGPAENPLAVLSERGRGAISLYARRRDYHDVVKGRLKLLAGFLLSRAGGGEAKVFVDTAPVMEKPLAQAAGLGWQGKHTNLVSRRFGSWLFLGAIFTNLELEADSPESDHCGSCRACLDICPTNAFPAPYRLDARRCVAYLTIEHKGGIPREFRAAIGNRVFGCDDCLAVCPWNKFASAAQDARLAARDELESVALADLAALDEAGFRALFAGTPVKRLGHARFMRNVAIAIGNSGDPALAPAAERLLGDASPLARGAAVWALARLLPRDEFASLADRLAPLEADAEVLEEWAKETQSPKK

SEQ ID NO: 78398 - protein, 395 aa, unidentified
  source 1..395: note = Methylocystaceae bacterium
  REGION 1..395: note = tr|A0A5C9DFQ0|A0A5C9DFQ0_9RHIZ Epoxyqueuosine reductase OS=Methylocystaceae bacterium OX=2052174 GN=queG; PE = 3 SV=1
MHATVPNALIGSPAGYDVRSPAAPALEEEIRARALELGFDVCRFARADVAPEQGERLHAWLRDGAHGDMDWMRETAERRAAPRALWPEAASLVMLGLNYGPDGDPLASLTKPACATISVYARNRDYHDVIKGRLKQLAGFILSRAGAGAGDAKVFVDTAPVMEKPLAQTAGVGWQGKHTNLVSRDFGAWLFLGAIFTTLRLEPDPPEHDHCGSCRKCLDVCPTAAFPAPYRLDARRCISYLTIEHKGPIPLEFRAKIGNRIYGCDDCLAVCPWNKYARAGREAKLAARPEFGAPPLAELARLDDAAFRALFAGSPIKRVGRDRFLRNVLIAIGNSGRPELAAEAERLTEDSAALVRGAAVWALVRLAPTRAAELRSHRLAAESETAVRQEWRQTA

SEQ ID NO: 78399 - protein, 402 aa, unidentified
  source 1..402: note = Methylocystis bryophila
  REGION 1..402: note = tr|A0A1W6MYM3|A0A1W6MYM3_9RHIZ Epoxyqueuosine reductase OS=Methylocystis bryophila OX=655015 GN=queG; PE = 3 SV=1
MAEFAPTSESLAIPDHPSGLARGKSALALRDAIRAKSRELGFDACGFARPDAIPLAAERLNAWLASGAHGEMGWMADRADARGSPQRLWSETRSVVLLGMNYGPGFDPLAATGTADRGAISVYAQGRDYHDVLKGRLKLLAGFMLSRAGGGAVKVFVDTAPVMEKPLAEAAGLGWQGKHTNLVSRGFGSWLFLGAIFTDLELSPDARESDHCGSCRACLDACPTQAFPAPYRLDARRCISYLTIEHKGPIPEEFRAAIGNRVYGCDDCLAVCPWNKFAQAAREAKLAANASLRAPRLADLAALDEAAFRRLFAGSAVKRIGHARFLRNVAIAIGNSGDCALAATLLPLLDAVSPLIRGAAVWALGRLLDADAFSQLVKARLREERDPSVAAEIAKMSHCWKK

SEQ ID NO: 78400 - protein, 376 aa, Methylocystis heyeri
  REGION 1..376: note = tr|A0A4S4MJX8|A0A4S4MJX8_9RHIZ Epoxyqueuosine reductase OS=Methylocystis heyeri OX=391905 GN=queG PE=3; SV = 1
MPLEDAIRSKALSLGFDACRLAPADAAPQAGARLAQWLEQGAHGDMAWMADTAERRASPRALWPQARSLVMLGANYGPEGDPLAALERRGRGAISVYARNRDYHDLVKGRLKQLAGFIVTQRPGAQVKVFVDTAPVMEKPLAQAAGLGWQGKHTNLVSTRFGSWLFLGSIFTDLELAPDAPGADHCGSCSACLDACPTQAFPAPYRLDARRCIAYLTIENKGPIPREFRAAIGNRVYGCDDCLAVCPWNKFAKATREAKLVAREELENPALAELAALDDAGFRALFSGSPVKRLGHSRFLRNVLIAIGNSGDVGLARRAGDLLDSPSPLVRGAAVWALARLIDSQAFSALAQRRAKAEDDADVIEEWAKETQSDKN

SEQ ID NO: 78401 - protein, 384 aa, Methylocystis hirsuta
  REGION 1..384: note = tr|A0A3M9XUN5|A0A3M9XUN5_9RHIZ Epoxyqueuosine reductase OS=Methylocystis hirsuta OX=369798 GN=queG PE=3; SV = 1
MASPAGYDVRRPAAPALEEDIRARAFELGFDVCRFARADVAPEQGDRLREWLRDGAHGDMAWMRETAERRAAPRALWPEAASLVMLGLNYGPDGDPLASLTKPDCATISVYARNRDYHDVLKGRLKQLAGFILSRAGGGDAKVFVDTAPVMEKPLAQTAGVGWQGKHTNLVSRDFGSWLFLGAIFTTLRLEPDPLERDHCGSCSKCLEVCPTAAFPAPYRLDARRCISYLTIEHKGPIPLEFRAKIGNRIYGCDDCLAVCPWNKYASAGREAKLAARPEFGSPPLAELARLDDAAFRALFSGSPIKRVGRDRFLRNVLIAIGNSARPELAAEAERLIEDAAAIVRGAAVWALGRLAPTRAAELRPHRLAAEPDAAVRQEWRQTP

SEQ ID NO: 78402 - protein, 390 aa, Methylocystis rosea
  REGION 1..390: note = tr|A0A3G8MAG7|A0A3G8MAG7_9RHIZ Epoxyqueuosine reductase OS=Methylocystis rosea OX=173366 GN=queG PE=3; SV = 1
MGSPTGYDVRSPTARALEEEIRARALELGFDVCRIARADVAPEQGERLWAWLRDGAHGDMAWMRETAERRVAPRALWPEAASLILLGLNYGPDGDPRASLTKPDCATISVYARNRDYHDIIKGRLKQLAGFILSRAGAGDAKVFVDTAPVMEKPLAQTAGVGWQGKHTNLVSRDFGSWLFLGAIFTTLRLDPDPPEHDHCGSCSKCIDICPTAAFPAPYRLDARRCISYLTIEHKGPIPLEFRAKIGNRIYGCDDCLAVCPWNKYASAGREAKLAARPEFDAPPLAELARLDDSAFRALFAGSPIKRVGRDRFLRNVLIAIGNSARPELAAEAERLIEDAAAIVRGAAVWALGRLAPTRSAELGAQRLAAEPDAAVRQEWRQTGKSATVA

SEQ ID NO: 78403 - protein, 328 aa, Methylocystis sp.
  REGION 1..328: note = tr|A0A2S5LJ63|A0A2S5LJ63_9RHIZ tRNA epoxyqueuosine(34) reductase QueG (Fragment); OS = Methylocystis sp. OX=1911079 GN=queG PE=3 SV=1
MGSPTGYDVRSPTARALEEEIRARALELGFDVCRIARADVAPEQGERLWAWLRDGAHGDMAWMRETAERRVAPRALWPEAASLILLGLNYGPDGDPRASLTKPDCATISVYARNRDYHDVIKGRLKQLAGFILSRAGAGDAKIFVDTAPVMEKPLAQTAGIGWQGKHTNLVSRDFGSWLFLGAIFTTLRLDPDPPERDHCGSCSKCIDVCPTAAFPAPYRLDARRCISYLTIEHKGPIPLEFRAKIGNRIYGCDDCLAVCPWNKYASAGREAKLAARPEFDAPPLAELARLDDSAFRALFAGSPIKRVGRDRFLRNVLIAIGNSARPE

SEQ ID NO: 78404 - protein, 433 aa, Methylocystis sp.
  REGION 1..433: note = tr|A0A2U1SJG7|A0A2U1SJG7_9RHIZ 4Fe-4S ferredoxin; OS = Methylocystis sp. MitZ-2018 OX=2127046 GN=C5688_04320; PE = 4 SV=1
MVDRSLSFTRDAADLDAIALRDIALEAGADDVGLVSIDDPALDDQRRDILAAFPFTRTLVSFIVRMNRENIRSPARSAANVEFHHAADDCDEVARDIVHALQAHGVRAAYPSMGFPMEASKWPDKMWIISHKPVAVAAGLGRMGLHRNVIHPTFGNFILLGTVAVDIELEAHAKPLDFNPCFECKLCVAACPTGAIAPDGHFDFGACYTHNYREFMGGFSEWVETIADSKSARAYRAKVSDAETVSMWQSLAFGPNYKAAYCMAVCPAGADVIGAYQADKKRYLQEIVDPLQKKAETVYVVADSDAETYVTRRFPAKTPKRVGSAPRPVTIEGFLSGLRLFFQRGKSTGLDAVYHFVFTGADRRSATIVIANKTLSVDDGLVGDSRLTVTADSETWLRFVRKETSLVWALLRGKIRLRGDPRLLLAFGRCFPG

SEQ ID NO: 78405 - protein, 351 aa, unidentified
  source 1..351: note = Methyloglobulus morosus
  REGION 1..351: note = tr|V5C0J2|V5C0J2_9GAMM Epoxyqueuosine reductase; OS = Methyloglobulus morosus KoM1 OX=1116472 GN=queG PE=3; SV = 1
MTLNNPDLMASLAAQIKTWGQELGFQQLGITDTNLSQAETHLGNWLANNFHGSMDYMQRHGHKRSRPALLHPGTQRVISVRMDYLPEPENQMNQSLEKPLLAYISRYALGRDYHKLMRSRLQKLADRIHAEIGDFGYRAFVDSAPVLEKALAEKAGLGWIGKHSNLINRKAGSWFFLGEIYTDLPLPVDKPGTEHCGDCRACLDICPTHAIVAPYQVDARRCISYLTIELHGSIPEELRPLLGNRIYGCDDCQLICPWNRFAKLTAEKDFNPRHRLNTQELLDVFAWGEQEFLTKTEGSAIRRIGHERWLRNIAVALGNAPKSEMIVNALKTKLQHPSELVREHVKWALEH

SEQ ID NO: 78406 - protein, 372 aa, unidentified
  source 1..372: note = Methyloligella halotolerans
  REGION 1..372: note = tr|A0A1E2RZZ0|A0A1E2RZZ0_9RHIZ Epoxyqueuosine reductase OS=Methyloligella halotolerans OX=1177755; GN = queG PE=3 SV=1
MTLKTDIASEAEALGFDAVAFTSADAPGSAGPGLDEFLAHGRQGDMGWMADNADRRKDPKTLWPEARSIVLLGVNYGPEADPMAALQRREIGTIATYAKRRDYHDVIKKKLKQLARFVQAESGADVKVFVDTAPVMEKPLAAKAGLGWQGKNTMLVSRQFGSWLFLGAIFTTADIDPDAPEADHCGGCTRCLDICPTDAFAGPYKLDARRCIAYLTIEHKGHIPAEFRRPIGNRIFGCEDCLAVCPWNKFAGAAKEAKLAVREEADNPPLAELLDLDDAAFRERFRGTPIKRTGRDRFLRNVLIAAGNSGDTTLLPRVERLLSDESPLVRAMAVWALKELAPGRADELKGTHLPRETDRDAASEWGEAKVAA

SEQ ID NO: 78407 - protein, 353 aa, unidentified
  source 1..353: note = Methylomagnum ishizawai
  REGION 1..353: note = tr|A0A1Y6D009|A0A1Y6D009_9GAMM Epoxyqueuosine reductase OS=Methylomagnum ishizawai OX=1760988 GN=queG; PE = 3 SV=1
MSPIPESRITRARILALAQALGFQNIGIADIELAQAEQRLADWLRAGFHGAMDYMERHGSKRGRPAELVPGTVSVISARMDYLPESRARMWQRLEDPDSAYISRYALGRDYHKLLRKRLQQLAERIADDIGPYGYRVFTDSAPVLEKPLAAQAGLGWIGKHTNLIDRKAGSFFFLGEIYTDLRLPPDAEATAHCGSCTACLDICPTTAIVAPYRLDARRCISYLTIEWRGSIPLEFREALGNRVYGCDDCQLVCPWNRYAQPTQEPGFLPRHGLDTAGLIELFGWDEAEFLRKTEGSAIRRIGHECWLRNLAVGLGNAPTGPEVRAALAARAGHPSALVREHVAWALERQGGF

SEQ ID NO: 78408 - protein, 373 aa, Methylomicrobium album
  REGION 1..373: note = tr|H8GPY8|H8GPY8_METAL Epoxyqueuosine reductase; OS = Methylomicrobium album BG8 OX=686340 GN=queG PE=3 SV=1
MSSIRNDEDLRWLAVQIKQWGLELGFQQVGIADTDLEQAERHLQAWLDDDFHGEMDYMHRHGLKRSRPALLQPGTVRIISVRMDYLPEPSDAMHKALAGPVEAYISRYALGRDYHKLIRSRLQKLADKIQVETGPFGYRAFVDSAPVLEKALAEKAGLGWIGKHSNLINRKAGSWFFLGEIYTDLPLPIDPPAAMHCGSCAACLDICPTRAIVAPFRVDARRCVSYLTIELHGSIPETLRPLIGNRIYGCDDCQLICPWNRFAKLTAENDFRPRHRLNARHLLDVFAWDEQTFLTRTEGSAIRRIGYERWLRNIAVALGNVPHAPKAVEALKARLGHSSELVKEHVRWALDRQSAKREELACSSAFVKGATSD

SEQ ID NO: 78409 - protein, 372 aa, Methylomicrobium alcaliphilum
  REGION 1..372: note = tr|G4T0W3|G4T0W3_META2 Epoxyqueuosine reductase; OS = Methylomicrobium alcaliphilum (strain DSM 19304 / NCIMB 14124 / VKM B-2133 / 20Z) OX=1091494 GN=yjeS PE=3 SV=1
MTTTNISQLSSLPQRIKQWGLELGFQQVGIADTDLAEAEAHLNHWLDKGFHGEMDYMQRHGLKRSRPAVLQPGTRSVISVRMDYLPESSAAMNRNLEKPLAAYISRYALGRDYHKLMRQRLQKLADRIANEIGDFGYRVFVDSAPVLEKALAEKAGLGWIGKHSNVINRKAGSWFFLGEIYTDLTLPPDTLADNHCGSCTACLDICPTRAIVAPYQVDARLCVSYLTIELHGSIPEALRPLIGNRIYGCDDCQIVCPWNRFARLTGEKDFNPRQQLNSRQLLEVFAWDETTFLKYTEGSAIRRIGHERWLRNIAVALGNAPYSESIVSALEAKLEHPSDLIKEHVLWAIALQIEKTKKKPEVTSSNAPGFES

SEQ ID NO: 78410 - protein, 359 aa, Methylomicrobium buryatense
  REGION 1..359: note = tr|A0A4P9UL37|A0A4P9UL37_9GAMM Epoxyqueuosine reductase OS=Methylomicrobium buryatense OX=95641 GN=queG; PE = 3 SV=1
MTTTNISQLSSLPQRIKQWGLELGFQQVGIADTDLAEAEAHLNNWLDKGFHGEMDYMQRHGLKRSRPAVLQPGTRSVISVRMDYLPESSAAMNQNLEKPLAAYISRYALGRDYHKLMRQRLQKLADRIANEIGDFGYRVFVDSAPVLEKALAEKAGLGWIGKHSNVINRKAGSWFFLGEIYTDLALPPDTKADNHCGSCMACLDICPTRAIVAPYQVDARLCVSYLTIELHSSIPEALRPLIGNRIYGCDDCQIVCPWNRFARLTGEKDFNPRQQLNSRQLLEVFAWDEPTFLKYSEGSAIRRIGHERWLRNIAVALGNAPYSESIVSAMKAKLEHPSDLIKEHVLWAIAKQSERRKAT

SEQ ID NO: 78411 - protein, 359 aa, Methylomicrobium kenyense
  REGION 1..359: note = tr|A0A543VFK8|A0A543VFK8_9GAMM Epoxyqueuosine reductase OS=Methylomicrobium kenyense OX=269709 GN=queG; PE = 3 SV=1
MSTASINSLSSLPQRIEQWGLELGFQQVGIADTDLTEAEAHLYRWLDKGFHGEMDYMRRHGLKRSRPADLQPGTRSVISVRMDYLPEPTAAMNRNLEKPLAAYISRYALGRDYHKLMRQRLQKLANRIADEIGEFGYRVFVDSAPVLEKALAEKAGLGWIGKHSNVINRKAGSWFFLGEIYTDLALPPDTKADNHCGSCTACLDICPTRAIVAPYQVDARLCVSYLTIELHGPIPEPLRPLIGNRIYGCDDCQIVCPWNRFARLTGEQDFNPRKQLNNRQLLEVFTWDEAAFLKYTEGSAIRRIGHERWLRNIAVALGNAPYSESIISALEAKLEHPSDLIKEHVLWAIAKQSERRKTT

SEQ ID NO: 78412 - protein, 348 aa, unidentified
  source 1..348: note = Methylomonas denitrificans
  REGION 1..348: note = tr|A0A126T7T9|A0A126T7T9_9GAMM Epoxyqueuosine reductase OS=Methylomonas denitrificans OX=1538553 GN=queG; PE = 3 SV=1
MELAQSIKQWGEELGFQQIGISDTNLNDAERHLQQWLNKGFNGEMQYMAAHGLKRSRPALLQEGTCSIISARMDYLPEPPAASQRLLEDPAAAFVSRYALGRDYHKLLRNRLQKLADKISAEIGPFGYRAFVDSAPVLEKAIAEKAGLGWIGKHSNLINRQAGSWFFLGEIYTDLPLPNDQPASNHCGQCRACLDICPTQAIVGPYQVDARRCVSYLTIELHGSIPVELRPLLGNRIYGCDDCQLVCPWNRFAKLSAESDFKPRHRLDQATLLELFAWTETEFLQKTEGSAIRRIGHQRWLRNIAVALGNGKSTDAAKTALAGRLSNDAEMVREHIQWALRKLDGMNV

SEQ ID NO: 78413 - protein, 358 aa, unidentified
  source 1..358: note = Methylomonas koyamae
  REGION 1..358: note = tr|A0A177P390|A0A177P390_9GAMM Epoxyqueuosine reductase OS=Methylomonas koyamae OX=702114 GN=queG PE=3; SV = 1
MPPSHFVATEEFVANIRAWALDLGFQQLGISDTDLTSAEGHLQRWLADGMHGEMHYMAAHGLKRSRPADLQPGTLSIISARMDYLPEHRSSMAERLNDPATAFVSRYALGRDYHKLLRSRLQKLADKIAAEIGPFGYRVFVDSAPVLEKAIAEKAGLGWIGKHSNLINRRAGSWFFLGEIYTDLALPADTPVASHCGTCRACLDICPTQAIVAPYRVDARRCVSYLTIELHGSIPEELRPLLGNRIYGCDDCQLICPWNRYATLSGEADFQPRHRLDRATLIELFGWSETEFLQRTEGSAIRRIGHARWLRNIAVALGNARADQAIRAALAGRLDHDSELVREHVVWALRRQTTEAET

SEQ ID NO: 78414 - protein, 355 aa, unidentified
  source 1..355: note = Methylomonas koyamae
  REGION 1..355: note = tr|A0A177N5L3|A0A177N5L3_9GAMM Epoxyqueuosine reductase OS=Methylomonas koyamae OX=702114 GN=queG PE=3; SV = 1
MPSTVSLDPEQLACRIKQWGLELGFQQIGISDTDLHQAESHLQNWLDQDFHGEMHYMAAHGLKRSRPALLQEGTRSIISARMDYLPEPSARSQNLLADPAAAFVSRYALGRDYHKLLRNRLQKLADNIAAAIGPFGYRAFVDSAPVLEKAIAEKAGLGWIGKHSNLINRRAGSWFFLGEIYTDLELPADQAASNHCGLCRACIDVCPTQAIVGPYRVDARRCVSYLTIELHGPIPEDLRPLLGNRIYGCDDCQLACPWNRFAKLSAEADFRPRQRLDRATLLELFAWDEAEFLQKTEGSAIRRIGHQRWLRNIATALGNGRPDPEMLTALNRRLHHASDLVAEHIHWALRRLTGA

SEQ ID NO: 78415 - protein, 358 aa, unidentified
  source 1..358: note = Methylomonas lenta
  REGION 1..358: note = tr|A0A177NDI5|A0A177NDI5_9GAMM Epoxyqueuosine reductase OS=Methylomonas lenta OX=980561 GN=queG PE=3 SV=1
MYPTQQPDFQQLADQIKTWGMALGFQQIGISDTDLNDAEHHLQLWLAQDRQGEMQYMSAHGLKRSRPALLQPGTRSIISARMDYLPENPVTSHTVLDDPTAAFVSRYALGRDYHKLLRNRLQKLADKIAAEIGPYGYRAFVDSAPILEKAIAEKAGLGWIGKHSNLINRRAGSWFFLGEIYTDLALPVDTATINHCGQCLACLDICPTQAIVAPYQVDARRCVSYLTIELHGSIPEELRPLLGNRIYGCDDCQLICPWNRFAKLSAEADFQPRHKLDNSTLITLFKWTESEFLSKTEGSAIRRIGHQRWLRNIAVALGNGNPSAASKIALQEKLHHEAELVREHADWALKQLISRAAL

SEQ ID NO: 78416 - protein, 359 aa, Methylomonas methanica
  REGION 1..359: note = tr|A0A177LXI6|A0A177LXI6_METMH Epoxyqueuosine reductase OS=Methylomonas methanica OX=421 GN=queG PE=3; SV = 1
MNSPPHQTEDLTALVQRIKQWGEELGFQQIGISDTNLNDAERHLQHWLDQGFNGEMQYMAAHGLKRSRPALLQEGTRSIISARMDYLPEPPAASQRLLDDPAAAFVSRYALGRDYHKLLRNRLQKLADKISAEIGPFGYRAFVDSAPVLEKAIAEKAGLGWIGKHSNLINRRAGSWFFLGEIYTDLALQSDQAASNHCGQCRACLDICPTQAIVGPYQVDARRCVSYLTIELHGSIPVEFRPLLGNRIYGCDDCQLVCPWNRFAKLSAENDFKPRHRLDQATLLELFAWTEAEFLQKTEGSAIRRIGHLRWLRNIAVALGNGQATPEAKAALSDRSSHDSEMVREHIEWALQTLDSLNI

SEQ ID NO: 78417 - protein, 358 aa, Methylomonas methanica
  REGION 1..358: note = tr|F9ZXJ4|F9ZXJ4_METMM Epoxyqueuosine reductase; OS = Methylomonas methanica (strain MC09) OX=857087 GN=queG; PE = 3 SV=1
MHPIEAPDFQQLAQQIKAWGTELGFQQIGISDTDLSAAEHYLGQWLAENRHGDMHYMAAHGLKRSRPAVLQPGTRSIISARMDYLPENPAHSHALLDNPVAAFVSRYALGRDYHKLLRNRLQKLADKIAAEIGPFGYRAFVDSAPVLEKAIAEKAGLGWIGKHSNLINRRAGSWFFLGEIYTDLPLPSSTAASNHCGQCRACLDICPTQAIVAPYQVDARRCVSYLTIELHGSIPEDLRPLLGNRIYGCDDCQLICPWNRFAKLSAETDFRPRHKLDNSTLLELFSWTESEFLQKTEGSAIRRIGHQRWLRNIAVALGNGSPTEASRTALTAKLQHDSELVREHATWALQRLTLPISL

SEQ ID NO: 78418 - protein, 354 aa, Methylomonas sp.
  REGION 1..354: note = tr|A0A2P5N303|A0A2P5N303_METSP Epoxyqueuosine reductase OS=Methylomonas sp. OX=418 GN=queG PE=3 SV=1
MRPTETEDFQHVAEQIKRWGVELGFQQIGISDTDLSQAEQHLQQWLAQGRQGEMQYMAAHGLKRSRPALLQPGTLSIISARMDYLPEQPDKSHALLKQPAAAFVSRYALGRDYHKLMRNRLQTLADKITDSVGPFGYRAFVDSAPVLEKAIAEKSGLGWIGKHSNLINRKAGSWFFLGEIYTDLPLPVDAPASQHCGQCKACLDICPTQAIVAPYQVDARLCVSYLTIELHGSIPEHLRPLLGNRIYGCDDCQLICPWNRFAKLSAEADFQPRHKLDQSSLIELFGWSESEFLQKTEGSAIRRIGHQRWLRNIAVALGNGKPSETSASALQTRLTHDSELVREHVVWAMARLDK

SEQ ID NO: 78419 - protein, 358 aa, Methylomonas sp.
  REGION 1..358: note = tr|A0A1S1Y3X8|A0A1S1Y3X8_9GAMM Epoxyqueuosine reductase OS=Methylomonas sp. LWB OX=1905845 GN=queG PE=3; SV = 1
MPPSHFVATEEFVANIRAWALDLGFQQLGISDTDLTSAEGHLQRWLADGMHGEMHYMAAHGLKRSRPADLQPGTLSIISARMDYLPEHRSSMAERLNDPAAAFVSRYALGRDYHKLLRSRLQKLADKIAAAIGPFGYRVFVDSAPVLEKAIAEKAGLGWIGKHSNLINRRAGSWFFLGEIYTDLALPADTPVASHCGSCRACLDICPTQAIVAPYRVDARRCVSYLTIELHGSIPEELRPLLGNRIYGCDDCQLICPWNRYATLSGEADFQPRHRLDRATLIELFGWSETEFLQRTEGSAIRRIGHARWLRNIAVALGNARPDAAIRAALAGRLDHDSELVREHVVWALRRQTTEAET

SEQ ID NO: 78420 - protein, 303 aa, unidentified
  source 1..303: note = Methylomusa anaerophila
  REGION 1..303: note = tr|A0A348AII2|A0A348AII2_9FIRM Epoxyqueuosine reductase OS=Methylomusa anaerophila OX=1930071 GN=queG_4; PE = 4 SV=1
MKSLRTALFAELENNGCQARIVPIHHLQNLRREMAELLQSGLVNNKLWGYLNGFQYDYSPVLSNPQSIIVAAVPQPITKLHIMWRGTKQTILVPPTYVYTTADNLVLNIMERELKKENFSLVRAKLPLKLLAVRSGLSYYGRNNISYIRGMGSFYRLIALVTDMPVSSGTWQNVQRMPECEDCQVCLNSCPARCIDLNRNIIHAEKCLTYINESPGPFPLWVDSNWHNSLVGCIKCQLACPQNKHVSQTNEFADILSERELDLILSASDYDGLPETTRYTLQKLNLTDYELTIIQRNLRALLL

SEQ ID NO: 78421 - protein, 255 aa, unidentified
  source 1..255: note = Methylomusa anaerophila
  REGION 1..255: note = tr|A0A348AGH7|A0A348AGH7_9FIRM Epoxyqueuosine reductase OS=Methylomusa anaerophila OX=1930071 GN=queG_3; PE = 4 SV=1
MEEQIRNYILELGVDDAGFACAEDYKSPKSYEISRLLPDAKSIIVMAFKPLSSCESPSMSAAQNGYLDLGAFARSASYRIARFLENKYNAKVATIPVSYPFELHNDRRAIADFSLRHAAVAAGLGAFGRHNLVIHPRFGTRVIFTSIITNLALEPSPQTSQDFCIHCNLCVENCPVRALNEEGKTDVMKCFGHSQPYGLTGDIAFQLQLLGSSAEEQKKLLMDEQYARLRQAAHLGNQYMCFNCLKICPVGLSPE

SEQ ID NO: 78422 - protein, 356 aa, Methylophaga aminisulfidivorans
  REGION 1..356: note = tr|F5T154|F5T154_9GAMM Epoxyqueuosine reductase; OS = Methylophaga aminisulfidivorans MP OX=1026882 GN=queG; PE = 3 SV=1
MDKQNSDINWQDFIVRMQRWARSLGFQALGVSDLDLSAADKHLQNWLEKGFHGEMTFMEKHGSKRTHPAQLVEGTLSVISVRMDYWPGQAAEPWSVINDSEKAFVSRYALGRDYHKLMRKRLAKLAEHIQKEVGEFGYRVFTDSAPVMEKAIAEKAGLGWIGKHTNVLNRDHGSYFFLGEIYTDLPLPATQSVSAHCGSCSACIDICPTQAIVAPYELDARRCISYLTIELRGAIPEEFRPLMGNRIYGCDDCQLICPWNKYAQATTESDYLPRDGLDAPQLVDLFMWSEHTFLSRLEGSPVRRIGYDCWLRNIAVALGNAKTSQSVIEALQSRSNQVSDMVQEHIDWALQQHQVS

SEQ ID NO: 78423 - protein, 356 aa, unidentified
  source 1..356: note = Methylophaga frappieri
  REGION 1..356: note = tr|I1YIS0|I1YIS0_METFJ Epoxyqueuosine reductase; OS = Methylophaga frappieri (strain ATCC BAA-2434 / DSM 25690 / JAM7) OX=754477 GN=queG PE=3 SV=1
MIQINTTQSAEAVIEEMQSLARQCGFQQIGVSDINLTEAENQLQDWLARGFHGEMHFMERHGVKRSRPDVLLPDTVRVITARMDYWPESTAAPWPVIADDQKGFVSRYALGRDYHKLMRKRLLRLSNSLEALLGKMGYRVFCDSAPVMEKALAEKSGLGWMGKHTNILNRQHGSYFFLGEIYTDMPLPLTKSVSAHCGKCSACIDICPTQAIVAPYQLDARRCISYLTIELRGAIPESLRPLIGNRIYGCDDCQLVCPWNKFAQPSMESSFQPRENLDAPQLLDLFAWSETEFYQKLEGSPIRRIGYDCWQRNLAVALGNARPSQPIQQALRARLPIVNEMVAEHIEWALKRQLMS

SEQ ID NO: 78424 - protein, 364 aa, unidentified
  source 1..364: note = Methylophaga lonarensis
  REGION 1..364: note = tr|M7NY10|M7NY10_9GAMM Epoxyqueuosine reductase; OS = Methylophaga lonarensis MPL OX=1286106 GN=queG PE=3 SV=1
MTSTNTSYDRTEFLPRLQKWARSFGFQQLGVSDIDLSQAEQHLNDWLAAGFHGEMQFMERHGSLRTHPEQLLPGTIRVITLRMDYWPSGAEDAWQVIDNDQLGFVSRYALGRDYHKLMRKRLLRLSEAIAKEVGPMGYRVFTDSAPVMEKALAEKSGLGWIGKHTNVLNRQHGSYFFLGEIYTDLPLPLTEPVSDHCGSCSACIDICPTQAIVAPYKLDARRCISYLTIELRGSIPVEFRKAMGNRIYGCDDCQLVCPWNKFAQHTHEMAFEPRDGLDAPRLAALFCWDEATFLSRLEGSPIRRIGYECWLRNIAVALGNAQSSPEVLAALNARRDDPSELVREHVQWAIAQHALSSAGHDRAQ

SEQ ID NO: 78425 - protein, 354 aa, Methylophaga muralis
  REGION 1..354: note = tr|A0A1E3GSC9|A0A1E3GSC9_9GAMM Epoxyqueuosine reductase OS=Methylophaga muralis OX=291169 GN=queG PE=3; SV = 1
MADPNTVQSSRALLADMQVWARSLGFQQLGVSDIDLSAAEEQLQQWLAKGFHGEMEFMERHGSLRSHPEQLVPGTIRVITARMDYWPETAADAWQVMGDSDLGFVSRYALGRDYHKVMRKRLLRLSQRIEEAVGAMGYRVFTDSAPVLEKALAQKSGLGWIGKHTNVLNRDNGSYFFLGEIYTDLPLPLTEPVTEHCGSCTACIDICPTQAIVAPYELDARRCISYLTIELRGSIPVEFRPMMGNRIYGCDDCQLVCPWNKFAQMTTESAYLPREGLDAPKLVDLFSWTEAEFLQRLEGSPIRRIGYECWLRNIAIALGNAETSDEVLSALNARLEYHSELIREHVLWALEQHC

SEQ ID NO: 78426 - protein, 357 aa, unidentified
  source 1..357: note = Methylophaga nitratireducenticrescens
  REGION 1..357: note = tr|I1XLL3|I1XLL3_METNJ Epoxyqueuosine reductase; OS = Methylophaga nitratireducenticrescens OX=754476 GN=queG; PE = 3 SV=1
MVDSNTVQLSRALLNDMQIWARSLGFQQLGVSDIDLSAAEDQLQQWLARGFHGEMEFMQRHGSLRTHPEELVPGTIRVITARMDYWPETAADAWQVMGESELGFISRYALGRDYHKLIRKRLLRLSQRIEEAVGAMGYRVFTDSAPVMEKALAQKSGLGWVGKHTNVLNRQNGSYFFLGEIYTDLPLPLTEPVSDHCGSCTACIDICPTQAIVAPYQLDARRCISYLTIELRGSIPVEFRPMMGNRIYGCDDCQLVCPWNKFAQMTTESAYLPREGLDAPQLVELFSWTEAEFLQRLEGSPIRRIGYECWLRNIAIALGNAETSQKIVASLKDQLEHSSELVREHVQWALEQHINPS

SEQ ID NO: 78427 - protein, 357 aa, Methylophaga sp.
  REGION 1..357: note = tr|A0A2D9KW09|A0A2D9KW09_9GAMM Epoxyqueuosine reductase OS=Methylophaga sp. OX=2024840 GN=queG PE=3 SV=1
MADSNTVQLSRTLLKDMQIWARSLGFQQLGVSDIDLSAAEDQLQQWLARGFHGEMEFMQRHGSLRTHPEELMPGTIRVITARMDYWPETASDAWQVMGESELGFISRYALGRDYHKLIRKRLLRLSKRIEEAVGVMGYRVFTDSAPVMEKALAQKSGLGWIGKHTNVLNRQNGSYFFLGEIYTDLPLPLTEPVSDHCGSCTACIDICPTQAIVAPYELDARRCISYLTIELRGSIPVEFRPMMGNRIYGCDDCQLVCPWNKFAQMTTESAYLPREGLDAPQLVDLFAWTESEFLQRLEGSPIRRIGYECWLRNIAIALGNAKTSQTVLAALKDRIEYPSELVREHVQWALEQHNTPS

SEQ ID NO: 78428 - protein, 354 aa, Methylophaga sp.
  REGION 1..354: note = tr|A0A4S5JIU0|A0A4S5JIU0_9GAMM Epoxyqueuosine reductase OS=Methylophaga sp. SB9B OX=2570356 GN=queG PE=3; SV = 1
MADPNTVQSSRALLADMQVWARSLGFQQLGVSDIDLSAAEEQLQQWLAKGFHGEMGFMERHGSLRSHPEQLVPGTIRVITARMDYWPETAADAWQVMGDSELGFVSRYALGRDYHKLMRKRLLRLSQRIEEAVGAMGYRVFTDSAPVLEKALAQKSGLGWIGKHTNVLNRDNGSYFFLGEIYTDLPLPLTEPVTEHCGSCTACINICPTQAIVAPYELDARRCISYLTIELRGSIPVEFRPMMGNRIYGCDDCQLVCPWNKFAQMTTESAYLPREGLDAPKLVDLFSWTESEFLQRLEGSPIRRIGYECWLRNIAIALGNAETSDEVLSALNARLEYHSELVREHVLWALEQHC

SEQ ID NO: 78429 - protein, 364 aa, Methylophaga sulfidovorans
  REGION 1..364: note = tr|A0A1I4AYS7|A0A1I4AYS7_9GAMM Epoxyqueuosine reductase OS=Methylophaga sulfidovorans OX=45496 GN=queG; PE = 3 SV=1
MLTAYNRSMDKQNTDIYWQDFIVRMQRWARSLGFQALGVSDLDLSDADKRLQNWLEKGFHGDMSFMEKHGSKRTHPAELVEGTLSVISVRMDYWPGEAAEPWSVINDSEKAFLSRYALGRDYHKLMRKRLARLAEHIQKEIGEFGYRVFTDSAPVMEKAIAEKAGLGWIGKHSNVLNRDHGSYFFLGEIYTNLPLPPTQSVTAHCGSCTACIDICPTQAIVAPYEVDARRCISYLTIELRGAIPEEFRPLMGNRIYGCDDCQLVCPWNKYAQVTTESDYLPRDGLDAPQLVDLFMWSEQTFLSRMEGSPIRRIGYDCWLRNIAVALGNAKTSQPVIAALKARSNQVSEMVQEHIDWALKQHHMS

SEQ ID NO: 78430 - protein, 356 aa, Methylophaga thiooxydans
  REGION 1..356: note = tr|A0A0A0BD56|A0A0A0BD56_9GAMM Epoxyqueuosine reductase OS=Methylophaga thiooxydans OX=392484 GN=queG; PE = 3 SV=1
MAENYTDTDGQKLLSRMQRWARSLGFQALGVSDIDLRDAEAKLQDWLAKGFHGEMGFMAKHGSMRTHPEQLVEGTVRVISLRMDYWPGEAAEPWKVLDDGNRAFISRYALGRDYHKLMRKRLAKLAKRIEREVGSMGFRVFTDSAPVMEKAIAEKAGLGWIGKHTNVLNRDHGSYFFLGEIYTDLPLPVTDATSAHCGSCSACIDICPTQAIVGPYQLDARRCISYLTIELRGAIPEEFRPMMGNRIYGCDDCQLVCPWNKYAQSTVEPDYLPREGLDAPQLIDLFNWTEQEFLSRLEGSPIRRIGYECWLRNIAVALGNAKTSATVVNALQQKVEHQSALVREHVTWALDQHQLS

SEQ ID NO: 78431 - protein, 356 aa, Methylophaga thiooxydans
  REGION 1..356: note = tr|C0N1K5|C0N1K5_9GAMM Epoxyqueuosine reductase; OS = Methylophaga thiooxydans DMS010 OX=637616 GN=queG PE=3; SV = 1
MAENYTDTDGQKLLSRMQRWARSLGFQAMGVSDIDLRDAEAKLQDWLAKGFHGEMGFMAKHGSMRTHPEQLVEGTIRVISLRMDYWPGEAAEPWKVLDDGNRAFISRYALGRDYHKLMRKRLAKLAKRIEREVGPMGFRVFTDSAPVMEKAIAEKAGLGWIGKHTNVLNRDHGSYFFLGEIYTDLPLPVTDATSAHCGSCSACIDICPTQAIVGPYQLDARRCISYLTIELRGAIPEEFRPMMGNRIYGCDDCQLVCPWNKYAQSTVEPDYLPREGLDAPQLIDLFNWTEQEFLSRLEGSPIRRIGYECWLRNIAVALGNAKTSAPVVNALQQKAEHQSALVREHVTWALDQHQLS

SEQ ID NO: 78432 - protein, 357 aa, unidentified
  source 1..357: note = Methylophilaceae bacterium
  REGION 1..357: note = tr|A0A356CTC5|A0A356CTC5_9PROT Epoxyqueuosine reductase OS=Methylophilaceae bacterium OX=2030816 GN=queG; PE = 3 SV=1
MTHIWDQLALQIKDWGRELGFDQIGITDIDLNHSKDHYLEWIKQGFHGEMHYMVKHGSRRYKPDELVPHTIRIISARLNYFPNAHNSEVILKSNEKAFISRYALGRDYHKVMRSKLKKLSEKIQKEAHKTLNQAFELRLFSDSAPVMEVELAEKSGLGWRGKHTLLINKEHGSWFFLGEIYINLPLPIDKKVDNHCGTCTSCIDVCPTKAIIAPYKLDARKCISYLTIELKSAIPNEYRKLIGNRVYGCDDCQLYCPWNKFGQISKEDDFKVRHGLDDIELVECFLWTEAEFLKRMEGSAILRIGYDQWLRNIAIGLGNAKTSEIIVNALKNRYHDASALVKEHISWALAQHNFHIN

SEQ ID NO: 78433 - protein, 356 aa, unidentified
  source 1..356: note = Methylophilaceae bacterium
  REGION 1..356: note = tr|A0A259CZ86|A0A259CZ86_9PROT Epoxyqueuosine reductase OS=Methylophilaceae bacterium 17-44-8 OX=1970534; GN = queG PE=3 SV=1
MNNTLDNALVQLAADIKRWGQTLGFAEVGITDTALGTAEHEHQAWIEKGFHGEMHYMAKHGTKRTRPAELVPNTQRVISVRLDYKPPNAKDSWQVIHQPNQAFISRYALGRDYHKVVRQKLQQLCDQIQSATQAMEYRVFTDSAPVLEVALAEKAGLGWRGKHTLLINKHHGSWFFLGEIYTNLPLPVDPPATEHCGTCHACLDICPTNAIVAPYEVDARRCISYLTIELKSAIPIEFRKSIGNRVYGCDDCQLICPWNKFAETTKEPDFQVRHGLDDIDLVTCFGWSEAEFQQKMAGSAIYRIGYQQWLRNIAVGLGNAAHSPEVIEALQARQADDSEIVREHVAWALDQHLTNV

SEQ ID NO: 78434 - protein, 356 aa, unidentified; identical to SEQ ID NO: 78433
  source 1..356: note = Methylophilales bacterium
  REGION 1..356: note = tr|A0A258ULG8|A0A258ULG8_9PROT Epoxyqueuosine reductase OS=Methylophilales bacterium 16-45-7 OX=1970536; GN = queG PE=3 SV=1

SEQ ID NO: 78435 - protein, 358 aa, unidentified
  source 1..358: note = Methylophilales bacterium
  REGION 1..358: note = tr|A0A0H4IZV8|A0A0H4IZV8_9PROT 4Fe-4S ferredoxin-type domain-containing protein; OS = Methylophilales bacterium MBRS-H7 OX=1623450; GN = VI33_06935 PE=4 SV=1
MLDKAYWKDISKKIIATGKELGFNDVGISDTVINQNQGLYKEWIDAKNHGAMSYLEDHQDIKFDPENILANTKSIISVRLDYLPLNENLINLINQKDKAYIARYALGKDYHKTLKKKLNHFGSLIKSIISESNFDFKYRAITDSAPSPEIEIATQAGLGWRGKNTLLLNKNNGSWFFLGELYTNAPLVFNQTSSTNHCGSCSACIDICPTQAIEKPYYLNASKCISYWTIEHKGTIPISFRRKIGNRIYGCDDCQIICPWNKFAKKSTEIDFFVRHKLNNISLMDCFLMDNHRFNEYFNGSAIKRIGYEKWISNVAIALGNADHDQNILDALMKRSEDPSNLIKEHVLWAISEQEAKK

SEQ ID NO: 78436 - protein, 365 aa, unidentified
  source 1..365: note = Methylophilus medardicus
  REGION 1..365: note = tr|A0A5B8CRX9|A0A5B8CRX9_9PROT Epoxyqueuosine reductase OS=Methylophilus medardicus OX=2588534 GN=queG; PE = 3 SV=1
MSHQSHPTPIQWPDPAVAAQMSATIKDWARELGFGNIGITDTDLSAAEPDFLDWLAKQYHGDMDYMAKHGTKRSRPAELVPGTLRVISVNLNYLPEQVADGWQVLATPDKAYVARYAMGRDYHKVMRQKLQQLCTRITDTYGQFEYRVFADSAPVMEVALATKAGVGWRGKHTLLLNRQQGSWFFLGEIYTNLPLPIDAPTSAHCGSCSACIDICPTRAIVAPYELDARRCISYLTIEHKGSIPLELRPLIGNRIYGCDDCQLICPWNKFAVKTEESDFAVRNGLDSTALIDCFAWTEAEFQARMAGSAIYRIGYAQWLRNVAVGLGNAPSTPAVIHALQARQDDAHALVREHVAWALAKHLPSS

SEQ ID NO: 78437 - protein, 178 aa, Methylophilus methylotrophus
  REGION 1..178: note = tr|A0A5C7WHN5|A0A5C7WHN5_METME tRNA epoxyqueuosine(34) reductase QueG (Fragment); OS = Methylophilus methylotrophus OX=17 GN=queG PE=4 SV=1
IYTNLPLPVDSPTTAHCGSCSACIDICPTRAIVAPYELDARRCISYLTIEHKSSIPLELRPLIGNRVYGCDDCQLICPWNKFAVKTQETDFAVRHGLDSNDLVDCFAWTEAEFQQRMAGSAIYRIGYVQWLRNVAVGLGNAPSSPAVIAALTARQDDDNELVREHVAWALAQHQQHRA

SEQ ID NO: 78438 - protein, 345 aa, Methylophilus rhizosphaerae
  REGION 1..345: note = tr|A0A1G9AYM0|A0A1G9AYM0_9PROT Epoxyqueuosine reductase OS=Methylophilus rhizosphaerae OX=492660 GN=queG; PE = 3 SV=1
MAATIKGWARELGFGNLGITDTDLSAAEPGLLSWLDKHYHGDMDYMAKHGTKRSRPAELVPGTLRVISVSLDYMPEHAENSWQVLENPDKAYIARYAMGRDYHKVMRQKLQQLCSRITEHFGNFEYRVFADSAPVLEVALATKAGVGWRGKHTLLLNRQQGSWFFLGEIYTNLPLPIDPPTSSHCGSCSACIDICPTQAIVAPYELDARRCISYLTIEHKGSIPPELRPLIGNRVYGCDDCQLICPWNKFSVSTEESDFSVRNGLDSADLVTCFTWTEAEFQQRMAGSAIYRIGYLQWLRNVAVGLGNAPTSPAVVSALRSRQQDENELLREHVQWALARHGIAS

SEQ ID NO: 78439 - protein, 366 aa, Methylophilus sp.
  REGION 1..366: note = tr|A0A2S5N641|A0A2S5N641_9PROT Epoxyqueuosine reductase OS=Methylophilus sp. OX=29541 GN=queG PE=3 SV=1
MSHQSHPAPIQLPDQAVAAHMAATIKNWARELGFGSIGITDTDLSAAEPEFLEWLAKQYHGDMDYMAKHGTKRSRPAELVPGTLRVISVNLNYLPEKAADGWQVLESPDKAYVARYALGRDYHKVMRQKLQQLCTRITEEFGQFEYRVFADSAPVLEVALATKAGVGWRGKHTLLLNRQQGSWFFLGEIYTNLPLPVDSPTTAHCGSCSACIDICPTRAIVAPYELDARRCISYLTIEHKSSIPLELRPLIGNRVYGCDDCQLICPWNKFAVKTQETDFAVRHGLDSNDLVDCFAWTEAEFQQRMAGSAIYRIGYVQWLRNVAVGLGNAPSSPAVIAALTARQDDDNELVREHVAWALAQHQQHRA

SEQ ID NO: 78440 - protein, 366 aa, Methylophilus sp.
  REGION 1..366: note = tr|A0A0K0SVD5|A0A0K0SVD5_9PROT Epoxyqueuosine reductase OS=Methylophilus sp. TWE2 OX=1662285 GN=queG; PE = 3 SV=1
MSHQSHPTPIQLPDQAVAAQMAATIKNWARELGFGSIGITDTDLSAAEPEFLDWLAKQYHGDMDYMAKHGTKRSRPAELVPGTLRVISVNLNYLPDNAADGWQVLENPNKAYVARYALGRDYHKVMRQKLQQLCTRITEEFGKFEYRVFADSAPVLEVALATKAGMGWRGKHTLLLNRQQGSWFFLGEIYTNLPLPVDSPTTAHCGSCSACIDICPTRAIVAPYELDARRCISYLTIEHKSSIPLELRPLIGNRVYGCDDCQLICPWNKFAVNTQETDFAVRHGLDSNDLVDCFAWTEAEFQQRMAGSAIYRIGYHQWLRNVAVGLGNAPSSPAVIAALTARQDDDNELVREHVAWALAQHQQHIA

SEQ ID NO: 78441 - protein, 377 aa, Methylopila sp.
  REGION 1..377: note = tr|A0A2H6BA17|A0A2H6BA17_9RHIZ Epoxyqueuosine reductase OS=Methylopila sp. Yamaguchi OX=1437817 GN=queG; PE = 3 SV=1
MTPAALKDELRARAASYGFEAFGVTTPDAVLAAGARLLEALALGRHGSMAWLEDRAQWRADPRALWPEARSVVLLGLNYGPDADPRRALEHPDRAAISVYAQGDDYHDLIKGRLKQVAGALASAGHAAKVFVDTAPVMEKPLAAAAGLGWQGKHTNLVSRGYGSWLFLGAIFTTAELPPDDAETDRCGSCRACLDACPTEAFPAPYQLDARRCVSYLTIEHAGPIPHELRPKLGNRIYGCDDCLAACPWNKFAEAGREMRLAARDALRAPELSRLAALDDAGFRALFAKSAVKRIGRDRFVRNVAIAIGNSGDASLAEALGPLLDDPSAIVRGAGAWAIARLVPPATLAPLAARRLATETDEEVRAEWRAALDQEAA

SEQ ID NO: 78442 - protein, 349 aa, unidentified
  source 1..349: note = Methyloprofundus sedimenti
  REGION 1..349: note = tr|A0A1V8MB53|A0A1V8MB53_9GAMM Epoxyqueuosine reductase OS=Methyloprofundus sedimenti OX=1420851 GN=queG; PE = 3 SV=1
MDTAINELSRQIKQWGYELGFQQVGITDTNLQQAEQRLEDWLAHGYHADMDYMHKHGLKRSRPALLQPETVSIISVRMDYLPEDHESMETTLNNPVAAFISRYALGRDYHKVLRKRLQKLAQRIEQEVGVFGYRAFVDSAPVLEKAIAEKAGLGWIGKHSNIINKKAGSWFFLGEIYTSLALPSNVPSQNHCGQCVACINICPTQAIVAPYQVDARRCISYLTIELKGSIPVDLRPLMGNRIYGCDDCQLICPWNRFAKLSNEADFNPRHNLNAQHLIELFNWSENEFFDKTEGSAIRRIGYQQWLRNIAVALGNAPASTVIKQTLNVKLDQSSELVREHILWALKQHA

SEQ ID NO: 78443 - protein, 334 aa, unidentified
  source 1..334: note = Methylorubrum extorquens
  REGION 1..334: note = tr|A0A2N9AS41|A0A2N9AS41_METEX Epoxyqueuosine reductase OS=Methylorubrum extorquens OX=408 GN=queG PE=4; SV = 1
MPAWLAAGHHGTMDWMEERADQRAAPSALWAETRSIVMLGMNAGPERDPLELIQLKDRAAIAAYAQRRDYHDVIKGKLKELGGFLSARSGQPVKVFVDTAPVMEKPLAQAAGLGWQGKHTVLISREHGNWLMLGAIFSRAELEPDTPETDHCGSCRRCLDICPTDAFPAPYQLDARRCIAYLTIEHQGPIPAEFREKIGNRVFGCDDCLAVCPWNKFAGAARESRMAARDDLAAPPLAELARLDDAGFRTRFAGTPIKRTGRDRFLRNVLIAIGNSGDAALAAEAVACLAEPDPVVRGAAVWACGRLLPQERLHELFDAHGHGGNGGACEGGMA

SEQ ID NO: 78444 - protein, 356 aa, unidentified
  source 1..356: note = Methylorubrum extorquens
  REGION 1..356: note = tr|H1KJJ8|H1KJJ8_METEX 4Fe-4S ferredoxin-type domain-containing protein OS=Methylorubrum extorquens DSM 13060 OX=882800 GN=MetexDRAFT_2810 PE=4 SV=1
MPDLRERLPAWLAAGHHGTMDWMEERADQRAAPSALWAETRSIVMLGMNAGPERDPLELVRLKDRAAIAAYAQRRDYHDVIKGKLKELGGFLSACSGQPVKVFVDTAPVMEKPLAQAAGLGWQGKHTVLISREHGNWLMLGAIFSRAELEPDAPETDHCGSCRRCLDICPTDAFPAPYQLDARRCIAYLTIEHQGPIPAEFREKIGNRVFGCDDCLAVCPWNKFAGAARESRMAARDDLAAPPLAELARLDDAGFRTRFAGTPIKRTGRDRFLRNVLIAIGNSGDAALAAEAVACLVEPDPVVRGAAVWACGRLLPRARLHELFAAHGHGETEAHVREEWREAAALPMEADGPRET

SEQ ID NO: 78445 - protein, 392 aa, unidentified
  source 1..392: note = Methylorubrum populi
  REGION 1..392: note = tr|A0A514KVH7|A0A514KVH7_9RHIZ Epoxyqueuosine reductase OS=Methylorubrum populi OX=223967 GN=queG PE=3; SV = 1
MKPEKAVLTGRSLRETVEARARRLGFDAFRVTRPDAVPALRERLPAWLADGHHGTMDWMEERAEQRAAPSALWAETRSIVMLGMNAGPQRDPLDLVRLTDRGAIAAYAQRRDYHDVIKGKLKELGGFLSARSGEPVKVFVDTAPVMEKPLAQAAGLGWQGKHTVLISREHGNWLMLGAIFARAELEPDAPETDHCGSCRRCLDICPTNAFPAPYRLDARRCIAYLTIEHHGPIPAAYREQIGNRVFGCDDCLAVCPWNKFAGAAREARMAARDDLAAPPLAELARLDDAGFRARFAGTPIKRTGRDRFLRNVLIAIGNSGEAALADEAVARLSEPDPVVRGAAVWACGRLLPRERLHDLFAAHGRGETEAHVREEWRAAAGLPMEADGPRES

SEQ ID NO: 78446 - protein, 356 aa, unidentified
  source 1..356: note = Methylorubrum populi
  REGION 1..356: note = tr|B1Z998|B1Z998_METPB 4Fe-4S ferredoxin-type domain-containing protein OS=Methylorubrum populi (strain ATCC BAA-705 / NCIMB 13946 / BJ001) OX=441620 GN=Mpop_2342; PE = 4 SV=1
MPALRERLPAWLADGHHGTMDWMEERADQRAAPSALWAETRSIVMLGMSAGPQRDPLDLVRLTDRGAIATYAQRRDYHDVIKGKLKELGGFLSARSGEPVKVFVDTAPVMEKPLAQAAGIGWQGKHTVLISREHGNWLMLGAIFARAELEPDAPETDHCGSCRRCLDICPTDAFPAPYRLDARRCIAYLTIEHHGPIPAEYREQIGNRVFGCDDCLAVCPWNKFAGAAREARMAARDDLAAPPLAELARLDDAGFRARFAGTPIKRTGRDRFLRNVLIAIGNSGEAALADEAVARLGEPDPVVRGAAVWACGRLLPRERLHDLFAAHGRGETEAHVREEWRAAAGLPMEADGPRES

SEQ ID NO: 78447 - protein, 379 aa, unidentified
  source 1..379: note = Methylorubrum salsuginis
  REGION 1..379: note = tr|A0A1I4BAQ4|A0A1I4BAQ4_9RHIZ Epoxyqueuosine reductase OS=Methylorubrum salsuginis OX=414703; GN = SAMN04488125_10392 PE=4 SV=1
MEARARKLGFDALRVTRPDAVPLTRERLPAWLAEGHHASMDWMEERADQRADPSALWPEARSVIVLGMNAGPEADPLALLAQKERGTIATYAQRRDYHEVIKGKLKELGGFLSARSGKPVKVFCDTAPVMEKPLAQAAGLGWQGKHTVLLSREHGNWLMLGAIFCVAELPVDPPETDHCGSCRRCLDACPTEAFPAPFRLDARRCIAYLTIEHAGPIPTEFREKIGNRIFGCDDCLAVCPWNKFARAARETRMAARADLAAPPLADLVRLDEAGFRSFFAGTPIKRTGRDRILRNVLIAIGNSGDAALAEEAARCLADPDPVVRGAAVWACGRLFPMARLDALYAAHGRDEPDPHVRAEWYALLPTAMEGPSASETCCA

SEQ ID NO: 78448 - protein, 376 aa, unidentified
  source 1..376: note = Methylorubrum sp.
  REGION 1..376: note = tr|A0A4Z0EH80|A0A4Z0EH80_9RHIZ tRNA epoxyqueuosine(34) reductase QueG OS=Methylorubrum sp. Q1; OX = 2562453 GN=queG PE=4 SV=1
MEARARRLGFGAFRVTRPDAVPDLRERLPAWLAAGHHGTMDWMEERADQRAAPSALWAETRSIVMLGMNAGPERDPLELVRLKDRAAIAAYAQRRDYHDVIKGKLKELGGFLSARSGQPVKVFVDTAPVMEKPLAQAAGLGWQGKHTVLISREHGNWLMLGAIFARAELEPDAPETDHCGSCRRCLDICPTDAFPAPYQLDARRCIAYLTIEHQGPIPAEYREQIGNRVFGCDDCLAVCPWNKFAVAARETRMAARDDLAAPPLAELARLDDAGFRARFAGTPIKRTGRDRFLRNVLIAIGNSGDVTLAAEAVACLAEPDPVVRGAAVWACGRLLPRERLHELFAAHGHGETEAHVREEWREAAALPMEADGLRET

SEQ ID NO: 78449 - protein, 376 aa, unidentified
  source 1..376: note = Methylorubrum zatmanii
  REGION 1..376: note = tr|A0A1W6RRV3|A0A1W6RRV3_9RHIZ tRNA epoxyqueuosine(34) reductase QueG OS=Methylorubrum zatmanii OX=29429 GN=B2G69_19545 PE=4 SV=1
MEARARRLGFEAFRVTRPDAVPDLRERLPAWLAAGHHGTMDWMEERADQRAAPSALWAETRSIVMLGMNAGPERDPLELIQLKDRAAIAAYAQRRDYHDVIKGKLKELGGFLSARSGQPVKVFVDTAPVMEKPLAQAAGLGWQGKHTVLISREHGNWLMLGAIFSRAELEPDTPETDHCGSCRRCLDICPTDAFPAPYQLDARRCIAYLTIEHQGPIPAEFREKIGNRVFGCDDCLAVCPWNKFAGAARESRMAARDDLAAPPLAELARLDDAGFRTRFAGTPIKRTGRDRFLRNVLIAIGNSGDAALAAEAVACLAEPDPMVRGAAVWACGRLLPQERLHELFDAHGHGETEAHVREEWREAAALPMEADGLRET

SEQ ID NO: 78450 - protein, 376 aa, Methylosinus sp.
  REGION 1..376: note = tr|A0A177P2I0|A0A177P2I0_9RHIZ Epoxyqueuosine reductase OS=Methylosinus sp. R-45379 OX=980563 GN=queG; PE = 3 SV=1
MSLEQALRRRAAEFGFDLCAITTAQAPAEAGEHLAQWLESGAHGDMEWMAETADRRAAPKALWPQARSVIMLGVDYGASGDPLATLAKPDRGAVSLYARRRDYHEVIKGRLKQLAGFLLAQAGGGEVKVFVDTAPVMEKPLAQAAGLGWQGKHTNLVSRRFGSWLLLGAIFTDLPLQPDAPEEDHCGSCRACLDACPTKAFPAPYRLDARRCVAYLTIEHKGQIPREFRAAIGNRIFGCDDCLAVCPWNKFARATRDAKLALREELSELPLADLAALDDAGFRALFAGTPVKRLGHARFRRNVAIAIGNSKNRELAAAVEPLLSDSSPLARGASVWALARLLPPGDFSALAGKALAEEEDVAVREEWAKETHPAKK

SEQ ID NO: 78451 - protein, 413 aa, Methylosinus sp.
  REGION 1..413: note = tr|A0A4R8HMH5|A0A4R8HMH5_9RHIZ Epoxyqueuosine reductase QueG OS=Methylosinus sp. sav-2 OX=2485168; GN = EDE12_10414 PE=4 SV=1
MREMALSAGADDVGFVSIDDPAIAFERAEILAAFPYARTLVSFVMRMNRENIRSPARSLANVEFHRVGDETDAVSHRLTRMLEDMGVRAAYPAMAFPMEAARWPAKMWVVSHKPVAVAAGLGKMGVHRNVIHPKFGNFILLGTVVVDVALDSYSRPLDYNPCLSCKLCVAVCPTGAIAPDGGFDFAACYTHNYREFMGGFMDWVETIADAKSAAGYREKVEDAESVSMWQSLAYGPNYKAAYCLAVCPAGEDVIGAYRGDRSGFLQSIVDPLKKKKETIYVTPLSDAEDYVKRRFPHKRVKRVANGMRAASIASFARGLSLRFQKKRAAGLSAVYHFAFSGAERKDLTVRIDNGRLEVGEGLIGKADLVIRADAQSWLRFLRKERSLLWALVTLEIRLRGDPRLLAAFGKCFP

SEQ ID NO: 78452 - protein, 376 aa, Methylosinus sporium
  REGION 1..376: note = tr|A0A549SDA8|A0A549SDA8_METSR Epoxyqueuosine reductase OS=Methylosinus sporium OX=428 GN=queG PE=3 SV=1
MTLEQALRRRAAALGFDLCAITSADAPAKAGERLAQWLESGGHGDMEWMAETAERRAAPKALWPQARSIIMLGVDYGASGDPLATLAKPDRGAVSLYARRRDYHEVIKGRLKQLAGFLLAQAGGGEVKVFVDTAPVMEKPLAQAAGLGWQGKHTNLVSRRFGSWLLLGAIFTDLSLTPDAPEEDHCGSCRACLDACPTKAFPAPYQLDARRCVAYLTIEHKGQIPREFREAVGNRIFGCDDCLSVCPWNKFAQATRDAKLALREDLAELPLADLAALDDAGFRALFAGTPVKRLGHARFRRNVAIAIGNSKRPALAFAVEPLLGDSSPLARGAAVWALARLLPRGDFSMLAGKALPEEDDGSVREEWAKETHPTKK

SEQ ID NO: 78453 - protein, 376 aa, Methylosinus sporium
  REGION 1..376: note = tr|A0A2U1SU47|A0A2U1SU47_METSR Epoxyqueuosine reductase OS=Methylosinus sporium OX=428 GN=queG PE=3 SV=1
MSLEQALRRRAAELGFDLCAITSADAPAEAGKRLAQWLAAGAQGDMEWMAETAERRAAPRALWPQARSVIMLGIDYGAPGDPLAILSRPDRGAISLYARRRDYHEVIKGRLKQLAGFLVAQTGGGEVKVFVDTAPVMEKPLAQVAGLGWQGKHTNLVSRRFGSWLLLGAIFTDLSLTPDAPEEDHCGSCRACLDACPTKAFPAPYRLDARRCVAYLTIEHKGQIPREFREAVGNRIFGCDDCLSVCPWNKFAQATRDAKLALREDLSALPLVDLAALDDAGFRALFAGTPVKRLGHARFRRNVAIAIGNSKRPALAFAVEPLLGDSSPLARGAAVWALARLLPMGDFSMLAGKALPKEDDGSVREEWAKETHPTKK

SEQ ID NO: 78454 - protein, 383 aa, Methylosinus trichosporium
  REGION 1..383: note = tr|A0A2D2D2T5|A0A2D2D2T5_METTR Epoxyqueuosine reductase OS=Methylosinus trichosporium OB3b OX=595536; GN = queG PE=3 SV=1
MLRRSRLLSLEEALRAQAAALGFDLCRIAPASAPPQAGERLAAWLASGAHGDMEWMAATPERRAAPQGLWSEARSIVLLGANYGADGDPLADLARRDHGAISLYARRRDYHEVIKGRLKQLAAFLLSRAGAGDAKVFVDTAPVMEKPLAQAAGLGWQGKHTNLVSRRFGSWLFLGSIFTDLTLAPDAPERDHCGSCRKCLDICPTNAFPAPYRLDARRCVAYLTIEHRGPIPRELRAAIGNRVFGCDDCLAVCPWNKFARAARDARLALRPELDAMPLAGLAALDDAGFRALFAATPVKRLGHARFLRNVAIAIGNSGEARLSAALRPLLDHASPVTRGAAVWALARLLPREELASLARAYAPREPDALVCTEWAKETQSEKK

SEQ ID NO: 78455 - protein, 358 aa, Methylotenera mobilis
  REGION 1..358: note = tr|A0A351RCS2|A0A351RCS2_9PROT Epoxyqueuosine reductase OS=Methylotenera mobilis OX=359408 GN=queG PE=3; SV = 1
MSHSTKNLNDLSHAIKKWGLELGFNQVGITDTNLQTAEQEHQAWIEKGFHGDMDYMAKHGVKRTRPAELVPNTQRIISARLDYLPPEAENSTSILQDSHKAFISRYALGRDYHKVMRNKLQKLCEKIQSELQSFQIDQFEYRAFTDSAPVLEVALAEKAGLGWRGKHTLLIDKNNGSWFFIGEIYTNLPLPIDEPASNHCGSCSKCIEVCPTQAITAPYEVDARRCISYLTIELKTSIPEEYRPLIGNRVYGCDDCQLYCPWNKFAEITQEPDFSVKHGLADVNLIDCFNWTEDEFKSKMAGSAIYRIGYLQWLRNIAVGLGNAETTPEIIDTLKQHLHHENEMVQEHVRWALDRHLA

SEQ ID NO: 78456 - protein, 359 aa, Methylotenera mobilis
  REGION 1..359: note = tr|C6WUZ5|C6WUZ5_METML Epoxyqueuosine reductase; OS = Methylotenera mobilis (strain JLW8 / ATCC BAA-1282 / DSM 17540) OX=583345 GN=queG PE=3 SV=1
MSHSTKNLSDLSLAIKNWGLALGFSQIGITDTNLQAAESEHQAWIEKGLHGDMDYMAKHGTKRTRPHELVPNTQRIISARLDYLPPQAADSDTILQDGSKAFISRYALGRDYHKVMRNKLQKLCEKIQSELQHYQVDGFEYRAFTDSAPVLEVALAEKAGIGWRGKHTLLINKNHGSWFFLGEIYTNLALPIDEPASNHCGSCSKCMEVCPTQAITAPYEVDARRCISYLTIELKTSIPVEFRPLIGNRVYGCDDCQLYCPWNKFAEITKETDFAVKHGLDDVSLIDCFNWTEEEFKTKMAGSAIYRIGYTQWLRNIAVGLGNAETTPEVINALKQHQHHENETLQEHVRWALSRHTPA

SEQ ID NO: 78457 - protein, 359 aa, Methylotenera sp.
  REGION 1..359: note = tr|A0A2S5L2M3|A0A2S5L2M3_9PROT Epoxyqueuosine reductase OS=Methylotenera sp. OX=2051956 GN=queG PE=3 SV=1
MSNSTKNLSDLSVAIKDWGRALGFNDVGITDTNLRTAESQHQAWIEKGFHGDMDYMAKHGVKRTRPDELVPNTQRIISVRLDYLPPQAENSDKILQDSSKAFISRYALGRDYHKVMRNKLQKLCEKIQSELQYYQTPAFEYRVFTDSAPVLEVALAEKAGLGWRGKHTLLINKNKGSWFFLGEIYTNLPLPIDEPASNHCGSCSKCIEVCPTQAITAPYEVDARKCISYLTIELKTSIPLEYRPLIGNRVYGCDDCQLYCPWNKFAEVTKETDFAVKHGLDDIRLIDCFQWSEDDFKTRMAGSAIYRIGYLQWLRNIAVGLGNAETTPEVIQALQRHVHHENAMVQEHVRWALIRHNRA

SEQ ID NO: 78458 - protein, 367 aa, Methylotenera sp.
  REGION 1..367: note = tr|A0A1G1B1N7|A0A1G1B1N7_9PROT Epoxyqueuosine reductase OS=Methylotenera sp. RIFCSPLOWO2_02_FULL_45_14; OX = 1801615 GN=queG PE=3 SV=1
MSHYTKFNSTKNISQLSRDIKRWGLELGFNQIGITDTHLQTAETEHQAWIKKGFHGEMDYMAKHGTKRTRPAELVPNTNRIISARLDYLPPNAKDSEAILQNNSRAFISRYALGRDYHKVMRNKLQKLCEKIQAELAHDQTSHFEYRAFTDSAPVLEVTLAEKSGLGWRGKHTLLINKSHGSWFFLGEIYTNLPLEIDEPATNHCGTCTSCIDVCPTQAITAPYEVDARRCISYLTIELKGSIPVELRPLIGNRVYGCDDCQLYCPWNKFAEITKEPDFAVKHGLDDISLIDCFNWSEDEFKTKMAGSAIYRIGYTQWLRNIAIGLGNAETTTEIIETLKQHINHENDLVREHVCWALSCHLLDPTF

SEQ ID NO: 78459 - protein, 369 aa, Methylotenera versatilis
  REGION 1..369: note = tr|D7DII8|D7DII8_METV0 Epoxyqueuosine reductase; OS = Methylotenera versatilis (strain 301) OX=666681 GN=queG; PE = 3 SV=1
MTDLNETIQSKFTQLANDIKQWGLALGFNQIGITDTNLQEAEVEHQAWIAKGFHGEMDYMAKHGVKRTRPAELVPNTLRVISARLDYMPPNAVDSESIMQDSSKAFISRYAMGRDYHKVMRNKLQKLCEKIQSEMTKYKVDDFSYRAFTDSAPVLEVALAEKAGLGWRGKHTLLINKNRGSWFFLGEIYTNLPLPIDEAGTNHCGICTSCIDVCPTKAITAPYEVDARRCISYLTIELKTSIPIEFRSLIGNRVYGCDDCQLFCPWNKFAEITHESDFAVKNGLDNISLVQCFAWTEAQFKQNMAGSAIYRIGYEQWLRNIAVGLGNASTTPEILEALQNRKNDASALLREHIDWALEQHKLSSDTADI

SEQ ID NO: 78460 - protein, 356 aa, unidentified
  source 1..356: note = Methylothermaceae bacteria
  REGION 1..356: note = tr|A0A148NAI2|A0A148NAI2_9GAMM Epoxyqueuosine reductase OS=Methylothermaceae bacteria B42 OX=1798802; GN = queG PE=3 SV=1
MDINYRQLARQIKTWGAELGFQSVGITDTDLSQAEKEFNDWLANQYHGEMNYMGRHGHKRTRPQALVPATLSVISVRMEYLPESAQAMESVLNRPTMGYISRYALGRDYHKVIRKRLQQLANKIEKAVGPFGYRVFCDSAPVLEKPLANKAGLGWIGKHTNLIAYKNGSWFFLGEIYTDLPLPSDKPVETSHCGSCRACIDICPTKAIVAPYLLDARRCISYLTIELKGSIPEEFRKAIGNRIYGCDDCQIVCPWNRHAQMTLETDFLPRNHLDQPDLRELFLWDEPTFLAKTEGSAIRRLGHTRWLRNIAVALGNAPSSEAIIQVLKQRLNDASPLVREHVRWALNQHIELAVKR

SEQ ID NO: 78461 - protein, 368 aa, Methyloversatilis sp.
  REGION 1..368: note = tr|A0A257XC40|A0A257XC40_9PROT Epoxyqueuosine reductase OS=Methyloversatilis sp. 12-65-5 OX=1970398; GN = queG PE=3 SV=1
MPARPTFPPSLPGSPAALAAQIRGWAHELGFASVGFAGVDLGDAETRLMDWLAAGRHGEMHYMERHGTARARPAELVPGTLSVISVRLPYWPDPQQATDAQAVLEDPDAAYVSRYALGRDYHKVLRARLQALADRIEARVGPFGYRAFTDSAPVMEVEIARRAALGWRGKHTLLIHRDAGSLFFLGELYTNLPLPADTPQSDHCGTCTRCIDVCPTGAIVAPYQLDARLCVSYLTIELDGPIPELLRPAIGNRIYGCDDCQLVCPWNRHAQLAVEPDFAVRNGLDRASLTELFAWREDEFDKKLAGSAIRRIGHARWLRNIAVALGNAPASVANIAALNARADHSSAMVREHVTWALARQHSPDPLHD

SEQ ID NO: 78462 - protein, 368 aa, Methyloversatilis sp.
  REGION 1..368: note = tr|A0A1B3LIQ2|A0A1B3LIQ2_9PROT Epoxyqueuosine reductase OS=Methyloversatilis sp. RAC08 OX=1842540; GN = queG PE=3 SV=1
MPARTTTSPPLPCSPDELAAHVREWGQALGFASVGFAGINLGEAETRLMEWLAAGRHGDMHYMERHGTARARPAELVPGTLSIISVRLPYWPDPREAADAQAVLDDADAAYVSRYALGRDYHKVLRARLQALADRIEAQVGPFGYRAFTDSAPVMEVEIARRAALGWRGKHTLLIHRDAGSLFFLGELYTNLPLPADTAQPDHCGTCTRCIDVCPTGAIVAPYQLDARLCVSYLTIELDGSIPEPLRPAIGNRIYGCDDCQLVCPWNRHAQLAVEPDFAVRNGLDRASLTELFAWNEDEFDAKLAGSAIRRIGHARWLRNIAVALGNAPASAANIAALNARADHPSAMVREHVAWALARQHSPDPQHD

SEQ ID NO: 78463 - protein, 359 aa, Methyloversatilis universalis
  REGION 1..359: note = tr|F5RHL8|F5RHL8_METUF Epoxyqueuosine reductase; OS = Methyloversatilis universalis (strain ATCC BAA-1314 / JCM 13912 / FAM5) OX=1000565 GN=queG PE=3 SV=1
MSDALPCSPLELADRIRAWAHELGFASVGISGIDLGEAEARLLDWLAAGRHGDMDYMARHGVTRARPAELVPGTLSVISVRMPYWPDEAADAQGVLDDGELGYVSRYALGRDYHKVLRSRLQKLAERIETVTGPFGHRAFTDSAPVLEVEIARRAALGWRGKHTLLIHRDAGSMFFLGELFTTLPLPPDAPQPDHCGTCTRCIDVCPTGAIVAPYQLDARLCVSYLTIELDGPIPEPLRPAIGNRIYGCDDCQLVCPWNRHAKKAMEPDFAVRNGLDRAPLTALFAWSEDEFNRRLEGSAIRRIGHERWLRNIAVALGNAPAAPAISAALQARADHPSPVVREHIAWALARQHSPDTPT

SEQ ID NO: 78464 - protein, 377 aa, Methylovirgula sp.
  REGION 1..377: note = tr|A0A371WFA8|A0A371WFA8_9RHIZ Epoxyqueuosine reductase OS=Methylovirgula sp. 4M-Z18 OX=2293567 GN=queG; PE = 3 SV=1
MQSDHTAFKSRLAVAAKDLGFDLCRIAAPDALPLAPERLAAWLALDRHGSMDWMQDTAARRADPRVLWPEVRSIVMLGVNYGPEEDPRATLAARHKGTISVYARNRDYHDVIKGKLKLLAQWLVKAAKPEVCDVKVFVDTAPVMEKPLAMSAGLGWQGKHTNLVSREFGSWLFLGSIFTSLPLAPDEAEVDHCGSCRACLDVCPTDAFPAPYQIDARRCISYLTIEHKGPIPRALRQAMGNRIYGCDDCLAVCPWNKFAQASREAKLAARGDLNAPDLTFLASLDDAAFRTHFSGSPIKRIGRDRFLRNVLIAIGNAKDPAMADIAIGHLNDESPVVRGAAVWALARLAPPDVFQHHAAQAFARETDDEVRAEWIEA

SEQ ID NO: 78465 - protein, 370 aa, unidentified
  source 1..370: note = Methylovorus glucosetrophus
  REGION 1..370: note = tr|C6XDA4|C6XDA4_METGS Epoxyqueuosine reductase; OS = Methylovorus glucosetrophus (strain SIP3-4) OX=582744; GN = queG PE=3 SV=1
MQFTSDSPVLPIDLPALALDIKRWAQELGFSQLGITDTDLSAAEPAHQAWLEKGFHGAMDYMAKHGSKRTRPQELVPGTLRILSVRMNYQPPATRDSWEVMADGESAFISRYALGRDYHKVLRSRLQQLCDRIAAHIAPLTDDSFDYRVFTDSAPVLEVELAQKAGLGWRGKHTLLLSRDAGSWFFLGEIYTNLPLPVDTPGQNHCGTCHACLDICPTQAIVAPYEVDARRCISYLTIELKDSIPESLRPLIGNRVYGCDDCQLACPWNKFGQLTAQEDFHVRHGLDNASLVELFGWDEATFKERMAGSAIYRIGHEQWLRNIAVGLGNAPSSPEVISALKKRLDHPSPLVNEHVRWALKQHEHLSAAAL

SEQ ID NO: 78466 - protein, 363 aa, Methylovorus sp.
  REGION 1..363: note = tr|A0A1A9T5R8|A0A1A9T5R8_9PROT Epoxyqueuosine reductase OS=Methylovorus sp. MM2 OX=1848038 GN=queG PE=3; SV = 1
MQNTFSDLSKLAADIKQWGLELGFSQLGITDTNLSAAEPEYKEWLVKGFHGAMDYMAKHGDKRTRPAELVPGTVRVISVRMDYRPPNARNSDEVMLNGTQAFISRYALGRDYHKVMRNRLQKLCERISQEIGPFGFRVFTDSAPVMEVALAERSGLGWRGKHTLLLSRDAGSWFFLGEVYIDIPLPIDAPTSKHCGTCTACIDVCPTQAIVAPYEVDARRCISYLTIELKESIPEPLRPLIGNRVYGCDDCQLTCPWNKFAQITKEEDFHVRHGLDDVTLVELFAWDESTFKQKMTGSAIYRIGYSQWLRNIAVGLGNAPSSPEIISALESRQNDESALVKEHVEWALNRHKSAIPSAPYTAQ

SEQ ID NO: 78467 - protein, 357 aa, unidentified
  source 1..357: note = Methylovulum psychrotolerans
  REGION 1..357: note = tr|A0A1Z4BYB1|A0A1Z4BYB1_9GAMM Epoxyqueuosine reductase OS=Methylovulum psychrotolerans OX=1704499; GN = queG PE=3 SV=1
MSEADTAMVELAQQIKQWGLALGFQQVGISDTDLAEAEGHLQGWLAQDFHGDMDYMQRHGLKRSRPALLQEGTRSIISVRMDYLPEAAAAMHSVLADPAAAYISRYALGRDYHKVLRNRLQKLADRIQAQCADLGYRVFVDSAPVLEKAIAEKAGLGWIGKHSNLLNRKAGSWFFLGEIYTDLPLPADTPTANHCGVCTACLAICPTQAIVAPYQVDARRCVSYLTIELHGPIPEDLRPLLGNRIYGCDDCQLVCPWNRFAHFSSESDFHPRHRLNSQQLLAVFAWDEAEFLRKTEGSAIRRIGHERWLRNIAVALGNAQPSPAIIAALTARLAHPSALVREHVQWALQCQTGLNDG

SEQ ID NO: 78468 - protein, 357 aa, unidentified
  source 1..357: note = Methylovulum psychrotolerans
  REGION 1..357: note = tr|A0A2S5CK73|A0A2S5CK73_9GAMM Epoxyqueuosine reductase OS=Methylovulum psychrotolerans OX=1704499; GN = queG PE=3 SV=1
MSESDTAMVELAQQIKQWGLALGFQQVGISDTDLAEAEGHLQGWLAQDFHGDMDYMQRHGLKRSRPALLQEGTRSIISVRMDYLPEAAAAMHSILADRAAAYISRYALGRDYHKVLRNRLQKLADRIQAQCADLGYRVFVDSAPVLEKAIAEKAGLGWIGKHSNLLNRKAGSWFFLGEIYTDLPLPADTPTANHCGVCTACLAICPTQAIVAPYQVDARRCVSYLTIELHGPIPEDLRPLLGNRIYGCDDCQLVCPWNRFAHFSNESDFHPRHKLNSQQLLAVFAWDEAEFLRKTEGSAIRRIGHERWLRNIAVALGNAQPSPAIIAALTARLAHPSALVREHVQWALQCQTGLNDG

SEQ ID NO: 78469 - protein, 378 aa, Methylovulum sp.
  REGION 1..378: note = tr|A0A522DNB4|A0A522DNB4_9GAMM Epoxyqueuosine reductase OS=Methylovulum sp. OX=1916980 GN=queG PE=3 SV=1
MNADEACRLGLYALRLCAPQAPDEDMAKLARQIKQWGQELGFQQIGITDTDLSGAETHLQAWLASHFHGEMDYMQRHGVKRSRPGELHAGTIRIISVRMDYLPEPPLAMKQALADPSAAYISRYALGRDYHKLMRKRLQKLVDKIQAATASSPNSSPAMRAFVDSAPVLEKAIAEKAGLGWIGKHSNLINRKAGSWFFLGEIYTDLPLPVDSPATAHCGACTACIDICPTQAIVAPYRVDARRCVSYLTIELHGSIPEHLRPLIGNRIYGCDDCQLICPWNRFARLTGERDFNPRHRLDTQQLLEVFAWDEQTFLSKTEGSAIRRIGYERWLRNIAVALGNAPASEGIIGALTAKSGHLSGMVREHVQWALDRHCETR

SEQ ID NO: 78470 - protein, 377 aa, Microbacterium sp.
  REGION 1..377: note = tr|A0A542GT30|A0A542GT30_9BACI Epoxyqueuosine reductase OS=Microbacterium sp. SLBN-1 OX=1489561 GN=queG; PE = 3 SV=1
MDMEQLKSDIISYSKTIGIDKIGFTTADTFTEMKNRLIRQEMAGYQSGFEEPDIDKRVDPSLTFDQPRSIIAIALAYPSRMKDAPRSKRGERRGIFCRASWGTDYHHILRDRLKKLEEYIVSRIPEARFRSMVDTGELVDRAVSERAGIGWSGKNCSIITPEFGSYVYLGEMITNLPFSPDKPIEDGCGTCNKCVDVCPTGALIEGGRLDAQKCIAFLTQTKGFLQDEYRVKLGNRIYGCDTCQTVCPENKGKDFHLHEEMEPDPEVAKPLLKPLLTISNRDFKETYGHISGSWRGKKPIQRNAIIALAHYKDETAIPDLIRVLKNDVRPVMRGTSAWALGKIGGQEAEEALKHQIEKEADPEVLAEIQKGLHLMTE

SEQ ID NO: 78471 - protein, 370 aa, Microbulbifer agarilyticus
  REGION 1..370: note = tr|A0A1Q2M1B7|A0A1Q2M1B7_9GAMM Epoxyqueuosine reductase OS=Microbulbifer agarilyticus OX=260552 GN=queG; PE = 3 SV=1
MSNTPDPQTMAELATQIRVWGRELGFQQVGITDCQLEKHGERLQHWLDAGYNGDMEWMGAHGDKRWRPDLLEEGTLRVISVRLDYLPPDTQPVQVLKDPGKAYVSRYANGRDYHKLIRKRLAQLAQQIDRYCEERGIPAQGRAFTDSAPVMERALAEKAGLGWIGKNCMVINSQAGSWFFLGEIYTNLPLPIDVSDEPNRCGECTACLKVCPTDAFIDAYTLDARRCISYLTIENKGPIPEELREPMGNRVFGCDDCQIICPWNKFAKPTAEQDFHPRHGLDSGELTDLFRWTEQEFLKKTEGSAIRRIGFERWQRNLAVALGNADATAEVITALEEQLDSATPLVAEHIQWALARLRSGRRRKRKIKRS

SEQ ID NO: 78472 - protein, 370 aa, unidentified
  source 1..370: note = Microbulbifer aggregans
  REGION 1..370: note = tr|A0A1C9W657|A0A1C9W657_9GAMM Epoxyqueuosine reductase OS=Microbulbifer aggregans OX=1769779 GN=queG; PE = 3 SV=1
MNRAVLAELADLIKLWGRELGFQQIGITDCQLTQDAEHLRAWLDAGHHGDMDWMAAHGDKRWRPEHLEPGTLRVISARLDYLPPDTEPVRVLKDSSKAYVSRYATGRDYHKLIRKRLAQLGERIRHFCEEREIETSGRAFTDSAPVMERALAQKAGLGWIGKNCMVINSGAGSWFFLGELFTSLPLPIDESDEPNQCGDCSACLKICPTDAFAGPYQLDARRCISYLTIENKGPIPEEFREPMGNRVFGCDDCQIICPWNRFAHPTAESDFHPRHGLADGDLLTLFQWSEEEFLERTAGSAIRRIGYERWRRNLAVALGNGEASAEAIAALESALEDSTPLVAEHVRWALERLRSGRRRRRKIRRTQTER

SEQ ID NO: 78473 - protein, 372 aa, Microbulbifer donghaiensis
  REGION 1..372: note = tr|A0A1M5EID2|A0A1M5EID2_9GAMM Epoxyqueuosine reductase OS=Microbulbifer donghaiensis OX=494016 GN=queG; PE = 3 SV=1
MTETLLAQLAAQIKIWGRELGFQQIGITDCQLEEHGERLRAWLDAGHNADMDWMGAHGEKRWRPELLQPGTLRAISARLDYLPPDTQPVRVLKDSSKAYVSRYANGRDYHKLIRKRLAQLAQRIDDFCNANGLESSGRAFTDSAPVMERALAEKAGLGWIGKNCMVINSGAGSWFFLGEIYTNLALPADNSTESNQCGDCSACLKVCPTDAFIGPYQLDARRCISYLTIENKGPIPEEFREPLGNRVFGCDDCQIICPWNKFAKPTAERDFHPRHGLDDGDLLTLFGWGEEEFLRKSEGSAIRRIGYERWQRNLAVALGNAEPCAEIVAALEGARHRATPLVAEHIEWALARLNSGRRRKRKIKRPTAGPTT

SEQ ID NO: 78474 - protein, 372 aa, Microbulbifer marinus
  REGION 1..372: note = tr|A0A1H3ZGR0|A0A1H3ZGR0_9GAMM Epoxyqueuosine reductase OS=Microbulbifer marinus OX=658218 GN=queG PE=3; SV = 1
MTETLLTELATQIKIWGRELGFQQIGITDCQLEQHGERLRAWLDAGHNGDMDWMGAHGEKRWRPDLLQPGTLRVISARLDYLPPDTQPVRVLKDADKAYVSRYANGRDYHKLIRKRLAQLAQRIDDFCNANGMDSSGRAFTDSAPVMERALAEKAGLGWIGKNCMVINSGAGSWFFLGEIYTNLALPVDNSDETNQCGDCTACLKVCPTDAFVGPYQLDARRCISYLTIENKGPIPEEFREPMGNRVFGCDDCQIICPWNKFAKPTAERDFHPRHGLDDGDLLTLFGWSEEEFLRKTEGSAIRRIGFERWQRNLAVALGNGRPGADVIAALERALPEATPLVREHIEWALARLHSGRRRKRKIRRPATGSTL

SEQ ID NO: 78475 - protein, 369 aa, Microbulbifer sp.
  REGION 1..369: note = tr|A0A2S1JMG7|A0A2S1JMG7_9GAMM Epoxyqueuosine reductase OS=Microbulbifer sp. A4B17 OX=359370 GN=queG; PE = 3 SV=1
MTESLLADLAQQIKIWGRELGFQQVGITDCQLEEEGERLRAWIDAGYHADMDWMGAHGEKRWRPELLEPGTLRVISVRLDYLPPDTQPIKVLKDSSKAYVSRYANGRDYHKLIRKRLANLSKQIDTYCAERGIESKGRAFTDSAPVMEKALAAKAGLGWIGKNTLVLNSTAGSYFFLGEIYTNLPLPIDISEEHDQCGDCVACLRVCPTDAFIDDRTLDARRCISYLTIENKGPIPEEFREPIGNRIYGCDDCQIVCPWNKFAKPTKEKDFHPRHELDNGELLKLFTWSEEEFLRKTEGSAIRRIGHERWLRNLAVAIGNGETTPEVINTLESARANATPLVLEHIDWALERLRSGRRRKRKIKRKPAG

SEQ ID NO: 78476 - protein, 370 aa, Microbulbifer sp.
  REGION 1..370: note = tr|A0A0X3U473|A0A0X3U473_9GAMM Epoxyqueuosine reductase OS=Microbulbifer sp. ZGT114 OX=1685377 GN=queG; PE = 3 SV=1
MNQAALAELAALIKDWGRELGFQQIGITDCHLTEDAEHLRAWIDAGHHGDMDWMAAHGDKRWRPEKLEPGTLRVISARLDYLPPDTEPVRVLKDSSKAYVSRYATGRDYHKLIRKRLAQLGERIEHFCDERGIEVKGRAFTDSAPVMERALAQKAGLGWIGKNCMLINSGAGSWFFLGELFTSLPLPVDESDEPNQCGECSACLKVCPTDAFLGPNQLDARRCISYLTIENKGPIPEEFREPMGNRVFGCDDCQIICPWNRFAQPTAERDFHPRHGLADGDLLALFRWSEDEFLQRTAGSAIRRIGYERWQRNLAVAIGNGEPAAEAIAALESARGNATPLVAEHIHWALQRLRSGRRRRRKIRRQLNQD

SEQ ID NO: 78477 - protein, 370 aa, Microbulbifer thermotolerans
  REGION 1..370: note = tr|A0A143HQH3|A0A143HQH3_9GAMM Epoxyqueuosine reductase OS=Microbulbifer thermotolerans OX=252514; GN = queG PE=3 SV=1
MNEPLLVELAALIKTWGRELGFQQLGIADCHLEAHGERLRAWLEAGYHGDMEWMGAHGEKRWRPELLQPGTVRVISARLDYLPPDTQPVRVLKDARKAYISRYATGRDYHKLIRKRLAHLAQKIDAWCAERGFDSAGRAFTDSAPVMERALAEKAGLGWIGKNCMAINSSAGSWFFLGEIYTNLALPVDKSTQPNQCGECSACLKVCPTDAFIAPYQLDARRCISYLTIENKGPIPEVFREPMGNRVFGCDDCQIICPWNKFAKPTGERDFHPRHGLDDGDLLTLFKWGEEEFLRKTEGSAIRRIGYERWRRNLAVALGNAEACGEIVAALEAARPGSTPLVAEHIDWALARLRSGRRRKRKIKRPQSPA

SEQ ID NO: 78478 - protein, 378 aa, Microbulbifer thermotolerans
  REGION 1..378: note = tr|A0A1I1IKW4|A0A1I1IKW4_9GAMM Epoxyqueuosine reductase OS=Microbulbifer thermotolerans OX=252514; GN = queG PE=3 SV=1
MAPVAFNTMNEPLLVELAALIKTWGRELGFQQLGIADCHLEAHGERLRAWLEAGYHGDMEWMGAHGEKRWRPELLQPGTVRVISARLDYLPPDTQPVRVLKDARKAYISRYATGRDYHKLIRKRLAHLAQKIDAWCAERGFDSAGRAFTDSAPVMERALAEKAGLGWIGKNCMAINSSAGSWFFLGEIYTNLALPVDKSTQPNQCGECSACLKVCPTDAFIAPYQLDARRCISYLTIENKGPIPEVFREPMGNRVFGCDDCQIICPWNKFAKPTGERDFHPRHGLDDGDLLTLFKWGEEEFLRNTEGSAIRRIGYERWRRNLAVALGNAEACGEIVAALEAARPDATPLVAEHIDWALARLRSGHRRKRKIKRPKSPA

SEQ ID NO: 78479 - protein, 373 aa, Microbulbifer yueqingensis
  REGION 1..373: note = tr|A0A1G9CZ91|A0A1G9CZ91_9GAMM Epoxyqueuosine reductase OS=Microbulbifer yueqingensis OX=658219 GN=queG; PE = 3 SV=1
MSDSPDADKLLAELAAHIKTWGRELGFQQVGITDCRLEAHGERLRQWLAAGYQGEMDWMAAHGDKRWRPELLEPGTLRAISVRLDYLPPDTEPVRVLKDDSKAYVSRYATGRDYHKLIRKRLARLAAQVEEFCSRHGLAAKGRAFTDSAPVMERALAEKAGLGWIGKNCMVLNSGAGSWFFLGEIYTNLALPVDTSTEPNQCGECTACLKVCPTDAFVGPYQLDARRCISYLTIENKGAIPEEFREPMGNRVFGCDDCQIICPWNRFARPTAESDFHPRHGLDDGGLLALFGWSEQEFLERTAGSAIRRIGYERWQRNLAVALGNGDATPEVITALEQRLADTTPLVAEHIEWALARLRSGRRRRRKIKRGAA

SEQ ID NO: 78480 - protein, 373 aa, Micrococcus lylae; identical to SEQ ID NO: 78025
  REGION 1..373: note = tr|A0A378NYZ9|A0A378NYZ9_9MICC Epoxyqueuosine reductase OS=Micrococcus lylae OX=1273 GN=queG PE=4 SV=1

SEQ ID NO: 78481 - protein, 312 aa, unidentified
  source 1..312: note = Microcoleaceae bacterium
  REGION 1..312: note = tr|A0A355CGY6|A0A355CGY6_9CYAN Epoxyqueuosine reductase OS=Microcoleaceae bacterium UBA10368 OX=2055793; GN = queG PE=3 SV=1
MKAPISSILVKQKSLELGFHKVGIALVGCGTDEEAQRLQRWLDKGYQADMGWMANPKRQDIRASMSEVKSLICVAINYYTPHQRPESPEYAKISRYGWGRDYHKILHKKLKVLADWVRSQGEGIEARYYADTGPIQDKVWAQRAGIGWIAKNGNVISREYGSWVFLGEVLTNLELVPDSGHTQHCGTCTRCIDACPTGAITEPFVVNADQCIAYHTIENRAEKLPDEIASNLQGWVAGCDICQDVCPWNQRFAKPTDVAEFEPYPENIAPTLAELAAISDEEWNRRFTASALRRIKPEMLRRNARGNQINSH

SEQ ID NO: 78482 - protein, 312 aa, unidentified; identical to SEQ ID NO: 78481
  source 1..312: note = Microcoleaceae bacterium
  REGION 1..312: note = tr|A0A3D5GCT6|A0A3D5GCT6_9CYAN Epoxyqueuosine reductase OS=Microcoleaceae bacterium UBA9251 OX=2055794; GN = queG PE=3 SV=1

SEQ ID NO: 78483 - protein, 321 aa, Microcoleus sp.
  REGION 1..321: note = tr|K9WIX0|K9WIX0_9CYAN Epoxyqueuosine reductase; OS = Microcoleus sp. PCC 7113 OX=1173027 GN=queG PE=3 SV=1
MSLSEEISVSSSQVKQEARSLGFHLCGIAAVDDQASSPTREHLEAWLALGYQADMAWMDNPQRFDIRACMPEVQSVICVALNYYTPHQRPQGSEYAKISRYGWGRDYHKVMHKKLKALTNWLSAQGEGILARYYADTGPVQDKVWAQRAGMGWIAKNANVITREYGSWVFLGEVLTNLPLTPDQPHTQHCGTCTRCLDACPTGAITKPFVVDANRCIAYHTIENRRQELPESLAPYLEGWVAGCDICQDVCPWNQRFAQETDVAEFQPYPWNVAPTLTELATLSDDEWNRRFPASALRRIKPEMLRRNAQANLKAAQASNQ

SEQ ID NO: 78484 - protein, 311 aa, Microcoleus vaginatus
  REGION 1..311: note = tr|F5UIJ1|F5UIJ1_9CYAN Epoxyqueuosine reductase; OS = Microcoleus vaginatus FGP-2 OX=756067 GN=queG PE=3 SV=1
MKAPISSILVKQKALELGFHKVGIALVDEGTDKDAQRLQAWLNKGYQADMAWMANPKRQDIRAAMPEVKSLICVAINYYTPHQRPGGSEYAKISRYGWGRDYHKILHKKLKVLANWVRSQGEGIEARYYADTGPIQDKMWAQRAGIGWIAKNGNVISREYGSWVFLGEILTNLELASDEPHTEHCGTCTRCIEACPTGAITEPFVVNADRCIAYHTIENRAEKLPDEIGSNLQGWVAGCDICQDVCPWNQRFAKPTDVADFEPYPENIAPTLAELADISDEEWNRRFTASALRRIKPEMLRRNAKANQINP

SEQ ID NO: 78485 - protein, 315 aa, Microcystis aeruginosa
  REGION 1..315: note = tr|B0JWY3|B0JWY3_MICAN Epoxyqueuosine reductase; OS = Microcystis aeruginosa (strain NIES-843) OX=449447; GN = queG PE=3 SV=1
MVTETQIKEKALELGFHGVGIASVDSQDSAVSHLKSWLERGYHADMDWMTNPKRQDITTLWPEVRSLICLALNYYTPQQHSQEQNHGKISRYAWGRDYHKVLSKKLKALSQWLESQGEQIQTRYYVDTGPVQDKVWAQRAGIGWIAKNGNLITRNYGSWVFLAEILTNLPLEPDRPHSDHCGTCSRCLSSCPTQAIVSPYVVDANRCIAYHTIENRAVTLPTEIAKNLQGWVAGCDICQDVCPWNQRFAQVTDVEDFQPRPENLSPRLDELANLTIEEWDRRFISSALRRIKPQQWRRNAQANLAHSPHPAQDDN

SEQ ID NO: 78486 - protein, 315 aa, Microcystis aeruginosa
  REGION 1..315: note = tr|L7E7R3|L7E7R3_MICAE Epoxyqueuosine reductase; OS = Microcystis aeruginosa TAIHU98 OX=1134457 GN=yjeS PE=3; SV = 1
MVTETQIKEKALELGFHGVGIASVDSQDSAVSHLKSWLERGYHADMDWMTNPKRQDIKTLWPEVRSLICLALNYYTPQQHSQEQNHGKISRYAWGRDYHKVLSKKLKALSQWLESQGEQIQTRYYVDTGPVQDKVWAQRAGIGWIAKNGNLITRNYGSWVFLGEILTNLPLEPDRPHSAHCGTCSRCLSACPTQAIVSPSVVDANRCIAYHTIENRAVTLPTEIAKNLQGWVAGCDICQDVCPWNQRFAQVTDVEDFQPRPENLSPKLEELANLTIEEWDRRFISSALRRIKPQQWRRNAQANLAHSPHPPQDDN

SEQ ID NO: 78487 - protein, 315 aa, Microcystis flosaquae
  REGION 1..315: note = tr|A0A3E0LS89|A0A3E0LS89_9CHRO Epoxyqueuosine reductase OS=Microcystis flos-aquae DF17 OX=2060470; GN = queG PE=3 SV=1
MVTETQIKEKALELGFHGVGIASVDSQDSAVSHLKSWLERGYHADMDWMTNPKRQNIKTLWPEVRSLIGLALNYYTPQQHSQEQNHGKISRYAWGRDYHKVLSKKLKALSQWLESQGEQIQTRYYVDTGPVQDKFWAQRAGIGWIAKNGNLITRNYGSWVFLAEILTNLPLEPDRPHSDHCGTCSRCLSSCPTQAIVSPYVVDANRCIAYHTIENRAVTLPTEIAKNLQGWVAGCDICQDVCPWNQRFAQVTDVEDFQPRPENLSPRLDELANLTIEEWDRRFISSALRRIKPQQWRRNAQANLAHSPHPAQDDN

SEQ ID NO: 78488 - protein, 315 aa, Microcystis flosaquae
  REGION 1..315: note = tr|A0A3E0L9F4|A0A3E0L9F4_9CHRO Epoxyqueuosine reductase OS=Microcystis flos-aquae TF09 OX=2060473; GN = queG PE=3 SV=1
MVTETQIKEKALELGFHGVGIASVDSQDSAVSHLKSWLERGYHADMDWMTNPKRQDIKTLWPEVRSLICLALNYYTPQQHSQEQNHGKISRYAWGRDYHKVLSKKLKALSQWLESQGEQIQTRYYVDTGPVQDKVWAQRAGIGWIAKNGNLITRNYGSWVFLGEILTNLPLEPDRPHSAHCGTCSRCLSACPTQAIVSPYVVDANRCIAYHTIENRAVTLPTEIAKNLQGWVAGCDICQDVCPWNQRFAQVTDVEDFQPRPENLSPKLEELANLTIEEWDRRFISSALRRIKPQQWRRNAQANLAHSSNPLQDDN

SEQ ID NO: 78489 - protein, 315 aa, unidentified
  source 1..315: note = Microcystis novacekii
  REGION 1..315: note = tr|A0A552IT75|A0A552IT75_9CHRO Epoxyqueuosine reductase OS=Microcystis novacekii Mn_MB_F_20050700_S1D; OX = 2486266 GN=queG PE=3 SV=1
MVTETQIKEKALELGFHGVGIASVDSQDSAVSHLKSWLERGYHADMDWMTNPKRQDIKALWPEVRSLICLALNYYTPQQHSQEQNHGKISRYAWGRDYHKVLSKKLKALSQWLESQGEQIQTRYYVDTGPVQDKVWAQRAGIGWIAKNGNLITRNYGSWVFLAEILTNLPLEPDRPHSAHCGTCSRCLSACPTQAIVSPYVVDANRCIAYHTIENRAVTLPTEIAKNLQGWVAGCDICQDVCPWNQRFAQVTDVEDFQPRPENLSPRLGELANLTIEEWDRRFISSALRRIKPQQWRRNAQANLAHSPHPVQDDN

SEQ ID NO: 78490 - protein, 315 aa, unidentified
  source 1..315: note = Microcystis panniformis
  REGION 1..315: note = tr|A0A0K1S9H8|A0A0K1S9H8_9CHRO Epoxyqueuosine reductase OS=Microcystis panniformis FACHB-1757 OX=1638788; GN = queG PE=3 SV=1
MVTETQIKEKALELGFHGVGIASVDSQDSAVSHLKSWLERGYHADMDWMTNPKRQDIKTLWPEVRSLICLALNYYTPQQHSQEQNHGKISRYAWGRDYHKVLSKKLKALSQWLESQGEQIQTRYYVDTGPVQDKVWAQRAGIGWIAKNGNLITRNYGSWVFLAEILTNLPLEPDRPHSAHCGTCSRCLSACPTQAIVSPYVVDANRCIAYHTIENRAVTLPTEIAENLQGWVAGCDICQDVCPWNQRFAQVTDVEDFQPRPENLSPRLEELANLTIEEWDRRFISSALRRIKPQQWRRNAQANLAHSPHPAQDDN

SEQ ID NO: 78491 - protein, 315 aa, unidentified
  source 1..315: note = Microcystis panniformis
  REGION 1..315: note = tr|A0A552Q3X9|A0A552Q3X9_9CHRO Epoxyqueuosine reductase OS=Microcystis panniformis Mp_MB_F_20051200_S9; OX = 2486223 GN=queG PE=3 SV=1
MVTETQIKEKALELGLHGVGIASVDSQDSAVSHLKSWLERGYHADMDWMTNPKRQDIKTLWPEVRSLICLALNYYTPQQHSQEQNHGKISRYAWGRDYHKVLSKKLKALSQWLESQGEQIQTRYYVDTGPVQDKVWAQRAGIGWIAKNGNLITRNYGSWVFLGEILTNLPLEPDQPHSAHCGTCSRCLSACPTQAIVSPYVVDANRCIAYHTIENRAVTLPTEIAKNLQGWVAGCDICQDVCPWNQRFAQVTDVEDFQPRLENLSPKLEELANLTIEEWDRRFISSALRRIKPQQWRRNAQANLTHSPNPVQDDN

SEQ ID NO: 78492 - protein, 315 aa, Microcystis sp.
  REGION 1..315: note = tr|A0A2L2XLT0|A0A2L2XLT0_9CHRO Epoxyqueuosine reductase OS=Microcystis sp. 0824 OX=1502726 GN=queG PE=3; SV = 1
MLTETQIKEKALELGFHGVGIASVDSQDSAVSHLKSWLERGYHADMDWMTNPKRQDIKTLWPEVRSLICLALNYYTPQQHSQEQNHGKISRYAWGRDYHKVLSKKLKALSQWLESQGEQIQTRYYVDTGPVQDKVWAQRAGIGWIAKNGNLITRNYGSWVFLGEILTNLPLEPDRPHSAHCGTCSRCLSACPTQAIVSPHVVDANRCIAYHTIENRSVTLPTEIAKNLQGWVAGCDICQDVCPWNQRFAQVTDVEDFQPRPENLSPRLDELANLTIEEWDRRFISSALRRIKPQQWRRNAQANLAHSPNPLQDDN

SEQ ID NO: 78493 - protein, 315 aa, Microcystis sp.
  REGION 1..315: note = tr|I4IJG8|I4IJG8_9CHRO Epoxyqueuosine reductase; OS = Microcystis sp. T1-4 OX=1160279 GN=queG PE=3 SV=1
MVTETQIKEKALELGFHGVGIASVDSQDSAVSHLKSWLERGYHADMDWMTNPKRQDIKTLWPEVRSLICLAINYYTPQQQSQEQNHGKISRYAWGRDYHKVLSKKLKALSQWLESQGEQIQTRYYVDTGPVQDKVWAQRAGIGWIAKNGNLITRNYGSWVFLSEILTNLPLEPDRPHSAHCGTCSRCLSACPTQAIVSPYVVDANRCIAYHTIENRAVTLPTEIAKNLQGWVAGCDICQDVCPWNQRFAQVTDVEDFQPRPENLSPRLDELANLTIEEWDRRFISSALRRIKPQQWRRNAQANLAHSLNPAQDDN

SEQ ID NO: 78494 - protein, 315 aa, unidentified
  source 1..315: note = Microcystis viridis
  REGION 1..315: note = tr|A0A552H510|A0A552H510_MICVR Epoxyqueuosine reductase OS=Microcystis viridis Mv_BB_P_19951000_S68D; OX = 2486270 GN=queG PE=3 SV=1
MVTETQIKEKALELGFHGVGIASVDSQDSAVSHLKSWLERGYHADMDWMTNPKRQDIKTLWPEVRSLIGLALNYYTPQQHSQEQNHGKISRYAWGRDYHKVLSKKLKALSQWLESQGEQIQTRYYVDTGPVQDKFWAQRAGIGWIAKNGNLITRNYGSWVFLGEILTNLSLEPDRPHSAHCGSCSRCLSACPTQAIVSPYVVDANRCIAYHTIENRAVTLPTEIAKNLQGWVAGCDICQDVCPWNQRFAQVTDVADFQPRPENLSPRLDELANLTIEEWDRRFISSALRRIKPQQWRRNAQANLAHSPNPVQDDN

SEQ ID NO: 78495 - protein, 315 aa, unidentified; identical to SEQ ID NO: 78485
  source 1..315: note = Microcystis viridis
  REGION 1..315: note = tr|A0A3G9K3I1|A0A3G9K3I1_MICVR Epoxyqueuosine reductase OS=Microcystis viridis NIES-102 OX=213615; GN = queG PE=3 SV=1

SEQ ID NO: 78496 - protein, 315 aa, unidentified
  source 1..315: note = Microcystis wesenbergii
  REGION 1..315: note = tr|A0A552MBY8|A0A552MBY8_9CHRO Epoxyqueuosine reductase OS=Microcystis wesenbergii Mw_MB_S_20031200_S109D OX=2486241 GN=queG PE=3 SV=1
MVTETQIKEKALELGFHGVGIASVDSQDSAVSHLKSWLERGYHADMDWMTNPKRQDIKTLWPEVRSLIGLALNYYTPQQHSQEQNHGKISRYAWGRDYHKVLSKKLKALSQWLESQGEQIQTRYYVDTGPVQDKVWAQRAGIGWIAKNGNLITRNYGSWVFLGEILTNLPLEPDRPHSAHCGTCSRCLSACPTQAIVSPSVVDANRCIAYHTIENRAVTLPTEIAKNLQGWVAGCDICQDVCPWNQRFAQVTDVEDFQPRPENLSPRLEELANLTIEEWDRRFISSALRRIKPQQWRRNAQANLAHSPNPVQDDN

SEQ ID NO: 78497 - protein, 315 aa, unidentified
  source 1..315: note = Microcystis wesenbergii
  REGION 1..315: note = tr|A0A3E0LQZ1|A0A3E0LQZ1_9CHRO Epoxyqueuosine reductase OS=Microcystis wesenbergii TW10 OX=2060474; GN = queG PE=3 SV=1
MPTETQIKEKALELGFHEVGIASVDSQDSAVSHLKSWLERGYHADMDWMTNPKRQDIKTLWPEVRSLICLALNYYTPQQHSQEQNHGKISRYAWGRDYHKVLSKKLKALSQWLESQGEQIQTRYYVDTGPVQDKVWAQRAGIGWIAKNGNLITRNYGSWVFLGEILTNLTLEPDRPHSAHCGTCSRCLSACPTQAIVSPSVVDANRCIAYHTIENRSVTLPTEIAKNLQGWVAGCDICQDVCPWNQRFAQVTDVEDFQPRPENLSPRLDELANLTIEEWDRRFISSALRRIKPQQWRRNAQANLAHSPNPAQDDN

SEQ ID NO: 78498 - protein, 314 aa, Microscilla marina
  REGION 1..314: note = tr|A1ZJ68|A1ZJ68_9BACT Epoxyqueuosine reductase; OS = Microscilla marina ATCC 23134 OX=313606 GN=queG PE=3; SV = 1
MNTVQIEKNTRLVKKKAKDLGFEFCGISEATFLEEEAPRLETWLKQKMQGEMGYMANHFDKRLDPRLLVDNAKSVVSLLYNYYPQEDIAQTQQNESYKVSKYAYGTDYHFVIKDKLKELFAFIQQEIGEVGGRVFVDSAPVMDKAWAQKSGVGWIGKHSNLLNRKMGSFFFIAELILDLTLMPDAPTQDYCGTCTRCIDACPTDAIVEPYVVNGSQCISYFTIELKDEIPQEVKGKFENWIFGCDICQDVCPWNRFSKPHQEPLFEPKPGLNQMTKQDWEEITEDVFRDLFRKSAVKRTKIKGLKRNISFVSNP

SEQ ID NO: 78499 - protein, 313 aa, unidentified
  source 1..313: note = Microscillaceae bacterium
  REGION 1..313: note = tr|A0A3C0IFB2|A0A3C0IFB2_9BACT Epoxyqueuosine reductase OS=Microscillaceae bacterium OX=2053581 GN=queG; PE = 3 SV=1
MITQQAIKSRNTQLIKQKAQELGFLYCGISAAGFLEQEAPKLAEWLQKNMHGEMAYMANHFDKRLDPRLLVEGAKSVITVLLNYFPKQDLAATTTLHVSKYAYGEDYHTVVKQKLKGLMEAIHEEIGQVSGRAFVDSAPVMDKAWAQKSGAGWIGKHSNLINRKAGSFFFIGELILDLPLVYDSPVGDYCGTCTRCIDACPTEAIVAPYVVDGSRCISYFTIELKNEIPNEVKGKFQDWVFGCDICQDVCPWNRFSTPHQVPAFEPIAELQQWSKQDWEEVTEEVFNRVFRKSALKRAKLKGLQRNIRFVATP

SEQ ID NO: 78500 - protein, 321 aa, unidentified
  source 1..321: note = Microscillaceae bacterium
  REGION 1..321: note = tr|A0A349E0E9|A0A349E0E9_9BACT Epoxyqueuosine reductase OS=Microscillaceae bacterium OX=2053581 GN=queG; PE = 3 SV=1
MNAIQVEKHTTLIKQKAKDLGFEFCGVSRAEFLEEEAPRLETWLKEKMQGEMAYMANHFDKRLDPRLLVEDAKSVVSLVYNYFPEEDLAQQNELEQSPEEESYKISKYAYGRDYHFVIKDKLRTLFEFIQENIGEVGGRVFVDSAPVMDKAWAKKSGLGWIGKHSNLINRQMGSFFFIAELILDLELIPDGPIKDYCGTCTRCIDACPTDAIIEPYVVDGSRCISYFTIELKEEIPTKVKGQFENWIFGCDICQDVCPWNRFSKPHQEPLFEPHPTLKNMRKQDWEEITEEVFRELFRKSAVKRTKLKGLKRNIRFVSSPE

SEQ ID NO: 78501 - protein, 363 aa, Microvirga aerophila
  REGION 1..363: note = tr|A0A512BPM8|A0A512BPM8_9RHIZ Epoxyqueuosine reductase OS=Microvirga aerophila OX=670291 GN=queG PE=4; SV = 1
MVRIARPDAIPLAPERLQAWLAEGYHGSMDWMAETAERRADPQALWPEVRSVILLGLNYGPVDDPLATLGQKDRASISVYARNRDYHDVIKGKLKEAAGFLASRASSDVKVFVDTAPVMEKPLAEAAGLGWQGKHTVIVSREFGNWLFLGAIFTTAELPADAPERDHCGSCRRCLDVCPTKAFPAPYQLDARRCISYLTIEHKGHIPADLREGVGNRVFGCDDCLAVCPWNKFAQAGREARLVQRDDLAALPLAELARLDDPAFRVRFAGTPIKRTGRDRFIRNILIAIGNSGDPALAGEAVRLLDDASPLVRAMAVWAIGRLLPSETVAAHRNGRWEREDDADVREEWRRIAPAASRAEAAA

SEQ ID NO: 78502 - protein, 333 aa, Microvirga guangxiensis
  REGION 1..333: note = tr|A0A1G5LAC7|A0A1G5LAC7_9RHIZ Epoxyqueuosine reductase OS=Microvirga guangxiensis OX=549386; GN = SAMN02927923_04085 PE=4 SV=1
MDWMVETADRRADPRTLWPEVRSIILLGVNYGPTTDPLATLSQKDRGSISIYARNRDYHDVIKGKLKEIAGFLAAKASSDVKVFVDTAPVMEKPLAEAAGLGFQGKHTVIVSRDFGNWLFLGAIFTTAELPVDEPEQNHCGSCRRCLDVCPTNAFPAPFQLDARRCISYLTIEHKGHIPEELRPGIGNRIFGCDDCLAVCPWNKFAKASREAKLMQREDLAALPLAELARLDDPNFRTRFSGTPIKRTGRDRFIRNVLVAIGNSGDAALADEAVRLLDDPSPLVRAMAIWAIGRLMPRETVASLSTGRFERESEEDVRNEWNRVLSVREGAAA

SEQ ID NO: 78503 - protein, 329 aa, unidentified
  source 1..329: note = Microvirga lotononidis
  REGION 1..329: note = tr|I4YTX2|I4YTX2_9RHIZ Uncharacterized Fe-S protein; OS = Microvirga lotononidis OX=864069 GN=MicloDRAFT_00039790; PE = 4 SV=1
MAETAERRADPRTLWPEVRSIILLGLNYAPSGNPLAELARTDRGYISVYARNRDYHDVIKGKLKEAAGFLASKASSDVKVFVDTAPVMEKPLAEAAGLGWQGKHTVVVSREFGDWLFLGAIFTTAELPPDAPERDHCGSCRRCLDICPTNAFPAPYQLDARRCISYLTIEHKGHIPAELRPGIGNRIFGCDDCLAVCPWNKFAQAGREARLVQRNDLAALPLAELARLDDPSFRVRFAGTPVKRTGRDRFIRNVLIAIGNSRDAALADEALRLLDDASPLVRAMAVWALARLLPPEALARHAEERLKREDDPDVREEWRRGMTAARAVA

SEQ ID NO: 78504 - protein, 386 aa, unidentified
  source 1..386: note = Microvirga ossetica
  REGION 1..386: note = tr|A0A1B2EPL2|A0A1B2EPL2_9RHIZ Epoxyqueuosine reductase OS=Microvirga ossetica OX=1882682 GN=queG PE=3; SV = 1
MRRPGLLESEELKRAFVARAKALGFEIVRIARPDAIPLAPERLKTWIEAGHHGSMDWMAETAERRADPRTLWPEVRSVILLGLNYGPAENPLAELERTDCGYISVYARNRDYHDVIKGKLKEVAGFLASRASSDVKVFVDTAPVMEKPLAEAAGLGWQGKHTVIVSREFGNWLFLGAIFTTAELPADEPERDHCGSCRRCLDICPTNAFPAPYRLDARRCISYLTIEHKGHIPAELRPGIGNRIFGCDDCLAVCPWNKFAQAGREARLVQREDLASLPLAELARLDDPAFRARFSGTPIKRTGRDRFIRNVLVAIGNAGDVGLAGEAVRLLDDASPLVRAMAAWAVGRLLPPETVARHAEERMEKETDPDVREEWRRAKAPIRALA

SEQ ID NO: 78505 - protein, 388 aa, Microvirga sp.
  REGION 1..388: note = tr|A0A2Z3IFU4|A0A2Z3IFU4_9RHIZ Epoxyqueuosine reductase OS=Microvirga sp. 17 mud 1-3 OX=2082949 GN=queG; PE = 3 SV=1
MGALRQPRLLEGEALKRAFVERAQALGFDTVRVARPDSIPLAPERLKAWLAEGYHGAMDWMVETAERRSDPRTLWPEVHSVILLGLNYGPAEDPLAALTLKDRGTISVYARNRDYHDVIKGKLKEAAGLLAAKGGADVKVFVDTAPVMEKPLAQAAGLGWQGKHTVIISRDFGNWLFLGAIFTTAELPVDAPERDHCGSCRRCLDICPTNAFPEPYRLDARRCVSYLTIEHKEHIPEDLRAGIGNRIFGCDDCLAVCPWNKFAQTAREARLAQRDDLAALPLAELARLDDPAFRTRFAGTPIKRTGRDRFVRNVLIAIGNSGERGLAAEAVRLLDDPSPLVRAMAVWALSRLAPDEVARHAAGRREHEADEDVRAEWERALAPGEVPA

SEQ ID NO: 78506 - protein, 384 aa, Microvirga sp.
  REGION 1..384: note = tr|A0A2T7U6E6|A0A2T7U6E6_9RHIZ Epoxyqueuosine reductase OS=Microvirga sp. KLBC 81 OX=1862707 GN=queG; PE = 3 SV=1
MKQDGEALKRAFVERAKQIGFDTIRIAAPDSIPLAPERLKAWLKAGHHGSMDWMVETAERRADPRTLWPEVRSIILLGVNYGPTSDPLAALSKKDCGSISIYARNRDYHDVIKGKLKEIAGFFAARASSDVKVFVDTAPVMEKPLAEAAGLGFQGKHTVIVSREFGNWLFLGAIFTTAELPADEPERNHCGSCRRCLDVCPTNAFPAPFQLDARRCISYLTIEYKGHIPEELRPGIGNRIFGCDDCLAVCPWNKFAQASREVKLMQRDDLAALPLSELARLDDPSFRTRFSGTPIKRTGRDRFIRNVLIAIGNSGDAALADEAVRLLDDPSPLVRAMAVWALGRLLPHEAIVPLSAERFEHESDADVRREWNRVLSVKEDAHAA

SEQ ID NO: 78507 - protein, 334 aa, Microvirga subterranea
  REGION 1..334: note = tr|A0A370HLL6|A0A370HLL6_9RHIZ Epoxyqueuosine reductase OS=Microvirga subterranea OX=186651; GN = DES45_104389 PE=4 SV=1
MEWMAETAERRSDPQALWPEVRSVILLGLNYGPAEDPLAGLALKDRASISVYARNRDYHDVIKGKLKEAAGFLAAKASSDVKVFVDTAPVMEKPLAAAAGLGWQGKHTVVVSREFGNWLFLGAIFTTAELLEDEPERDHCGSCRRCLDVCPTNAFPAPYQLDARRCISYLTIEHKGHIPADLREGIGNRVFGCDDCLAVCPWNKFAQAGREARLVQRDDLAALPLAELARLDDPTFRTRFAGTPIKRTGRDRFIRNVLIAIGNSGDASLAPEAVRLLDDASPLVRAMAVWAIARLLPAEEVSAHREARRDIETDEDVRREWRRALSGIPDEAAA

SEQ ID NO: 78508 - protein, 384 aa, unidentified
  source 1..384: note = Microvirga vignae
  REGION 1..384: note = tr|A0A0H1RGW2|A0A0H1RGW2_9RHIZ Epoxyqueuosine reductase OS=Microvirga vignae OX=1225564 GN=queG PE=3 SV=1
MKTNGEALKRAFVERAKQIGFDMIRIAAPDSIPFAPERLKAWLEAGHHGSMDWMVDTAERRADPRTLWPEVRSIILLGVNYGPTSDPLAALSHKDCGSISIYARNRDYHDVIKGKLKEVAGFLAAKASSDVKVFVDTAPVMEKPLAEAAGLGFQGKHTVIVSREFGNWLFLGAIFTTAELPVDEPERNHCGSCRRCLDICPTNAFPAPFQLDARRCISYLTIEHRGHIPEELRSGIGNRIFGCDDCLAVCPWNKFAQASREVKLMQRDDLAALPLSELARLDDPSFRMRFSGTPIKRTGRDRFIRNVLIAIGNSGEAALADEAIRLLDDPSPLVRAMAVWAIGRLLPHEAIVSLGSERFKHESDADVRGEWKRVLSVKEETHAA

SEQ ID NO: 78509 - protein, 368 aa, Microvirgula aerodenitrificans
  REGION 1..368: note = tr|A0A2S0PAI0|A0A2S0PAI0_9NEIS Epoxyqueuosine reductase OS=Microvirgula aerodenitrificans OX=57480; GN = queG PE=3 SV=1
MSASIPENTDYRELTDRVKEWARDLGFTDIKITRASLPVGAETGLESWLAAGFHGDMDYMARHGFKRARPSELVPGSRTVISVRLNYWPGSAHDADQQLADPDRAYISRYALGRDYHKVLRNRLQKLAERIQQAVGPFGHRAFTDSAPVMEVALASQSGLGWRGKHTLLLTREQGSLFFLGELFTDLPLDVDQAIEPHCGRCTRCIDVCPTGAIVAPYTVDARRCISYLTIELQGAIPEQLRPLLGNRIYGCDDCQLVCPWNRFAVPTAEADFAPRHGLDSASLVGLFAWSAADFAERLAGSAIHRIGHERWLRNIAVALGNAPTTPAVLAALQSRLDDPSALVREHVHWAWARHGQSGGHESCADKE

SEQ ID NO: 78510 - protein, 368 aa, Microvirgula sp.
  REGION 1..368: note = tr|A0A329B929|A0A329B929_9NEIS Epoxyqueuosine reductase OS=Microvirgula sp. AG722 OX=2183901 GN=queG; PE = 3 SV=1
MSASIPENTDYRELTDRVKEWARDLGFTDIKITRASLPVGAETGLESWLAAGFHGDMDYMARHGFKRARPAELVPGSRTVISVRLNYWPGSAHDADQQLADPDRAYISRYALGRDYHKVLRNRLQKLAERIQQAVGPFGHRAFTDSAPVMEVALASQSGLGWRGKHTLLLTREQGSLFFLGELFTDLPLDVDQAIEPHCGRCTRCIDVCPTGAIVAPYTVDARRCISYLTIELQGAIPEPLRPLLGNRIYGCDDCQLVCPWNRFAVPTAEADFAPRHGLDSASLVGLFAWSAADFAERLAGSAIHRIGHERWLRNIAVALGNAPTTPAVLAALQSRLDDPSALVREHVHWAWARHGQSGGHESCADKE

SEQ ID NO: 78511 - protein, 352 aa, unidentified
  source 1..352: note = Minicystis rosea
  REGION 1..352: note = tr|A0A1L6L0E4|A0A1L6L0E4_9DELT Epoxyqueuosine (OQ) reductase QueG OS=Minicystis rosea OX=888845; GN = A7982_00579 PE=4 SV=1
MTAATTDPTTLVKERAHALGFDIVGIARADEPLGVEHERYRAFVDRGMHGSLGWLADHAAVRRRLDGAEILAGAKSVVCVGRRYARTAAEEAQDPPLARGIARYARGQDYHVFLRKKLRKLAAFVRGLGPEVEARAFLDTEPVLERAWAARAGIGFVGKNGLVITPGQGSYQILGEVVTTLALVPDVPIAERCGSCTRCLDACPTQAFPEPFVLDARRCISYWTIEEAGAPPDDLKAAIGEHLFGCDVCQEVCPFNRTAPPSAEKTVPFRPLERWGTLDLASLVTLPAERWEEVAEGSPMYRARQSGVARNAALVAANRLARGQGGDDERRAVEAAREHADPIVRATVKRSG

SEQ ID NO: 78512 - protein, 377 aa, unidentified
  source 1..377: note = Minwuia thermotolerans
  REGION 1..377: note = tr|A0A2M9FX42|A0A2M9FX42_9PROT Epoxyqueuosine reductase OS=Minwuia thermotolerans OX=2056226 GN=queG; PE = 3 SV=1
MTISISDPAGLKAAIRTRALDLGFAETGVTAPAGIALAGERLDAFLAAGRQGDMDWMAERAAWRRDPAALWPAARSIVMLATNYGPDHDPLALLDHPGRGAVSAYAARRDYHDVVKKRLKALGRWLVDETGCEIKVFVDTAPVMEKPLAAAAGLGWQGKHTNLVSRSAGSWTFLGAIFTTIDLPPDEAGGDHCGACRRCLDVCPTDAFPAPYQLDANRCIAYLTVEHRGPIPHEFRAAIGNRIFGCDDCLAICPWNKFAKVSRDDRLAMREEILNAPLAELLELDDAAFRRMFAQTPVKRLGRDRFLRNVLIAAGNAGDESLSTRVEVLLDDASPLVRGAAVWALSRIGGPGRLAAARARCEPVERDADVLAEWSRL

SEQ ID NO: 78513 - protein, 351 aa, Mitsuaria sp.
  REGION 1..351: note = tr|A0A1A9HTS0|A0A1A9HTS0_9BURK Epoxyqueuosine reductase OS=Mitsuaria sp. 7 OX=1658665 GN=queG PE=3 SV=1
MVEVRAWALEFGFSQIGVAHVDLSDAEAGLQAWLDAGFHGEMQYMAAHGLKRARPAELVPGTISILTARMDYLPEAAGDDWQDREWAAMRDPSRAQVSLYARGRDYHKVLRQRLQQLADRIQDRVGTMGHRVFTDSAPVLEVELASRSGIGWRGKHTLTLHRDSGSMFFLGEIYLDLELPASEPVTAHCGQCRACLDACPTGAIIAPYRLDARRCISYLTIEQDGPIPIEFREAIGNRIYGCDDCQLACPWNKFARRNALPDFDWREPLGNASLLSLFAWDEATFLKRTEGSAIRRIGHARWQRNIAVAMGNALRQDLTPDLRAQMRAALEAASQDATPLLAEHISWALDS

SEQ ID NO: 78514 - protein, 238 aa, Mitsuaria sp.
  REGION 1..238: note = tr|A0A5C6YW73|A0A5C6YW73_9BURK tRNA epoxyqueuosine(34) reductase QueG (Fragment) OS=Mitsuaria sp. TWR114 OX=2601731 GN=queG PE=4 SV=1
MVEVRAWAHELGFSQIGVAHVDLSDAEAGLQAWLDAGFHGEMQYMAAHGLKRARPAELVPGTISILTARMDYLPEAIGPEWQAREWAALADPARAQVSLYARGRDYHKVLRQRLQQLADRLQARVGPMGHRVFTDSAPVLEVELASRSGIGWRGKHTLTLHRDSGSMFFLGEIYLDLALPPSEPVSAHCGQCRACLDACPTGAIIAPYRLDARRCISYLTIEQDGPIPVEFRAAIGNR

SEQ ID NO: 78515 - protein, 379 aa, unidentified
  source 1..379: note = Mixta gaviniae
  REGION 1..379: note = tr|A0A2L0IK06|A0A2L0IK06_9GAMM Epoxyqueuosine reductase OS=Mixta gaviniae OX=665914 GN=queG PE=3 SV=1
MSHPLDLQQLAQDIKQWGLSLGFQQVGICDTDLSAEEPRLQAWLDKQYHGEMEWMARHGMMRARPHELLPGTLRVISVRMNYLPAKAAFASTLKNPRLGYVSRYALGRDYHKVLRNRLKKLGDLIRERCETANFRPFVDSAPLLERPLAARAGLGWTGKHSLILNREAGSWFFLGELLINLPLPVDKPQEEQCGRCVACITTCPTGAIVEPYVVDARRCISYLTIELEGAIPEAFRPLIGNRIYGCDDCQLICPWNRFGQLTDEDDFSPRAALHAPPLTELFLWDEAKFLRITEGSAIRRIGHLRWLRNVAVALGNAPWDEAHIAVLSRRLGENAMLDEHIEWAIAQQKRRRAENAIEVQRPQQKRLVRAVEKGLPRDA

SEQ ID NO: 78516 - protein, 379 aa, unidentified
  source 1..379: note = Mixta sp.
  REGION 1..379: note = tr|A0A506V6K3|A0A506V6K3_9GAMM Epoxyqueuosine reductase OS=Mixta sp. BIT-26 OX=2562439 GN=queG PE=3 SV=1
MSHPLDLQQLAQDIKQWGLALGFQQVGICDTDLSLEEPRLQAWLEQQRHGEMEWMARHGMMRARPHELLPGTLRVISVRMNYLPAKAAFASTLKNPRLGYVSRYALGRDYHKVLRNRLKKLGDLIQQRCAEANFRPFVDSAPVLERPLAAKAGLGWTGKHSLILNREAGSWFFLGELLINLPLPIDRPQEAQCGRCVACITTCPTGAIVEPYVVDARRCISYLTIELEGAIPEELRPLIGNRIYGCDDCQLICPWNRFGQLTDEDDFSPRAALHAPPLTELFAWDEAKFLRITEGSAIRRIGHLRWLRNVAVALGNAPWEAANITALESRLGENSMLDEHIEWAIAQQLAKRRASAVEVQPSKKLRLIRAVEKGLPRDA

SEQ ID NO: 78517 - protein, 379 aa, unidentified
  source 1..379: note = Mixta theicola
  REGION 1..379: note = tr|A0A2K1QBB4|A0A2K1QBB4_9GAMM Epoxyqueuosine reductase OS=Mixta theicola OX=1458355 GN=queG PE=3 SV=1
MSHPLDLQQLAQDIKQWGLSLGFQQVGICDTDLSLEEPRLQAWLDKQYHGEMEWMARHGMMRARPHELLPGTLRVISVRMNYLPAKAAFASTLKNPRLGYVSRYALGRDYHKVLRNRLKKLGDLIRERCEAVNFRPFVDSAPLLERPLAAKAGLGWTGKHSLILSREAGSWFFLGELLIDLPLPVDRPQEEQCGRCVACITTCPTGAIVEPYVVDARRCISYLTIELEGAIPEAFRPLIGNRIYGCDDCQLICPWNRFAQLSDEDDFSPRAALHAPPLTELFAWDEAKFLRITEGSAIRRIGHLRWLRNIAVALGNAPWDAENIAALSSRLGENAMLDEHITWALEQQKIKRAENAIEVQRPQQKRLVRAIEKGLPRDA

SEQ ID NO: 78518 - protein, 364 aa, unidentified
  source 1..364: note = Mizugakiibacter sediminis
  REGION 1..364: note = tr|A0A0K8QR99|A0A0K8QR99_9GAMM Epoxyqueuosine reductase OS=Mizugakiibacter sediminis OX=1475481 GN=queG; PE = 3 SV=1
MSAPAPSPPAGIDYAALAADIRRWGAELGFQQVGIADVRLAEDEAHLLDWLQAGYHGSMDYMARHGVKRSRPAELQPGTLRVISVRMNYAPADIGEAWSVLRDPTLGYVSRYALGRDYHKLIRSRLQKLAERIAAVTGPFGYRAFADSAPVLEKALARNAGLGWTGKHTLLLNREAGSYFFLGELYTDLPLPVDAPVSAHCGRCTRCIDVCPTQAIVAPYKLDARRCISYLTIERREAIPPELRPLIGNRIFGCDDCQLVCPWNRYAQAATEPDFAPRHALGSSRLVELFAWSEEEFLARTEGMAIRRAGYEGWLRNVAVALGNAPYSGEVVAALQARADHPSALVREHVAWALEEQRRKRGQP

SEQ ID NO: 78519 - protein, 385 aa, Moellerella wisconsensis
  REGION 1..385: note = tr|A0A0H2QKQ9|A0A0H2QKQ9_9GAMM Epoxyqueuosine reductase OS=Moellerella wisconsensis OX=158849 GN=queG; PE = 3 SV=1
MATQLDLNLLAQQIKQWGTDVGFQQIGICDTDLTAEEPKLQQWLDKQYQGEMDWMARHGMMRARPHELLPGTLRVISVRMNYLPAKASFASTLSNPNLAYVSRYALGRDYHKLLRQRLKKLGDRIKEYCQEFNYQDEINFRPFVDSAPILERPLAAKAGLGWVGKHSLILNREAGSWFFLGELLINLPLPVDQPVEEQCGRCVACMTTCPTGAIVAPYTVDARRCISYLTIELEGAIPEEFRPLMGNRIYGCDDCQLICPWNRFSQLTDEEDFSPRRALHTPELLDLFSWNEEKFLRITEGSAIRRIGYLRWLRNISVALGNAPYQDSIILALQEKRGIDAMLDEHLEWAISQQRQRREENAVNIQTSQQKRLVRAISKGLPRDA

SEQ ID NO: 78520 - protein, 385 aa, Moellerella wisconsensis
  REGION 1..385: note = tr|A0A0N0ZAE1|A0A0N0ZAE1_9GAMM Epoxyqueuosine reductase OS=Moellerella wisconsensis ATCC 35017; OX = 1354267 GN=queG PE=3 SV=1
MAIQLDLNLLAQQIKQWGTDVGFQQIGICDTDLTAEEPKLQQWLDKQYQGEMDWMARHGMMRARPHELLPGTLRVISVRMNYLPAKASFASTLSNPNLAYISRYALGRDYHKLLRQRLKKLGDRIKEYCQDFNYQDEINFRPFVDSAPILERPLAAKAGLGWVGKHSLILNREAGSWFFLGELLINLPLPVDQPVEEQCGRCVACMTTCPTGAIVAPYTVDARRCISYLTIELEGAIPEEFRPLMGNRIYGCDDCQLICPWNRFSQLTDEEDFSPRRALHTPELLDLFSWNEEKFLRITEGSAIRRIGYLRWLRNISVALGNAPYQDSIILALQEKRGIDAMLDEHLEWAISQQRQRREENAVNIQTSQQKRLVRAISKGLPRDA

SEQ ID NO: 78521 - protein, 319 aa, unidentified
  source 1..319: note = Moheibacter sediminis
  REGION 1..319: note = tr|A0A1W1ZSK5|A0A1W1ZSK5_9FLAO Epoxyqueuosine reductase OS=Moheibacter sediminis OX=1434700 GN=queG PE=3; SV = 1
MEFLTRNTANPNSLLKKSNLIKQRALELGFGSCGIAKAEFLEEEAKHLESWLHKGMHGKMSYMENHFDMRLDPRLLVDGAKSVVSLTYNYFPEKIQENHSYKIAKYAYGTDYHFVVKDKLKELLNFIQEEIGEVNGRAFVDSAPILEHAWAKKSGIGWVGKNSLTLSKQKGSFFFLAELILDLDLEYDSPIQTDHCGSCTKCIDSCPTEAILPNKTVDGSKCISYFTIELKEEIPSEMSGKFGDWIFGCDVCQDVCPWNRFSLPHREEKFNPNEELLNYSKSEWEDITEDVFRKIFAKSPVKRTKFEGIKRNIDFIKPN

SEQ ID NO: 78522 - protein, 341 aa, unidentified
  source 1..341: note = Monaibacterium marinum
  REGION 1..341: note = tr|A0A2C9CTR3|A0A2C9CTR3_9RHOB Epoxyqueuosine reductase OS=Monaibacterium marinum OX=1690039; GN = SAMN06273572_105180 PE=4 SV=1
MDAARIRVEAQAQGFARMGVCAPDAIPHAADRLGQFLAKDMHGQMGWMADRANWRGDPTALWPEARSVIMLAEPYTPDVDPLSLLEQPEIGAISVYARNKDYHDLVKKRLKRLGRWLVEQTGCQIKVFVDTAPVMEKPLAQAAGLGWQGKHTNLLSRDLGNWFFLGSIFTTLELEQDTAGVEKCGSCTACLDACPTGAFPAPFQLDARRCISYLTIEHKGLVDLELREKLGNRIYGCDDCLAVCPWNKFAQEARDAGYWARVELVAPRLDDLVKLTDATFREVFAGSPIKRIGRDRFVRNVLYAIGNSGQPDLRPCAQDLTDDPDPAVADAARWAAERLAT

SEQ ID NO: 78523 - protein, 324 aa, unidentified
  source 1..324: note = Mongoliibacter ruber
  REGION 1..324: note = tr|A0A2T0WGX7|A0A2T0WGX7_9BACT Epoxyqueuosine reductase OS=Mongoliibacter ruber OX=1750599 GN=queG PE=3; SV = 1
MVGKCTITQQMEKDKYAKIIKNQAKNLGFDFCGIAKAGFLEEEAPKLESWLNQNHHGKMAYMANHFDKRLDPTKLVEGAKTVISLIYNYFPENELSAGVEDYKLAKYAYGTDYHFVIKDKLKKLLKDLQAEIGDFEGRVFVDSAPVMERQWAQKSGLGWLGKNSLLLNKQMGSFFFLAEMIIDLEVTADPPMVKDYCGTCTKCLDACPTDAIVQAGVVDGSRCISYLTIELKESIPSEFKGKTENWVFGCDICQDVCPWNRFSKPHQEPDFQPHPDLLGFSKHDWEEMTEETFQKVFKKSALKRTKFEGLKRNVSFASEKYNSE

SEQ ID NO: 78524 - protein, 317 aa, unidentified
  source 1..317: note = Moorea bouillonii
  REGION 1..317: note = tr|A0A1U7N172|A0A1U7N172_9CYAN Epoxyqueuosine reductase OS=Moorea bouillonii PNG OX=568701 GN=queG PE=3; SV = 1
MDIPVTSTEVKQKARSLGFHKVGIAAVDVDHHDSAEQNLKAWLALGYQADMAWMANPRRLGIRGCMPEVKSVICVALNYYTPHQRPENPEYGKISRYGWGRDYHKVMHKKLKELTCWLQAQAEEIQVRYYADTGPVQDKVWAQRSGIGWIAKNGNVITREYGSWVFLGEVLTNLALTPDTPHTSHCGSCTRCIQACPTGAITKPFVVDANRCIAYHTIENRAANLPESIKPHLDGWVAGCDICQDVCPWNQRFAKETDVVEFQPYPENVAPRLTELATISDQEWNRRFPASALRRIKPNMLRRNAQANIDASQKSVD

SEQ ID NO: 78525 - protein, 317 aa, unidentified
  source 1..317: note = Moorea producens
  REGION 1..317: note = tr|F4XMK4|F4XMK4_9CYAN Epoxyqueuosine reductase; OS = Moorea producens 3L OX=489825 GN=queG PE=3 SV=1
MDISVTSTEVKQKAHSLGFHKVGIAAVDVDHNDSAEQNLKAWLGLGYQAEMDWMANPRRLDIRACMPKVKSVISVALNYYTPQQRPESPEYGKISRYGWGRDYHKVMHKKLKELTFWLQAQAEEIQVRYYADTGPVQDKVWAQRSGIGWIAKNGNVITREYGSWVFLGEVLTNLALTPDTPHTSHCGSCTRCIQACPTGAITKPFVVDANRCIAYHTIENRAENLPESIKPHLEGWVAGCDICQDVCPWNQRFAKETDVVEFQPYPWNVAPRLTELATISDQEWNRRFPASALRRIKPNMLRRNAQANIDASQKSVD

SEQ ID NO: 78526 - protein, 320 aa, unidentified
  source 1..320: note = Moorea producens
  REGION 1..320: note = tr|A0A1D8TPK4|A0A1D8TPK4_9CYAN Epoxyqueuosine reductase OS=Moorea producens PAL-8-15-08-1 OX=1458985; GN = queG PE=3 SV=1
MDIPVTSTEVKQKAHSLGFHKVGIAAVDVDHHDSAQQNLNAWLGLGYQADMAWMANPRRLDIRACMPEVESVISVALNYYTPHQRPESPEYGKISRYGWGRDYHKVMHKKLKELTFWLQAQAEEIQVRYYADTGPVQDKVWAQRSGIGWIAKNGNVITREYGSWVFLGEVLTNLALTPDTPHTSHCGSCTRCIQACPTGAITKPFVVDANRCIAYHTIENRAANLPESIKPHLEGWVAGCDICQDVCPWNQRFAKETDVVEFQPYPENVAPRLTELATISDQEWNRRFPASALRRIKPNMLRRNAQANIDASQKSVDYSD

SEQ ID NO: 78527 - protein, 374 aa, Moorella glycerini
  REGION 1..374: note = tr|A0A0C7N559|A0A0C7N559_9THEO Epoxyqueuosine reductase-QueG OS=Moorella glycerini OX=55779 GN=1326 PE=4; SV = 1
MQAAELKDWAARRGLVLGIAPARPFERGEAALKWRAERGLKTPFASGRPEERCQPRLLYPAARSLVVVARPHLEPAGPPGPGEGLIACYALGPDYHGELQGHLQDLAGLLQQGGAGFTAIQVDSGPLLEREAACLAGLGYYGASCNLIIPGLGSGTSLGLVITDLELEPGVPLEPAACEDCGRCLAACPTGALVAPGRLDPERCLSYLTQKRGVIPGELRPLFGQYIWGCDACQDVCPANRRERAALREVARRQEGRVRVVAGAGHEVTWPDLATIITMDKEQFNRTFGPTALAWRGKTVLQRNAAIALGNLGDPGAMVSLAQALRAPAAILRGHAAWALGRLGAAARPALEKARREETDPWVRREIDEALAFL

SEQ ID NO: 78528 - protein, 449 aa, Moorella glycerini
  REGION 1..449: note = tr|A0A0C7NM76|A0A0C7NM76_9THEO Twin-arginine translocation pathway, signal sequence OS=Moorella glycerini OX=55779 GN=833 PE=4 SV=1
MERAKMDRRTFLKAMGLAGIVASVPEVALAAGAANIDPPYRTRASHGDEYRKVLPKAFYRTIENRPGYIGTTKIVGEIKPFEDAREHGFAQLVRRVAQKDWSGDWGAVIKEVVEEKAKLMAKFTPQQREDFLWSNAITMASDQWHVNLGPGRWESIPISKEKLELPPEIMTAKLKKVAKWYGIEQIGVCEIDESMRPFFYKIGRTQGTLRGGAPGFKDEGRPIPWPYPHKYCIVIGNFEDLQGTKANTGGLNNISVATECSDDDIYPLYLESIIRGLGYDARAQYIAGTEDFLQTPFAVKAGLGELGRNGQLVSPWGAHIRLAAVTTNMPLVPDRPIDFGLQEFCKTCKKCAENCPAGAISDANEPTNVNGTLRYEFDAKKCAKYRFVYGCATCAAVCPYSKPDNLVHSAGRVIGRNPAGARLLKTLDDFFYGRNPKPRDLERFAPWRL

SEQ ID NO: 78529 - protein, 367 aa, Moorella humiferrea
  REGION 1..367: note = tr|A0A2T0AWF9|A0A2T0AWF9_9THEO Epoxyqueuosine reductase OS=Moorella humiferrea OX=676965 GN=queG PE=4; SV = 1
MREKELKEWALERGLVLGIAPALPFQRGLAALKWREERGIITPFACGSLEERCHPRLLYPMVRSLIVVAKPHPDPATVSLPAKEFIARYALGTDYHDELQNSLQELAQYLRQNGAEFTAVQVDSGPLLEREAAYLAGLGYYGANCNLIIPGMGSAVSLGILLTDLELEPGVPAEPVTCAECGRCLKACPTKALVAPGRLDPARCLSYLTQARGVVPSDLRPFFKRYLWGCDVCQEVCPAAGREPAQLWEQGAEGNSPEGSYRFTELAAILAMDNKQFTKVFGTTPLAWRGKTVIQRNAVLLLGNWGDLFALPLLEQALRSPSPIVRGHAAWALGRLGPSARSLLNKARLEEKDVLVRREIDEALEAI

SEQ ID NO: 78530 - protein, 374 aa, Moorella mulderi
  REGION 1..374: note = tr|A0A151ATK4|A0A151ATK4_9THEO Epoxyqueuosine reductase OS=Moorella mulderi DSM 14980 OX=1122241 GN=queG; PE = 4 SV=1
MQVAELKDWASRRGLVLGIAPVQPFERGEAALKWRAERGLKTPFASGRPEERCQPQLLYPAARSLVVVASPHPELAGPPGPGEGLIARYALGPDYHGELQGHLQDLAGLLQQGGAGFTALQVDSGPLLEREAACLAGLGYYGASCNLIIPGLGSGASLGLVITDLELEPGVPLEPAACEDCGRCLAACPTGALVAPGRLDPERCLSYLTQKRGVIPGELRPLFGQYIWGCDACQDVCPANRRERAALREVARRQEGRVRVVAGAGHEVTRPDLATIITMNKEQFHRTFGSTALAWRGKTVLQRNAAIALGNLGDPGAMVSLAQALRSPAAILRGHAAWALGRLGAAARPALEKARREETDPWVLLEIEEALAFL

SEQ ID NO: 78531 - protein, 364 aa, Moorella sp.
  REGION 1..364: note = tr|A0A101EB08|A0A101EB08_9THEO 4Fe-4S ferredoxin, iron-sulfur binding protein OS=Moorella sp. 60_41; OX = 1635264 GN=XD51_0741 PE=4 SV=1
MGLTEELQQEAARLGLRLGAVPATTVFERGLDALQHRERENWATPFVGGSIEVRCRPYALFPGARTVIAVARPWYIPAVGPPGPGEGLVAMSFRGEDYHRVLERLLVPLAERLKDWGASWAVVQVDKGPLIEREAAFAAGLGYYGYNCSLMVPDMGSRVALGLIITDLRLEATLPLKEPKCRECGRCLAACPTGALVAPYTLHPGRCLSYLTQKRGFLPSDLRPYLGQRLFGCDVCQDVCPENEGLALRSGPSFVHPGLADLLRLRGGRFRELFGTTALAWRGKTVLQRNAVVALVNTGYDGEEAVRELQELLLHPSPVLRGHAAWALGKLGAAEGRRALERAYGEEGDPLVREEIGRALKGEG

SEQ ID NO: 78532 - protein, 365 aa, Moorella sp.
  REGION 1..365: note = tr|A0A4P6BLM1|A0A4P6BLM1_9THEO 4Fe-4S ferredoxin; OS = Moorella sp. E306M OX=2572683 GN=E306M_06820 PE=4 SV=1
MLASELKEWAARRGLVLGIALVRPFEFGEEALKWRAERGLKTPFANGSLEERCRPRLLYPAARSLVVVASPHPEPAVPPGPGEGLIARYALGPDYHAVLQGHLRDLAGLLQQAGASLTAIQVDSGPLLEREAAYLAGLGYYGASCNLIIPGLGSGASLGLLITDLDLEPGVPLEPAACEGCGRCLAACPSGALVAPGRLNPERCLSYLTQKRGVIPAELRPFFKQYIWGCDVCQEACPANRRERGGLRAEITSGSEQRLTWPDLAAIVTMDKDQFKQTFGPTALGWRGKTVLQRNAVLLLGNRGDPQALAPLAQALRAPAAVLRGHAAWALGHLGAAGRPVLEKARREETDPWVCREIEEALAFQ

SEQ ID NO: 78533 - protein, 386 aa, Moorella thermoacetica
  REGION 1..386: note = tr|A0A1D7X7U9|A0A1D7X7U9_MOOTH Epoxyqueuosine reductase OS=Moorella thermoacetica OX=1525 GN=queG PE=4; SV = 1
MGSTKLTKELKEWAAARGLVLGVAPVRPFERGRQALAWLARRGLATPFATGRPEERYRPDLLYPAARSLIVVARPHPQPVRPPGPGEGRIARYALGPDYHLELRASLEALAGMLQRAGARLTAVQVDNGPLLEREAAYLAGLGYYGASCNLIIPGLGTGCALGLLITDLELEAGQPLTQATCRNCGRCLAACPTGALVAPGRLHPELCLSYLTQKRGVIPVELRPALGRHIWGCDACQEVCPENRAEFSPADRGASRAGPDGQWQGPGRDLPDGGTGTGLIYPELATIITMDKAGFNRVFGGTALAWRGKTLLQRNAAIALGNLGDARALGPLQQALRAPAAVLRGHAAWALGRLGPPARPALAVALATETDPWVRREIRTALDSC

SEQ ID NO: 78534 - protein, 445 aa, Moorella thermoacetica
  REGION 1..445: note = tr|A0A0S6UFP9|A0A0S6UFP9_MOOTH Uncharacterized Fe-S protein OS=Moorella thermoacetica Y72 OX=1325331; GN = MTY_1563 PE=4 SV=1
MPDLRVQLRPGQVPAVGDIRRRLLGYSQENFGLALVHSEDQTNPARKRGIFKVKRGTGGVGSTKLTKELKEWAAARGLVLGVAPVRPFERGRQALAWLARRGLATPFATGRPEERYRPDLLYPAARSLIVVARPHPQPVRPPGPGEGRIARYALGPDYHLELRASLEALAGMLQRAGARLTAVQVDNGPLLEREAAYLAGLGYYGASCNLIIPGLGTGCALGLLITDLELEAGQPLTQATCRNCGRCLAACPTGALAAPGRLHPELCLSYLTQKRGVIPVELRPALGRYIWGCDACQEVCPENPPEFSPADRGASRAGPDGQWQGSGRDLPDGGTGTGLIYPELATIITMDKAGFNRVFGGTALAWRGKTILQRNAAIALGNLGDARALGPLQQALRAPAAVLRGHAAWALGRLGPPARPALAVALATETDPWVRREIRTALDSC

SEQ ID NO: 78535 - protein, 397 aa, Moraxella atlantae
  REGION 1..397: note = tr|A0A378Q406|A0A378Q406_9GAMM Epoxyqueuosine reductase OS=Moraxella atlantae OX=34059 GN=queG PE=3 SV=1
MPISTNAIPVNDLSPAHDVGLHALKTWIKAQAADLGFADCGVVHPDNPVFAKQLAALQTYLANGYHGELHFLQDHHDKRANPAQLVMGTQSIISVRMDYLTDAPTPRAVTDNALPNHGIIARYARGRDYHKTMRGRLKTLAERLRQHLATHYPTLAEGFIYRPFSDSAPIFERALAEQAGLGWTGKHTLLIHRAGGSFFVLGELFTSLPLPPDAPVGAHCGSCSACMAICPTQAIVAPYTVDARLCISYLTIELDGEIPPPLRPLMGNRVFGCDDCQLICPWNKFAKRAQVADFAPRHGLDDVGLLTLWAWDEAAFLRHTEGSALRRTGYANFMRNVAVALGNAPFDPTIVTALRAKRDSLNANTQRHVDWALAEQTRKQRQNTPSCATITPDLNAP

SEQ ID NO: 78536 - protein, 397 aa, Moraxella atlantae
  REGION 1..397: note = tr|A0A1B8QG04|A0A1B8QG04_9GAMM Epoxyqueuosine reductase OS=Moraxella atlantae OX=34059 GN=queG PE=3 SV=1
MPISTNAIPVNDLSPAHDVGLHALKAWIKAQAADLGFADCGVVHPDNPVFAKQLAALQTYLANGYHGELHFLQDHHDKRANPAQLVMGTQSIISVRMDYLTDVPTPRAVTDNALPNHGIIARYARGRDYHKTMRGRLKTLAERLRQHLATHYPTLAEGFIYRPFSDSAPIFERALAEQAGLGWTGKHTLLIHRAGGSFFVLGELFTSLPLPPDAPVEAHCGSCSACMAICPTQAIVAPYTVDARLCISYLTIELDGEIPPPLRPLMGNRVFGCDDCQLICPWNKFAKRAQVADFAPRHGLDDVGLLTLWAWDEAAFLYHTEGSALRRTGYANFMRNVAVALGNAPFDPTIATALRAKRDSLNANTQRHVDWALAEQTRKQRQNTPSCATITPDLNAP

SEQ ID NO: 78537 - protein, 384 aa, Moraxella canis
  REGION 1..384: note = tr|A0A1S9ZHT4|A0A1S9ZHT4_9GAMM Epoxyqueuosine reductase OS=Moraxella canis OX=90239 GN=queG PE=3 SV=1
MTKRIPAVCVQPIDKDGVKDWICAKAAEFGFSDCGFLSVHHPLFAKQTQALKAWLDQGLNGTLDFMHDNHDKRANPALLVDGAKTIITVRMDYLHDLPKPRSVMDNTRPNHAIIARYARGRDYHKTVRQQLKKLAKAIENELPQWQHLSIGADKPFVFRPFSDSAPIFERPIADAAGLGWTGKHTLLINRQAGSFFNLGELFISLDLVGDDETHAVKAHCGSCQACMDICPTRAIIAPYTLDAAACISYLTIEHKGSIDIKYRKAIGNRIFGCDDCQLICPWNRYAKLSTVSDYAPRHGLDDIELTEVWAWSEDDFLAKTEGSPLRRTGYLHLLRNTAIALGNCQATGIKSDRIIHALKSRLGMDRMLDEHINWAISELSGQDG

SEQ ID NO: 78538 - protein, 196 aa, Moraxella catarrhalis
  REGION 1..196: note = tr|A0A198UP02|A0A198UP02_MORCA Epoxyqueuosine oQ reductase QueG OS=Moraxella catarrhalis OX=480; GN = AO384_0328 PE=4 SV=1
MTKRIPAVCVQPIDKDGVKDWICAKSAEFGFSDCGFLSVHYPLFVKQTKALKAWLDQGLNGTLDFMHENHDKRANPALLVDGAKTIITVRMDYLHDLPKPCSVMDNTRPNHAIIARYARGRDYHKTVRQQLKKLAKAIENELPQWQHLSIGADKPFVFRPFSDSAPIFERPIADAAGLGWTGKHTLLINRQAGSFF

SEQ ID NO: 78539 - protein, 127 aa, Moraxella catarrhalis
  REGION 1..127: note = tr|A0A198UP75|A0A198UP75_MORCA Epoxyqueuosine oQ reductase QueG OS=Moraxella catarrhalis OX=480; GN = AO384_0326 PE=4 SV=1
MISNTEKAIGNRIFGCDDCQLIRPWNRYAKLSTVSDYAPRHGLDDIQLTEVLAWSEDDFLAKTEGSPLRRTGYLHLLRNTAIALGNCQATGIELDRIIHALKSRLGLDRMLDEHINWAISELSGQDG

SEQ ID NO: 78540 - protein, 396 aa, Moraxella caviae
  REGION 1..396: note = tr|A0A1S9ZXY6|A0A1S9ZXY6_9GAMM Epoxyqueuosine reductase OS=Moraxella caviae OX=34060 GN=queG PE=3 SV=1
MTLAQNTPKQNSTVQNSENPPDKEAVKTWIKEQALALGFSDCGFLSVSHPVFAKEIKRLQAWLDKGYGDCLPFLKENHHLRANPALLVEGAKTIISVRMDYLCDKPAPRCVEDDARPNHAIIARYARGRDYHKTMRQKLKQLAKLIEAKLPEWQHLTDGAPFVFRPFSDSAPIFEKAAAHHAGLGWEGKHTLLIHRQAGSFFNLGELFVSLDLAAPNEDNPAKNLCGSCSACIDVCPTRAIVGARTLNAAACIAYLTIEHDGSIPTEYRKGIGNRIFGCDDCQLICPWNKFAKITQVADYAPRHSLDDISLLQVWAWSEDEFLQKSEGSPLRRTGYLNLLRNTAIALGNAPFSKDIITALQGRIGQNPMLDEHIDWALNEQRQKQLKIDCQMICDE

SEQ ID NO: 78541 - protein, 384 aa, Moraxella cuniculi
  REGION 1..384: note = tr|A0A448GTW0|A0A448GTW0_9GAMM Epoxyqueuosine reductase OS=Moraxella cuniculi OX=34061 GN=queG PE=3 SV=1
MTDLIAMQPSDDIAEVRAWIRQKAQELGFADCGFLSVHHPLFAQQTQALKQWLNQGLNGTLDFLHENHELRANPHKLVEHAKTIISVRMDYLHTTPTPRCVEDNHRPNHAIIARYARGRDYHKTVRQQLKKLAIAIENELPNWQHLHIGADKPFVFRPFSDSAPIFERPIADAAGLGWTGKHTLLINRQAGSFFNLGELFISLDLAEKNQPHATKSHCGSCSACIDICPTGAIIAPHTLDAAACISYLTIEHKGSIDHKYRKAIGNRIFGCDDCQLICPWNRYAKISTVADYAPRHGLDDIWLLDVWQWSEAEFLTKTEGSPLRRTGYLHLLRNTAIALGNCQPTDRHALNTVLNALTQRLGDNEMLDEHILWAIEQLHALSVV

SEQ ID NO: 78542 - protein, 384 aa, Moraxella cuniculi; identical to SEQ ID NO: 78541
  REGION 1..384: note = tr|A0A1N7FFL1|A0A1N7FFL1_9GAMM Epoxyqueuosine reductase OS=Moraxella cuniculi DSM 21768 OX=1122245; GN = queG PE=3 SV=1

SEQ ID NO: 78543 - protein, 384 aa, unidentified
  source 1..384: note = Moraxella macacae
  REGION 1..384: note = tr|L2F702|L2F702_9GAMM Epoxyqueuosine reductase; OS = Moraxella macacae 0408225 OX=1230338 GN=queG PE=3 SV=1
MKIPTKTLDNSDNANLDNTNTLTILKHWIKEQALDLGFSDCGVVHPDNPIFPQQLAKLKQWLADGYHGNMNFFHENHDKRANPALLVAGTKSILSVRLDYLVTPPPKRSIPDNDYPNHAIIARYARGRDYHKIMRSRLKALALRIHDKLKTDYPQFADDFVFRPFSDSAPISERPLAEQAGLGWTGKHTLLINQKSGSFFVLGELFTSLPLPADSPVLPHCGSCSACMDICPTGAIVGEQLVDARRCISYLTIELDSEIPLELRPKMGNKIFGCDDCQLVCPWNKFAKLAKIDDFNPRHNLDSSSLLDLWGWDNAIFLANTEGSPLRRTGYDNFMRNIAVALGNAPFDQNIVDKLKQKYPTLSENAQIHIDWAIKQQLAKAKLT

SEQ ID NO: 78544 - protein, 375 aa, Moraxella osloensis
  REGION 1..375: note = tr|A0A1B8PT26|A0A1B8PT26_9GAMM tRNA epoxyqueuosine(34) reductase QueG OS=Moraxella osloensis; OX = 34062 GN=A9Z61_01965 PE=4 SV=1
MLDTTNELNALKGWIKAQAKALGFADCGFVHPSNPIFSKQLDALQTWLAQGKHGDMLFFEDNHDKRANPALLVDKTQSIISVRLDYLVTPPPKRSVPDNERPNSAIIARYARGRDYHKTMRGLLKTLARLIQDKLTTDYPQYANDFVFRPFSDSAPIFERALAEQAGLGWTGKHTLLIHPQAGSFFVLGELFTSLPLAEDKKQIETTLSHCGSCRACIHVCPTHAIRKTPTGHYDVDARRCISYLTIELDGKIPVELRPKIGNRIFGCDDCQLICPWNKFAKLATIEDFNPRHRLDEVSLLELWAWDAQDFLTKTEGSPIRRTGYDNFMRNVAVALGNAPFSQAIIDKLKQKRPMLSENTQEHIDWAIQQQLSKS

SEQ ID NO: 78545 - protein, 375 aa, Moraxella osloensis
  REGION 1..375: note = tr|A0A2K8KAB0|A0A2K8KAB0_9GAMM tRNA epoxyqueuosine(34) reductase QueG OS=Moraxella osloensis; OX = 34062 GN=queG PE=4 SV=1
MLDTTNELNALKGWIKAQAKALGFADCGFVHPANPIFSKQLGALQTWLAQGKHGDMLFFEDNHDKRANPALLVDRTQSIISVRLDYLVTPPPKRSVPDNERPNSAIIARYARGRDYHKTMRGLLKTLAKLIQEKLTTDYPQYANDFVFRPFSDSAPIFERALAEQAGLGWTGKHTLLIHPKAGSFFVLGELFTSLPLAEDNKQIETVSSHCGSCRACIHVCPTHAIRKTPTGHYDVDARLCISYLTIELDGKIPVELRPKIGNRIFGCDDCQLICPWNKFAKLATIEDFNPRHRLDEVSLLELWAWDAQDFLTKTEGSPIRRTGYDNFMRNVAVALGNAPFSQAIIDKLQQKRPMLSENTQEHIDWAIEQQLSKS

SEQ ID NO: 78546 - protein, 401 aa, Moraxella pluranimalium
  REGION 1..401: note = tr|A0A1T0CIE0|A0A1T0CIE0_9GAMM Epoxyqueuosine reductase OS=Moraxella pluranimalium OX=470453 GN=queG; PE = 3 SV=1
MHSRSIAMTKPSPPPSSSQPSRIDSTTLPDVDDVKDWIRAKACELGFADCGFLSVHHPLFAEQTQALKAWLNQGLYGTLDFMHDNHELRANPHQLVDGAKTIISVRMDYLHTLPAPRRIEDNERPNHAIIARYARGRDYHKTVRQQLKKLARAIESELPNWTHLSIGADKPFVFRPFSDSAPIFERPIADAAGLGWTGKHTLLINRQAGSFFNLGELFISLDLMGDTESHPVKVHCGSCTACIDICPTQAIIAPHTLDAGACISYLTIEHKGSIDVKYRKAIGNRIFGCDDCQLICPWNRYAKIATVADYAPRHGLDEVRLLDVWAWDEDEFMAKTEGSPLRRTGYLNLLRNTAIALGNSQPDDTAKIDTITALQSRLGMDAMLDEHIYWAIDELTAAHDA

SEQ ID NO: 78547 - protein, 384 aa, Moraxella porci
  REGION 1..384: note = tr|A0A1T0CNJ7|A0A1T0CNJ7_9GAMM Epoxyqueuosine reductase OS=Moraxella porci DSM 25326 OX=573983 GN=queG; PE = 3 SV=1
MTKPSSQPSRIDSTTLPDVDAVKDWIRAKAMELGFADCGFLSVHHPLFAEQTQALKAWLNQGLHGTLDFMQDNHELRASPHKLVDGAKTIISVRMDYLHTLPNPRRIDDDNRPNHAIIARYARGRDYHKTVRQQLKKLARAIESELPNWTHLSIDADKPFVFRPFSDSAPIFERPIADAAGLGWTGKHTLLINRQAGSFFNLGELFISLDLVGKTESHPVKVHCGSCTACIDICPTKAIIAPYTLDAGACISYLTIEHKGSIDIKYRKAIGNRIFGCDDCQLICPWNRYAKLATVADYAPRHGLDEISLLEVWAWDEDEFLQKTEGSPLRRTGYLNLLRNTAIALGNSQPDDTTKADTIKALRSRLGMNAMLDEHIHWAIRELE

SEQ ID NO: 78548 - protein, 396 aa, Moraxella sp.
  REGION 1..396: note = tr|A0A496NCF3|A0A496NCF3_MORSP tRNA epoxyqueuosine(34) reductase QueG OS=Moraxella sp. OX=479; GN = queG PE=4 SV=1
MLFSISFVKIDNFDMTTAKQIETACPKALIKAWIKTQALSLGFSDCGFLSVHHDLFAKSTTHLQARLSQNLHGELKFLEENHHLRANPSLLVAGAKTIISVRMDYLHELPKPRTISDNQKPNHAIIARYARGRDYHKTMRQKLKTLAHLIQNELPNWQGLGVGAEDDFIFRPFSDSAPIFERPLADACGLGWTGKHTLLINRQAGSFFNLGELFISLDLVEKNTSTPVSSHCGSCNACIDVCPTKAIIAPYTVDAKACISYLTIEHKGSIDIKYRKAIGNRVFGCDDCQLICPWNRYAKISLVADYAPRHHLDNITLNQLWQWQESDFLSFTEGSPIRRAGYFGFMRNIAIALGNSKPKTQQEKQEVVALLNTKLGQNAILDEHILWAIHEIYTDE

SEQ ID NO: 78549 - protein, 371 aa, Moraxella sp.
  REGION 1..371: note = tr|A0A229GXT1|A0A229GXT1_9GAMM tRNA epoxyqueuosine(34) reductase QueG OS=Moraxella sp. VT-16-12 OX=2014877 GN=queG PE=4 SV=1
MPTQNSRDAIKAWIKSQALKLGFADCGFLSVNHELFAQQTERLRTWLSWDLHGSLVFLKENHHLRANPSLLVAGAKTIISVRMDYLQTSPKLRTIEDNSRPNHAIIARYARGRDYHKTMRQKLKALAKIIENELPNWHGLGVGAENAFVFRPFSDSAPIFERAIGEAVGLGWTGKHTLLINRHGGSFFNLGELFVSLTLCDDNVSIPVKNLCGSCSACINICPTNAIIAPHTLDAGACISYLTIEHKGVIDIKYRKAIGNRIFGCDDCQLICPWNKFAKLASVPDYQARHGLDDISLLDIWGWSEDEFLAKTEGSPLRRTGYMGLMRNVAIALGNSQPTDRQAVLSVLQDKLGLNHLLDEHILWAMGELTR

SEQ ID NO: 78550 - protein, 58 aa, unidentified
  source 1..58: note = Moraxellaceae bacterium
  REGION 1..58: note = tr|A0A3D3KCK1|A0A3D3KCK1_9GAMM tRNA epoxyqueuosine(34) reductase QueG (Fragment); OS = Moraxellaceae bacterium OX=1889775 GN=DIS69_08395 PE=4; SV = 1
MLDTTNELNALKGWIKAQAKALGFADCGFVHPANPIFVKQLDALQTWLAQGKHGDMLF

SEQ ID NO: 78551 - protein, 369 aa, unidentified
  source 1..369: note = Moraxellaceae bacterium
  REGION 1..369: note = tr|A0A345P474|A0A345P474_9GAMM Epoxyqueuosine reductase OS=Moraxellaceae bacterium HYN0046 OX=2283318; GN = queG PE=3 SV=1
MTRAKLPRNPDLRDNPIALKAWIQHEAKTLGFANLGVTSPNVSDQLPFLKQFLADGFAGDMHYLAENIEKRGDASLLLEGTTSVLCVQMNYLAEPPPHRYVPEAPNQAIVSRYAQGRDYHKVVRGRLKQLALRIEEQIGPFQWRPFADSAPILEKPLAERSGLGWTGKHTLLINKKAGSFFFLGELLTDLNLPFDSPATAHCGSCTACIDICPTQAIVAPYRLDARRCIAYLTIEFKGIIPIDLRHGIGNRVFGCDDCQLICPWNSFAKLSAEIDFQARHQLDRLSLLDLWQWSEQDFLSFTEGSPLRRTGYANLMRNVAVGLGNAPADPTILNALHARLGQLGDIVDEHILWAIEEQKQKAKRIDVTH

SEQ ID NO: 78552 - protein, 385 aa, Morganella morganii
  REGION 1..385: note = tr|A0A1M7MBK0|A0A1M7MBK0_MORMO Epoxyqueuosine reductase OS=Morganella morganii OX=582 GN=queG PE=3 SV=1
MSTHPDLHQLAARIKQWGRELGFQQVGICDTDLSAEEPKLQAWLDAGYQGEMDWMARHGMMRARPHELLPGTLRVISVRMNYLPAKASFAAVLQNPEQGYISRYALGRDYHKLLRQRLKQLGERIQAECDDLALENTLSYRPFVDSAPVLERPLAAKAGLGWVGKHSLILNREAGSWFFLGELLINLPLPVDTPAEEQCGRCVACMTTCPTQAIVAPYTVDARRCISYLTIELEGAIPEEFRPLMGNRIYGCDDCQLICPWNRFSQLTDEADFSPRKRLHTPELLDLFAWDEATFLRVTEGSAIRRIGYLRWLRNISVALGNAPYEDKIIIALTEKTGLADWLDEHIRWAVARQYAKRDESRIEIQTSQQKRLIRAISKGLPRDA

SEQ ID NO: 78553 - protein, 385 aa, Morganella morganii
  REGION 1..385: note = tr|J7UAY3|J7UAY3_MORMO Epoxyqueuosine reductase; OS = Morganella morganii subsp. morganii KT OX=1124991; GN = queG PE=3 SV=1
MSTHPGLHQLAARIKQWGRELGFQQVGICDTDLSAEEPKLQAWLDAGYQGEMDWMARHGMMRARPHELLPGTLRVISVRMNYLPAKASFAAVLQNPEQGYISRYALGRDYHKLLRQRLKQLGERIQAECDELALENTLSYRPFVDSAPVLERPLAAKAGLGWVGKHSLILNREAGSWFFLGELLINLPLPVDTPAEEQCGRCVACMTTCPTQAIVAPYTVDARRCISYLTIELEGAIPEEFRPLMGNRIYGCDDCQLICPWNRFSQLTDEADFSPRKRLHTPELLDLFAWDEATFLRVTEGSAIRRIGYLRWLRNISVALGNAPYEDKIIIALTEKTGLADWLDEHIRWAVARQYAKRDESRIEIQTSQQKRLIRAISKGLPRDA

SEQ ID NO: 78554 - protein, 385 aa, Morganella psychrotolerans
  REGION 1..385: note = tr|A0A1B8HL13|A0A1B8HL13_9GAMM Epoxyqueuosine reductase OS=Morganella psychrotolerans OX=368603 GN=queG; PE = 3 SV=1
MSNSPDLHALAAQIKLWGNELGFQQVGICDTDLSAEEPKLQAWLDAGYQGEMDWMARHGMMRARPHELLPGTLRVISVRMNYLPAKAAFAATLQNPALGYISRYALGRDYHKLLRQRLKQLGERIQAHCDALALNHSLSYRPFVDSAPVLERPLAAKAGLGWVGKHSLVLNRDAGSWFFLGELLINLPLPVERPVEEQCGRCVACMTTCPTQAIVAPYTIDARRCISYLTIELEGAIPEEFRPLMGNRIYGCDDCQLICPWNRFSQLTDEDDFSPRKQLHTPELLTLFAWDEATFLRITEGSAIRRIGYLRWLRNISVALGNASYEDNIVIALTAKKGLTDWLDEHIDWAIACQYVKREESGIEIQTSQQKRLIRAISKGLPRDA

SEQ ID NO: 78555 - protein, 385 aa, Morganella psychrotolerans
  REGION 1..385: note = tr|A0A1B8H8E0|A0A1B8H8E0_9GAMM Epoxyqueuosine reductase OS=Morganella psychrotolerans OX=368603 GN=queG; PE = 3 SV=1
MSNSPDLHALAAQIKQWGNELGFQQVGICDTDLSAEEPKLQAWLDAGYQGEMDWMARHGMMRARPHELLPGTLRVISVRMNYLPAKAAFAATLQNPAQGYISRYALGRDYHKLLRQRLKQLGERIQAHCDTLTSDHSLSYRPFVDSAPVLERPLAAKAGLGWVGKHSLVLNRDAGSWFFLGELLINLPLPVDQPVEEQCGRCVACMTTCPTQAIVAPYTIDARRCISYLTIELEGAIPEEFRPLMGNRIYGCDDCQLICPWNRFSQLTDEDDFSPRKQLHTPELLTLFAWDEATFLRITEGSAIRRIGYLRWLRNISVALGNAPYEDNIVIALTEKKGLADWLDEHIDWAVACQYVKRDESGIEIQTSQQKRLIRAISKGLPRDA

SEQ ID NO: 78556 - protein, 385 aa, Morganella sp.
  REGION 1..385: note = tr|A0A3D3HPB0|A0A3D3HPB0_9GAMM Epoxyqueuosine reductase OS=Morganella sp. (in: Bacteria) OX=1912315; GN = queG PE=3 SV=1
MSNSPDLHALAAQIKQWGTELGFQQVGICDTDLSAEEPKLQAWLDAGYQGEMDWMVRHGMMRARPHELLPGTLRVISVRMNYLPAKAAFAATLQNPAQGYISRYALGRDYHKLLRQRLKQLGERIQAHCDTLTLNHSLSYRPFVDSAPVLERPLAAKAGLGWVGKHSLVLNRDAGSWFFLGELLINLPLPVDQPVKEQCGRCVACMTTCPTQAIVAPYTIDARRCISYLTIELEGAIPEEFRPLMGNRIYGCDDCQLICPWNRFSQLTDEDDFSPRKQLHTPELLTLFAWDEATFLRITEGSAIRRIGYLRWLRNISVALGNAPYEDNIVIALTAKKGLADWLDEHIDWAVACQYVKRDESGIEIQTSQQKRLIRAISKGLPRDA

SEQ ID NO: 78557 - protein, 380 aa, Moritella marina
  REGION 1..380: note = tr|A0A5J6WM18|A0A5J6WM18_MORMI tRNA epoxyqueuosine(34) reductase QueG OS=Moritella marina ATCC 15381 OX=1202962 GN=queG PE=4 SV=1
MPPIDYQQLTQQIKAWGAELGFQQVGIADTDLSTYEPHFQTWLDNGYHADMDYMSRYGTMRTHPEELYPGTIRVISVRMDYLPPDALMATTLKQKDKGYISRYALGRDYHKIVRKRLKKLGDKISEHCESLDARPFVDTGPLLERPLAEKAGLGWTGKHSLILNKEAGSWFFLGEILINLPLPVDKPIENQCGKCTACLQICPTQAIVAPYSVDANRCISYLTIELFGAIPEQYRSLIGNRIYGCDDCQLICPWNRFAAITGEQDFHPRSNLHSPDLLALYAWDETYFLKQTEGSPIRRIGHERWLRNISVALGNAAYSAEIIEALTAKFAETTEMVQEHITWALQQQRAKAENIIPVLQIDKTKDKLIRMVEKALPRDA

SEQ ID NO: 78558 - protein, 380 aa, Moritella sp.
  REGION 1..380: note = tr|A0A2G2C1Z1|A0A2G2C1Z1_9GAMM Epoxyqueuosine reductase OS=Moritella sp. OX=78556 GN=queG PE=3 SV=1
MPPIDYQQLTQKIKVWGAELGFQQVGITDTDLSTYEPHFQTWLDNGYHADMDYMSRYGTMRTHPEELYPGTIRVISVRMDYLPPDALMATTLKQKDKGYISRYALGRDYHKIIRKRLKHLGEKISEHCETLDARPFVDTGPLLERPLAEKAGLGWTGKHSLILNKEAGSWFFLGEILINLPLPVDKPIENQCGKCTACLQICPTQAIVAPYSVDANRCISYLTIELFGAIPEEFRPLIGNRIYGCDDCQLICPWNRFAALTDEQDFHPRSNLHSPDLLALYAWEETYFLKQTEGSPIRRIGHERWLRNISVALGNAAYSAEIVEALETKFVETTEMVQEHITWALQQQQAKADNIIPVLQIDKTKDKLIRMIEKALPRDA

SEQ ID NO: 78559 - protein, 380 aa, Moritella sp.
  REGION 1..380: note = tr|A0A2I0F5G0|A0A2I0F5G0_9GAMM Epoxyqueuosine reductase OS=Moritella sp. Urea-trap-13 OX=2058327 GN=queG; PE = 3 SV=1
MPPIDYQQLTQQIKAWGAELGFQQVGIADTDLSTYEPHFQTWLDNGYHADMDYMSRYGSMRTHPEELYPGTIRVISVRMDYLPPDALMATTLKQKDKGYISRYALGRDYHKIVRKRLKHLGDKISEHCETLDARPFVDTGPLLERPLAEKAGLGWTGKHSLILNKEAGSWFFLGEILINLPLPVDKPIENQCGKCTACLQICPTQAIVAPYSVDANRCISYLTIELFGPIPEQYRALIGNRIYGCDDCQLICPWNRFAAITGEKDFHPRSNLHSPALLTLYAWNETYFLKQTEGSPIRRIGHERWLRNISVALGNAAYSAEIVAALEAKFGETTAMVQEHITWALQQQQTKAGSIIPVLQIDKTKDKLIRMVEKALPRDA

SEQ ID NO: 78560 - protein, 380 aa, Moritella viscosa
  REGION 1..380: note = tr|A0A090I9R4|A0A090I9R4_9GAMM Epoxyqueuosine reductase OS=Moritella viscosa OX=80854 GN=queG PE=3 SV=1
MPPIDYQQLTQQIKVWGAELGFQQVGIADTDLSTYEPHFQTWLDNGYHADMDYMSRYGTMRTHPEELYPGTIRVISVRMDYLPPDALMATTLKQKDKGYISRYALGRDYHKIIRKRLKHLGQKISEHCETLDARPFVDTGPLLERPLAEKAGLGWTGKHSLILNKEAGSWFFLGEILINLPLPIDKPIENQCGKCTACLQICPTQAIVEPYTVDANRCISYLTIELFGAIPEQYRTLIGNRIYGCDDCQLICPWNRFAAITGEQDFHPRSNLHSPELLTLYAWNEAYFLKQTEGSPIRRIGHERWLRNISVALGNAAYSPEIVEALETKFVETTEMVQEHITWALQQQQAKANNIIPILQIDKTKDKLIRMVEKALPRDA

SEQ ID NO: 78561 - protein, 380 aa, Moritella yayanosii
  REGION 1..380: note = tr|A0A330LS72|A0A330LS72_9GAMM Epoxyqueuosine reductase OS=Moritella yayanosii OX=69539 GN=yjeS PE=3 SV=1
MPPIDYQQLTQKIKVWGAELGFQQVGITDTDLSTYEPHFQTWLDNGYHADMDYMSRYGTMRTHPEELYPGTIRVISVRMDYLPPDALMATTLKQKNKGYISRYALGRDYHKIIRKRLKHLGEKISAHCETLDARPFVDTGPLLERPLAEKAGLGWIGKHSLILNKEAGSWFFLGEILINLPLPVDKPIENQCGKCTACLQICPTQAIVAPYSVDANRCISYLTIELFGAIPEEFRPLIGNRIYGCDDCQLICPWNRFAALTDEQDFHPRSNLHSPDLLALYAWEETYFLKQTEGSPIRRIGHERWLRNISVALGNAAYSAEIVEALETKFVETTEMVQEHITWALQQQQAKADNIIPVLQIDKTKDKLIRMIEKALPRDA

SEQ ID NO: 78562 - protein, 374 aa, unidentified
  source 1..374: note = Motilimonas sp.
  REGION 1..374: note = tr|A0A418YAA2|A0A418YAA2_9GAMM Epoxyqueuosine reductase OS=Motilimonas sp. PLHSC7-2 OX=2303987 GN=queG; PE = 3 SV=1
MSNIDLHKLAQDIKQWGKALGFQKVGISDIDLSQHEATLQQWLDNQYHGEMEYMARHGMMRARPAELLPGTVRVISARMDYLPPDASFAKDLKQSDTAYISRYALGRDYHKVMRARLKQLGEKIKLQVSDLNYRPFVDSAPILERPLAAKAGLGWVGKHTLVLDEESGSWFFLGEILVNIPLPVDKPVQEKCGACVACIKICPTNAIIEPYVVDARRCISYLTIELDGPIPEEFRPLIGNRIYGCDDCQLICPWNRYAQITDEQDFHPRQLLKSQELLTLLNWTEAEFLERTQGSPIRRIGFERWQRNIAVGLGNANYSEDIIVALESALEASTSELVKEHIQWALSQQKSRPSVSKKTLRLTRSIEKGLPRDA

SEQ ID NO: 78563 - protein, 384 aa, unidentified
  source 1..384: note = Motiliproteus coralliicola
  REGION 1..384: note = tr|A0A369WGA1|A0A369WGA1_9GAMM Epoxyqueuosine reductase OS=Motiliproteus coralliicola OX=2283196 GN=queG; PE = 3 SV=1
MPSKPEPQAPTQPSISASPEQLTAQVKDWAKELGFSAVGITGIDTADAVQRLEAWLNKGFHGSMGYLANHRELRRHPEQLHPGTLKVISVRMDYLPPEVETVRVLQNPNQAYISRYALGRDYHKTLRKRLVRLAKQIEQHCGSFNYRPFVDSAPVMEKPMAQRAGLGWQGKHSLLIDRKAGSYFVLGELFTDLPLVDDAPYTEDHCSRCSACIDVCPTDAIPEPYVLDARRCISYLTIESKEPIPLELRPLIGNRVFGCDDCQLVCPWNRYCHFTGESDFNPRHQLDTIELAELFQWDEATFLKKTEGSPIRRSGYQGWLRNLAVGLGNSGDKAMIEVLKQQQDNPSELVREHVAWAIEQLSSEQGPSPLPLTDRQPRKVRHLL

SEQ ID NO: 78564 - protein, 393 aa, unidentified
  source 1..393: note = Motiliproteus sp.
  REGION 1..393: note = tr|A0A1R1LWD0|A0A1R1LWD0_9GAMM Epoxyqueuosine reductase OS=Motiliproteus sp. MSK22-1 OX=1897630 GN=queG; PE = 3 SV=1
MKSPGSHSQNTRQRTDSASSEESRLDSAQLTTSIKNWAHELGFQAVGIGDIDLSRHRQPLEDWLKQGYQGEMQFMERHLDLRTDPSQLHPGTLNAICVRMEYMPPDVETVKVLQNPEQAYISRYALGRDYHKVVRKRLAQLAKRIEADYGSFNSRPFVDSAPVMEKPLAQQAGLGWQGKHGLIIDRKAGSYFVIGELLTDLPLIPDLPYSENHCRRCTACMDVCPTNAFPAPYILDARRCISYLTIELKGSIPEELRPLIGNRVFGCDDCQLVCPWNRYCHFSDETDFKPRHSLDKAELIALFNWNEEEFLKKTEGSPIRRSGYQGWLRNLAVGIGNSGAGEPAIQALSAKREQCSEMVKEHIDWALRQLTASAAIAPLPLTEKHPRKVRHLL

SEQ ID NO: 78565 - protein, 315 aa, unidentified
  source 1..315: note = Mucilaginibacter auburnensis
  REGION 1..315: note = tr|A0A2H9VVF0|A0A2H9VVF0_9SPHI Epoxyqueuosine reductase OS=Mucilaginibacter auburnensis OX=1457233; GN = queG PE=3 SV=1
MQQSRSAYSKLIKDEAKKLGFMFCGIAKAGFLEAEAPRLEAWLNAGMHGKMQYMENYFDKRLDPRLLVDGAKSVISLALNYYTDARQTDPSAPKISKYAYGQDYHAVIKDKLKQLLQTINEQIGEVGGRAFVDSAPVLDKAWAKKAGIGWVGKNSNLLNKKAGSFFFLAELIVDIELEYDSEPTADHCGTCTRCIDACPTDAIVGPYVVDGSKCISYLTIELKDELPAEFKGKMDNWMFGCDICQDVCPWNKFSVIHSEPPFDPHPDLLGLSRDDIQEITEDVFKKVFQKSAVKRTKYAGLKRNINFLKPGTTSL

SEQ ID NO: 78566 - protein, 312 aa, Mucilaginibacter frigoritolerans
  REGION 1..312: note = tr|A0A562TVN5|A0A562TVN5_9SPHI Epoxyqueuosine reductase OS=Mucilaginibacter frigoritolerans OX=652788; GN = queG PE=3 SV=1
MLQNKQQYSTLIKNEAKRLGFMFCGISKADFLEEEAPRLENWLKNNMQGEMHYMENHFDKRLDPRLLVDDAKSVISLSLNYFTDAQQIDPSGPKISKYAYGTDYHQVIKEKLKQLLDIINEQIGEVSGRAFVDSAPVLDKAWAKKAGLGWIGKNTNLISKKVGSFFFLAELIVDIELEYDIAPTADHCGTCTNCIDACPTQAIVGPYIVDGSRCISYLTIELKNEIPAEFKGKMDDWMFGCDVCQDVCPWNKFSVLHQEPAFTPHPDLLNLKKQDWEDITEDVFQKVFKNSAVKRTKYSGLKRNINFLGKDN

SEQ ID NO: 78567 - protein, 313 aa, unidentified
  source 1..313: note = Mucilaginibacter ginsenosidivorans
  REGION 1..313: note = tr|A0A5B8UYR1|A0A5B8UYR1_9SPHI Epoxyqueuosine reductase OS=Mucilaginibacter ginsenosidivorans OX=398053; GN = queG PE=3 SV=1
MQQHLTAYSKLIKKEAKNLGFMFCGIAKADFLEEEAPRLEAWLKKGMQGEMQYMENHFDKRLDPRLLVDGAKSVISLGLNYYTNQSQFDPAAPKISKYAYGDDYHQVIKAKLKQLLEIINEKIGEVHGRAFVDSAPVLDKAWAKKAALGWIGKNTNLINTKKGSFFFLAELIVDIELEYDVPATADHCGTCTRCIDACPTEAIVAPYVVDGSRCISYLTIELKNEIPGEFKGKMDNWMFGCDVCQDVCPWNRFSVLNHERSFQPKEDLLGMNKGDWEDITEDIFQKVFKNSPVKRTKYSGLKRNIEFLGNSDL

SEQ ID NO: 78568 - protein, 310 aa, unidentified
  source 1..310: note = Mucilaginibacter ginsenosidivorax
  REGION 1..310: note = tr|A0A5B8VVM5|A0A5B8VVM5_9SPHI Epoxyqueuosine reductase OS=Mucilaginibacter ginsenosidivorax OX=862126; GN = queG PE=3 SV=1
MQNRTVYSQLIKSEAQKLGFLFCGISKAGFLEEEAPRLENWLKKNMHGEMHYMENHFDKRLDPRLLVDGAKSVISLGFNYYTDNRQTDPTAPKISKYAYGIDYHTVIKDKLRLLLQIINEQIGEVGGRVFVDSAPVLDKAWAKKSGMGWIGKNANLLSKKAGSFFFLAELIIDLELEYDIAPTADHCGTCTNCIDACPTDAIVGPYVVDGSRCISYLTIELKNEIPAEFKGKMDNWMFGCDVCQDVCPWNRFSVLNTEPAFTPHPDLLHLKAADWQDITQDVFQKVFKNSAVKRTKFSGLKRNIDFLKEI

SEQ ID NO: 78569 - protein, 312 aa, Mucilaginibacter gossypii
  REGION 1..312: note = tr|A0A1G7NCQ8|A0A1G7NCQ8_9SPHI Epoxyqueuosine reductase OS=Mucilaginibacter gossypii OX=551996 GN=queG; PE = 3 SV=1
MQQNKAIYSQLIKNEAQKLGFLFCGIAKADFLEDEAPRLESWLNKNMHGEMAYMENHFDKRLDPRLLVDGAKSVISLGINYYTDQQQDDPLSPKISKYAYGIDYHTVIKDKLRLLLQIINDKIGEVGGRAFVDSAPVLDKAWARKAGMGWIGKNSNLLNKKAGSFFFLAELIIDLELEYDIAPTADHCGTCTNCIDACPTDAIVGPYVVDGSRCISYLTIELKNEIPQEFKGKMDNWMFGCDVCQDVCPWNRFSVLNTEPAFTPHPDLLHLKTADWQDITQDIFQKVFKNSAVKRTKFSGLKRNIDFLKVKG

SEQ ID NO: 78570 - protein, 312 aa, Mucilaginibacter gossypii
  REGION 1..312: note = tr|A0A5C1ICG5|A0A5C1ICG5_9SPHI Epoxyqueuosine reductase OS=Mucilaginibacter gossypii OX=551996 GN=queG; PE = 3 SV=1
MQQNKATYSQLIKSEAQKLGFLFCGIAKADFLEDEAPRLEAWLNKNMHGEMAYMENHFDKRLDPRLLVDGAKSVISLGINYYTDQQQDDPLSPKISKYAYGIDYHTVIKDKLRQLLQIINDKIGEVGGRAFVDSAPVLDKAWARKAGMGWIGKNSNLLNKKAGSFFFLAELIVDLELKYDIAPTADHCGTCTNCIDACPTDAIVGPYVVDGSRCISYLTIELKNEIPQEFKGKMDNWMFGCDVCQDVCPWNRFSVLNTEPAFTPHPDLLHLKTADWQDITQDIFQKVFKNSAVKRTKFSGLKRNIDFLKIRD

SEQ ID NO: 78571 - protein, 312 aa, Mucilaginibacter gossypiicola
  REGION 1..312: note = tr|A0A1H8JPY1|A0A1H8JPY1_9SPHI Epoxyqueuosine reductase OS=Mucilaginibacter gossypiicola OX=551995; GN = queG PE=3 SV=1
MQQNKATYSQLIKNEAQKLGFLFCGIAKADFLEDEAPRLETWLNKNMHGEMAYMENHFDKRLDPRLLVDGAKSVISLGVNYYTDQQQDDPLSPKISKYAYGIDYHTVIKDKLRLLLQIINDKIGEVGGRAFVDSAPVLDKAWARKAGMGWIGKNSNLLNKKAGSFFFLAELIIDLELEYDIAPTADHCGTCTNCIDACPTDAIVGPYVVDGSRCISYLTIELKNEIPQEFKGKMDNWMFGCDVCQDVCPWNRFSVLNTEPAFTPHPDLLHLKTADWQDITQDIFQKVFKNSAVKRTKFSGLKRNIDFLKVKG

SEQ ID NO: 78572 - protein, 311 aa, unidentified
  source 1..311: note = Mucilaginibacter gotjawali
  REGION 1..311: note = tr|A0A110B380|A0A110B380_9SPHI Epoxyqueuosine reductase OS=Mucilaginibacter gotjawali OX=1550579 GN=queG; PE = 3 SV=1
MMPQKSTVYSSLIKKEAQKLGFLFCGISKADFLEDEAPRLEAWLKKGMQGEMHYMENHFDKRLDPRLLVDGARSVISLGLNYFTEVRQADPLSPKISKYAYGDDYHYVIKEKLKELLTIIREQIGEVNGRAFVDSAPVLDKVWAKKAGLGWIGKNTNLINKRVGSFFFLAELIIDLDLNYDIAPAADHCGTCTACIDACPTEAIVAPYIVDGSRCISYLTIELKNELPPAFQGKMDNWMFGCDVCQDVCPWNKFSVLHTEPAFKPKPQLLELNKKDWEEITEDVFQKVFKNSAVKRTKFKGLKRNIDFLKS

SEQ ID NO: 78573 - protein, 314 aa, Mucilaginibacter gracilis
  REGION 1..314: note = tr|A0A495J896|A0A495J896_9SPHI Epoxyqueuosine reductase OS=Mucilaginibacter gracilis OX=423350 GN=queG; PE = 3 SV=1
MMLQNAALYTKQIKTWAHELGFMFCGIAQADFLEEEAPRLEAWLKKGFHGEMQYMENHFDKRLDPRLLVDGAKSVISLGLNYYTDARQLDASAPLISKYAYGADYHDVIKDKLKQLLQLINEHIGEVSGRGFVDSAPVLDRAWAKKAGLGWIGKNANLIGKKTGSFFFLAELIIDLELDYDVEPTADHCGTCTRCIDACPTEAIVGPAVVDGSKCISYLTIELKNEIPASFKDKLDGWMFGCDICQDVCPWNRFSVLHNQPAFEPHPDLLGMTKQDWNEITEDVFKKVFKGSAVKRTKFAGLTRNISFLSPPAP

SEQ ID NO: 78574 - protein, 311 aa, Mucilaginibacter lappiensis
  REGION 1..311: note = tr|A0A1N7CVL4|A0A1N7CVL4_9SPHI Epoxyqueuosine reductase OS=Mucilaginibacter lappiensis OX=354630 GN=queG; PE = 3 SV=1
MTQNRTIYSQLIKNEAQKLGFLFCGISKAEFLEDEAPRLESWLKKNMHGEMQYMENHFDKRLDPRLLVDGAKSVISLGINYYTNNKQNDPDAPKISKYAYGIDYHTIIKDKLRQLLQIINEKIGEVGGRVFVDSAPVLDKAWAKKAGMGWIGKNSNLLNKKAGSFFFLAELIIDLELEYDIAPTMDHCGTCTNCIDACPTDAIVGPYVVDGSRCISYLTIELKNEIPAEFKGKMDNWMFGCDVCQDVCPWNRFSILNSEPAFNPHPELLHLKADDWQDITQDVFQKVFKNSAVKRTKFTGLKRNIEFLKEI

SEQ ID NO: 78575 - protein, 317 aa, Mucilaginibacter mallensis
  REGION 1..317: note = tr|A0A1H1V9I5|A0A1H1V9I5_9SPHI Epoxyqueuosine reductase OS=Mucilaginibacter mallensis OX=652787 GN=queG; PE = 3 SV=1
MYYLCAMHSNRSAYSELIKTEAKNLGFMFCGIAKAEFLEDEAPRLEQWLKKNMHGEMRYMENHFDKRLDPRLLVDGAKSVISLGLNYYSEHKQADPLAPKISKYAYGADYHQVIKDKLKQLMEIINEKIGEVGGRAFVDSAPVLDKAWAKKAGLGWTGKNSNLINKKSGSFFFLAELIIDLDLEYDIEPTADHCGSCTRCIDACPTEAIVAPYIVDGSRCISYLTIELKDAIPQEFKGKMDNWMFGCDICQDVCPWNKFSVLNNEPSFKATPELLDMNKNDWTDITQEVFQKVFKSSAVKRTKFSGLTRNIEFLRNS

SEQ ID NO: 78576 - protein, 311 aa, Mucilaginibacter oryzae
  REGION 1..311: note = tr|A0A316HCV1|A0A316HCV1_9SPHI Epoxyqueuosine reductase OS=Mucilaginibacter oryzae OX=468058 GN=queG; PE = 3 SV=1
MQQNKQAYSQLIKSEAQKLGFLFCGIAKADFLEEEAPRLEAWLNKNMHGEMAYMENHFDKRLDPRLLVDGAKSVISLGINYYTDQTQDDPSAPKISKYAYGMDYHTVIKDKLKQLLQIINEKIGEVGGRAFVDSAPVLDKAWARKAGMGWIGKNSNLLNKKAGSFFFLAELIIDLELEYDIAPTADHCGTCTNCIDACPTNAIVGPYVVDGSRCISYLTIELKNEIPQEFKGKMDNWMFGCDVCQDVCPWNRFSVIHTEPAFTPHPDLLHLKKADWQEITRDVFQKVFKNSAVKRTRFSGLTRNISFLNNS

SEQ ID NO: 78577 - protein, 308 aa, Mucilaginibacter paludis
  REGION 1..308: note = tr|H1Y387|H1Y387_9SPHI Epoxyqueuosine reductase; OS = Mucilaginibacter paludis DSM 18603 OX=714943 GN=queG; PE = 3 SV=1
MQNTALYTKQIKNWATELGFLFCGIAKAEFLEQEAPRLESWLKKGFHGEMQYMENHFDKRLDPRLLVDGAKSVISLGLNYYTDAQQLDSDAPRISKYAYGADYHDVIKNKLKQLLQLINEHIGEVNGRGFVDSAPVLDKAWAKKAGLGWVGKNANLLNKRSGSFFFLAELIVDLELKYDIEPTADHCGTCTRCIDACPTEAIVGPAVVDGSKCISYLTIELKNEIPVFFKDKMAGWMFGCDICQDVCPWNRFSVLHNEPAFQPPPDLLSMTKGDWDEITEDVFKKVFKSSAVKRTKFTGLKRNIDFIK

SEQ ID NO: 78578 - protein, 317 aa, unidentified
  source 1..317: note = Mucilaginibacter pedocola
  REGION 1..317: note = tr|A0A1S9PF70|A0A1S9PF70_9SPHI Epoxyqueuosine reductase OS=Mucilaginibacter pedocola OX=1792845 GN=queG; PE = 3 SV=1
MQNRHAYSQLIKTEAKNLGFLFCGISKAEFLEEEAPRLENWLAKGMHGEMKYMENYFDKRLDPRLLVDGAKSVISLGLNYYTDELQLDSSAPKISKYAYGADYHTVIKDKLKLLLEFINEQIGEVGGRAFVDSAPVLDKAWAKKAGLGWVGKNSNLISKQVGSFFFLAELIVDIELEYDIEPTADHCGTCTRCIDACPTDAIVGPYIVDGSRCISYLTIELKNEIPQEFKGKMDNWMFGCDICQDVCPWNRFSVLHNEPAFKPHPELHGLKKADWEDITRDVFQKVFKNSAVKRTKFEGLQRNIKFLVPQPPEGGAK

SEQ ID NO: 78579 - protein, 312 aa, unidentified
  source 1..312: note = Mucilaginibacter phyllosphaerae
  REGION 1..312: note = tr|A0A4Y8ABT8|A0A4Y8ABT8_9SPHI Epoxyqueuosine reductase OS=Mucilaginibacter phyllosphaerae OX=1812349; GN = queG PE=3 SV=1
MQQNLSAYSQMIKTEAKNLGFLFCGIAKAEFLEQEAPRLEAWLNKGMHGEMRYMENYFDKRLDPRLLVDGARSVISLGINYYTDTKQLDPSAPKISKYAYGTDYHSVIKDKLKALLEIINQKIGEVGGRAFVDSAPVLDKAWAKKAGLGWIGKNSNLLSKQVGSFFFLAELIVDIELEYDIEPTADHCGSCTRCIDACPTDAIVGPYVVDGSRCISYLTIELKNEIPQEFKGKMDNWMFGCDICQDVCPWNRFSVLHNEPAFIPHPDLHGLKKQDWEDITADVFQKVFKNSAVKRTKFEGLKRNIEFLKKSD

SEQ ID NO: 78580 - protein, 312 aa, unidentified
  source 1..312: note = Mucilaginibacter pineti
  REGION 1..312: note = tr|A0A1G6V1S8|A0A1G6V1S8_9SPHI Epoxyqueuosine reductase OS=Mucilaginibacter pineti OX=1391627 GN=queG; PE = 3 SV=1
MQQSKIAYSQLIKNAALKLGFLFCGISKAEFLEEEAPRLEAWLKNNMHGEMQYMENHFDKRLDPRLLVDGAKSVISLGINYYTDSRQADPLAPKISKYAYGIDYHTVIKDKLRQLLHIINEKIGQVDGRVFVDSAPVLDKAWAKKSGMGWIGKNANLLNKKAGSFFFLAELIIDMELEYDIAPTADHCGTCTNCIDACPTDAIVGPYVVDGSRCISYLTIELKNEIPAEFKGKMDNWMFGCDVCQDVCPWNRFSVLNTEQAFTPHPDLLNLKAGDWQEMTQDVFQKVFKNSAVKRTKFSGLKRNIDFVSNRQ

SEQ ID NO: 78581 - protein, 311 aa, unidentified
  source 1..311: note = Mucilaginibacter polytrichastri
  REGION 1..311: note = tr|A0A1Q5ZZ37|A0A1Q5ZZ37_9SPHI Epoxyqueuosine reductase OS=Mucilaginibacter polytrichastri OX=1302689; GN = queG PE=3 SV=1
MLNNRNAYSQLIKAEAQKLGFLFCGIAKAEFLEQEAPRLESWLQKGMHGEMAYMENYFDKRLDPRLLVDGAKSVISLGLNYYSDHQQSDPNAPKISKYAFGADYHTVIKDKLKQLLAVINEQIGEVGGRAFVDSAPVLDKAWAKKAGLGWIGKNSNLISKKTGSFFFLAELIVDIELEYDIEPTADHCGTCTRCIDACPTEAIVAPQVVNGSRCISYLTIELKNEIPAEFKGKMDGWMFGCDICQDVCPWNKFSLLHQEQSFAPHPELLGMNTADWNDITEDVFRKVFKNSAVKRTKFDGLTRNISFLKKI

SEQ ID NO: 78582 - protein, 322 aa, unidentified
  source 1..322: note = Mucilaginibacter psychrotolerans
  REGION 1..322: note = tr|A0A4Y8SMB2|A0A4Y8SMB2_9SPHI Epoxyqueuosine reductase OS=Mucilaginibacter psychrotolerans OX=1524096; GN = queG PE=3 SV=1
MPQNRSAYSQMIKAEAKNLGFLFCGIAKAEFLEDEAPRLETWLNKGMHGEMRYMENHFDKRLDPRLLVDGAKSVISVALNYYTDEQQTDPSAPKLSKYAYGTDYHFVIKDKLKQLLAFINREIGEVGGRAFVDSAPVLDKAWAKKAGLGWVGKNANLLNKHAGSFFFLAELIVDIELEYDVEPTADHCGTCTRCIDACPTDAIVGPYVVDGSRCISYLTIELKDEIPAEFKGKMDNWMFGCDICQDVCPWNRFSVIHTEPAFAPHAELLGLKKEDWNDLTQDVFQKVFKNSAVKRTKFDGLKRNISFLAPQPPKGGAKNKPI

SEQ ID NO: 78583 - protein, 310 aa, unidentified
  source 1..310: note = Mucilaginibacter rubeus
  REGION 1..310: note = tr|A0A5C1HYX7|A0A5C1HYX7_9SPHI Epoxyqueuosine reductase OS=Mucilaginibacter rubeus OX=2027860 GN=queG; PE = 3 SV=1
MQQNKATYSQLIKNEAQKLGFLFCGIAKAEFLEEEAPRLEAWLNKNMHGEMAYMENHFDKRLDPRLLVDGAKSVISLGINYYTDQRQDDPSAPKISKYAYGIDYHTVIKDKLRQLLQIINEQIGEVGGRAFVDSAPVLDKAWARKAGMGWIGKNSNLLNKKAGSFFFLAELIIDLELEYDIAPTADHCGTCTNCIDACPTDAIVGPYVVDGSRCISYLTIELKNEIPQEFKGKMDNWMFGCDVCQDVCPWNRFSVLNTEPAFSPHPDLLHLKTADWQDISQDIFQKVFKNSAVKRTKFSGLKRNIDFLNG

SEQ ID NO: 78584 - protein, 312 aa, unidentified
  source 1..312: note = Mucilaginibacter rubeus
  REGION 1..312: note = tr|A0A364WKZ5|A0A364WKZ5_9SPHI Epoxyqueuosine reductase OS=Mucilaginibacter rubeus OX=2027860 GN=queG; PE = 3 SV=1
MQQNKSTYSQLIKNEAQKLGFLFCGIAKAGFLEDEALHLETWLNKNMHGEMAYMENHFDKRLDPRLLVDGAKSVISLGINYYTDKQQDDPLSPKISKYAYGIDYHTVIKDKLRLLMQIINNKIGEVGGRAFVDSAPVLDKAWARKAGMGWIGKNSNLLNKKAGSFFFLAELIIDLELEYDIAPTADHCGTCTNCIDACPTDAIVGPYVVDGSRCISYLTIELKNEIPQEFKGKMDNWMFGCDVCQDVCPWNRFSVLNTEPAFTPHPDLLHLKTADWQDITQDIFQKVFKNSAVKRTKFSGLKRNIDFLKVKG

SEQ ID NO: 78585 - protein, 359 aa, Mucilaginibacter sp.
  REGION 1..359: note = tr|A0A2J6H455|A0A2J6H455_9SPHI Epoxyqueuosine reductase OS=Mucilaginibacter sp. OX=1882438 GN=queG PE=3; SV = 1
MRRQVFNKLQHIVIIHKGYNLFKKKNYYPKFNLGHNLPITRFIYLCIVQQKLQGYSQLIKKAAAELGFLFCGISPAGFLEEEAPRLENWLKKGMHGEMKYMENYFDKRLDPRLLVDGAKSVISLGLNYYTNQKAEDPLAPKISKYAYGADYHGVIKDKLKVLLQTINEQIGEVGGRAFVDSAPVLDKAWAKKAGLGWIGKNANLISKKRGSFFFLAELIVDIELAYDVAPTADHCGDCTRCIDACPTQAIVGPYIVDGSRCISYLTIELKNEIPQEFKGKMDNWMFGCDVCQDVCPWNRFSVLHQEPAFKPNADLLGLKQQEWEELTTDVFQKVFKNSAVKRTKYDGLKRNINFLKNNS

SEQ ID NO: 78586 - protein, 309 aa, Mucilaginibacter sp.
  REGION 1..309: note = tr|A0A367GT15|A0A367GT15_9SPHI Epoxyqueuosine reductase OS=Mucilaginibacter sp. ZR32 OX=2201324 GN=queG; PE = 3 SV=1
MSRTAYSRLIKEEAKKLGFLFCGISEAGFLEEEAPRLEKWLEQNMHGEMQYMENHFDKRLDPRLLVEGAKSIISLGINYYTDAAQADPLAPKISKYAYGIDYHHVIKDKLKLLLQVINAKIGEVGGRAFVDSAPVLDKAWAKKAGLGWIGKNANLINRETGSFFFLAELIVDIELEYDIEPTADYCGTCTRCIDACPTNAIVEPYVVDGSRCISYLTIELKNEIPVEFKNKMDGWMFGCDVCQDVCPWNKFSVLHNEPSFQPRAELLELNKKEWEEITEDVFHKVFHKSAVKRTKYNGLKRNINFLKVT

SEQ ID NO: 78587 - protein, 302 aa, unidentified
  source 1..302: note = Mucilaginibacter yixingensis
  REGION 1..302: note = tr|A0A2T5J5U4|A0A2T5J5U4_9SPHI Epoxyqueuosine reductase OS=Mucilaginibacter yixingensis OX=1295612; GN = queG PE=3 SV=1
MIKAEAKNLGFLHCGIAKAGFLEEEAPRLEAWLNNNMNGQMQYMENYFDKRLDPRLLVDGAKSVISLALNYYTDNKQVDASSPKISKYAYGIDYHTVIKDKLKHLLNFIRENIGEVDGRAFVDSAPVLDKAWAKKAGLGWVGKNSNLINKQAGSFFFLAELIVDLELEYDVAPTADHCGTCTRCIDACPTDAIVGPYVVDGSKCISYLTIELKDEIPAEFKDKMDSWMFGCDVCQDVCPWNKFSVIHSEPAFNPHPDLLNLTQNDWQDISEEVYQKLFKGSAVKRTKFAGLKRNIKFLGDKD

SEQ ID NO: 78588 - protein, 287 aa, unidentified
  source 1..287: note = Mucinivorans hirudinis
  REGION 1..287: note = tr|A0A060REI3|A0A060REI3_9BACT Epoxyqueuosine (OQ) reductase QueG OS=Mucinivorans hirudinis OX=1433126; GN = BN938_3051 PE=4 SV=1
MTNLMKIIDISNSNFDDIAVVRYEMLDLEGERLKCWLSRGMEGELEYMRRSADLRRDPRAVFADVKSIIVTLTAIKKVKPHSPTLAAFAHNNPDYHILIKNKLNLLLSNIREIEPQIEGRAVVDSAPIFEKGLAVRAGLGWIGRNSLLIHPRLGSYTHIGLLLLNKDLSSECQVIEDQCPKGCSICKDNCPNGAINGDRTVDCRKCIAAMTIENCSDAYALHNHIFGCDLCQQYCPYNSDIEEIEPTIKEDWSTITKDSFRAKYRKTSLGRVSFEKIKNSLQCAKNQ

SEQ ID NO: 78589 - protein, 312 aa, unidentified
  source 1..312: note = Muribaculaceae bacterium
  REGION 1..312: note = tr|A0A4S4GH33|A0A4S4GH33_9BACT tRNA epoxyqueuosine(34) reductase QueG OS=Muribaculaceae bacterium OX=2498093 GN=queG PE=4 SV=1
MSSGPSICKDDLIDEARRLGITDIGIAAAEPVDSETMSRYRQWIADGCHGTMSYLERYPDLRADPRLIFPEARSIITAAFNYYPAQFRQPDNPRFAYYAYGRDYHEVVRERLSRLADYVTQLTGAATRVCVDTAPVLERYWAVKSGLGFKGLNSLLILPSRGSYFFLGEILTTAEITPTEPCNRRCGDCGACQRACPAGAIRGDGTVDASRCLSYLTIEYRGELPDSVNLGNRIYGCDTCQRVCPHNRKSRPTEIEDFTPSPEFLALDRDDIANLTPERFNALFRHSAIKRTKLSGLLRNLNRLSPDNQNLT

SEQ ID NO: 78590 - protein, 324 aa, unidentified
  source 1..324: note = Muribaculaceae bacterium
  REGION 1..324: note = tr|A0A3N2NQC8|A0A3N2NQC8_9BACT tRNA epoxyqueuosine(34) reductase QueG OS=Muribaculaceae bacterium Isolate-114 (HZI) OX=2486475 GN=queG PE=4 SV=1
MMIKRELFLTDCDKESIRSILFASGACAVGFAKAEPVDSEVWRGFTDWLSRGDNAGMEYMYNYPDLRRDSRLLLDGARTVISIAYSYAPAKWRNPDLGEIAAYAYGKDYHKVLRKLLKPALNEISATYSDSAFRICIDSAPVLERYWAQKAGIGFIGDNSALIVPGYGSMVFLVEILTTLDIAPDNPDTRDCGHCGACRKACPGKAIIDNCQIDCRRCISYLTIEHRGEWTLEESSEVMKTEAARNSIFGCDTCLRVCPHNRGVPPTSIEDFHPSIQMLSLYFEDIKSLKNSEDLQRLIPGSPMTRAGVSGLLRNISPDCRHCR

SEQ ID NO: 78591 - protein, 315 aa, unidentified
  source 1..315: note = Muribaculum intestinale
  REGION 1..315: note = tr|A0A1B1SCE0|A0A1B1SCE0_9BACT tRNA epoxyqueuosine(34) reductase QueG OS=Muribaculum intestinale OX=1796646 GN=A4V02_12500 PE=4 SV=1
MNTEQLDSIMRSSGAVAWGVATAESVDSEAWERRERWISDGNNARMDYLDRYPDVRRDPRNLLEEARSVIVAAYSYYPSRRQPADAPQFAWYAYGRDYHEVVRARLERVASRLDEVYDGARFRICVDTAPLMERYWAVKAGVGFVGRNAQLIVPGHGSACFLGEIVTTIPLPASTPSEGACPDGCDLCIRACPGGAISRECTVDARRCLSYLTIEHRGAFTDGMPQLGRRIYGCDACQSACPLNRGISPTDIPEFLPSEALMSLTDSDIATLTPERFSSIFSHSAVKRAKLAGLLRNLSALTPRSAAGPPSEDKI

SEQ ID NO: 78592 - protein, 317 aa, unidentified
  source 1..317: note = Muribaculum intestinale
  REGION 1..317: note = tr|A0A4S2G044|A0A4S2G044_9BACT tRNA epoxyqueuosine(34) reductase QueG OS=Muribaculum intestinale OX=1796646 GN=queG PE=4 SV=1
MMNTEQLDSIMRSSGAVAWGVATAEPVDSEAWERRERWISDGNNAGMDYLDRYPDVRRDPRNLLEEARSVIVAAYSYYPSRRQPADAPQFAWYAYGRDYHEVVRARLELAASRLEEVYAGARFRICVDTAPLMERYWAVKAGVGFIGRNAQLIVPGHGSACFLGEIVTTIPLPASTPSEGACPDGCDLCIRACPGRAISRECTVDARRCLSYLTIEHRGAFTDGMPQLGRRIYGCDACQSVCPLNRGISPTDISEFSPSEALMSLTDSDIATLTPERFSSVFSHSAVKRAKLAGLLRNLSALTPRSAAGPPSEDEIQ

SEQ ID NO: 78593 - protein, 331 aa, unidentified
  source 1..331: note = Muribaculum sp.
  REGION 1..331: note = tr|A0A1Y4CCX0|A0A1Y4CCX0_9BACT 4Fe-4S ferredoxin-type domain-containing protein OS=Muribaculum sp. An287 OX=1965623 GN=B5F81_08900 PE=4 SV=1
MPETARLIIETATREGFTGAGIAPVSETALQPLSDWLAKGYNAGMEYMGRNIRLRGNPAGLLEGARSIMVFTMPYPDSITGKSGEKYAGFAIGKDYHYIIKERLSRIAATCLPSGSRYRVFCDSAPVMERYWAEKCGLGAIGKNNFLISKASGARVLIGEILTCETFDKKTAGALRDWNDSNDRLHFNPGFCAGCGRCIEACPNGALKGRGLLDASKCISYHTVESKDRIPEYMETKGWVLGCEECLLACPFSRQPCPEQAISTEQAIRNADNDGARLCATEFYTNAGLLESLGKEGWERMDNAAFKAHFKGTAFERPGLEKLKDNINKAK

SEQ ID NO: 78594 - protein, 312 aa, unidentified
  source 1..312: note = Muribaculum sp.
  REGION 1..312: note = tr|A0A4P7VQU5|A0A4P7VQU5_9BACT tRNA epoxyqueuosine(34) reductase QueG OS=Muribaculum sp. TLL-A4 OX=2530390 GN=queG PE=4 SV=1
MSSGPSICKDDLIDEARRLGITDIGIAAAEPVDPETMSRYSQWIAEGCHGTMSYLERYPDLRADPRLILPEARSIITAAFNYYPAQFRQPDNLRFAYYAYGRDYHEVVRERLSRLADYVTQLTGAATRVCVDTAPVLERYWAIKSGLGFKGLNSLLILPSRGSYFFLGEILTTAEITPTEPCNRRCGDCGACQRACPAGAIRGDGTIDASRCLSYLTIEYRGELPDSVDLGNRIYGCDTCQRVCPHNRKSRPTEIEDFTPSPEFLALDRDEIANLTPERFNALFRHSAIKRTKLSGLLRNLNRLSPDNQNLT

SEQ ID NO: 78595 - protein, 303 aa, unidentified
  source 1..303: note = Muricauda antarctica
  REGION 1..303: note = tr|A0A1M6TH87|A0A1M6TH87_9FLAO Epoxyqueuosine reductase OS=Muricauda antarctica OX=1055723 GN=queG PE=3; SV = 1
MIKTEAKRLGFLSCGVSKAGFLEEEAPRLEKWLNQNRHGEMQYMENHFDKRLDPTKLVEGSKSVISLLLNYFPSEQQNPDSYKISKYAYGTDYHFVIKDKLKSLLHFIQEEIGEVHGRAFVDSAPVLDKAWASRSGLGWIGKHSNLLTQKVGSFYFIAELIVDLELEYDTPVTDHCGTCTACIDACPTEAIMEPYVVDGSKCISYFTIELKNEIPGEFQGKFDEWMFGCDVCQDVCPWNRFSKPHREPLFDPHPELLSFTKKDWEEITEDVFKKVFQKSAVKRAKLSGLKRNIDFIKNKNHSV

SEQ ID NO: 78596 - protein, 307 aa, Muricauda lutaonensis
  REGION 1..307: note = tr|A0A0D5YTA5|A0A0D5YTA5_9FLAO Epoxyqueuosine reductase OS=Muricauda lutaonensis OX=516051 GN=queG PE=3; SV = 1
MDKVQKHTTLIKTEAKRLGFLSCGISKAGFLEQEAPRLEKWLDDSMHGEMQYMENHFDKRLDPTKLVPGAKSVISFLLNYFPKETQKENTFKVSKYAYGTDYHFVIKHKLKSLLNFIREEIGEVHGRAFVDSAPVLDKAWATKSGLGWMGKHSNLLTKEVGSFYFIAELIVDLELEYDSAVTDHCGTCTACIDACPTEAIVEPYVVDGSKCISYLTIELKNEIPSEFQGKMEDWIFGCDVCQDVCPWNRFSKPHREPLFDPHPELLSMTKNDWEEITEDVFKRIFKKSAVKRTKFAGLKRNIDFLGK

SEQ ID NO: 78597 - protein, 306 aa, Muricauda lutimaris
  REGION 1..306: note = tr|A0A3A1N913|A0A3A1N913_9FLAO Epoxyqueuosine reductase OS=Muricauda lutimaris OX=475082 GN=queG PE=3; SV = 1
MNAEKNTQLIKTEAKRLGFLSCGISKAEFLEEEAPRLEKWLNQNMHGEMQYMENHFDKRLDPTKLVEGSKSVISLLLNYFPSEEQNSDSYKISKYAYGTDYHFVIKDKLKTLLHFIREEIGEVHGRAFVDSAPVLDKAWAAKSGLGWIGKHSNLLTQQVGSFYFVAELIVDLELEYDTPVTDHCGTCTACIDACPTDAIVQPYVVDGSKCISYITIELKNEIPSEFDGKLDDWMFGCDVCQDVCPWNRFSKSHNEPLFNPNPELLAFTKKDWEEITQDVFKKVFKKSAVKRTKLSGLKRNIDFLKK

SEQ ID NO: 78598 - protein, 306 aa, Muricauda olearia
  REGION 1..306: note = tr|A0A444VID0|A0A444VID0_9FLAO Epoxyqueuosine reductase OS=Muricauda olearia OX=552546 GN=queG PE=3 SV=1
MNATKRTQMIKTEAKRLGFLSCGISKAQFLEEEAPRLEKWLKNNMHGEMQYMENHFDKRLDPTKLVEGSKSVISLLLNYFPSQEQNQDSYKISKYAYGTDYHFVIKDKLKSLLHFIQDEIGEVHGRAFVDSAPVLDKAWAARSGLGWIGKHSNLLTQQVGSFYFIAELIVDLDLEYDAPTTDHCGTCTACIDACPTEAIVEPYVVDGSKCISYFTIELKNEIPTGFKGKLDDWMFGCDVCQDVCPWNRFSKPHSEPLFDPNPQLLSMTKKDWEEITEEVFRKVFKKSAVKRTKYGGLQRNITFLKS

SEQ ID NO: 78599 - protein, 305 aa, unidentified
  source 1..305: note = Muricauda pacifica
  REGION 1..305: note = tr|A0A2T0MJG2|A0A2T0MJG2_9FLAO Epoxyqueuosine reductase OS=Muricauda pacifica OX=1080225 GN=queG PE=3; SV = 1
MSKSRYTKLIRDEAKRLGFLSCGISKAEFLEEEAPRLEKWLNANMHGEMTYMENHFDKRLDPTKLVEGSKSVISLLLNYFPLEEQNPNSYKISKYAYGTDYHFVIKDKLKQLLHCIHEEIGEVNGRAFVDSAPVMDKAWAAKSGLGWMGKHSNLLTQQVGSFYFIAELIVDLELEYDLPVTDHCGTCTACIDACPTEAIVEPYVVDGSKCISYFTIELKSEIPTEFEDKFEDWMFGCDVCQDVCPWNRFSKPHSEPLFNPTPELLFFSKKDWEEITEDVFKKIFKKSPVKRTKFSGLKRNIDFVK

SEQ ID NO: 78600 - protein, 307 aa, Muricauda ruestringensis
  REGION 1..307: note = tr|G2PJV0|G2PJV0_MURRD Epoxyqueuosine reductase; OS = Muricauda ruestringensis (strain DSM 13258 / CIP 107369 / LMG 19739 / B1) OX=886377 GN=queG PE=3 SV=1
MGSKQKHTNLIKTEAKRLGFLSCGVSKAEFLEEEAPRLEKWLNQNMHGEMQYMENYFDKRLDPTKLVEGSKSVISLLLNYFPSKEQNPDSYKISKYAYGMDYHFVIKDKLKSLLHFIQEEIGDVHGRAFVDSAPVLDKAWAAKSGLGWIGKHSNLLTQQVGSFYFIAELIVDLDLEYDTPVTDHCGTCTACIDACPTDAIVQPYMVDGSKCISYLTIELKNEIPSEFDGKLDDWMFGCDVCQDVCPWNRFSKPHSEPLFNPTPELLSYTKKDWEEITEDVFKKIFKKSAVKRTKLSGLKRNVDFIKK

SEQ ID NO: 78601 - protein, 308 aa, Muricauda sp.
  REGION 1..308: note = tr|A0A2E3VRF2|A0A2E3VRF2_9FLAO Epoxyqueuosine reductase OS=Muricauda sp. OX=192149 GN=queG PE=3 SV=1
MLNSITKHTSMIKTEAKRLGFLSCGISKAGFLEEEAPRLEKWLNQNMHGEMQYMENHFDKRLDPTKLVEGSKSVISLLLNYFPSEEQNPDSYKISKYAYGMDYHFVIKDKLKSLLQFIQEEIGDVHGRAFVDSAPILDKAWAAKSGLGWIGKNSNLLTQQVGSFYFIAELIVDLELEYDTPVTDHCGTCTACIDACPTEAIVQPYVVDGSKCISYLTIELKNEIPSEFDGKLDEWMFGCDVCQDVCPWNRFSKPHSEPLFNPNPDLLSFTKKDWEEITEDVFKKIFKKSAVKRTKLSGLERNINFLKK

SEQ ID NO: 78602 - protein, 307 aa, Muricauda sp.
  REGION 1..307: note = tr|A0A424LKM0|A0A424LKM0_9FLAO Epoxyqueuosine reductase OS=Muricauda sp. TMED12 OX=1986608 GN=queG PE=3; SV = 1
MNALQKNTELIKTEAKRLGFLSCGISKAEFLEEEAPRLEKWLNQNMHGEMQYMENHFDKRLDPTKLVEGSKSVISLLLNYFPSEEQNSDSFKISKYAYGTDYHFVIKDKLKTLLHFIQEEIGEVCGRAFVDSAPVLDKAWAAKSGLGWIGKHSNLLTQQVGSFYFVAELIVDLELDYDSPVTDHCGTCTACIDACPTDAIVQPYMVDGSKCISYLTIELKNEIPSEFDGKLDDWMFGCDVCQDVCPWNRFSKPHNEPLFNPNPELLAFTKKDWEEITEDVFKKVFKKSAVKRTKLSGLKRNIDFLKK

SEQ ID NO: 78603 - protein, 313 aa, unidentified
  source 1..313: note = Muricauda taeanensis
  REGION 1..313: note = tr|A0A3A1NP25|A0A3A1NP25_9FLAO Epoxyqueuosine reductase OS=Muricauda taeanensis OX=1005926 GN=queG PE=3; SV = 1
MTNSKRVHTDLIKTEAKRLGFLSCGVSKAGFLEEEAPRLEKWLNQNRHGEMQYMENHFDKRLDPTKLVEGSKSVISLLLNYFPSEQQNPDSYKISKYAYGTDYHFVIKDKLKSLLHFIQEEIGEVYGRAFVDSAPVLDKAWASRSGLGWIGKHSNLLTQKVGSFYFIAELIVDLELEYDTPVTDHCGTCTACIDACPTEAIVEPYVVDGSKCISYFTIELKNEIPGEFQGKFDEWMFGCDVCQDVCPWNRFSKPHREPLFDPHPELLSFTKKDWEEITEDVFKKVFQKSAVKRAKLSGLKRNIDFIKNKNHST

SEQ ID NO: 78604 - protein, 306 aa, unidentified
  source 1..306: note = Muricauda zhangzhouensis
  REGION 1..306: note = tr|A0A1H2WZS0|A0A1H2WZS0_9FLAO Epoxyqueuosine reductase OS=Muricauda zhangzhouensis OX=1073328 GN=queG; PE = 3 SV=1
MNAAKRTQLIKAEAKRLGFLSCGVSKADFLEEEAPRLEQWLNKQMHGEMQYMEDHFDKRLDPTKLVEGSKSVISMLLNYYPSEQQNADSYKISKYAYGTDYHFVIKDKLKNLLHFIQEEIGEVHGRAFVDSAPVLDKAWAAKSGLGWIGKNSNLLTQQVGSFYFIAELIVDLELEYDNPVTDHCGTCTACIDACPTDAIVQPYVVDGSKCISYFTIELKNEIPNEFQGKLDEWMFGCDVCQDVCPWNRFSKPHSEPLFNPNPELLSFTKKDWEEITEDVFKQVFKKSPVKRTKLSGLQRNIKFLKD

SEQ ID NO: 78605 - protein, 306 aa, Muriicola sp.
  REGION 1..306: note = tr|A0A411E707|A0A411E707_9FLAO Epoxyqueuosine reductase OS=Muriicola sp. MMS17-SY002 OX=2507538 GN=queG; PE = 3 SV=1
MSSQSKNTRLIKEEAKRLGFLSCGISKSEFLEEEAPRLERWLKESMHGEMAYMENHFDKRLDPTKLVEGSKSVISLILNYYPAAVQKEDTLKVSKYAYGKDYHHVIKAKLKDLLNFIEEEIGDVHGRAFVDSAPVLDKAWAARSGLGWIGKHSNLLTQQVGSFYFIAELIVDLELDYDSPVTDHCGSCTACIDACPTEAIIQPYVVDGSKCISYLTIELKNEIPTSFKGLMDDWIFGCDVCQDVCPWNRFSKAHAEPLFNPHPDILEMNRKDWEEITEEVFKKVFRGSAVKRTKFTGLKRNIEFLK

SEQ ID NO: 78606 - protein, 414 aa, unidentified
  source 1..414: note = Mycoavidus cysteinexigens
  REGION 1..414: note = tr|A0A2Z6EY34|A0A2Z6EY34_9BURK Epoxyqueuosine reductase OS=Mycoavidus cysteinexigens OX=1553431 GN=queG; PE = 3 SV=1
MNANVDNLPDKPKQVTPLGGSQLDAGALAALVPRIRAWAQELGFNALGITDTDLSAAEPGFLAWLAAGFHGEMDYMAKHRAQRLQPAELVAGTVRVISVRMPYLPAQTTLNSEAEQGAAQADWRAIEAARLEDPTQAVISIYARGRDYHKVLRQRLQKLADRIQVEIGPFGYRAFTDSAPVFEVALAQKAHLGWRGKHTLLLHRDEGSLFFLGEIFVDLPLPVDVPQSSAPAPLENSDNPQQTEDGAYCGRCTRCIDVCPTGAIVAPYRLDARRCISYLTIELKGSIPEPLRPLLGNRVYGCDDCQLVCPWNKFARPSSVGDFAVRNKLDQASLIELFAWSESDFETRLAGSAIRRIGYQRWLRNLAVGLGNARRAAWAAGRNLEHRQLTQALHERAQDSSALVREHVQWALCQ

SEQ ID NO: 78607 - protein, 376 aa, Mycobacterium sp.
  REGION 1..376: note = tr|A0A554UBD1|A0A554UBD1_9MYCO Epoxyqueuosine reductase OS=Mycobacterium sp. KBS0706 OX=2578109 GN=queG; PE = 3 SV=1
MSGAADIKDRIRAEAFALGFDSAGFAAATPDPRLRERLELFLGEGQHGDMGWLEANADRRADPQTLWPDALTVLSLGLNYGPAEDPLLLLQQQERGVISVYAQGRDYHDVVKKKLKALGGWIHRTFKTELKVFVDTAPVMEKPLAMRAGIGWQGKHTNLVSRDWGSWLFLGEIYLAIALPPDAPEQDRCGSCHACLDICPTAAFPAPYRLDARRCISYLTIEHKGPIPREMRSLLGNRIYGCDDCLAVCPWNKFAAAGREAALAPRPELNGPALVSLLRFDDAGFRAAFSGSPIKRIGRDRFLRNVLIAIGNSADPALAPAVEPLLDDASPLVRGAAVWALGRLLGPDGLRRLAMARAEDPEAEVRDEWRAGLQAA

SEQ ID NO: 78608 - protein, 341 aa, unidentified
  source 1..341: note = Mycolicibacterium aichiense
  REGION 1..341: note = tr|A0A378RFE2|A0A378RFE2_9MYCO 4Fe-4S ferredoxin; OS = Mycolicibacterium aichiense OX=1799 GN=queG PE=4 SV=1
MRPQLSDHPTVQAVRARRRATPAPVIDADWLREICLAAGADDVAFAAVDNPDLESEREHVEAALPGTRSYISLVVRMNRDNVRSVARSVANQEFHRSGEIINEAAHRITRALEDAGHRALNPSATFPMEMDRYPGRIWVVAHKPVAVAAGLGVMGIHRNVIHPKFGNFVLLATILVDAPVSSYGAPLDYSPCLECKLCVAACPVGAIKKDGEFDFLACSVHNYREFMGGFTDWAQTIADSEDAADFRSRVTDSENASMWQSLSFKANYKAAYCLAVCPAGEDVIEPYLDDRKAFMDLVLRPLQEKVETLYVLPNSAAKAHAERRYPHKPVKVVDSGVRGRA

SEQ ID NO: 78609 - protein, 346 aa, unidentified
  source 1..346: note = Mycolicibacterium chlorophenolicum
  REGION 1..346: note = tr|A0A0J6V9K6|A0A0J6V9K6_9MYCO Epoxyqueuosine reductase OS=Mycolicibacterium chlorophenolicum OX=37916; GN = queG PE=4 SV=1
MAQKLPPRLADHPTVRKVQAHPSRPPGVIDAGWLRAICREAGVDDVGFARVADPALASEVEHVQAALPGAVSYLSLVVKMNRDNVRSTARSVANQEFHRSGEIMNEAAHRITRILQDAGYRVVNPSATFPMEMDRYPGRIWVVAHKPVAVAAGMGVMGIHRNVIHPRFGNFILLGTILVAADISTYDAPLDYSPCLECKLCVAACPVGAIKKNGDFDFVACSVHNYREFMGGFTDWVQTVADSEDAEDFRSRVSDSENASMWQSLSFKANYKAAYCLAVCPAGEEVIEPYLDDRKGFMDLVLKPLQDKVETLYVLPGSEAEAHAVKRYPHKPLKRVDSGIRGVRGR

SEQ ID NO: 78610 - protein, 346 aa, unidentified
  source 1..346: note = Mycolicibacterium chubuense
  REGION 1..346: note = tr|A0A0J6VWQ7|A0A0J6VWQ7_MYCCU Epoxyqueuosine reductase OS=Mycolicibacterium chubuense OX=1800 GN=queG; PE = 4 SV=1
MAQKLPPRLADHPTVRKVQAHPSRPPGVIDADWLRAICREAGVDDVGFARVADPALASEVEHVQAALPGAVSYLSLVVKMNRDNVRSTARSVANQEFHRSGEIMNEAAHRITRILQDAGHRVVNPSATFPMEMDRYPGRIWVVAHKPVAVAAGMGVMGIHRNVIHPRFGNFILLGTILVAADISTYDAPLDYSPCLECKLCVAACPVGAIKKNGDFDFVACSVHNYREFMGGFTDWVQTVADSEDAEDFRSRVSDSENASMWQSLSFKANYKAAYCLAVCPAGEEVIEPYLDDRKGFMDLVLKPLQDKVETLYVLPGSEAEAHAVKRYPHKPVKRVDSGIRGVRGR

SEQ ID NO: 78611 - protein, 344 aa, unidentified
  source 1..344: note = Mycolicibacterium hassiacum
  REGION 1..344: note = tr|A0A3P4A278|A0A3P4A278_MYCHD Epoxyqueuosine reductase OS=Mycolicibacterium hassiacum (strain DSM 44199 / CIP 105218 / JCM 12690 / 3849) OX=1122247 GN=queG PE=4; SV = 1
MAGQISARLADHPTVQAVRNRPRRDPGVIDAAWLRQVCLDAGVDDVGFARADDPELAAEREHADAALPGVRSYISLVVRMNRDNVRSTARSVANQEFHRSGELVNEAAHRITRALQDAGYRAINPSMSFPMEMHRYPGRIWVVAHKPIAVAAGMGVMGIHRNVIHPKFGNFILLGTVLVDGRISEYGAPLDYSPCLECKLCVAACPVGAIGKDGDFDFVACSVHNYREFMGGFTDWAQTIADSADAEDFRNRVSDAENASMWQSLSFKANYKAAYCLAVCPAGEEVIGPYLEDRKAFMDLVLRPLQEKRETLYVLPNSAAKAHAERRYPHKTVKVVDSGIRGLR

SEQ ID NO: 78612 - protein, 345 aa, unidentified
  source 1..345: note = Mycolicibacterium obuense
  REGION 1..345: note = tr|A0A0J6W1T0|A0A0J6W1T0_9MYCO Epoxyqueuosine reductase OS=Mycolicibacterium obuense OX=1807 GN=queG; PE = 4 SV=1
MVQKLPPRLAAHPTVRAVQERPSQPPGVIDADWLRTVCREAGVDDVGFARVDNPALASEVEHVEAALPGAVSYLSLVVKMNRDNVRSTARSVANQEFHRSGEIMNEAAHRVTRVLQDAGHRVINPSATFPMEMDRYPGRIWVVAHKPVAVAAGMGVMGIHRNVIHPRFGNFILLGTIVVGSEITEYGAPLDYSPCLECKLCVAACPVGAIKKNGEFDFIACSVHNYREFMGGFTDWVQTVADSADGEDFRSRVSDSENASMWQSLSFKANYKAAYCLAVCPAGEEVIEPYLDDRKAFMEVVLKPLQEKQETLYVLPGSAAEEHALKRFPHKPVKHVGSGIRGVRE

SEQ ID NO: 78613 - protein, 345 aa, unidentified
  source 1..345: note = Mycolicibacterium smegmatis
  REGION 1..345: note = tr|A0A0D6IYI3|A0A0D6IYI3_MYCSM 4Fe-4S ferredoxin; OS = Mycolicibacterium smegmatis OX=1772 GN=queG PE=4 SV=1
MGDRIPARLAEHPTVRAVRSRGAAGPRVPIDADWLRALCLEAGVDDVGFVSVDDPAVESEREHADAALPGVRSYISLVVRMNRDNVRSTARSVANQEFHRSGEALNEAAHRITRSLEDAGYRAVNPSATFPMEMDRYPGRIWVIAHKPVAVAAGMGVMGIHRNVIHPKYGNFILLGTILVAAPITSYGEPLDYSPCLECKLCVAVCPVGAIGKNGEFDFRACSVHNYREFMGGFTDWVQTVADSADADDFRSRVSDSENASMWQSLSFKPNYKAAYCLAVCPAGEDVIEPYLDDRKAFMDLVLKPLQDKKETLYVLPNSAAKEYAEKRYPHKTVKVVDGGLPRGQ

SEQ ID NO: 78614 - protein, 387 aa, Mycoplana dimorpha
  REGION 1..387: note = tr|A0A2T5BEU8|A0A2T5BEU8_MYCDI Epoxyqueuosine reductase OS=Mycoplana dimorpha OX=28320 GN=queG PE=3 SV=1
MPGAAERTDRQTQRREKLKDFLLAEAAEKGFEVCRVTRPDAIPDAPARLKEFIEAGYQGTMEWMAETRERRADPRVLWGEVRSIVLFGLNYGPDEDPRSVLARPDRAAISVYARNRDYHDVVKGRLKEIATRFAARAGEDVKVFVDTAPVMEKPLAMQAGLGWQGKHTNLVSREFGSWLFLGSMFTTADLSLDEPERDHCGSCRACLDSCPTNAFPAPYKIDARRCISYLTIEHKGPIDRELRPLIGNRIYGCDDCLAACPWNKFAATASEMKFHARDDLRAPRIAELLELDDTAFRTLFSGSPVKRIGRDRFVRNVLIAAGNSGDAALIPACERLAEDPSPLVRGMAVWALGQLMERQDFERLAARAAGEADPQVRAEYELAMEDR

SEQ ID NO: 78615 - protein, 306 aa, unidentified
  source 1..306: note = Myroides indicus
  REGION 1..306: note = tr|A0A4R7F624|A0A4R7F624_9FLAO Epoxyqueuosine reductase OS=Myroides indicus OX=1323422 GN=queG PE=3 SV=1
MNKAKYSLMIKKEALRLGFMSCGISKADFLEVEAPRLEKWLNQNMHGQMQYMENHFDKRLDPRLLVEGAKSVVSLTLNYYPQEQQREDTFKISKYAYGEDYHFVIKDKLKDLLAFIQDNIGEVDGRVFVDSAPVLDKAWAAKSGLGWIGKNNNLISRQSGSFFFIAELILDLELDADGITTDHCGTCTKCIDACPTNAIEQPYIVNGSKCISYLTIELKDAIPDEFQGEIDDWMFGCDVCQDVCPWNRFAKPHSEPRFSPKEELINYNKQEWKELTRELFNGIYKKSAVKRTKYEGLMRNIDFLSR

SEQ ID NO: 78616 - protein, 298 aa, Myroides marinus
  REGION 1..298: note = tr|A0A1H6TMN8|A0A1H6TMN8_9FLAO Epoxyqueuosine reductase OS=Myroides marinus OX=703342 GN=queG PE=3 SV=1
MIKTEAKRLGFSSCGISKATFLETEAPRLERWLNNQMHGEMSYMENHFDKRLDPRLLVEGAKSVVSLTLNYYPEERQVDDNYKISKYAYGEDYHYVIKDKLKELLAFINDEIGAVDGRVFVDSAPVLDKAWAAKSGLGWVGKNNNLINRKSGSFFFIAELIIDLELEEDGPTTDHCGTCTKCIDACPTGAIESAHIVNGSKCISYLTIELKDDIPEEFSGKLDNWMFGCDVCQDVCPWNRFSSPHKEARFIPNNELIQFSEREWKELTKETFNEIFKKSAIKRTKYEGLLRNMQFLGE

SEQ ID NO: 78617 - protein, 308 aa, Myroides marinus
  REGION 1..308: note = tr|A0A163W780|A0A163W780_9FLAO Epoxyqueuosine reductase OS=Myroides marinus OX=703342 GN=queG PE=3 SV=1
MIENKNKYTTMIKTEAKRLGFSSCGISKATFLETEAPRLERWLNNQMHGEMSYMENYFDKRLDPRLLVEGAKSVVSLTLNYYPEERQVDDNYKISKYAYGEDYHYVIKDKLKELLAFINDEIGAVDGRVFVDSAPVLDKAWAAKSGLGWVGKNNNLINRKSGSFFFIAELIIDLELEEDGPTTDHCGTCTKCIEACPTGAIESAHIVNGSKCISYLTIELKDDIPEEFSGKLDNWMFGCDVCQDVCPWNRFSSPHKEARFIPNNELIQFSKREWKELTKETFNEIFKKSAIKRTKYEGLLRNMQFLGE

SEQ ID NO: 78618 - protein, 308 aa, Myroides odoratimimus
  REGION 1..308: note = tr|A0A0U2VJN3|A0A0U2VJN3_9FLAO Epoxyqueuosine reductase OS=Myroides odoratimimus OX=76832 GN=queG PE=3; SV = 1
MIENKSKYSNIIKAEAKRLGFSSCGISKADFLEVEAPRLEQWLNKQMHGQMSYMENHFDKRLDPRLLVEGAKSVVSLTLNYYPEERQVSDSYKISKYAYGEDYHHVIKDKLKELLHFIESEIGAVDGRVFVDSAPVLDKAWAAKAGLGWVGKNNNLINRKSGSFFFIAELIIDLELEEDGPTTDHCGTCTKCIDACPTEAIESPHIVNGSKCISYLTIELKDDIPTDFSGKLDDWMFGCDVCQDVCPWNRFASPHKEQRFIPNNALIEYSKHEWKELTKETFNEIFKKSAIKRTKYEGLLRNMQFLGE

SEQ ID NO: 78619 - protein, 308 aa, Myroides odoratimimus
  REGION 1..308: note = tr|H1H3E7|H1H3E7_9FLAO Epoxyqueuosine reductase; OS = Myroides odoratimimus CIP 101113 OX=883154 GN=queG PE=3; SV = 1
MIENKSKYSNIIKAEAKRLGFSSCGISKADFLEVEAPRLEQWLNKQMHGQMSYMENHFDKRLDPRLLVEGAKSVVSLTLNYYPEERQISDSYKISKYAYGDDYHHVIKDKLKELLYFIESEIGAVDGRVFVDSAPVLDKAWAAKAGLGWVGKNNNLINRKSGSFFFIAELIIDLELEEDGPTTDHCGTCTKCIDACPTEAIESPYIVNGSKCISYLTIELKDDIPSEFSGKLDNWMFGCDVCQDVCPWNRFASPHKEQRFIPNNALIEYSKHEWKELTKETFNEIFKKSAIKRTKYEGLLRNMQFLGE

SEQ ID NO: 78620 - protein, 307 aa, Myroides odoratus
  REGION 1..307: note = tr|A0A378RUF8|A0A378RUF8_MYROD Epoxyqueuosine reductase OS=Myroides odoratus OX=256 GN=queG PE=3 SV=1
MDKKSHYAALIKAEAKRLGFLSCGISEAGFLEEEAPRLEKWLNANMHGSMQYMENHFDKRLNPTLLVEGAKSVVSLLFNYYPEQEQTDGAYKISKYAYGEDYHYVVKDKLKELLHFIHDNIGAVDGRAFVDSAPILDKAWAAKSGLGWVGKNSNLISKQVGSFFFIAELIIDLELESDGATTDHCGKCTRCIDACPTGAIESAYIVNGSKCISYFTIELKDDIPAELAGQFDNWMYGCDVCQDVCPWNRFAKPHNEPRFTPNEALMNYSNKEWEELTNEVFNDIFRKSAVKRTKYTGLVRNIKFLKE

SEQ ID NO: 78621 - protein, 307 aa, Myroides odoratus; identical to SEQ ID NO: 78620
  REGION 1..307: note = tr|H1Z5V4|H1Z5V4_MYROD Epoxyqueuosine reductase; OS = Myroides odoratus DSM 2801 OX=929704 GN=queG PE=3 SV=1

SEQ ID NO: 78622 - protein, 308 aa, Myroides phaeus
  REGION 1..308: note = tr|A0A1G8BZK0|A0A1G8BZK0_9FLAO Epoxyqueuosine reductase OS=Myroides phaeus OX=702745 GN=queG PE=3 SV=1
MIENKSKHAALIKAEALRLGFMSCGISKADFLEVEAPRLERWLNKQMHGQMSYMENHFDKRLDPRLLVEGAKSVVSLTLNYYPEETQIEDSYKISKYAYGEDYHYVIKDKLKELLYFIQSEIGDVDGRVFVDSAPVLDKAWAAKSGLGWVGKNNNLINRKNGSFFFIAELIIDLDLETDGPTTDHCGTCTKCIDACPTGAIESPYIVNGSKCISYLTIELRDDIPTEFANKLDDWMFGCDVCQDICPWNRFAKPHNEPRFIPNNELMRLEKREWRELTKETFSEIFKKSAIKRTKYDGLLRNMKFLAD

SEQ ID NO: 78623 - protein, 308 aa, Myroides profundi
  REGION 1..308: note = tr|A0A0B5RTX0|A0A0B5RTX0_9FLAO Epoxyqueuosine reductase OS=Myroides profundi OX=480520 GN=queG PE=3 SV=1
MIENKSKYSNMIKAEAKRLGFSSCGISKADFLEVEAPRLEQWLNKQMHGQMSYMENHFDKRLDPRLLVEGAKSVVSLTLNYYPEERQVSDSYKISKYAYGEDYHHVIKDKLKELLYFIESEIGAVDGRVFVDSAPVLDKAWAAKAGLGWVGKNNNLINRKSGSFFFIAELIIDLELEEDGPTTDHCGTCTKCIDACPTEAIESAHIVNGSKCISYLTIELKDDIPTEFSGKLDNWMFGCDVCQDVCPWNRFASPHKEQRFIPNNALIEYSKHEWKELTKETFNEIFKKSAIKRTKYEGLLRNMQFLGE

SEQ ID NO: 78624 - protein, 339 aa, unidentified
  source 1..339: note = Myxococcaceae bacterium
  REGION 1..339: note = tr|A0A4Q5ZJU7|A0A4Q5ZJU7_9DELT tRNA epoxyqueuosine(34) reductase QueG OS=Myxococcaceae bacterium OX=2484252 GN=queG PE=4 SV=1
MTPLPTARLRDLAQQVGFDLIGFARAEPIPPSSLLSWLEAGYDADMDWMGSRAEERLDVSVLLPGAKTVLSFANNYYRDDEPSRGSPIARYARGRDYHSTLRDRMKAFRKTINEWYPGLGTYGGVDSGPMMEKVWAARGGLGYVGKNGCLITESHGSWVLLATLILDAEVDEYPPGPVADRCGSCRRCLMACPTGALVGHRQVDARACLSYQSIENRDRDVPEAFRFKFDNLIFGCDICQQVCPLNRKPVHAEDARFTPRAVASLGTAELAALTPEQYKELIPGTALARARYDGLRRNAVYALGVARQGHVRPLLEKLSDDSSELVRSAAKWALLQLES

SEQ ID NO: 78625 - protein, 282 aa, unidentified
  source 1..282: note = Myxococcaceae bacterium
  REGION 1..282: note = tr|A0A3N5H5F3|A0A3N5H5F3_9DELT tRNA epoxyqueuosine(34) reductase QueG (Fragment); OS = Myxococcaceae bacterium OX=2484252 GN=queG PE=4 SV=1
MRALAHEAGFDLCGFARPEPIPPAVLLDWLAAGMGADMDWLAERAMDRLEPRRLLPDARTVVALGCNYWTEAEGAEASPIARYARGRDYHATMRDRLRAFRRLLRAEWPELRTYGSVDHGPFMEKVWAARAGLGVIARNGCLVTPRFGSWVVLAVLLVELEVDAYADGPGADRCGSCRLCVDACPTGALDGAGRVDSRACLSYQTIENEGPVPAEHREAMAPHVFGCDVCQDVCPLNAAPLPAVGSRFLPRPVAGVDARGLAAMTPERYAELVPGTALARAG

SEQ ID NO: 78626 - protein, 368 aa, unidentified
  source 1..368: note = Myxococcales bacterium
  REGION 1..368: note = tr|A0A2E8RY16|A0A2E8RY16_9DELT tRNA epoxyqueuosine(34) reductase QueG OS=Myxococcales bacterium OX=2026763 GN=queG PE=4 SV=1
MINGARVALLDTENLRGQAAISLSVDGDPLQPGHATNPARDAARVRTLALQQGYSLAGVGPIGPHPEHVHLQEFLDRGYAGTMDYLRKTATKRMDPSEVSPWARSALVVGLIYETPFPHTDALIDPESDQAYPDADERLWISRYGWGRDYHRVLTRMNRRLVRQLKEAFGPEHDFRQWVDTGPLMEKVLATHAGLGWMAKNTLVVNPMVGSWFFLGVILTSLDLQPTGAVPDHCGSCTACLDVCPTDAFVEPYVLDATRCISYRTIETRENELPVDQSSGLAPHLFGCDLCQDVCPFNRKSPMTTLNDFHPRNLGEAPRRADVDAFLKRPEQARERLIGTPLKRTGPEGLQRTVRWLDEVQSKDGDLE

SEQ ID NO: 78627 - protein, 352 aa, unidentified
  source 1..352: note = Myxococcales bacterium
  REGION 1..352: note = tr|A0A0S8F0B4|A0A0S8F0B4_9DELT Uncharacterized protein OS=Myxococcales bacterium SG8_38_1 OX=1703408; GN = AMJ63_07010 PE=4 SV=1
MKPERTLNERVRAAAEEAGFSSVGFAEAQRLEEEAAHLDAWLAAGRQGQMSWMEETAEVRKDPRDPRMLDAAKSVIVMAAPYRHAQGYQGPPPARIAKYALGRDYHNVLTKKARRVAKSLRDAGHLARVAVDSKPVFERAWAERAGVGFVGKNCCLIVPGIGSHVFLACIVTTAPLEPSAPIPRRCGSCTACLDACPTKAFVETRTLDARRCISYLTIEQRGPIPESLRPEVGPWLFGCDVCQDVCPYNQAAGATPQSMSAFEPDDRWAQTEVAEFLGMSEDAFRARFEGSPVKRASPEGLARNAAIVLGNRGEARHLPVLDEAGRHHPSEVVRDAAEWAGRELKRRLADGE

SEQ ID NO: 78628 - protein, 337 aa, Myxococcus fulvus
  REGION 1..337: note = tr|A0A511SYJ3|A0A511SYJ3_MYXFU Epoxyqueuosine reductase OS=Myxococcus fulvus OX=33 GN=queG PE=4 SV=1
MLPTAPLRDLARSVGFDLVGFARAEPIEPRFLLSWLEAGYAADMDWMGERAEERLDVGRLLPGAKTVISFVNNYYRDEEPSKGSPIARYARGRDYHSTLRDRMKAFRKAIIQMAPGLGTYGSVDSGPLMEKVWAARAGLGYVGKNGCFITEPFGSWVLLATLVIDVEVDEYADGPTADRCGACRRCLVSCPTGALVGNSQVNAGACLSYQTIENREREVPEPFRFKFNNLIFGCDICQQVCPLNRKPVFAEHPRFAPRAVAELGTLELAGLTTEQYEQLIPGTALARARYDVLRRNAVYALGVARQADARHLLEKLSDDSSELVRSAAQWALRQLVP

SEQ ID NO: 78629 - protein, 339 aa, Myxococcus fulvus
  REGION 1..339: note = tr|F8CL91|F8CL91_MYXFH Putative iron-sulfur cluster binding protein OS=Myxococcus fulvus (strain ATCC BAA-855 / HW-1) OX=483219 GN=LILAB_16565 PE=4 SV=1
MTVLPTAHLRDLASSVGFDLVGFARAEPIPPDFLLSWVAAGYAADMDWMGERAAERLDVSVLLPGARTVISFANNYWRDDAETVDSPIARYARGRDYHSTLRDRMKAFRKALTVMYPGLGTYGGVDSGPLMEKVWAARAGLGYVGKNGCFITEPYGSWVLLATLVLDVEVDDYGTGPAADRCGACRRCLVSCPTGALVGNGRVDARACLSYQTIENREQQVPEAFRLKFDNLIFGCDICQQVCPLNRRPVFAEHPRFAPRAVAELGVRELAGLTVEQYEHLIPGTALARARYDGLRRNAVYALGVAKQADAKPLLEKLCGDSSELVRTAAQWALLQLDP

SEQ ID NO: 78630 - protein, 339 aa, unidentified
  source 1..339: note = Myxococcus hansupus
  REGION 1..339: note = tr|A0A0H4WR59|A0A0H4WR59_9DELT Epoxyqueuosine (OQ) reductase QueG OS=Myxococcus hansupus OX=1297742; GN = A176_000955 PE=4 SV=1
MNVLPTAHLRDLARSVGFDLVGFARAEPIPPDFLMSWVAAGYAADMDWMGERAAERLDVSLLLPGAKTVISFVNNYWRDDAESVDSPIARYARGRDYHSTLRDRMKAFRKALNVMFPGLGTYGSVDSGPLMEKVWAARAGLGYVGKNGCFITEPYGSWVLLATLIVDAEVDDYGNGPAADRCGACRRCLMSCPTGALVGNGRVDARACLSYQTIENREQQVPEAFRLKFDNLIFGCDICQQVCPLNRRPVFAENPRFAPRAVAALGVRELAGLTLEQYEHLIPGTALARARYDGLRRNAVYALGVAKQADAKVLLEKLSGDSSELVRTAAQWALLQLDP

SEQ ID NO: 78631 - protein, 339 aa, unidentified
  source 1..339: note = Myxococcus macrosporus
  REGION 1..339: note = tr|A0A250K236|A0A250K236_9DELT Epoxyqueuosine reductase OS=Myxococcus macrosporus DSM 14697 OX=1189310; GN = MYMAC_005728 PE=4 SV=1
MTVLPTAHLRDLASSVGFDLVGFARAEPIPPDFLLSWVAAGYAADMDWMGERAAERLDVSVLLPGARTVISFANNYWRDDAETVGSPIARYARGRDYHSTLRDRMKAFRKALTVMYPGLGTYGGVDSGPLMEKVWAARAGLGYVGKNGCFITEPYGSWVLLATLVLDVEVDDYGTGPAADRCGACRRCLVSCPTGALVGNGRVDARACLSYQTIENREQQVPEAFRLKFDNLIFGCDICQQVCPLNRRPVFAEHPRFAPRAVAELGVRELAGLTVEQYEHLIPGTALARARYDGLRRNAVYALGVAKQADAKPLLEKLCGDSSELVRTAAQWALLQLDP

SEQ ID NO: 78632 - protein, 337 aa, Myxococcus sp.
  REGION 1..337: note = tr|A0A540WRD8|A0A540WRD8_9DELT tRNA epoxyqueuosine(34) reductase QueG OS=Myxococcus sp. AM401; OX = 2590453 GN=queG PE=4 SV=1
MLPTAHLRDLARSVGFDLVGFARAEPIPPTFLMEWLEAGFAADMDWMGERAAERLDVDRLLPGARTVISFINNYWRDDEESVGSPIARYARGRDYHSTLRDRMKSFRKAVTVMFPGLGTYGSVDSGPLMEKVWAARAGLGYVGKNGCFITEPYGSWVLLATLILDAEVDDYGTGPAADRCGACRRCLMSCPTGALVGNGRVDARACLSYQTIENREQQVPEAFRLKFDNLIFGCDICQQVCPLNRRPVFAEHPRFAPRAVAELGTLELAGLTPTQYEQLIPGTALARARYDVLRRNAVYALGVARQADSRYLLEKLCGDSSELVRTAAQWALCKLDP

SEQ ID NO: 78633 - protein, 337 aa, Myxococcus stipitatus
  REGION 1..337: note = tr|L7UMY9|L7UMY9_MYXSD Uncharacterized protein; OS = Myxococcus stipitatus (strain DSM 14675 / JCM 12634 / Mx s8) OX=1278073 GN=MYSTI_06561 PE=4 SV=1
MLLTAHLRDLARSVGFDLVGFARAEPIPPKFLMEWLEAGFAADMDWMRERADERLDVANLLPGAKTVISFVNNYWRDDEQSVDSPIARYARGRDYHSTLRDRMKAFRKALTGRFPGLGSYGSVDSGPLMEKVWAARAGLGYVGKNGCFITEPFGSWVLLATLVIDAEVDEYASGPAADRCGACRRCLMSCPTGALVGNGQVNAGACLSYQTIENREQQVPEAFRLKFDNLIFGCDICQQVCPLNRRPVFAEHPRFAPRAVAELGTLELAGLTEAQYEQLIPGTALARARYDGLRRNAVYALGVARQADSRHLLEKLSGDSSELVRTAAQWALRQLDP

SEQ ID NO: 78634 - protein, 339 aa, Myxococcus virescens
  REGION 1..339: note = tr|A0A511HJF7|A0A511HJF7_9DELT Epoxyqueuosine reductase OS=Myxococcus virescens OX=83456 GN=queG PE=4; SV = 1
MNVLPTTHLRDLASSVGFDLVGFARAEPIPPDFLLEWVAAGYAADMDWMGERAAERLDVSLLLPGAKTVISFANNYWRDDAETVDSPIARYARGRDYHSTLRDRMKAFRKALNVMYPGLGSYGGVDSGPLMEKVWAARAGLGYVGKNGCFITEPYGSWVLLATLVVDAGVDDYGNGPAADRCGACRRCLMSCPTGALVGNGRVDARACLSYQTIENREQQVPEAFRFKFDNLIFGCDICQQVCPLNRRPVFAEHPRFAPRAVAELGVRELAGLTVEQYEHLIPGTALARARYDGLRRNAVYALGVAKQADAKPLLEKLCGDSSELVRTAAQWALLQLDP

SEQ ID NO: 78635 - protein, 339 aa, Myxococcus xanthus
  REGION 1..339: note = tr|A0A4Y6CMC4|A0A4Y6CMC4_MYXXA tRNA epoxyqueuosine(34) reductase QueG OS=Myxococcus xanthus; OX = 34 GN=BHS06_27975 PE=4 SV=1
MNVLPTAHLRDLASSVGFDLVGFSRAEPIPPDFLLEWVAAGYAADMDWMGERAAERLDVSLLLPGAKTVISFANNYWRDDAETVDSPIARYARGRDYHSTLRDRMKAFRKALNVMYPGLGSYGGVDSGPLMEKVWAARAGLGYVGKNGCFITEPYGSWVLLATLVVDAEVDDYGHGPAADRCGACRRCLMSCPTGALVGNGRVDARACLSYQTIENREQQVPEAFRFKFDNLIFGCDICQQVCPLNRRPVFAEHPRFAPRAVAELGVRELAGLTPEQYEHLIPGTALARARYDGLRRNAVYALGVAKQADAKSLLEKLSGDSSELVRTAAQWALLQLDP

SEQ ID NO: 78636 - protein, 339 aa, Myxococcus xanthus
  REGION 1..339: note = tr|Q1CZU6|Q1CZU6_MYXXD Putative iron-sulfur cluster binding protein OS=Myxococcus xanthus (strain DK 1622); OX = 246197 GN=MXAN_5940 PE=4 SV=1
MNVLPTAHLRDLASSVGFDLVGFARAEPIPPDFLMEWVAAGYAADMDWMGERAAERLDVSLLLPGAKTVISFANNYWRDDAETVDSPIARYARGRDYHSTLRDRMKAFRKALNVMYPGLGSYGGVDSGPLMEKVWAARAGLGYVGKNGCFITEPYGSWVLLATLVVDAEVDDYGNGPAADRCGACRRCLMSCPTGALVGNGRVDARACLSYQTIENREQQVPEAFRFKFDNLIFGCDICQQVCPLNRRPVFAEHPRFAPRAVAELGVRELAGLTVEQYEHLIPGTALARARYDGLRRNAVYALGVAKQADAKSLLEKLCGDSSELVRTAAQWALLQLDP

SEQ ID NO: 78637 - protein, 426 aa, Nannocystis exedens
  REGION 1..426: note = tr|A0A1I1UDJ3|A0A1I1UDJ3_9DELT Epoxyqueuosine reductase OS=Nannocystis exedens OX=54; GN = SAMN02745121_00990 PE=4 SV=1
MNQPVPKDSPPGPDVTPAGEATPRGSPVPEDSAASTPALADEAPVLTPAILARLAAVAEGNGLLKLGVVRLDHPGFAPARAALDAYVAAGKAGDMDFIPRTVDLRKHPEGMLPGARSLLVAAVPYGGEPGPIARYARSRDYHTVVHQRLIALEAALHAELPGVRSLICVDTKPVLERSAAALAGLGFLGKHGCLIVPGLGSYVLLGELLCTATWPEGHPTAAPTSPPWDACGACTRCLDACPTAAFDAPGQLDPRRCLSYLTIEHRGHVPEDMSEKFGERLAGCDVCQEVCPYNAGLGRNARIPAVAWLPPAPRPAPTVTAMAALGGAQYRGFVRHTALRRIPHRLMRRNALLALGNRTGAPDPGERHAFAAGLLEPDPRVHDAARWAAARRGLDEQALAPELEELRRLREAAAAAAEAREREDDD

SEQ ID NO: 78638 - protein, 404 aa, Natranaerobius thermophilus
  REGION 1..404: note = tr|B2A678|B2A678_NATTJ Uncharacterized protein; OS = Natranaerobius thermophilus (strain ATCC BAA-1301 / DSM 18059 / JW/NM-WN-LF) OX=457570 GN=Nther_0493 PE=4 SV=1
MNSLSKLRQMALNNGFVSTGVISPDEYKEGKSRQEQAQARGHLMPFINKSQNLATRVNPSKYANWVKTVILVLYPYGGSNGNHPPKPDDGVLRGRFSKISWGRDYHLVVKKALQDLASDLVNEDIISETYETFIDTSPFAERELAFRAGLGYPGRHGCLINPTYGSFVVIGGILTDTMLPTNEQPVDEIFSTCKSCDECITVCPGKALEDSNHESKIQLENCAAYLTVVKGIIPRKKRPIIKDYLYGCDECQNVCPENSSNNFGSTNNDCVKTFSLPKWDEQHLTIEDLYPQITKILNLSNQTFRKKYKDNAVFWRGKQVLKRNAVIALGNLKDPKGLPLILETLANPSPIIRAHVPWSLEQISTQLPIHKKSWIYHKLEQQYLKESDPLVIDELKSSLLNLSK

SEQ ID NO: 78639 - protein, 390 aa, Natranaerobius trueperi
  REGION 1..390: note = tr|A0A226C0E6|A0A226C0E6_9FIRM tRNA epoxyqueuosine(34) reductase QueG OS=Natranaerobius trueperi OX=759412 GN=queG PE=4 SV=1
MNLHQKITQLAKKTGFPLVSVIPTDRYECGYNRLATIQKNLGEYPFVKNDPDYRTTPNKYTTWAKSLIIGLYPYGCAPEKTSPKPNDQFIRGRFARVAWGRDYHLVVKEALVDLAQKLKKHSIISSNFLPIVDTSPLAERELAFRGELGIKGNHNCLMVPGLGSFFFIGGLLIDTELPQMNNLNLTTSKCLNCERCINSCPGSALDSKSYLDLNNCAAYLTVKKGFLTRKQRNIIGDYLYGCDKCQVVCPENRNNDDYSPDCMPEWGEEVLNIDDIYPKISDILKLSNKQFKNRFKDNAIFWRGKKVLQRNALIVLGNLKDPRSTQLVLDSFHDQREIIRTMSVWASEKIYENLNNKEREQVLKELNVLYNNEKSEMVLNELKQTLNNIS

SEQ ID NO: 78640 - protein, 368 aa, Natranaerovirga hydrolytica
  REGION 1..368: note = tr|A0A4R1N061|A0A4R1N061_9FIRM Epoxyqueuosine reductase OS=Natranaerovirga hydrolytica OX=680378; GN = EDC19_0690 PE=4 SV=1
MAIKDEIIQYSQGIHIDTIGFCDAKPFLEYKKILEERRKRGYYIPFEEQDIQKRIDPSQSLPNAKTFIVIGESYQYNAKKHKTEILKGHIAISAIGKDYHKVVMEKLDLLEKYILSLTQCQIKKFVDISPLPDRQIAKRAGLGFVGKNNMLIHPDFGSRFNIGYLLTDLEIQPDVTNDFMGCGGCNRCEIACPTKAIIGDYSMNPNRCIAYLTQHKGDIEDELKEKMGKQIYGCDICQQVCPYNQSLPNNKTIEPLLDHEMSIEKLLNLSNKAFKDLFGPTSAAWRGKKTIQRNAVIALGNMKEDRSIELLEMMSKDLRKEIKQEVIWALGKKKNEKARCILKEMLDVEQDEALTEAIKTILNESLMK

SEQ ID NO: 78641 - protein, 363 aa, Natranaerovirga pectinivora
  REGION 1..363: note = tr|A0A4R3MP06|A0A4R3MP06_9FIRM Epoxyqueuosine reductase OS=Natranaerovirga pectinivora OX=682400; GN = EDC18_101311 PE=4 SV=1
MSTIKDKIIEYSKKVNIDMIGFCSAKPFYEYKSILEERKEKKYHVPFEEQDIDKRIYPELTLPGAKAFIVIGESYNVIPKAYNNQLTGKISISAIGKDYHQVVMEKLDLLERYIFSLQQCQIKKFVDISPLPDRQIAKRAGLGFFGKNSMLINSQYGSHFNIGYILTDLEIEPDTVEEYKGCSKCNRCFEVCPTNAIIGDGSLNCSICVAYLTQHKGDIPNELKEKMGTQLYGCDRCQKVCPYNQKIKNKLIEPILDEAMDLKRILSLSNKEFKELFGPTSAGWRGKKTIQRNAIICLGNTEDENAIDLLEAISNDDRKDIRKEVIWALSKKKNDKAIEVLNKMLLKENDLVLKGIIMSSLGG

SEQ ID NO: 78642 - protein, 375 aa, Natribacillus halophilus
  REGION 1..375: note = tr|A0A1G8NT10|A0A1G8NT10_9BACI Epoxyqueuosine reductase OS=Natribacillus halophilus OX=549003 GN=queG; PE = 3 SV=1
MTNAQLKEELIAYSKTIGIDKIGFASADPFLTLKERLRTQQQLGYQSGFEEEDIDLRTEPERLLPYAKTIISIALAYPAKLENPPKGVKGKRRGIFCRASWGEDYHRVLNDRLQKLETFIQKRVPNAKMASMVDTGALSDRAVAERAGIGWSGKNCAIITPEFGSYVYLGEMITTIALEPDIPIDDQCGSCNKCVDACPTDALIQGGQLDANKCIAFLTQTKEMIPERYRKKIGNRLYGCDTCQVVCPENKGKGEEYQPEFTPEPEKVKPELLPLLSISNREFKETYGNMAGSWRGKKPIQRNAIMALGHFREEGAVPQLQTMLMNDSRPVIRGTAAWSLGKIGTDDARETLQEVNESEEDPTVREEIQHALTMG

SEQ ID NO: 78643 - protein, 360 aa, Natronincola ferrireducens
  REGION 1..360: note = tr|A0A1G9DZ45|A0A1G9DZ45_9CLOT Epoxyqueuosine reductase OS=Natronincola ferrireducens OX=393762; GN = SAMN05660472_01782 PE=4 SV=1
MGLKDRIIQYAKLIDVDLIGFTNAEAFEDIRDILEKRKQAGHLSGFEEEDIELRINPKKTMENAKSIIVIGVSYYLDDEKLQGKKIPKFYGELARTAWGRDYHYVLKEKLERIGDFIKEEREDFQYKSFVDTGPLVDRHVAYRAGLGWYGYNSLLINETYGSWFFIGYMINNLAFQEDKPLENKSCLRCNLCIKHCPKGAIEKPYGFNAQHCISNLLQQKENIDEKDRKLLGKNLYGCDICQGVCPHNRKVKQGSQNHFVPKDLFVKPDLVELLNMSNKRFRETYGETSAGWRGKKILQRNAIVAIVNHGDKEGIAYLLPLLKDPRPEIRKYALWGIYKLDPEGAYEILKQAKEYEKDGF

SEQ ID NO: 78644 - protein, 194 aa, Natronincola peptidivorans
  REGION 1..194: note = tr|A0A1I0FSU2|A0A1I0FSU2_9CLOT Epoxyqueuosine reductase OS=Natronincola peptidivorans OX=426128; GN = SAMN05660297_02925 PE=4 SV=1
MKIHDDLTYYIKKQALDAGALLAGFTKIRRVEPVIILGFSFTDTWFFKHPLSISKLLGKTSATSIHVQDVIAKTLKSQGYKAEYKTIWSLYGDFRPLAVSAGLGDWGRNGIIVNKEHGAGLLFAAIFTDAPLEITSPKARPTQDHQQHCIDCQQCISSCPAKAFENNKFHTFRCLPYAIKGCSECLKICKGRLS

SEQ ID NO: 78645 - protein, 378 aa, Natronincola peptidivorans
  REGION 1..378: note = tr|A0A1I0DKX1|A0A1I0DKX1_9CLOT Epoxyqueuosine reductase OS=Natronincola peptidivorans OX=426128; GN = SAMN05660297_02039 PE=4 SV=1
MMMLKNKVIDYGRSIGIDMMGFTSAEAFEDLRDIINMRKKAGYLSGFAENDIELRVNPKKTMSEAKSILVIGVPYYVKDEMQHQEKLPEFYGELARTAWGKDYHQVLKEKMENIASFIKKEEKDFQYKIFVDTGPLVDRHVAYRAGLGWYGYNSLLMNKKYGSWFFIGYMLNNIAFEADKESICTTCYQCNLCIKHCPKGAIEAPYKFNAQKCLSNILQQKGDIGEEDRSILGQRLYGCDICQSVCPHNKEIEGISENYFYPKDVSCKPDLIELLNISNKEFKETYGKTSAGWRGKTVLQRNAIIAIVNQQKSTALPHLLPLLQDIRPEIRKYAVWAISVLAPQEACKILMKTKAKEKNQEVLKIIEYYLDKLTDEEQ

SEQ ID NO: 78646 - protein, 319 aa, Natronoflexus pectinivorans
  REGION 1..319: note = tr|A0A4R2GID8|A0A4R2GID8_9BACT Epoxyqueuosine reductase OS=Natronoflexus pectinivorans OX=682526 GN=queG; PE = 3 SV=1
MNLTQQHIANTIRDKALELGFDDVGFSPATELTEDKERLRKWLNNGYNAGMKYMNNHFEKRVNPALLVEGSLSVITVLKNYNQQNNQLSAGFPKISRYAYGKDYHDTIRQKLSHLFNFIREHINPELQGRYFVDSAPLLERAIATRAGLGWIGKNSMLINRKLGSWVFIAELVVNIKLPYNHTTVNDGCGGCTRCIEACPTQAILPHRQIDSNRCISYLTIENRNDIPENFKGKLDGWVFGCDICQEVCPWNRKAVETDEPDFKPSEQLLNMIAVEWENLTPEKFSKLFRGSAVKRTKHKGFMRNYYFSLKPQMSHNKT

SEQ ID NO: 78647 - protein, 361 aa, unidentified
  source 1..361: note = Natronospirillum operossus
  REGION 1..361: note = tr|A0A4Z0W7L7|A0A4Z0W7L7_9BACT Epoxyqueuosine reductase OS=Natronospirillum operossus OX=2562806 GN=queG; PE = 3 SV=1
MRLQALDLTDIKARLHDKALSLGFADMGVTGTDVSAEKPRFDAWLARGYHGSMGFLAAHGDKRFHADKLVPDTRSVISVRLDYLPDTRTHELLDHPEQAYIARYALGRDYHKLMRKRLVQLARWLEEVVGPFGYRAFADSAPVLERAVARNAGLGWVGKHTLVLNRHAGSWFFLGELYTDLELPPDPPQATQHCGSCTRCLDVCPTNAFTGPWELDARKCISYLTIEHDGPIPEPLRAPMGNRIFGCDDCQIYCPWTKFTPHTREADFTPRHQLDEADMVALFLWDEATFLQRTEGMAIRRTGYENWLRNLAVALGNGSPRPEALQALRRRRPECSELVQEHIDWALQRLRAKTLGTPARQ

SEQ ID NO: 78648 - protein, 384 aa, unidentified; identical to SEQ ID NO: 74899
  source 1..384: note = Negativibacillus sp.
  REGION 1..384: note = tr|A0A3A8XMM4|A0A3A8XMM4_9FIRM Epoxyqueuosine reductase OS=Negativibacillus sp. 1xD8-3 OX=2320085; GN = queG PE=3 SV=1

SEQ ID NO: 78649 - protein, 311 aa, Negativicoccus succinicivorans
  REGION 1..311: note = tr|W1U7Y6|W1U7Y6_9FIRM Uncharacterized protein; OS = Negativicoccus succinicivorans DORA_17_25 OX=1403945; GN = Q612_NSC00213G0006 PE=4 SV=1
MDKNKIITTQANRLGLTEVGFVRLPLPETLAATLHAAGEPSPFTPPDVTTRLDPAALLPGAQSVIVCLFPYRPDSAAAENAAEPPANLPEYARARDYHIIVQHYLTRLQARLRTHFPDAAFSPFVDTSPLPDRALAYLAGLGFFGWNKALINDRYGTHTVIGGLVTTLALTPSEPLRKTCLQCGRCRRFCPGQALTPERFIWPRCKSYITQKKGDLTAAEAAIIAKNHYIFGCDVCQEVCPHNTAAEPTPLPEFQNDRIARITAAEISRYSNRTFQAAYGDRAWAWRGKKILLRNAALLAESSAHRNNDKH

SEQ ID NO: 78650 - protein, 136 aa, Neisseria gonorrhoeae
  REGION 1..136: note = tr|A0A4T9VI20|A0A4T9VI20_NEIGO DUF1730 domain-containing protein (Fragment) OS=Neisseria gonorrhoeae OX=485 GN=E8M63_14190 PE=4 SV=1
AGKYFLEFLGSDGHGDMDWLAANPERRTDPRALWAGVRSIIMLGVNYGPDDDPLKLIARRSQGAISVYAQGDDYHDVIKKRLKVLARWLAATTGDEVKVFVDTAAVMEKPLAQAAGIGWQGKHTNLVSRAFGSWLF

SEQ ID NO: 78651 - protein, 304 aa, unidentified
  source 1..304: note = Neisseriaceae bacterium
  REGION 1..304: note = tr|A0A431I3Y4|A0A431I3Y4_9NEIS tRNA epoxyqueuosine(34) reductase QueG (Fragment); OS = Neisseriaceae bacterium OX=2014784 GN=queG PE=3 SV=1
MHGETPERDSINWDQLKANINLWATELGFSGAGVAGIDLSSAEQGLRDWLAAGFHGAMDYMAKHGLKRARPAELLPGTVSVISLRMNYLAVGPASAIDMLGQPQQAYISRYALGRDYHKVLRNRLQALAERISAAVGPYGYRVFTDSAPVLEVEIASRTLQGWRGKHTLLLNRDEGSFFFLGDILTDLPLPPDVPQSGHCGNCSRCIEVCPTQAIVAPYRLDARRCISYLTIELHGAIPLEFRPLIGNRVYGCDDCQLFCPWNRFARPSSEADFDVRNGLDQATLVALFAWTEAEFQQRLAGTA

SEQ ID NO: 78652 - protein, 362 aa, unidentified
  source 1..362: note = Neisseriaceae bacterium
  REGION 1..362: note = tr|A0A2I7N6A1|A0A2I7N6A1_9NEIS Epoxyqueuosine reductase OS=Neisseriaceae bacterium DSM 100970 OX=2052837; GN = queG PE=3 SV=1
MVDSVSLQNLKEEIRKKAKRLGCLDITIAATIISNEAKEKYQQWLNEKLHGSMDYLARNTELRFNPTLIHENTVTIICVKIPYLINPINLHKERLNSEEMAYVSSYALGRDYHKVVKQILNNLATFINEQLESSDIEHNYRAFTDSAPVMEVQLSSQSGLGWRGKNTLLITKNQGSMFFLGELFTNLPLPEDKEINNHCGSCNKCIDICPTKAFIAPYKLDARRCISYLTIENKGAIPPELRKLIGNRIYGCDDCQLFCPWNKFSQQSPIKDFNTRNHLDSSSLLELFNWDEEEFFKKTEGSAIRRIGYNSWIRNLAVAIGNSEPSLEKIKVLQSKLPYPDEMVTEHITWAINELTNRLTTD

SEQ ID NO: 78653 - protein, 362 aa, unidentified
  source 1..362: note = Neisseriales bacterium
  REGION 1..362: note = tr|A0A5C8BH15|A0A5C8BH15_9NEIS Epoxyqueuosine reductase OS=Neisseriales bacterium OX=2053582 GN=queG; PE = 3 SV=1
MVDYNILKALIKDKAQELGFLELTVSSCTIDSAAQQKFQDWLAQGYAGDMQYLENNQNLRFNPQELHPTSVRIISVKTPYLTQNITELKNRLRNKPEHAYISSYALGRDYHKVVKQQLNKLATWINQYLSEMGFEHHYRAFSDSAPIMEVQIAAQSGSGWRGKNTLLLNKNHGSMFFLGELFTNLPLEVDKPISSHCGSCNKCIEVCPTQAFISPYVLNAKKCISYLTIENKGSIPLELRSLMGNRIYGCDDCQLFCPWNKFSTLTTYTDFTPRHKLDSSSLLELFKWNIAEFTQKMQGSAILRIGYDSWQRNLAVALGNAPYQAEIITELEFKSRTSSTMVKEHITWAIAQQQNKRSTSNS

SEQ ID NO: 78654 - protein, 332 aa, unidentified
  source 1..332: note = Neisseriales bacterium
  REGION 1..332: note = tr|A0A3D5YTA2|A0A3D5YTA2_9NEIS tRNA epoxyqueuosine(34) reductase QueG OS=Neisseriales bacterium OX=2053582 GN=queG PE=4 SV=1
MEAKISSIIIDQQAQSKFAEFLNNGYAGEMTYLKNNQNLRYHPAELHPTTLAIISVKMPYLSENINCHQQRLKDSNHAYVSSYALGRDYHKVVKQQLQKYAQWINQLLATHQLEQNYRVFTDSAPIMEVQLATQAGNGWRGKNTLLINKNHGSMFFLGEIFTSLPLPPDEATTQHCGSCQKCLEICPTQAFVTPYVLDARKCIAYLTIENPGAIPVELRSKIGNRIYGCDDCQLFCPWNKFSQLSQLNDFTPRNQLDSSSLLELFAWSETEFKQRLQGSPILRIGYQAWQRNIAVGLGNAAPSNAIRQALELALPNSSPLVAEHILWALEQQ

SEQ ID NO: 78655 - protein, 344 aa, Neoasaia chiangmaiensis
  REGION 1..344: note = tr|A0A1U9KSE8|A0A1U9KSE8_9PROT Epoxyqueuosine reductase OS=Neoasaia chiangmaiensis OX=320497 GN=queG; PE = 3 SV=1
MKKSVEDRIAEYARRLGFDAVGFCRAELPDEARARLHEFVANGWHGTMGWMEQRLDQRGDPKALWPDVRSVISLGLSYAPETDPLATLAMADRGNISVYARNRDYHDIIKGMLKHVAQFVVKQGTDTQVKVFVDTAPVSEKPLAEAAQLGWQGKHTNVVSRDHGSWLLLGEIFTTLDLQPSAPRAGACGSCTRCLVACPTNAFPAPYRMDARRCISYLTIEHAGPIPHEFRPLIGNHIYGCDDCLAVCPWNRFAQAGHEAKLAARSELVAPRLAELVALDDAAFRTLFSGSPIKRIGRNRFVRNVLIAIGNSGDASLADHARTRTQNDDAVVAEAARWAVERLS

SEQ ID NO: 78656 - protein, 324 aa, Neochlamydia sp.
  REGION 1..324: note = tr|A0A0C1JNP0|A0A0C1JNP0_9BACT Epoxyqueuosine reductase OS=Neochlamydia sp. EPS4 OX=1478175 GN=queG PE=4; SV = 1
MQKNKSERAIFTDVKYKKMTLSFDEIKVKALELGWDDVGITPANVRQEDIQAYKEWLAEGKHADLAYMEKEIRCYPQQYFPQAKTALIFLSYYKQPKENLLAGQGLIASYARGRDYHHVHRKRLKKFIQWLEERVGEQGIAKGFSDSSPLLEKALAVQAGLGWFGKNTLLIHRRFGTYTLISGILTSLEIPGAVISLRLPRCGSCTRCIDACPTQALTSPYKLDAAKCLSYHLIESKKPIPLEIQQKNPGYIFGCDICQDACPHNQRTLPSLTAAFSPASGNGTYLDLKKLEECEKNPEKLFGTPLQRRGITGLKYTAETLKLK

SEQ ID NO: 78657 - protein, 306 aa, Neochlamydia sp.
  REGION 1..306: note = tr|A0A0C1KCA5|A0A0C1KCA5_9BACT Epoxyqueuosine reductase OS=Neochlamydia sp. TUME1 OX=1478174 GN=queG; PE = 4 SV=1
MTLSFDEIKVKALELGWDDVGITPANVRPEDIQAYKEWLAEGKHADLAYMEKEIRCYPQQYFPQAKTALIFLSYYKQPKENLLAGQGLIASYARGRDYHHVHRKRLKKFIQWLEERVGEQGIAKGFSDSSPLLEKALAVQAGLGWFGKNTLLIHRRFGTYTLISGILTSLEIPGAVISLRLPRCGSCTRCIDACPTQALTSPYKLDAAKCLSYHLIESKKPIPLEIQQKNPGYIFGCDICQDACPHNQRTLPSLTAAFSPASGNGTYLDLEKLEECEKNPEKLFGTPLQRRGITGLKYTAETLKLK

SEQ ID NO: 78658 - protein, 402 aa, Neokomagataea sp.
  REGION 1..402: note = tr|A0A506USZ3|A0A506USZ3_9PROT tRNA epoxyqueuosine(34) reductase QueG OS=Neokomagataea sp. Jb2; OX = 2558904 GN=queG PE=4 SV=1
MLCSALSGKLGELPGSAVPSPLHPLRCIVTEKKNTLESRILHQARILGFNTAGITATVLPPEVEQGLRAFVAENRHGTMHWMEERITQRAQPAALWPEVQSVISLGLSYAPPSPDIAFTTLARPECGNISVYARNRDYHDVMKGMLKHLAQQVVKLGGEGTQVKVFVDTAPVAERDLAVAAGLGWRGKHGCVVSRRYGSWLFLGEIYTTLSLERLRAPLSPQPEQPGSSRPCRKSAPTTAPGRCGSCTRCLVSCPTDAFLEGGGMDARRCISYLTIEHEGPIPLELRPLMGNRIYGCDDCVAVCPWNRFAPPGQIAKLQSRPDRDTPLLADLARLDDAGFRRMFSGSPVKRIGRNRFIRNVLIAIGNSGLPALRPAAERLCRDPDATVAECARWAAGRLRAV

SEQ ID NO: 78659 - protein, 385 aa, unidentified
  source 1..385: note = Neorhizobium alkalisoli
  REGION 1..385: note = tr|A0A561QRI5|A0A561QRI5_9RHIZ Epoxyqueuosine reductase OS=Neorhizobium alkalisoli OX=528178 GN=queG; PE = 3 SV=1
MIDDRAAAKAQARREKLTAFIREEAKAQGFDLCRVTGPDSIPRAPERLEIFLADGHHGTMDWMEETRERRGDPKVLWSDVRSIVMFAMNYGPEEDPRGILDRPDKAAISVYARNRDYHDIIKGRLKEVATRFAARAGEDVKVFVDTAPVMEKPLGEAAGLGWQGKHTNLVSRTHGSWLFLGSMFTTADLIVDEPERDHCGSCRACLDACPTSAFPAPYRLDARRCISYLTIEHKGTIAPAFRPLIGNRIYGCDDCLATCPWNKFAASASEMKLKAREDLKEPAIADLLTLDDADFRALFSGSPVKRIGRDRFVRNVLIAAGNSSDGSLIAQCRVLSADSSPVVRGMAIWALKQLMTDEVFRAFADERGAEEDPDVLEEWRMAGAA

SEQ ID NO: 78660 - protein, 391 aa, unidentified
  source 1..391: note = Neorhizobium galegae
  REGION 1..391: note = tr|A0A0T7G9J9|A0A0T7G9J9_RHIGA Epoxyqueuosine reductase OS=Neorhizobium galegae bv. officinalis; OX = 323656 GN=queG PE=3 SV=1
MRTLISDATSREEEKALRRREKLTAFIREEAKAQGFDLCHVTGPDSIPRAPERLEVFLAEGHHGSMDWMAETRLRRADPKVLWDQVRSIVMFGLNYGPDEDPRGVLEKHDKAAISVYARNRDYHDVIKGRLKEIATRFAARAGEDVKVFVDTAPVMEKPLAEAAGLGWQGKHTNLVSRTHGSWLFLGSLFTTADLVIDAPETDHCGSCRACLDACPTAAFPSPYRLDARRCISYLTIEHKGPIDPEFRPLIGNRIYGCDDCLAACPWNKFAASASEMKLQAREDLKEPSIAFLLTLDDAAFRTFFSGSPVKRIGRDRFIRNVLIAAGNSDDASLIAQCLELAGDPSPTVRGMAIWALKRLMTDMDFAELAGARGTEDDPEVREEWRLAGAA

SEQ ID NO: 78661 - protein, 391 aa, unidentified
  source 1..391: note = Neorhizobium galegae
  REGION 1..391: note = tr|A0A068SZM3|A0A068SZM3_RHIGA Epoxyqueuosine reductase OS=Neorhizobium galegae bv. orientalis str. HAMBI 540 OX=1028800 GN=queG PE=3 SV=1
MRTLISDAPAREEEKALRRREKLTAFIREEAAAQGFDLCRIAGPDSIPQAPERLEIFLADGHHGSMDWMAETRLRRADPRMLWDQVRSIVMFGLNYGPDEDPRGILDKPDKAAISVYARNRDYHDVIKGRLKEIATRFAARAGEDVKVFVDTAPVMEKPLAEAAGLGWQGKHTNLVSRTHGSWLFLGSLFTTADLIIDAPEIDHCGSCRACLDACPTAAFPAPYRLDARRCISYLTIEHKGPIDPEFRPLIGNRIYGCDDCLAACPWNKFAASAAEMKLKARDDLKEPSIAFLLTLDDATFRTFFSGSPVKRIGRDRFIRNVLIAAGNSGDASLIGQCLELAGDPSPVVRGMAIWALKRLMTDADFARFAEARGAEEDPEVREEWRLAGAA

SEQ ID NO: 78662 - protein, 403 aa, unidentified
  source 1..403: note = Neorhizobium sp.
  REGION 1..403: note = tr|A0A4R2ZW36|A0A4R2ZW36_9RHIZ Epoxyqueuosine reductase OS=Neorhizobium sp. JUb45 OX=2485113 GN=queG; PE = 3 SV=1
MRISTSETKPEAARADAPSRHDGRSEKDRLRASKLTALIRTEAEAQGFDLCRITPPDSIPHAPARLIEFVEAGRHGTMAWMEETRERRGDPKVLWSDVRSIVMFGMNYGPDEDPRGLLSKPDKGNISVYARNRDYHDVIKGRLKEIATRFAARAGVDVKVFVDTAPVMEKPLAAAAGLGWQGKHTNLVSRTHGSWLFLGSLFTTADLDFDEAERDHCGKCRACLDACPTSAFPAPYQIDARRCISYLTIEHKGPIAHEFRPLIGNRIYGCDDCLAACPWNKFAASASEMKLQAREDLKEPSLAFLLTLEDAQFRTFFSGSPVKRIGRDRFVRNVLIAVGNSGDRGFIEACKGLAADPSAAVRGMAVWALSRLMTKDEFERFASARVIDEDDEVEAEWAMAGVA

SEQ ID NO: 78663 - protein, 391 aa, unidentified
  source 1..391: note = Neorhizobium sp.
  REGION 1..391: note = tr|A0A346YRN8|A0A346YRN8_9RHIZ Epoxyqueuosine reductase OS=Neorhizobium sp. SOG26 OX=2060726 GN=queG; PE = 3 SV=1
MRTLISEPVGREEEKALRRRAKLTAFIREEAAAQGFDLCRITSADSIPQATERLDMFLAEGHHGTMEWLAETRDRRSDPRVLWDQVNSVVMFGLNYGPDEDPRALLDKPGSAAISVYARNRDYHDVIKGRLKEIATRFAARAGEDVKVFVDTAPVMEKPLAEAAGLGWQGKHTNLVSRSHGSWLFLGSIFTTADLERDAPETDHCGSCRACLDACPTAAFPAPYRLDARRCISYLTIEHKGPIEPHFRPMIGNRIYGCDDCLAACPWNKFAASASEMKLKAREDLKEPSIAFLLTLDDPTFRSFFSGSPVKRIGRDRFVRNVLIAAGNSGDRALIPQVEKLAGDPSPVVRGMAVWALKRLMLDEEFLLFAQRRPTETDPEVQEEWKLAGVS

SEQ ID NO: 78664 - protein, 324 aa, unidentified
  source 1..324: note = Neosynechococcus sphagnicola
  REGION 1..324: note = tr|A0A098THZ5|A0A098THZ5_9CYAN Epoxyqueuosine reductase OS=Neosynechococcus sphagnicola sy1 OX=1497020; GN = queG PE=3 SV=1
MLPDSTDATEQIKAQALTLGFHKVGIAAVDSAAAPTTVSDPNRTGLQAWLTQGYQAQMQWMATPKRQDIQQVMPTVRSLICVALNYYTPLVRPEGRQYGKISRYGWGRDYHRVLQRKLKAFSTWLEGLDPGVQTRYYADTGPIQDKVWAQRAGLGWIAKNSNLITREYGSWVFLGEILTNLTLQPDPPHTAHCGTCRRCIDACPTAAIVQPFVVDANRCIAYHTIENRAATLPGAIAPHLQGWVAGCDICQDVCPWNQRFASETDIPDFQPYPQNVAPPLTELATLSDQEYQQRFPASALRRIKPEMMRRNARANLTPNSLADP

SEQ ID NO: 78665 - protein, 381 aa, Neptunomonas antarctica
  REGION 1..381: note = tr|A0A1N7P8E3|A0A1N7P8E3_9GAMM Epoxyqueuosine reductase OS=Neptunomonas antarctica OX=619304 GN=queG; PE = 3 SV=1
MTDSDVSTQHLTSPQPSPQLSPEKLAELAKQIHIWASEYGFQQCGIVDPDLKEDAARLQAWLEKQYHGEMNYLAANADKRRDPYSLVPGSCRIISVRMDYTPPAFSSLKILNSPEKAYIARYTLGRDYHKMMRKRLTQLGKRIEEAAGEMGYRAFVDSAPVMERPIAQQAGLGWTGKHTLILNRHAGSWFFLGELFIDLPLPTDLPEKKTHCGSCTACLDICPTNAFTGPYELDATRCISYLTIEKKGSIPEELRSLMGNRIFGCDDCQLVCPWNRFAKHTAETDFHPRHQLDDISLVDLFNWDEATFLKRTEGSAIRRTGYEGWLRNIAIALGNSGGGNDIITTLEAKRPICSEMVIEHIDWAINQLKAGQTRLSPIQFK

SEQ ID NO: 78666 - protein, 393 aa, unidentified
  source 1..393: note = Neptunomonas qingdaonensis
  REGION 1..393: note = tr|A0A1I2UAV5|A0A1I2UAV5_9GAMM Epoxyqueuosine reductase OS=Neptunomonas qingdaonensis OX=1045558 GN=queG; PE = 3 SV=1
MTDSVLSTSAQLTKPARQELSSGQELSAEQAFSSEKLAALAKQVHLWAAEAGFQECGIVNPDLEEDTERLQAWLDKQHHGEMSYLAANADKRRDPYLLVPGSCRIISVRMDYTPPAFSALKVLNSPEKAYIARYTLGRDYHKMMRKRLTQLGKRIAEAAGTMGYRAFVDSAPVMERPIAQQAGIGWTGKHTLILNRHAGSWFFLGELLIDLPLPTDPPIEKQHCGSCTACLDICPTKAFSGPYELNATRCISYLTIEKKGAIPEELRPLMGNRIFGCDDCQLVCPWNRFAKHTAEADFHPRHQLDDVSLIDLFNWDETTFLKRTEGSAIRRTGYQGWLRNIAVALGNSGGGNEIIAALEAKRPHCSEMVIEHIDWAINRLTKGTTLLSPIQLK

SEQ ID NO: 78667 - protein, 363 aa, Neptunomonas sp.
  REGION 1..363: note = tr|A0A437Q6H9|A0A437Q6H9_9GAMM Epoxyqueuosine reductase OS=Neptunomonas sp. HPM-16 OX=1815562 GN=queG; PE = 3 SV=1
MSHSLTDEQLLSLSEQIPVWAAELGFQQCGIVDPDLDSDFAQLQAWLEKGYHGQMNYLADHGEKRRKPYELVPGSCRIISLRMDYTPPAFDALKLIGQPDKAYIARYTLGRDYHKTMRKRITQLGQRIEKETSALGYRAFVDSAPVMERPIAQQAGIGWTGKHTLILNRHAGSYFFLGELFIDLPLPVAEPITKNHCGRCTACLDICPTNAFIGPYELDARRCISYLTIEHKGAIPLNLRPLMGNRIFGCDDCQLVCPWNRFAKLTEESDFHPRHSLDDVSLLTLFAWDEATFLKRTEGSAIRRTGFEGWQRNLAIALGNSSGGAAVIDALKAKREASSPLVQEHIDWAINQLQQNATARREA

SEQ ID NO: 78668 - protein, 341 aa, Nereida ignava
  REGION 1..341: note = tr|A0A0U1NK01|A0A0U1NK01_9RHOB Epoxyqueuosine reductase OS=Nereida ignava OX=282199 GN=queG PE=3 SV=1
MSLKARLWDVAQDAGFAKMGVCKPDAAPETAQRLSAFVEAGYHGQMSWMAERMNWRGSPQDLWPECRSVIMLAEMYTPEHDPRTVLSRPELGAISVYAQNKDYHDVAKKRLKKVGRWLVEQGDIQIKVFVDTAPVMEKPLAQAAGLGWQGKHTNLLARDLGNWFFLGAIFTTAELEPDEAQTDNCGSCTACLDACPTDAFPAPFQLDARRCISYLTIEHKGPVAPELREKMGNHIYGCDDCLAACPWNKFAVAATEMKYAAREELKAPKLAALVSFDDASFRARFSGSPIKRIGRDRFTRNVLYAIGNSGKPELKSHAQALLNDNDPVVRDAAEWAVGRLS

SEQ ID NO: 78669 - protein, 385 aa, Nesiotobacter exalbescens
  REGION 1..385: note = tr|A0A1U7JI03|A0A1U7JI03_9RHOB Epoxyqueuosine reductase OS=Nesiotobacter exalbescens OX=197461 GN=queG; PE = 3 SV=1
MLTDRQANRVKSDLIKRAHALGFGQVRIARPDAIPHAPERLRQFIEAGYHATMNWMPETEARRSDPRVLWPEVRSIIMLAMNYGPDEDPLALQEKPEKAAISVYARNRDYHDVVKGKLKELANLVASRGGGDVKVFVDTAPVMEKPLAQAAGLGWQGKHTNLVSRELGSWFFLGSIFSTLELPVDETEVDHCGRCRRCLDACPTKAFPAPYQLDANRCISYLTIEHHGPIPHEFRRPMGNRIYGCDDCLGVCPWNKFAQEASEAKLRAREDLKEPSIADLLKLDDASFRRFFTGSPIKRVGRDRFIRNVLIAAGNSGKAELLGDVIRLLEDPAPVVRATAVWALGELGSPAQQADLHDGLAPSETAREVQEEWQRLKQAAGRNSV

SEQ ID NO: 78670 - protein, 363 aa, unidentified
  source 1..363: note = Nevskiales bacterium
  REGION 1..363: note = tr|A0A2E9ZU31|A0A2E9ZU31_9GAMM Epoxyqueuosine reductase OS=Nevskiales bacterium OX=2026766 GN=queG PE=3; SV = 1
MRVKTQPPNTTPSPEVLAGRIRDWAAELGFDGVGITGFDLAEDVEHLHQWLREGRHGSMDYMARHADLRADPARLQPEAIRCISVRMNYLTQSADAMQACLDDPDRAYVSRYALGRDYHKLMRGRLKQLTRQLQEAAPEALSRPFVDSAPVLEKALGRDARLGWIGKHSLLLHRDAGSWFFLGEILTNVALPVDDDPPVKNLCGSCTACMEICPTQAITGPRQLDARRCIAYLTIEHKGSIPEGLRKPMGNRIFGCDDCQLVCPWNRYAQATREPDFAPRHGLDTARLVDLFAWSEDEFLSRTEGMPIRRTGYVGWRRNIAVALGNATASDESRQALRGALDDPSPLVREHVQWALQQLEAAD

SEQ ID NO: 78671 - protein, 310 aa, unidentified
  source 1..310: note = Niabella drilacis
  REGION 1..310: note = tr|A0A1G6L1A3|A0A1G6L1A3_9BACT Epoxyqueuosine reductase OS=Niabella drilacis OX=1285928 GN=queG PE=3 SV=1
MNPAAAHTHLIKQYSRELGFSYCGIAKAVQLDEDARRLEQWLSKGMHGSMQYMENYFDLRIDPAKLVPGARSVITLLMNYFPQQQQQTDGPRISKYAYGHDYHEVIRARLNILLQYIREQVGEINGRGFVDSAPVLERSWARQSGLGWIGKNGNLLVKGAGSFYFIATLITDLPLQYDDPYSADFCGSCTKCLDACPTGAILPGRVVNGSQCISYFTIELKDALIPDAVKGQFQNWAFGCDICQDVCPWNRFSKPNQQQEFTPLPEILNLSTTEWEQFSEEQFRKIFKHSPIKRTKLKGIQRNLKFINSH

SEQ ID NO: 78672 - protein, 309 aa, unidentified
  source 1..309: note = Niabella ginsenosidivorans
  REGION 1..309: note = tr|A0A1A9HXN4|A0A1A9HXN4_9BACT Epoxyqueuosine reductase OS=Niabella ginsenosidivorans OX=1176587 GN=queG; PE = 3 SV=1
MNTALHYTQLIKRFSKELGFDYCGIAKAERLDEDARRLEKWLSKGMHGQMGYMENHFELRIDPTRLVPGARSVITLLMNYFPGQQQQTDGPKISKYAYGNDYHEVIRGRLKTLLALINENIGEVQGRGFVDSAPVLERAWAKKSGLGWIGKNGNLLTRDAGSFFFIATLITDLTLLYDDPYAKDFCGTCTRCINACPTNAILPDKVIDGSKCISYFTIELKDALIPGEMQGRFDNWAFGCDVCQDVCPWNRFSKPTQEADFQPLPEVLNFSTKEWEQFSEEQFRRIFKHSPIKRAKLKGLQRNLKFIEL

SEQ ID NO: 78673 - protein, 306 aa, Niabella soli
  REGION 1..306: note = tr|W0F6K4|W0F6K4_9BACT Epoxyqueuosine reductase; OS = Niabella soli DSM 19437 OX=929713 GN=queG PE=3 SV=1
MNATQHIKIVSKELGFDYCGIAKAEKLDDDARRLEQWLSRGMHGTMKYMENYFDLRIDPSRLVPGAKSVITLLMNYFPQQLQQTDGAKIAKYAYGNDYHEVIRAKLNALLSFINEQIGAVNGRGFVDSAPVLERSWAQKSGLGWIGKNGNLLTKDSGSFYFIATLITDLELEYDSPYTKDFCGTCTRCIDACPTNAILPGKIIDGSRCISYFTIELKDSIIPAEMQGKFENWAFGCDTCQDVCPWNRFSKPTQEAAFEPLPQILNLSSKEWESFSEEQFRKIFKHSPVKRTKLKGLQRNLKLIREK

SEQ ID NO: 78674 - protein, 309 aa, Niabella sp.
  REGION 1..309: note = tr|A0A5C7W8C9|A0A5C7W8C9_9BACT Epoxyqueuosine reductase OS=Niabella sp. OX=1962976 GN=queG PE=3 SV=1
MSRISEHTFLVKQTGKQLGFDYCGIARAQPLDEDARRLEAWLNKGMNGTMKYMENYFELRVDPTKLVPGAKSVITLLLNYFPPQHQEGNGPKISKYAYGNDYHEVIRTKLNEFLFMVREKVGAVEGRGFVDSAPVLERAWAQRSGLGWVGKNGNLITKKSGSFFFIATLITDLELEHDDPLAKDFCGSCTKCIDACPTDAIMPNKVINGSKCISYFTIELKEMLIPSEMQGKFDDWMFGCDICQDVCPWNRFSKPNTVEDFTPIPEVLNLTTTEWEAMTEESFRKIFKHSPIKRSKFKGIQRNLNFLLE

SEQ ID NO: 78675 - protein, 309 aa, Niastella koreensis
  REGION 1..309: note = tr|G8TFD2|G8TFD2_NIAKG Epoxyqueuosine reductase; OS = Niastella koreensis (strain DSM 17620 / KACC 11465 / GR20-10) OX=700598 GN=queG PE=3 SV=1
MNFKLQHTQQIKSFVRELGFDFCGIARAQQLDEEARRLEQWLNKGLHGNMQYMENYFDLRIDPTKLVPGAKSVITVLLNYFPQQTQQSDTPNISKYAYGNDYHEVIKKKLHTLMALINEHIGEVQGRGFVDSAPVLERSWAHRSGLGWIGKNGNLINKQQGSFFFIATLIVDIELEYDDPIAKDYCGSCRKCIEACPTGAITEGKVINGSQCISYYTIELKDLLLPDDKKGQFADWMFGCDVCQDVCPWNRFAKPTSEAGFKPIPEILNFTTKEWESLTEDAFKQIFRHSPLKRAKFQGIQRNVKFLKG

SEQ ID NO: 78676 - protein, 309 aa, Niastella populi
  REGION 1..309: note = tr|A0A1V9FDL1|A0A1V9FDL1_9BACT Epoxyqueuosine reductase OS=Niastella populi OX=550983 GN=queG PE=3 SV=1
MNHKQHHTQQIRSFIRELGFNFCGIARAQQLDDDARRLEQWLNKGLHGNMQYMENYFDLRIDPTKLVPGAKSVITVLLNYFPQQAQRAGTPHISKYAWGNDYHEVIKKKLHTLLALINEHIGEVQGRGFVDSAPVLERSWAHRSGLGWIGKNGNLITKQQGSFFFIATLIVDLELEYDDPIAKDYCGSCRRCIDACPTGAITEGKVINGSQCISYYTIELKDLLLPDDKKGQFADWMFGCDVCQDVCPWNRFAKPTQETGFTPIPEILNFTTKEWESLTEEAFKKIFRNSPLKRAKFQGIQRNVKFLKG

SEQ ID NO: 78677 - protein, 260 aa, Niastella sp.
  REGION 1..260: note = tr|A0A4R2W672|A0A4R2W672_9BACT Epoxyqueuosine reductase OS=Niastella sp. CF465 OX=2135684; GN = C8K05_103651 PE=4 SV=1
MQYMENYFDLRIDPTKLVPGARSVITVLMNYFPQQTQQEGTPHISKYAWGNDYHEVIKKKLNTLLALINEHIGEVQGRGFVDSAPVLERSWAHRSGLGWIGKNGNLINKQQGSFFFIANLIVDLELEYDDPIAKDYCGSCRRCIDACPTNAITEGKVINGSQCISYYTIELKDLLLPDDKKGQFADWMFGCDVCQDVCPWNRFAKPTSEAGFTPIPEILNFTTKEWESLTEDAFKQIFRHSPLKRAKFQGIQRNVKFIKG

SEQ ID NO: 78678 - protein, 307 aa, Niastella sp.
  REGION 1..307: note = tr|A0A1E4E6T8|A0A1E4E6T8_9BACT Epoxyqueuosine reductase OS=Niastella sp. SCN 39-18 OX=1660119 GN=queG; PE = 3 SV=1
MSVTDKNTAIVKQTAAQLGFDYCGIAKAGYLSDDARRLESWLSKGMHGTMQYMQNHFDLRVDPTLIVPGAKSIITILYNYYPAEQQVDGAPKISKYAYGKDYHEIIRKKLNEFLSLLQQQIGDIQGRGFVDSAPVLERSWAQKSGLGWVGKNGNLIHKAQGSFFFIASLIVDLPLTYDDPFAKDYCGSCTRCIDACPTEAILPDKVINAQKCISYFTIELKEELIPEKNKWDDWIFGCDVCQDVCPWNRFSKQTRHAALKPITEIINFNKQDWDELTEEKFKLIFSKSALKRTKYAGIKRNLKFIQK

SEQ ID NO: 78679 - protein, 310 aa, unidentified
  source 1..310: note = Niastella vici
  REGION 1..310: note = tr|A0A1V9FT06|A0A1V9FT06_9BACT Epoxyqueuosine reductase OS=Niastella vici OX=1703345 GN=queG PE=3 SV=1
MSNTSYHTQQIKSFVRELGFDFCGIARAQQLDEEARRLEQWLKKGLHGNMQYMENYFDLRIDPSKLVPGAKSVITVLLNYFPQQSQQAGTPKISKYAWGKDYHEVIKKKLHALLALINEHIGEVQGRGFVDSAPVLERSWAHRSGLGWIGKNGNLITRQQGSFFFIATLIVDLELEYDDPIAKDYCGSCRRCIEACPTGAISEGKVINGSQCISYYTIELKDLLLPDDKKGQFADWMFGCDVCQDVCPWNRFSQPTREAGFAPIPEILNFTTKEWESLTEEAFKQIFRHSPLKRAKYQGIQRNVKFLQHK

SEQ ID NO: 78680 - protein, 309 aa, Niastella yeongjuensis
  REGION 1..309: note = tr|A0A1V9F8B3|A0A1V9F8B3_9BACT Epoxyqueuosine reductase OS=Niastella yeongjuensis OX=354355 GN=queG PE=3; SV = 1
MANKAYHTQQIKSFVRELGFDFCGIARAQQLGDDARRLEQWLSKGLHGNMQYMENYFDLRIDPTKLVPGARSVITVLLNYFPQQTQQTNTPHISKYAFGNDYHEVIKKKLHALLVLINEHIGEVQGRGFVDSAPVLERSWAHRSGLGWIGKNGNLINKQQGSFFFIATLIVDLELEYDDPIAKDYCGSCRRCIDACPTGAITEGKVINGSQCISYYTIELKDLLLPDDKKGQFADWMFGCDVCQDVCPWNRFAKPTSEAGFTPIPEILNFTTKEWESLTEEAFKQIFRHSPLKRAKFQGIQRNVKFLKG

SEQ ID NO: 78681 - protein, 389 aa, unidentified
  source 1..389: note = Nibricoccus aquaticus
  REGION 1..389: note = tr|A0A290Q8E5|A0A290Q8E5_9BACT tRNA epoxyqueuosine(34) reductase QueG OS=Nibricoccus aquaticus; OX = 2576891 GN=queG PE=4 SV=1
MSEAREELRRRLRALGFDEVRFARMDAPFGAGLRARMEAGQFADMDWMGRTADKRTNPDLVLPGVKTMIMLGVNYWPGAEAMSSGGGDEVGKPVWARYALHADYHDTIKPALVAAGKVLEELCGATAEDYRYYVDTGPVQERGWAERAGLGFIGKNAMLISREFGNWLFLATILTRVEIAPDEPLSAKHQPHESGEPRVGLLCGKCSRCMDECPTEAIVAPGVVDARRCVSYQTIENKGTIPRELRAGIGRRIYGCDVCAEVCPWNRFAQESRKVLLAARYELADLSLREVLELTPVRFAEVFRKTAIKRVKLAGLLRNACVVAGNTRAEECVEILVRLAGHESALVRGHAVWAVYRIAGHARAGELLAVAKAGERDEGVLAEYGAEGG

SEQ ID NO: 78682 - protein, 343 aa, unidentified
  source 1..343: note = Nioella sp.
  REGION 1..343: note = tr|A0A2E2EYZ0|A0A2E2EYZ0_9RHOB Epoxyqueuosine reductase OS=Nioella sp. OX=1912091 GN=queG PE=3 SV=1
MTDLKTQLEAKALEEGFAKMRVCRPDAIPQAAARLAEYVAKGRHGQMGWIEARMGWRGDPTALWPEARSVVMLAEPYTPEIDPLEPLKARDCGTISVYAQNRDYHDALKKRLKRVGRWLLEQAPGEEIKVFVDTAPVMEKPLGQASGLGWQGKHTNLLARDLGNWFFLGSIFTTLELPADPADSDHCGNCTACLDICPTDAFPAPYQLDARRCISYLTIEHHGPVDEELRPLMGNRIFGCDDCLAICPWNKFAVEAREMRYSGRPELQGPKLAELARLDDAAFRTMFSGNPVKRIGRNRFIRNVLYAIGNSGDSGLLDTAQGLLDDADDTVKDAARWAVERLR

SEQ ID NO: 78683 - protein, 371 aa, Nisaea sp.
  REGION 1..371: note = tr|A0A2D7Z6D8|A0A2D7Z6D8_9PROT tRNA epoxyqueuosine(34) reductase QueG OS=Nisaea sp. OX=2024842; GN = queG PE=4 SV=1
MIVTDIRARAANLGFSAVGIARPEVSATVQARFDAMVAADAFGDMSWMATTAARRRDPAVLWPAARSVIVLAQSYTPDHDPMTALAAPTRGNVSVYARFKDYHDVMKKRLKALARWLVATHGGEVKVFVDTAPILEKPLAQRAGVGWQGKHSNLVSRALGSWFFLGEVFTTLDLPVDAPGEDHCGACTRCIDICPTAAITAPYHLEPGRCIAYLTIEHKGHIDRAFRPAIGNRVFGCDDCLAVCPWNKFATPPMEAAYRPAPASSLPDLADLVALEDDGFRARFRGTPVRRLGRDRFLRNVLIAIGNSAQPALAPAAAARLDDSAAVVRAMAVWALARLLPASDFAALRQAHAGREADPDVRGEWAMAAAD

SEQ ID NO: 78684 - protein, 373 aa, Nisaea sp.; identical to SEQ ID NO: 75450
  REGION 1..373: note = tr|A0A2D7JN13|A0A2D7JN13_9PROT Epoxyqueuosine reductase OS=Nisaea sp. OX=2024842 GN=queG PE=3 SV=1

SEQ ID NO: 78685 - protein, 384 aa, unidentified
  source 1..384: note = Nissabacter sp.
  REGION 1..384: note = tr|A0A4P8SF88|A0A4P8SF88_9GAMM Epoxyqueuosine reductase OS=Nissabacter sp. SGAir0207 OX=2126321 GN=queG; PE = 3 SV=1
MTFPFDLHQLSQHIKQWGQSLGFQQVGICDTDLSLEEPKLQDWLDKQYHGEMEWMARHGMLRARPHELLPGTLRVISVRMNYLPAKAAFASTLKNPALGYVSRYALGRDYHKLLRQRLKKLGEMIQSWCSEQGGGEVGFRPFVDSAPIMERPLAAKAGIGWVGKHSLILNREAGSWFFLGELLIDLPLPVDQPQPEQCGKCVACMTTCPTGAIVAPYTVDARRCISYLTIELEGAIPEEFRPLMGNRIYGCDDCQLICPWNRFSQLTDEADFSPRAALHAPELLELFAWSEEKFLRVTEGSAIRRIGHLRWLRNVSVALGNAPYQAEIVLALQQRLGENEMLDEHLHWAIAQQFQKRDANKLEVQLPQQKRLVRAVEKGLPRDA

SEQ ID NO: 78686 - protein, 376 aa, Nitratireductor aquibiodomus
  REGION 1..376: note = tr|I5BWK6|I5BWK6_9RHIZ Epoxyqueuosine reductase; OS = Nitratireductor aquibiodomus RA22 OX=1189611 GN=queG; PE = 3 SV=1
MKSAQADRLRAFVEKEARALGFDAVAVASAERAPSRAVELGHFLKEGRHGSMQWMEETADRRAHPRDLWPQARSVIMLGMNYGPDENPLEILERRDRAAISVYARNRDYHDVIKGRLKQLAGKLAARTGEDVKVFVDTAPVMEKPLAREAGLGWQGKHTNLVSREYGSWLFLGSVFTTAELAPDAPEHDHCGSCRACLDICPTRAFPAPYQIDARRCISYLTIENKGPIPREFRIPMGNRIYGCDDCLAACPWNKFAQGAAEAKLQAREDLKEPPLSALLELDDAGFRALFSGSPVKRIGRDRFIRNVLIAAGNSGEASLVDPCRRLAEDDAPLVRGAAVWALSRLLDDKAFRAIETRLRPQETDAQVQTEWDGRS

SEQ ID NO: 78687 - protein, 378 aa, Nitratireductor basaltis
  REGION 1..378: note = tr|A0A084U5Q3|A0A084U5Q3_9RHIZ Epoxyqueuosine reductase OS=Nitratireductor basaltis OX=472175 GN=queG; PE = 3 SV=1
MGAGAPADRLRAFVEEKARAAGFDVVAFTTPDAAPHTPERLRRFIEAGRHGTMEWMAETEERRARPRNLWQDVRSIIMLGMNYGPDENPLDLLEQKDRAAISVYARNRDYHDVIKGKLKQVAGQIAAHAGEDVKVFVDTAPVMEKPLAAAAGLGWQGKHTNLVSREFGSWLFLGSIFTTAQLAPDQPERDHCGSCRACLDICPTNAFPAPYQIDARRCISYLTIEHKGPIPHEFRAAMGNRIYGCDDCLAVCPWNKFAQEASEAKLQARDDLKAPALAELLELDDAAFRMRFSGSPVKRIGRGRFVRNVLIAAGNSEDPRLVPQCEALLQDEDAQIRGAAVWALSRLISAENIRALAAMQNEEDAMVLEEWKMAGAAA

SEQ ID NO: 78688 - protein, 375 aa, Nitratireductor indicus
  REGION 1..375: note = tr|K2NQQ8|K2NQQ8_9RHIZ Epoxyqueuosine reductase; OS = Nitratireductor indicus C115 OX=1231190 GN=queG PE=3; SV = 1
MSGAEADRLRAFIEKEARAVGFDAVAIASAEEAPSRAVELRHFLDEGRHGTMLWMEDTADRRAHPRDLWPEVRSVIMLGMNYGPDENPLALLDKPDKASISVYARNRDYHDVVKGKLKQLAGKLAARTREDVKVFVDTAPVMEKPLAREAGLGWQGKHTNLVSRDFGSWLFLGSIFTTARLAADEPERDHCGSCRACLDICPTDAFPAPYQLDARRCISYLTIEHKGPIPRAFRARMGNRIYGCDDCLAVCPWNKFAVTAAEAKLKARDDLNEPALADLLLLDDPAFRTLFSGSPVKRIGRDRFIRNVLIAAGNSRDDGLAARCEELASDPSPLVRGAAVWALEQLLAPQEFARLAERLYASEEDLAVRAEWRKQ

SEQ ID NO: 78689 - protein, 376 aa, Nitratireductor pacificus
  REGION 1..376: note = tr|K2LGF8|K2LGF8_9RHIZ Epoxyqueuosine reductase; OS = Nitratireductor pacificus pht-3B OX=391937 GN=queG PE=3; SV = 1
MRPAQADRLRAFVDKEARAAGFDAVAIASAERAPSRAAELRHFLNEGRHGTMQWMEETAERRAHPRDLWPEARSVIMLAMNYGPEDNPLAILEHRSRAAISVYARNRDYHDVVKGRLKQVAGKLAARAGAEVKVFVDTAPVMEKPLAREAGLGWQGKHTNLVSREFGSWLFLGSIFTTAELAPDAPERDHCGSCRACLDICPTDAFPAPYQLDARRCISYLTIEHKGPIPREFRAAMGNRIYGCDDCLAVCPWNKFAREAAETKLRAREDLNAPPLADLLTLDDAAFRAFFSGSPIKRIGRDRFVRNALIAAGNSGDPALAGACEVLAGDPSALVRGAAVWALERLLDAERFAVLDARLRPREKDAEVLAEWGARS

SEQ ID NO: 78690 - protein, 376 aa, Nitratireductor sp.
  REGION 1..376: note = tr|A0A2E0JCH2|A0A2E0JCH2_9RHIZ Epoxyqueuosine reductase OS=Nitratireductor sp. OX=1872084 GN=queG PE=3; SV = 1
MKSAQADRLRAFVEKEARALGFDAVAVASAERAPSRAVELGHFLKEGRHGSMQWMEETADRRAHPRDLWPQARSVIMLGMNYGPDENPLEILERRDRAAISVYARNRDYHDVIKGRLKQLAGKLAARTGEDVKVFVDTAPVMEKPLAREAGLGWQGKHTNLVSREFGSWLFLGSVFTTAELAPDAPERDHCGSCRACLDICPTSAFPAPYQIDARRCISYLTIENKGPIPREFRIPMGNRIYGCDDCLAVCPWNKFAQNAAETKLQAREDLKEPPLSSLLELDDAGFRAFFSGSPVKRIGRDRFIRNVLIAAGNSGEASLVDPCERLAEDGSPLVRGAAVWALSRLLDEKAFAAIETRLRPQESDTQVQAEWDGRS

SEQ ID NO: 78691 - protein, 426 aa, Nitratireductor sp.
  REGION 1..426: note = tr|A0A5B8KVC5|A0A5B8KVC5_9RHIZ Epoxyqueuosine reductase OS=Nitratireductor sp. SY7 OX=2599600 GN=queG; PE = 3 SV=1
MVRPDQVATFLPAATFRPCLRPVAGLALRGPGFLTVASSARHDKSPLRTLVQREAKAAGFDLVRITRPDAVPQLPERLQAFVDAGHHATMAWLAERADTRADPRRLWPDVRSIIMLGMNYGPEHDPLLDLQKRSSGVISVYAQNRDYHDVVKGRLKLVAGKLAARSGAGVKVFVDTAPVMEKPLAEAAGLGWQGKHTNLVSRDYGSWLFLGSIFTTADIAPDEAEEDHCGSCRACLDICPTDAFPAPYQLDARRCISYLTIEHHGPIPRQFRVAMGNRIYGCDDCLAVCPWNKFAQRASEAKLAGRADRKAPRLNELLALDDAAFRQRFAGSPVKRTGRDRMVRNALVAAGNSGDATLVPKCRDLLDDAAPVVRGAAVWALSRLMPAGHFRAVATEQPAESDEGVRQEWRDALAETGGARGTQEHA

SEQ ID NO: 78692 - protein, 378 aa, Nitrincola lacisaponensis
  REGION 1..378: note = tr|A0A063Y4H4|A0A063Y4H4_9GAMM Epoxyqueuosine reductase OS=Nitrincola lacisaponensis OX=267850 GN=queG; PE = 3 SV=1
MPSEQSKQNSTPPSTEDLATLALKIKHWAKEFGFQQCAITGTDLSAEAEGLDQWLEQGMQGEMHWLAEHREKRLDASQLLPGTQRIISLRMDYLPPDVQTLHILNNPDKAYIARYTLGRDYHKLMRNRLKQLGLRINQELQQDSIFRPFVDSAPVLERPLARNAGLGWIGKHTLLLNRQAGSWFFLGELFINLPLPLDSPQQESHCGKCTACLDVCPTQAFPRPYVLDARRCISYLTIENKGSIPVSLRSAIGNRIFGCDDCQLVCPWNRFAKHSQEDDFKPRHQLDDIELLTLFRWDEATFLKRTEGSAIRRTGFIGWQRNLAVALGNSRGGSDVEQALEQRLQHADCPDMLREHIQWALQQLRGETGGDGSDAALQ

SEQ ID NO: 78693 - protein, 369 aa, unidentified
  source 1..369: note = Nitrincola nitratireducens
  REGION 1..369: note = tr|W9VNT4|W9VNT4_9GAMM Epoxyqueuosine reductase; OS = Nitrincola nitratireducens OX=1229521 GN=queG PE=3 SV=1
MISASLHQDLTNDLAQLADQIKIWASEIGFQGCAITGTDLSQEQTSLTEWLDQGMHGEMHYLSENIEKRLDASLLVPGTQRIISVRMDYLPADIKTLELLSQPDKAYIARYTLGRDYHKLIRQRLKQLGNKIQTSTGHEVSFRPFTDSAPVLERPIARNAGLGWIGKHTLLLNRKAGSWFFLGELFINLPLPIDPPETEQHCGRCTACLDICPTRAFPKPYVLDARRCISYLTIEYRGSIPTELRPLMGNRIFGCDDCQLVCPWNRFAKHSQEDDFKPRHGLDDIELIELFEWDEATFLKRTEGSAIRRTGFEGWQRNIAVALGNSSGNPRIIKALNERYPLASPLVQEHIEWALNELASKAPKPDLIT

SEQ ID NO: 78694 - protein, 366 aa, Nitrincola sp.
  REGION 1..366: note = tr|A0A099PDQ4|A0A099PDQ4_9GAMM Epoxyqueuosine reductase OS=Nitrincola sp. A-D6 OX=1545442 GN=queG PE=3; SV = 1
MVDDLSLRELADKIKHWASELGFQQCAITGTDLSAEADNLTEWLDQGMQGEMRWLEQHQAKRLDASQLLPGTQRIISLRMDYLPPETETLRILNNPDKAYIARYTLGRDYHKLMRKRIQQLGQRIDAHMQQDSAFRPFVDSAPVLERPIARNAGLGWIGKHTLLLNRQAGSWFFLGELFINLPLPVDAAETSSHCGSCRACLDICPTQAFPQPYVLDARRCISYLTIELKGAIPVELRAKMGNRIFGCDDCQLICPWNRFAKHSQESDFKPRHQLDDIDLLSLFEWDEATFLKRTEGSAIRRTGFEGWQRNLAVALGNSRGGAEVEAALNRRLQSGCSDMLAEHIHWALAQLRGGTDGGGNDATLQ

SEQ ID NO: 78695 - protein, 370 aa, Nitrincola sp.
  REGION 1..370: note = tr|A0A5A9W3G5|A0A5A9W3G5_9GAMM Epoxyqueuosine reductase OS=Nitrincola sp. MEB193 OX=1708751 GN=queG PE=3; SV = 1
MSDLSPEYLFDLAQKIKTWAQELGFQQCAITHTQVAAEGPALTRWVEQGMHGEMRWFEQNHELRLHPEQLHPGTQRILSLRMDYLTPGIETLSLLQQPSKAYIARYTLGRDYHKLLRQRLRQLAERIAQEGLPISFRPFVDSAPVLERPIARNAGLGWIGKHTLLLNRQAGSWFFLAELFIDLPLPIDPPQTRGHCGQCRACLDICPTQAFPEPYVLDARRCISYLTIEHPGSIPEPLRAKMGNRIFGCDDCQLVCPWNRFAQHSSESDFHPRHQLDDIDLLTLWEWDEPTFLKHTEGSAIRRTGYQGWQRNLAVALGNSRGGQQVVEALRKRLDTCSELVREHIHWALDQLSNKVRDAGNDDGNNVTPQ

SEQ ID NO: 78696 - protein, 362 aa, unidentified
  source 1..362: note = Nitrincola tibetensis
  REGION 1..362: note = tr|A0A364NJJ1|A0A364NJJ1_9GAMM Epoxyqueuosine reductase OS=Nitrincola tibetensis OX=2219697 GN=queG PE=3; SV = 1
MTNDLAQLAAQIKIWATEVGFQGCAITGTDLSQEKTPLTEWLDQGMQGEMHYLSDNIEKRLDASLLVPGTQRIISVRMDYLPADIKTLELLSQPDKAYIARYTLGRDYHKLIRQRLKQLGNKIQASTGHEVSFRPFTDSAPVLERPIARNAGLGWIGKHTLLLNRKAGSWFFLGELFINLPLPIDPPETEQHCGRCTACLDICPTRAFPKPYVLDARRCISYLTIEYKGSIPIELRPLMGNRIFGCDDCQLVCPWNRFAKHSQETDFKPRHGLDDIELIELFEWDEATFLKRTEGSAIRRTGFEGWQRNIAIALGNSRGGPRILKALQERHPMASPLVQEHIEWALNELVSKTSKPEPSLTI

SEQ ID NO: 78697 - protein, 357 aa, Nitrococcus mobilis
  REGION 1..357: note = tr|A4BLN8|A4BLN8_9GAMM Epoxyqueuosine reductase; OS = Nitrococcus mobilis Nb-231 OX=314278 GN=queG PE=3 SV=1
MNDARPALDLHALARDIKRWGQELGFDRVGIAKPNLAVDEARLLQWLRRGFHGEMAYMARHGVKRARPQRLLAGTLRVISVRLNYRPPGIEPDARVLQDARRAFIARYALGRDYHKLMRKRLQRLAHRIEATAGPFGYRALVDSAPVLEKALARDAGLGWIGKHTLLLSREAGSYFFLGELFTDLPLPPSAPSSEHCGSCRACLNICPTGAIVGPYQLDARRCISYLTIEHQGSIPESLRPLIGNRVFGCDDCQAVCPWNKFARPTDEADFRPRHGLDTAALTALMRWDEAEFLERTAGSAIHRLGHVRWLRNLAVALGNSPCDEAARDVLRARSQHPSALVREHVAWALARQSDKS

SEQ ID NO: 78698 - protein, 376 aa, unidentified
  source 1..376: note = Nitrolancea hollandica
  REGION 1..376: note = tr|I4EGI2|I4EGI2_9CHLR Uncharacterized protein; OS = Nitrolancea hollandica Lb OX=1129897 GN=NITHO_2720001; PE = 4 SV=1
MLTRERVRELAAAAGLNVARVSSADPFDGLAEKLEAHIDAGRMAGLDWFTVERARFSADPRNLHAGGRSIIAVGLPYWQPDIQPPDDDEPRGRISRYAWGRDYHKTLKNRMRDLQQRLEQDVGHAIEARLLVDTARIVDRAVAARSGLGWYGKNAMILVPGHGSWVMLGELVVDVEIEVDPSLKPRCGQCTGCLDACPTGALVAPYTVDTPRCISFLTIELRGPIPRELRPQMGNWVFGCDACQDVCPYTGAARPADDEAFRPARIENAFPSLRWLLRMTEPEFREVYRGTAVLRTKRAGLARNAAIALGNTGTARDLAVLEDALISHDEPLVRGHAAWAMARIDRSVASAALLQRLVREEDASVRAAIADALKEG

SEQ ID NO: 78699 - protein, 373 aa, unidentified
  source 1..373: note = Nitrosococcus halophilus
  REGION 1..373: note = tr|D5C1A4|D5C1A4_NITHN Epoxyqueuosine reductase; OS = Nitrosococcus halophilus (strain Nc4) OX=472759 GN=queG; PE = 3 SV=1
MSIIDTMHGRESGTLDLNALAADIKQWGRKLGFQHIGIADIALGEAEKHLLDWLQAGRHGEMAYMARHGLKRTRPGELVPGTVRIISARMDYWPEADDDPWRILEDDSLGYISRYALGRDYHKVLRKRLQRLAKQMEAAIGPFGYRVFSDSAPVMEKALAEKAGLGWVGKHTNLLARDAGSWFFLGEIYTDLPLPPDSATTSHCGTCQACIDICPTQAIVAPYQLDARRCISYLTIELRGSIPEPLRPLIGNRIYGCDDCQLVCPWNRYAQVTREKDFSPRHGLAAPQLLDLFAWSEEEFLSRTEGSAIRRIGYLGWLRNIAVALGNAAPHPHIIRALQSRADHSSALVREHVAWALGEQARKSRAAAPTEEN

SEQ ID NO: 78700 - protein, 368 aa, Nitrosococcus oceani
  REGION 1..368: note = tr|Q3JE80|Q3JE80_NITOC Epoxyqueuosine reductase; OS = Nitrosococcus oceani (strain ATCC 19707 / BCRC 17464 / NCIMB 11848 / C-107) OX=323261 GN=queG PE=3 SV=1
MHGAEKTGPDLHTLAADIKQWGYQLGFQQVGIADIELGEAEQHLLAWLQAGRHGEMDYMARHGLKRTRPEELVPGTLRVISARMDYWPETEDNPWHILEDDSRGYISRYALGRDYHKVLRKRLQKLAKQIEAAIGPFGYRVFSDSAPVMEKALAEKAGLGWIGKHTNLLARDVGSWFFLGEVYTDLPLPLDGATTSHCGSCRACIDICPTQAIVAPYQLDARRCISYLTIELRGAIPESLRPLIGNRIYGCDDCQLICPWNRYAQVTGEQDFRPRQGLEAPQLLDLFAWSEEDFLSRTEGSAIRRIGYVGWLRNIAVALGNAAPQPDIVQALRSRADHPSPLVREHVIWALEEQLRKRAVPVRQEKRG

SEQ ID NO: 78701 - protein, 411 aa, Nitrosococcus oceani
  REGION 1..411: note = tr|A0A0E2Z4W5|A0A0E2Z4W5_9GAMM Epoxyqueuosine reductase OS=Nitrosococcus oceani C-27 OX=314279 GN=queG; PE = 3 SV=1
MNKLEGPPVEACVKRVKTLWQLKKLEILLDDGEAVTNNETINAMHGAEKTGPDLHTLAADIKQWGYQLGFQQVGIADIELGEAEQHLLAWLQAGRHGEMDYMARHGLKRTRPEELVPGTLRVISARMDYWPETEDNPWHILEDDSRGYISRYALGRDYHKVLRKRLQKLAKQIEAAIGPFGYRVFSDSAPVMEKALAEKAGLGWIGKHTNLLARDVGSWFFLGEVYTDLPLPLDGATTSHCGSCRACIDICPTQAIVAPYQLDARRCISYLTIELRGAIPESLRPLIGNRIYGCDDCQLICPWNRYAQVTGEQDFRPRQGLEAPQLLDLFAWSEEDFLSRTEGSAIRRIGYVGWLRNIAVALGNAAPQPDIVQALRSRADHPSPLVREHVIWALEEQLRKRAVPVRQEKRG

SEQ ID NO: 78702 - protein, 373 aa, unidentified
  source 1..373: note = Nitrosococcus wardiae
  REGION 1..373: note = tr|A0A4P7BY71|A0A4P7BY71_9GAMM Epoxyqueuosine reductase OS=Nitrosococcus wardiae OX=1814290 GN=queG PE=3; SV = 1
MGIIDIMYGRENRALDLNALAADIKQWGHKLGFQHLGITDIALGEAEKHLLDWLQAGRHGEMAYMARHGLKRTRPAELVPGTVRVISARMDYWPEADNNPWHILEDDSLGYISRYALGRDYHKVLRKRLQQLAKQIEAAIGPFGYRVFSDSAPVMEKALAEKAGLGWVGKHTNLLARDAGSWFFLGEIYTDLPLPPDSATTSHCGTCQACIDICPTQAIVAPYQLDARRCISYLTIELRGSIPEPLRPLIGNRIYGCDDCQLVCPWNRYAQVTREKDFSPRHKLAAPQLLDLFAWSEEEFLSRTEGSAIRRVGYLGWLRNIAVALGNAAPHPHIIRALQARADHPSALVREHVAWALKEQVRKSSAATPGGED

SEQ ID NO: 78703 - protein, 368 aa, unidentified
  source 1..368: note = Nitrosococcus watsoni
  REGION 1..368: note = tr|D8KAV4|D8KAV4_NITWC Epoxyqueuosine reductase; OS = Nitrosococcus watsoni (strain C-113) OX=105559 GN=queG; PE = 3 SV=1
MHGVEKTGPDLHTLAADIKQWGCQLGFQQVGIADIELGEAEQHLLAWLQTGRHGEMDYMARHGLKRTRPEELVPGTLRVISARMDYWPETEDNPWHILKDDSRGYISRYALGRDYHKVLRKRLQQLAKQIEAAIGPFGYRVFSDSAPVMEKALAAKAGLGWIGKHTNLLARDVGSWFFLGEIYTDLPLPLDGATTSHCGSCRACIDICPTQAIVAPYQLDARRCISYLTIELRGAIPESLRPLIGNRIYGCDDCQLICPWNRYAQVTGEQDFHPRHGLEAPQLLDLFAWSEEEFLSRTEGSAIRRIGYVGWLRNIAVALGNAAPRPEIVHALRSRADHPSPLVREHVMWALEEQRRKRAVPIRQEERD

SEQ ID NO: 78704 - protein, 364 aa, unidentified
  source 1..364: note = Nitrosomonadaceae bacterium
  REGION 1..364: note = tr|A0A2E6UQE2|A0A2E6UQE2_9PROT Epoxyqueuosine reductase OS=Nitrosomonadaceae bacterium OX=2026767; GN = queG PE=3 SV=1
MQKNISNYLLLDLASVTNNIRIWSKELGFQEIGISDAKSEKSHIESGLLRWLDIGYHGTMDYMVKHGIKRVHPDKLIPGTLRVISVRMNYSPPKTRNSWQVIKDREKAFISRYALGRDYHKVLRGRLQKLADKIAEQIGCFNYRVFSDSAPVMEVEWAQKSGLGWRGKHTLLLSREAGSMFFLGEIYTDLPLPVDKPIKNYCGTCTKCIDICPTQAIIEPYRLDARRCISYLTIELKGSIPEPLRPLIGNRVYGCDDCQLACPWNKYAAATGEQDFAVRNGLDNSSLVELFNWSREEFDTKLAGSPIRRIGHEQWLRNLAVGLGNASYSKKISNALKARYNDNSPLVREHVRWALQQHGVVGHL

SEQ ID NO: 78705 - protein, 371 aa, unidentified
  source 1..371: note = Nitrosomonadaceae bacterium
  REGION 1..371: note = tr|A0A4V0X965|A0A4V0X965_9PROT Epoxyqueuosine reductase OS=Nitrosomonadaceae bacterium OX=2026767; GN = queG PE=3 SV=1
MQENASKSPSQDFVALAVAIKAWARELGFQDIRIADATADMSQVEANLHEWLSQGHHGEMDYMAKHGIRRTRPAELVPNTLRVISIRMNNTPPTAKNSWEVLRSGVGAFISRYALGRDYHKVLRARLQKLADKITVEVGPFNYRVFTDSAPVMEVEWAQRSGLGWRGKHTLLLTRESGSMFFLGEVYTDLPLPVDGASENHCGSCSKCISICPTQAIIAPYRLDARRCISYLTIEHKGRIPIELRPLIGNRVYGCDDCQLICPWNKFAAITDEGDFAVRNGLDDVSLVELFGWSKERFDTLLAGSPIRRIGHEQWLRNLAVGLGNAPSSFPVINALQARRDDPSDLVREHVEWALQQHKGSPPLMKSKDGP

SEQ ID NO: 78706 - protein, 353 aa, unidentified
  source 1..353: note = Nitrosomonadales bacterium
  REGION 1..353: note = tr|A0A2E0I700|A0A2E0I700_9PROT Epoxyqueuosine reductase OS=Nitrosomonadales bacterium OX=2026761 GN=queG; PE = 3 SV=1
MNDKLIWKSITDKIKIWGHEFGFDEIGISDINLNHSKKSYDNWIKSGFHGEMHYLKKHQDIKFNPHNLVPKTLTVISARLNYFPKKENTLQILQDKNKAYISRYTLGRDYHKVIREKLKKLTKKLKEEIKNISFNSRVFTDSAPVLEVELAEKAGLGWRGKHTLLLNKDNGSWFFIGEIYTSLPLVIDKKKSNHCGSCTACIDVCPTKAIVAPYKLDANKCISYLTIEFKGSIPIEYRKPIGNRIYGCDDCQLVCPWNKYGKITKEKDFNVRHNLDNLSLIDSFKITETEFKKIFNGSAILRIGYDQWLRNIAVGLGNAPKSTNIIKVLRSRLKNTSKLVQEHILWAINEHQN

SEQ ID NO: 78707 - protein, 371 aa, unidentified
  source 1..371: note = Nitrosomonadales bacterium
  REGION 1..371: note = tr|A0A1E4G120|A0A1E4G120_9PROT Epoxyqueuosine reductase OS=Nitrosomonadales bacterium SCN 54-20; OX = 1660164 GN=queG PE=3 SV=1
MQDLPDSTADLPQLARSIKEWGKKLGFQKVSIADAGADMREAETGLFKWLDQGCHGEMDYMARHGTRRTRPAELVPGTLRVISVRMNYTPVAKDSWEVIRDGSCAFISRYALGRDYHKVLRGRLQKLAEKIEAETGRLNYRVFSDSAPVTEVEWAQKSGLGWRGKHTLLLSRDAGSLFFLGELFTDLPLPVDNPIGNYCGSCTKCIDICPTQAIIAPYRLDARRCISYLTIEHKGSIPESLRPLIGNRVYGCDDCQLVCPWNKFAAITDEEDFSVRNGLDSASLIELFGWSKEEFEARLAGSPIRRIGHEQWLRNLAVGLGNAPFSQPVIQALRARLDDTSALIREHVRWALHQQERPPSLFIEDASIPEK

SEQ ID NO: 78708 - protein, 367 aa, Nitrosomonas aestuarii
  REGION 1..367: note = tr|A0A1I4CV65|A0A1I4CV65_9PROT Epoxyqueuosine reductase OS=Nitrosomonas aestuarii OX=52441 GN=queG PE=3; SV = 1
MSDNSGLDVADLALNIKAWGKELGFQEIRIADAHADMSEAEAGMFKWLDEGYHGAMDYMGKHGTKRSRPDELVAGTKRVISVRMNYYPPKAKESWTVINKGDQAFISRYALGRDYHKVLRARMQKLAEKIQHAIGSFNYRVFSDSAPVMEVEWAQKSGLGWRGKHTLLLSRQAGSFFFLGEIYTDLLLPVDAPVGTKGSFCGSCTKCIDICPTQAIVAPYQVDARRCISYLTIELKESIPESLRPLIGNRIYGCDDCQLVCPWNKFSHLTDEEDFHVRHGLDDITLLELFSWNKAEFESRLAGSPIRRIGYLQWLRNIAVGLGNAPYSPEIIQALQTRLDDDSEMVREHVQWALEQQYKKENKESTE

SEQ ID NO: 78709 - protein, 360 aa, Nitrosomonas communis
  REGION 1..360: note = tr|A0A0F7KHH3|A0A0F7KHH3_9PROT Epoxyqueuosine reductase OS=Nitrosomonas communis OX=44574 GN=queG PE=3; SV = 1
MQEETSTNSSLDVILLKESIKNWGRQLGFQDVRVADANANMSSVEAELSAWLDKGFHGDMDYMVKHGTKRTRPAELVPGTLRVISVRMNYTPPAVKEGWSILEDGNKAFISRYAVGRDYHKVLRIRLQKLADNISGKIGPFNYRVFTDSAPVMEVEWAKKSGLGWRGKHTLLLSREGGSYFFLGEMYTDLPLPVDDPVESYCGSCTRCIDICPTQAIIGPYQLDARRCISYLTIELKGSIPEALRTLIGNRVYGCDDCQLVCPWNKFAKITQEADFAVRNGLDDISLVELFQWSKEEFESKLAGSPIRRIGYEQWLRNIAVGLGNAPSSPAVIEALQARNHDPSPLVREHVRWALWQHEK

SEQ ID NO: 78710 - protein, 346 aa, Nitrosomonas communis
  REGION 1..346: note = tr|A0A5D3YC48|A0A5D3YC48_9PROT Epoxyqueuosine reductase OS=Nitrosomonas communis OX=44574 GN=queG PE=3; SV = 1
MLKESIKNWGRQLGFQDVRVADANANMSSVEAELSAWLDKGFHGDMDYMVKHGTKRTRPAELVPGTLRVISVRMNYTPPAVKEGWSILEDGNKAFISRYAVGRDYHKVLRIRLQKLADNISGKIGPFNYRVFTDSAPVMEVEWAKKSGLGWRGKHTLLLSREGGSYFFLGEMYTDLPLPVDDPVESYCGSCTRCIDICPTQAIIGPYQLDARRCISYLTIELKGSIPEALRTLIGNRVYGCDDCQLVCPWNKFAKITQEADFAVRNGLDDISLVELFQWSKEEFESKLAGSPIRRIGYEQWLRNIAVGLGNAPSSPAVIEALQARNHDPSPLVREHVRWALWQHEK

SEQ ID NO: 78711 - protein, 359 aa, unidentified
  source 1..359: note = Nitrosomonas cryotolerans
  REGION 1..359: note = tr|A0A1N6INC0|A0A1N6INC0_9PROT Epoxyqueuosine reductase OS=Nitrosomonas cryotolerans ATCC 49181; OX = 1131553 GN=queG PE=3 SV=1
MQENTPLNVSYDFISLATIIKAWGRELGFQDIRIADANTDMSPVESNLLEWLDKGYHGDMDYMAKHGVKRTRPSELVPGTQRVISVCMNYTPPLAENSWAVIKSGDQAFISRYALGRDYHKVLRARLQKLADKIAQEVTPFNYRVFSDSAPVMEVEWAQKSGLGWRGKHTLLLSREAGSMFFLGEIYTDLPLPVDEAIGSYCGTCSKCIDICPTQAIIAPYQLDARRCISYLTIELKGSIPETLRPLIGNRVYGCDDCQLVCPWNKFAKITNENDFSVRHGLDNASLVELFSWSKEEFDLRLAGSPIRRIGHKQWLRNLAVGLGNAASSPKIINALRARHDDDSPLVREHVQWALRQHK

SEQ ID NO: 78712 - protein, 358 aa, Nitrosomonas halophila
  REGION 1..358: note = tr|A0A1H3LQ24|A0A1H3LQ24_9PROT Epoxyqueuosine reductase OS=Nitrosomonas halophila OX=44576 GN=queG PE=3; SV = 1
MNNKDTDWRWLSEQIKLWGRQLGFQEVRISDAHADVATVEAGLSDWLENQFHGEMDYMAKHGTKRTRPPELVPGTLRVISVRMNNKPVNMEESWTALQDGSRAFISRYALGRDYHKVLRARLQKLAEKITEQVGEFGYRAFSDSAPVMEVEWASRSGLGWRGKHTLLLSRDAGSFFFLGELYTDLPLTVDDPVASYCGSCTRCLDICPTQAIVAPYRLDARRCISYLTIELKGSIPEDLRALIGNRVYGCDDCQLVCPWNKFSQFTQEADFAVRHGLDNVSLIELFAWDKETFEARLAGSPIRRIGYEQWLRNLAVGLGNAPSSPAVIGALQARRRDPSPLVREHVEWALGQHRLTKE

SEQ ID NO: 78713 - protein, 375 aa, Nitrosomonas marina
  REGION 1..375: note = tr|A0A1I0DB28|A0A1I0DB28_9PROT Epoxyqueuosine reductase OS=Nitrosomonas marina OX=917 GN=queG PE=3 SV=1
MDTAQQKTSYNNSSDCKPDYVRLASEIKTWGRELGFQDVRIGNANTDMSEAEAGMFAWLEDENHGEMDYMAKHGTKRSRPAELVPGTQRVISVRMNYYPPNAAESWAVINQGDKAFISRYALGRDYHKVLRSRMQKLADKIQQAIGSFNYRVFSDSAPVMEVEWAQKSGLGWRGKHTLLLSRQAGSYFFLGEIYTDLLLPVDEPVGTKGSFCGSCTKCIDICPTQAIVAPFKVDARRCISYLTIELKSSIPESLRPLIGNRIYGCDDCQLVCPWNKFSHLTGESDFHVRHGLDDVTLVDLFRWNQQEFETRLAGSPIRRIGYQQWLRNIAVGLGNAPFSDTVIAALQSRLNDPSEMVREHVQWALEQQHTKKETE

SEQ ID NO: 78714 - protein, 375 aa, Nitrosomonas marina
  REGION 1..375: note = tr|A0A1H8HEQ6|A0A1H8HEQ6_9PROT Epoxyqueuosine reductase OS=Nitrosomonas marina OX=917 GN=queG PE=3 SV=1
MDTAQQKTSYKNSTDCKPDYVRLATEIKAWGRELGFQDVRIGNANADMSEAEAGMFAWLEDENHGEMDYMAKHGTKRSRPAELVPGTQRVISVRMNYYPPNAADSWTVINQSEKAFISRYALGRDYHKVLRSRMQKLADKIQQVAESFNYRVFSDSAPVMEVEWAQKSGLGWRGKHTLLLSRQAGSYFFLGEIYTDLLLPVDEPVGTQGSFCGSCTKCIDVCPTQAIVAPFKVDARRCISYLTIELKSSIPESLRPLIGNRIYGCDDCQLVCPWNKFSHLTGESDFHVRHGLDDVTLVELFRWNQQEFETRLAGSPIRRIGYPQWLRNIAVGLGNAPYSDAAIAVLQSRLDDPSEMVREHVQWALEQQYAKKETE

SEQ ID NO: 78715 - protein, 366 aa, unidentified
  source 1..366: note = Nitrosomonas mobilis
  REGION 1..366: note = tr|A0A1G5SG57|A0A1G5SG57_9PROT Epoxyqueuosine reductase OS=Nitrosomonas mobilis OX=51642 GN=yjeS PE=3; SV = 1
MMLVMQKTAPDKQIEDWSQLTRLIRDWASELGFQALHISDASADTVATENGLNAWLEAGCHGEMDYMAKHGIKRTRPAELVPGTLRVISVRMNNKPVEMENSWHAIRNGQRAFISRYALGRDYHKVVRARLQKLAGRIRTQVGEFGYRVFSDSAPVMEVEWASRSGLGWRGKHTLLLTREAGSFFFLGEIYTDLPLLVDQPAQNYCGSCTRCIDVCPTQAIVAPYRLDARRCISYLTIELKGSIPEDMRPLIGNRVYGCDDCQLICPWNKFSKLTEEEDFAVRHGLDDVALVDLFAWSQLEFEEKLAGSPIRRIGHERWLRNLAIGLGNAPTSPEIIAALQARSNDPSPLVREHVQWALARHGSSE

SEQ ID NO: 78716 - protein, 360 aa, Nitrosomonas nitrosa
  REGION 1..360: note = tr|A0A3D0FB40|A0A3D0FB40_9PROT Epoxyqueuosine reductase OS=Nitrosomonas nitrosa OX=52442 GN=queG PE=3; SV = 1
MHEKTSMNSSRDMVSLKQSIKSWGMQLGFQDIRIADAHADMTSAEEGMFAWLEQGFHGGMDYMAKHGTKRSRPSELVPGVLRVISVRMNYKPPAAKESWEVIHDGDKAFISRYAVGRDYHKVMRARLQKLADHITNEIGHFNYRVFSDSAPVMEVEWAKKAGLGWRGKHTLLLSREGGSYFFLGEMYTDLPLPVDEPIGDYCGSCTRCIDICPTQAIIGPYRLDARRCISYLTIELKGSIPEDLRPLIGNRVYGCDDCQLVCPWNKFAKVTQEADFAVRHGLDDVSLIELFNWSEQEFESKLAGSPIRRIGYEQWLRNLAVGLGNAPTSPAVIEVLQARSLDPSPLVREHVQWALRQHGE

SEQ ID NO: 78717 - protein, 354 aa, Nitrosomonas nitrosa
  REGION 1..354: note = tr|A0A1I4T1X5|A0A1I4T1X5_9PROT Epoxyqueuosine reductase OS=Nitrosomonas nitrosa OX=52442 GN=queG PE=3; SV = 1
MNSSRDMVSLKQSIKSWGMQLGFQDIRIADAHADMTSAEEGMFAWLEQGFHGGMDYMAKHGTKRSRPSELVPGVLRVISVRMNYKPPAAKESWEVIHDGDKAFISRYAVGRDYHKVMRARLQKLADHITNEIGHFNYRVFSDSAPVMEVEWAKKAGLGWRGKHTLLLSREGGSYFFLGEMYTDLPLPVDEPIGDYCGSCTRCIDICPTQAIIGPYRLDARRCISYLTIELKGSIPEDLRPLIGNRVYGCDDCQLVCPWNKFAKVTQEADFAVRHGLDDVSLIELFNWSEQEFDSKLAGSPIRRIGYEQWLRNLAVGLGNAPTSPAVIEALQARSLDSSPLVREHVQWALRQHGE

SEQ ID NO: 78718 - protein, 355 aa, Nitrosomonas oligotropha
  REGION 1..355: note = tr|A0A1H8R743|A0A1H8R743_9PROT Epoxyqueuosine reductase OS=Nitrosomonas oligotropha OX=42354 GN=queG; PE = 3 SV=1
MAVAIKTWGKELGFHDVRIADAQADMSTVESGLFQWLAQGYHGDMDYMAKHGTKRTRPAELEPGTQRVVSVCMNYAPPAVKNSWDVIHDGDQAFISRYALGRDYHKVIRARLQKLADRITGEVGTFQYRVFSDSAPVMEVAWAQKSGLGWRGKHTLLLNRQAGSMFFLGEMYVDLPLPVDEETGNYCGSCSRCIDVCPTQAIIGPYQVDARRCISYLTIELKDSIPEPLRPLIGNRIYGCDDCQLVCPWNKYAKITQENDFHVRNGLDEVSLIELFGWDQATFEAKLAGSAIRRIGHTQWLRNIAVGLGNAPYSVEIVQTLQARVDDSSDMVREHVQWALQQQDQKRTAIQESST

SEQ ID NO: 78719 - protein, 370 aa, Nitrosomonas oligotropha
  REGION 1..370: note = tr|A0A5C7VTX1|A0A5C7VTX1_9PROT Epoxyqueuosine reductase OS=Nitrosomonas oligotropha OX=42354 GN=queG; PE = 3 SV=1
MQENTSTNKLPDYAALAAAIKTWGKELGFHDVRIADAQADMSTVESGLFQWLAQGYHGDMDYMAKHGTKRTRPAELEPGTQRVVSVCMNYAPPAVKNSWDVIHDGDRAFISRYALGRDYHKVIRARLQKLADRITSEVGTFRYRVFSDSAPVMEVAWAQKSGLGWRGKHTLLLNRQAGSMFFLGEMYIDLPLPVDEETGNYCGSCTRCIDICPTQAIVGPYQVDARRCISYLTIELKDSIPEPLRPLIGNRIYGCDDCQLVCPWNKFAKITNENDFHVRNGLDEVSLIELFGWDQATFEAKLAGSAIRRIGHAQWLRNIAVGLGNAPYSVEIVQALQARSDDPSDMLREHVQWALQQQGQKRTAIQESST

SEQ ID NO: 78720 - protein, 368 aa, Nitrosomonas sp.
  REGION 1..368: note = tr|A0A5C7VFU2|A0A5C7VFU2_9PROT Epoxyqueuosine reductase OS=Nitrosomonas sp. OX=42353 GN=queG PE=3 SV=1
MQEEISQNGTVDPASLKQSITNWAHQLGFQDIRIANAEADMSSVETGLSAWLAMGFHGDMDYMAKHGIKRTRPNELVPGTSRVISVRMNYLPSDVKESWSVIEDGHQAFISRYALGRDYHKVLRSRLQKLVEKMEVAIGKFNYRVFSDSAPVMEVEWASKSGLGWRGKHTLLLSREAGSFFFLAEIYTDIPLPVDEPSKNYCGSCTRCLEVCPTNAIVAPYKLDARRCISYLTIELKGSIPETLRPLIGNRVYGCDDCQLICPWNKFAEPTQEPDFAVRNGLDDSSLVALFAWTQDEFETKLAGSPIRRIGYQQWLRNLAVGLGNAPSSPSVIQALKDRSNDPSTLVQEHVHWALKQHETRQSICNMQ

SEQ ID NO: 78721 - protein, 365 aa, Nitrosomonas sp.
  REGION 1..365: note = tr|A0A2V3W9N4|A0A2V3W9N4_9PROT Epoxyqueuosine reductase OS=Nitrosomonas sp. Nm84 OX=200124 GN=queG PE=3; SV = 1
MQENTSTNKLPDYIALATAIKAWSKELGFQDTCIADAGADMSAVESGLFQWLDKGYHGDMDYMAKHGTKRTRPAELEPGTQRIISVCMNYSPPATKKSWDVINMGDQAFISRYALGRDYHKVMRARLQRLADKITAAVGQFNYRVFSDSAPVMEVAWAQKAGLGWRGKHTLLLSRQAGSMFFLGEMYTDLPLPVDETTGDYCGSCSKCIDICPTQAIIAPYELDARRCISYLTIELKSSIPESLRPLIGNRIYGCDDCQLVCPWNKFARITNENDFHVRNGLDDVSLIALFSWDQETFETKLAGTPIRRIGHQQWLRNIAVGLGNAPYSGEIVTALQARLDDASALVREHVQWALQQQDKKRTEQ

SEQ ID NO: 78722 - protein, 357 aa, Nitrosomonas ureae
  REGION 1..357: note = tr|A0A1H5WH05|A0A1H5WH05_9PROT Epoxyqueuosine reductase OS=Nitrosomonas ureae OX=44577 GN=queG PE=3 SV=1
MAVVIKTWGKELGFHDVRIADANADIAVIESGFFSWLDKGYHGEMDYMAKHGTKRTRPAELEPGTLRIISVCINYAPPAVKNSWDVIHSGERAFVSRYALGRDYHKVLRSRLQKLADKMTAEAGAFNYRVFSDSAPVMEVAWAQKAGLGWRGKHTLLLSRQAGSMFFLGEMYVDLPLPVDEETENYCGSCSRCIDICPTQAIVAPYEVDARRCISYLTIELKDSIPESLRPLIGNRIYGCDDCQLVCPWNKFAQITNENDFHVRNGLDDVSLIELFSWDQETFEAKLAGSAIRRIGHIQWLRNIAVGLGNAPYSAEIVQALQARLNDASVLVREHVQWALQQQDMKRTEQQQRTYDE

SEQ ID NO: 78723 - protein, 373 aa, Nitrosomonas ureae
  REGION 1..373: note = tr|A0A285BX37|A0A285BX37_9PROT Epoxyqueuosine reductase OS=Nitrosomonas ureae OX=44577 GN=queG PE=3 SV=1
MQKNTSTNKISDYAALAVAVKTWGKELGFHDVRIADANADITVIESGFFSWLDKGYHGEMDYMAKHGTKRTRPAELEPGTLRIISVCINYAPPSVKNSWDVIHSGERAFISRYALGRDYHKVLRSRLQKLADKMTAEAGAFNYRVFSDSAPVMEVAWAQKAGLGWRGKHTLLLSRQAGSMFFLGEMYVDLPLPVDEETENYCGSCSRCIDICPTQAIVAPYEVDARRCISYLTIELKDSIPESLRPLIGNRIYGCDDCQLVCPWNKFARITNENDFHVRNGLDDVSLIELFSWDQETFEAKLAGSAIRRIGHIQWLRNIAVGLGNAPYSVEIVQALQARLNDASVLVREHVQWALQQQDMKRTEQQQRKTYDE

SEQ ID NO: 78724 - protein, 376 aa, Nitrosospira briensis
  REGION 1..376: note = tr|A0A1I5BVU7|A0A1I5BVU7_9PROT Epoxyqueuosine reductase OS=Nitrosospira briensis OX=35799 GN=queG PE=3; SV = 1
MQEKTSKDPLPAPPAQTLDFTQLTRAIKAWAEELGFQDICIADAGSDMAKAESGLSEWLRHGFHGEMDYMAKHGTRRTRPAELVPGTLRVISARMNYMPAEARDSWQVIRDGEKAFISRYALGRDYHKVLRGRLQRLADKITAATGQFNYRVFSDSAPVMEVEWAQRSGLGWRGKHTLLLSREGGSMFFLGELFTDLPLPIDNPVGDYCGSCTKCLDICPTQAIIAPYRLDARRCISYLTIEHKGSIPETLRPLIGNRVYGCDDCQLVCPWNKFAAVTGEGDFSVRNGLDDTSLVELFSWSREEFEARLAGSPIRRIGHEQWLRNLAVGLGNAPFSAGVISALQARRDDPSSLVREHVQWALHQHDSRAARVLESP

SEQ ID NO: 78725 - protein, 377 aa, unidentified
  source 1..377: note = Nitrosospira lacus
  REGION 1..377: note = tr|A0A1W6SKZ6|A0A1W6SKZ6_9PROT Epoxyqueuosine reductase OS=Nitrosospira lacus OX=1288494 GN=queG PE=3; SV = 1
MMRIMQEKISKDPSGIPCNLPDAGVDLPRLADAIKAWGKELGFQEICIADANAEMAKAESGLFEWLGKGYHGEMDYMAKHGTRRTRPSELVPGTLRVISVRMNYTPPAAKNSWQVMHDGDKAFISRYALGRDYHKVLRGRLQKLADKIAAEVGHFNYRVFSDSAPVMEVEWAQKSGLGWRGKHTLLLSREAGSMFFLGELYTDLPVPVDSPTGNYCGSCTKCIDICPTQAIVAPYRLDARRCISYLTIEHKGSIPEALRPLIGNRVYGCDDCQLICPWNKFAAVTGEDDFAVRNGLDDVSLVELFGWTKEEFDIRLAGSPIRRIGHEQWLRNLAVGLGNAPSSAAVTAALRTRCDDESSLVREHVRWALQRHDMECI

SEQ ID NO: 78726 - protein, 122 aa, Nitrosospira multiformis
  REGION 1..122: note = tr|A0A328ZHP3|A0A328ZHP3_9PROT Uncharacterized protein OS=Nitrosospira multiformis OX=1231 GN=C8R16_10297; PE = 4 SV=1
MLRPSIGNRVYGCDDCRLICPWNKFAATTGEEDFAVRNGLDDTSLLELFGWTKEEFDTRLAGSSIRRIRHEQWLRNLAVGLGNAPFSVSVMSALQGRRDDVRPWYANTCAGHYICMKRVFSP

SEQ ID NO: 78727 - protein, 385 aa, Nitrosospira multiformis
  REGION 1..385: note = tr|Q2Y602|Q2Y602_NITMU Epoxyqueuosine reductase; OS = Nitrosospira multiformis (strain ATCC 25196 / NCIMB 11849 / C 71) OX=323848 GN=queG PE=3 SV=1
MRKDDPSTELSPEPLKDLSDSTVDLPQLARSIKEWGEKLGFQKVSIVDAGADMRRAETGLFEWLDQGCHGEMDYMARHGTRRTRPAELVPGTLRVISVRMNYMPIARDSWQVIQDGTRAFISRYALGRDYHKVLRGRLQKLAEKIEAETGCLNYRVFSDSAPVMEVEWAQKSGLGWRGKHTLLLSRDAGSLFFLGELFTDLPLPVDQPAANYCGSCTRCIDICPTRAIIAPYRLDARRCISYLTIEHKGSIPEPLRPLIGNRVYGCDDCQLVCPWNKFAVITNEDDFSVRNGLDSASLIELFGWSSEEFEARLAGSPIRRIGHEQWLRNLAVGLGNAPFSQSVVQALRARLDDASPLIREHVRWALHQQERPLSFFIEDAAIPKK

SEQ ID NO: 78728 - protein, 382 aa, Nitrosospira sp.
  REGION 1..382: note = tr|A0A1G5DRG3|A0A1G5DRG3_9PROT Epoxyqueuosine reductase OS=Nitrosospira sp. Nl5 OX=200120 GN=queG PE=3; SV = 1
MTFGRTGMIRIMQDKISKDPPNVPNDLPDSAVDLIWLAGMIKAWGKELGFQDICIADAGAEMRQAELGLLEWLSKGYHGEMDYMAKHGTRRTRPAELVPGTLRVISVRMNYMPPAARNSWQVIRDGDKAFVSRYALGRDYHKVLRGRLQKLADKISAEVNHFNYRVFTDSAPVMEVEWAQKSGLGWRGKHTLLLSREAGSMFFLGELYTDLPVPVDDPVGNYCGSCTKCIDICPTQAIVAPYRLDARRCISYLTIEHKGSIPETLRPLIGNRVYGCDDCQLICPWNKYAAISGENDFSVRNGLDNASLVELFSWTREEFDARLAGSPIRRIGYEQWLRNLAVGLGNAPSSTAVTAALQARRDDDSSLVREHVQWALQRHDAR

SEQ ID NO: 78729 - protein, 382 aa, Nitrosospira sp.
  REGION 1..382: note = tr|A0A495EN56|A0A495EN56_9PROT Epoxyqueuosine reductase OS=Nitrosospira sp. Nsp44 OX=1945879 GN=queG; PE = 3 SV=1
MMDAGRVGMMRIMREMPTKNSTGENVPDSLCDLTQLTQAVKAWGKELGFQEIRIADAAADMSQSESGLKRWLAEGYHGEMDYMGKHGTRRTRPAELVPGTLRVISARMNYMPEAKESWEVIADGDKAFISRYALGRDYHKVLRGRLQKLAERIAAEVELFNYRVFSDSAPVMEVEWAQKSGSGWRGKHTLLLTRDAGSMFFIGEIYTDLPLVVDEPIGNYCGSCTKCIDICPTQAIIGPYRLDARRCISYLTIEHKGSIPETLRPLIGNRVYGCDDCQLICPWNKFAAYTGEADFAVRNGLDDVSLVQLFGWSREEFDTRLAGSPIRRIGYEQWLRNLAVGLGNAPSSPAVVAALQARRDDSSPIVREHVRWALQAHENRGD

SEQ ID NO: 78730 - protein, 370 aa, unidentified
  source 1..370: note = Nitrosovibrio sp.
  REGION 1..370: note = tr|A0A497X919|A0A497X919_9PROT Epoxyqueuosine reductase OS=Nitrosovibrio sp. Nv12 OX=2135773 GN=queG; PE = 3 SV=1
MQEKTSKDPLQDPPDRVLDFIQLAGTIKAWGKELGFQDICIADAGAQMTQAESGLLEWLSNGYHGEMDYMAKHGTRRSRPAELVPGTLRVISARMNYMPSSARDSWEVIQDGEKAFISRYALGRDYHKVVRARLQKLADKIVAETGHSNYRVFSDSAPVMEVEWAQKSGLGWRGKHTLLLTRESGSMFFLGEIYTDLPLPIDDPVGNHCGSCTKCIDICPTQAIIAPYRLDATRCISYLTIEFKGSIPEALRPLIGNRVYGCDDCQLICPWNKYASITAENDFSVRNGLDDTSLVELFGWNREEFDTRLAGSPIRRIGYEQWLRNLAVGLGNAPSSPAVIAALQERRDDVSPLVREHVRWALKQHERRSS

SEQ ID NO: 78731 - protein, 370 aa, unidentified
  source 1..370: note = Nitrosovibrio sp.
  REGION 1..370: note = tr|A0A286C0R1|A0A286C0R1_9PROT Epoxyqueuosine reductase OS=Nitrosovibrio sp. Nv4 OX=1945880 GN=queG PE=3; SV = 1
MQEKTSKDPLQNPPDRALDFIQLAGTIKAWGKELGFQDICIADAGAEMMQAESGLLEWLSNGYHGEMDYMAKHGTRRSRPAELVPGTLRVISARMNYMPSSARDSWQVIQDGEKAFISRYALGRDYHKVVRGRLQKLADKIVAETGHSNYRVFSDSAPVMEVEWAQKSGLGWRGKHTLLLTRESGSMFFLGEMYTDLPLPVDDLVGNYCGSCTKCIDICPTQAIIAPYRLDATRCISYLTIEFKGSIPETLRPLIGNRVYGCDDCQLICPWNKYASITAENDFSVRNGLDDASLVELFGWNREEFDTRLAGSPIRRIGYEQWLRNLAVGLGNAPSSQAVIAALQERREDVSPLVREHVQWALEQHERRSS

SEQ ID NO: 78732 - protein, 369 aa, unidentified
  source 1..369: note = Nitrosovibrio tenuis
  REGION 1..369: note = tr|A0A1H7FVN0|A0A1H7FVN0_9PROT Epoxyqueuosine reductase OS=Nitrosovibrio tenuis OX=1233 GN=queG PE=3 SV=1
MQKKISENPLKNARDSAPDFARLAGAIKAWGRELGFQEIRIADANADMSQSEYGLEQWLNKGYQGEMDYMAKHGTRRTRPAELIPGTLRIISVCMNYMPVAKDSWQVIGNGDKAFVSRYALGRDYHKVLRTRLQKLADRIAAEVEHSNYRVFTDSAPVMEVEWAQKSGVGWRGKHTLLISREAGSMFFLGEIYTDTPVTVDSPIGNYCGSCTRCIDICPTHAIVAPYRLDARRCISYLTIEHKGSIPEALRPLIGNRVYGCDDCQLICPWNKFAVKTVEADFAVRNGLDDISLVELFSWNKEEFDTRLAGSPIRRIGHEQWLRNLAVGLGNAPTSPAVVDALQGRRDDVSSLVREHVRWALQNHNKRRV

SEQ ID NO: 78733 - protein, 383 aa, Nitrospina gracilis
  REGION 1..383: note = tr|M1YXY4|M1YXY4_NITG3 Epoxyqueuosine reductase; OS = Nitrospina gracilis (strain 3/211) OX=1266370 GN=queG; PE = 3 SV=1
MHTATLPEKMNALRDRARELGFDALGVAPPDVGDDGKRFLEWLDRGHDGEMAYLKRGEAKRLDPALILPGVKSILCLRTNYHTRAKSLDFLNQPQTGDISNYAWNVDYHDLIKPRLHKLEHFLWELFPDCTSKAYVDTGPVLEKALAEKAGLGWVGKHSNLLTEGLGSYYFLSEILIDVALPLSEPATDHCGTCTNCIDICPTRAIVAPYVLDARRCISYLTIELKGVIPLEFRKAIGNRIYGCDDCQIVCPWNSYAVTTGEPAFQERDGTRLLIDLMRLDENGFRERFRKSPVKRIKRRGLLRNVAVALGNSGDPQAVPVLMEVLSDPEPLIRAHAVWALGELLGEEAWQAVQGALSEEADPAVQTEIERLKPVDNLGRNGL

SEQ ID NO: 78734 - protein, 379 aa, Nitrospina sp.
  REGION 1..379: note = tr|A0A3C8CD71|A0A3C8CD71_9BACT Epoxyqueuosine reductase OS=Nitrospina sp. OX=2024844 GN=queG PE=3 SV=1
MNLLEKNEKLADLKAFAESLGFDGFGVARPELGPAGERFGKWLDAGYDGEMAYLRRGEEKRKNPDLVLEGVKSILCFRTNYYAMEKDMSYVEHREIADISIYALNKDYHDIITPRLRQMEKRIQEKFAGCRTRIYVDTGPLLEKPLAQQAGLGWIGKHTNLLTEGLGSWYFLSEILTDVVLPQSQPADDHCGTCRSCIDICPTKAIIAPYVLDSNRCISYLTIELKGVIPIEYRKAIGNRIYGCDDCQIVCPWNSYAVKTDDPDFQEKQDTLKLIDLIQITGEMFRQRFKGSPIKRIKRRGLLRNVAIALGNSGNPQAIPPLIKVLDDEEPLIRAHAVWALGELSGLEVLPVMREKLNNEKEDIVLEELERVVARFATL

SEQ ID NO: 78735 - protein, 376 aa, Nitrospina sp.
  REGION 1..376: note = tr|A0A523MSI3|A0A523MSI3_9BACT Epoxyqueuosine reductase OS=Nitrospina sp. OX=2024844 GN=queG PE=3 SV=1
MAESKDTREKLEKIRRRALKLGFDRLGVAPPELGAAGRRFEQWLADRYDGEMYYMKRGGSKRLDPARVLPGVKSVICLMTNYFTTPRTLDFLKEPDTGDLSNYAWHLDYHDLIQPRLRQLEDCLAEEFPGCRTKGYVDTGPILEKPLAQRAGLGWIGKHTNLLTEGLGSYYFLSEILVDVDLPLSEAAVDHCGTCTECIDICPTGAIVAPYVLDSRKCISYLTIELKGPIPHEFRKAIGNRIYGCDDCQIVCPWNSYAVATEEPAFQEREAVKGLIALMQLDEEGFRTRFRKSPVKRIKRRGLLRNVAVALGNSGRPEAVPVLTEALADPEPLIRSHAVWALAELLGPEALAVVESGLQGETDPVVLSEIERIKTV

SEQ ID NO: 78736 - protein, 93 aa, unidentified
  source 1..93: note = Nitrospinae bacterium
  REGION 1..93: note = tr|A0A3M1QY32|A0A3M1QY32_9BACT Uncharacterized protein (Fragment) OS=Nitrospinae bacterium OX=2026769; GN = D6736_19875 PE=4 SV=1
PFLRYDPEWVAPKLVDLMALDDAGFRARFRGTPVTRAKRRGLLRNVAVALGNWGSPEALPVLERALHDPEPLVREHAAWAIARIRSQVRSCPV

SEQ ID NO: 78737 - protein, 377 aa, unidentified
  source 1..377: note = Nitrospinae bacterium
  REGION 1..377: note = tr|A0A2H0CQS6|A0A2H0CQS6_9BACT tRNA epoxyqueuosine(34) reductase QueG OS=Nitrospinae bacterium CG22_combo_CG10-13_8_21_14_all_47_10 OX=1974050 GN=queG; PE = 4 SV=1
MNSVENKKKLADLKSFAESLGFDGFGVARPQLGAAGEKLGEWLDAGYDGEMAYIRRGEEKRKNPDLVLEGVQSILCFRTNYYTMEKDMSYVEHRDIADISIYALNKDYHDTITPRLRKMEEKFQKEFQGCRTRIYVDTGPILEKPLAQQAGLGWIGKHTNLLTQGAGSWYFLSEILTDVAFPHSQPADDHCGTCKSCIDICPTTAIIAPYVLDSKRCISYLTIELKGVIPVEFRKAIGNRIYGCDDCQIVCPWNSYAVKTAEPDFQRKQDAFNLIDLIQISGETFSKMFKGSPIKRIKRRGLLRNVAVALGNSGNRQAIPVLVKALDDEEPLIRAHVVWALGELSGPEMLPTIRQKLRDEKEEIVLNEVEGVTVRLS

SEQ ID NO: 78738 - protein, 345 aa, unidentified
  source 1..345: note = Nitrospira bacterium
  REGION 1..345: note = tr|A0A0S8CPJ2|A0A0S8CPJ2_9BACT Epoxyqueuosine reductase OS=Nitrospira bacterium SG8_3 OX=1704023 GN=queG; PE = 3 SV=1
MPPRSTLATQIKEEARRLGFDAIGIARLPTNLPTVSSPFAQDSILSEDSPITWRLWGRLKKWLELRFHGAMEWMAKDPKRRSDPAEVLPGCQSIVVVGTNYYTNHIPDETKKAGRIARYAWGKDYHNLMKERLTQLENFLHAKIPEVETRSYVDTGPIMEKPWAQEAGIGWIGKHTNVVSTDFGSWLLLGEILTTVTLDVYEPAMDLCGTCSLCIQACPTGAIVEPYLLDAERCISYLTIEFRGGVDDLPAELRKKIGNRIFGCDDCLDICPFNVNAKPTAEPGFQPSPWTLHPQLPTLANLTKEEFQSMTKGSPLRRPKYDGFMRNVQIGLANQAPSNSPTVIR

SEQ ID NO: 78739 - protein, 343 aa, unidentified
  source 1..343: note = Nitrospira defluvii
  REGION 1..343: note = tr|D8PCC1|D8PCC1_9BACT Epoxyqueuosine reductase; OS = Nitrospira defluvii OX=330214 GN=yjeS PE=3 SV=1
MSASLTVAIKQAARELGFDAVGISRLPTQANPATHRNHQDPEAGLLDRLQKWLRRGYHATMAWMVRDPERRADPTRVLPGCRSIISVGMNYYTDYRADERQGNGRIARYAWGRDYHKILGDRLAQLTERIGTLAAGSLNRAYVDTGPVMEKAWAQQAGLGWIGKHSNLVSTDFGSWLLLGEILTTLELEPDEAGSDLCGSCTLCIQACPTGAITEPYVVDAGRCISYLTIELRGTEPPIAEELRRKLGNRIFGCDDCLDICPYNVQARPTTEPGFQPSPLTAAPSLLALTKMDEQTFATTFTHSPIRRAKYAGLQRNLSWALSNETAPADRHSPAAPPSDDPR

SEQ ID NO: 78740 - protein, 326 aa, unidentified
  source 1..326: note = Nitrospira japonica
  REGION 1..326: note = tr|A0A1W1I5S2|A0A1W1I5S2_9BACT Epoxyqueuosine reductase OS=Nitrospira japonica OX=1325564 GN=queG PE=3; SV = 1
MSLSAVIRQEAIALGFDAVGISSVAQSHSTTLLDRLEEWLARRYHGTMAWLARDPSRRADPTVVLPNCRSIVSVGLNYDTGHRATEGPGFGRIARYAWGRDYHRTLGDRLTLLENRIKALAPTAATRTYVDTGPVMEKAWAQQAGLGWIGKHSNLVSAQYGSWLLLGEVLTTLELTPDEPATDLCGNCRLCIQACPTGAIVEPYVVDARRCISYLTIEFRGAADMIEHEIRQQMGNHIFGCDDCLDVCPYNLQAEEKAVTAFSPAPLSLAPRLSELAELTDETFTERFRDSPIRRTKRDGLLRNVTIAQHNETRHTKNSPLLSPAE

SEQ ID NO: 78741 - protein, 327 aa, unidentified
  source 1..327: note = Nitrospira lenta
  REGION 1..327: note = tr|A0A330L226|A0A330L226_9BACT Epoxyqueuosine reductase OS=Nitrospira lenta OX=1436998 GN=queG PE=3 SV=1
MFAPAVTAMPLSRAIKQEALALGFDAVGITRVDTPASPQPTLATRLNQWLQRGYHATMAWIERTPEKRADPRIVLPGCHAIICVGMNYLTDERADERPGHGRIARYAWGQDYHDVLGKKLKQLEERIAALAPQAITRSYVDTGPIMEKAWAEQAGLGWIGKHSNLVSSDHGSWLLLGEILTTLELEPDEPATDLCGSCTLCIQACPTQAITEPYVVDANRCLSYLTIEHRGEAATIPNDLQRQFGNHIFGCDDCLDVCPFNLQAGFTREPAFYPSPLTQAPSLEHLAHMDDATFKSSFQRSPIRRAKLVGLQRNVAIARSNQPLHAP

SEQ ID NO: 78742 - protein, 331 aa, Nitrospira moscoviensis
  REGION 1..331: note = tr|A0A0K2G919|A0A0K2G919_NITMO Epoxyqueuosine reductase OS=Nitrospira moscoviensis OX=42253 GN=queG PE=3; SV = 1
MALSRAIKEEARALGFDAVGIARSTVPDTHAQTLLARLTQWLERGYHGTMAWMARTPERRADPAQALPGCRSIISVGMNYLTDQRADERPGHGRIARYAWGKDYHTVLGDRLRQLERRIRELSPGAVTRSYVDTGPVMEKAWAEQAGLGWIGKHSNLVSSQFGSWLLLGEILTTLELEPDEPATDLCGSCTLCIQACPTQAIVEPYIVDATRCISYLTIELRGEHAAIPDDTRRRMGNKIFGCDDCLDVCPFNLRAEPTGEPAFQPTALTLTPRLDDLAGMNEAAFATLFQHSPIKRSKHAGLQRNIDIARRNQPSPVGASAPFPSKDREE

SEQ ID NO: 78743 - protein, 366 aa, Nitrospira sp.
  REGION 1..366: note = tr|A0A3C1MAK0|A0A3C1MAK0_9BACT Epoxyqueuosine reductase OS=Nitrospira sp. OX=70125 GN=queG PE=3 SV=1
MYSLRFRPLHRAIHGAIRVREAVMSASLTVAIKQAARELGFDAVGISLLPTQTNPAVNLNREASAGDLLDRLQEWLRRGYHATMAWMVRDPERRADPTRVLPGCRSIISVGMNYYTDYRADERQGNGRIARYAWGLDYHKILGDKLAQLAERIGALAPASLNRAYVDTGPVMEKVWAQQAGLGWIGKHSNLVSTDFGSWLLLGEILTTLELEPDEAGTDLCGSCTLCIQACPTGAITEPYVVDAGRCISYLTIELRGTEPPIAEDLRRELGNRIFGCDDCLDICPYNVQARPTTEPGFQPSPLTGAPSLLALTKMDEQTFATTFKHSPIRRAKYAGLQRNLSWALSNEPAPTDRHSTTPPPSADPR

SEQ ID NO: 78744 - protein, 379 aa, Nitrospira sp.
  REGION 1..379: note = tr|A0A256WXU3|A0A256WXU3_9BACT Epoxyqueuosine reductase OS=Nitrospira sp. UW-LDO-01 OX=2004993 GN=queG; PE = 3 SV=1
MPIDPLFSSLQCSVRLLNSTVNSPKLMSLTAAIKQQARTLGFDAIGIVRLANNDAPSTLTPQPLEPCSDNATKIVPQLYHRLTEWLRRGYHGTMTWMERAPDKRTDPRVVLPGCQSIIAVGINYLTDHRANEQPGHGRIARYAWGKDYHKVFKTRLKQLEEFIKILAPATHTRSYSDTGPLMEKAWAEQAGLGWIGKHSNLVSADHGSWLLLGEILTTVELEPDAPATDLCDSCTLCIQACPTNAIVQPYVIDATRCISYLTIELRGDESVIPQELHAGMGNKIFGCDDCLDVCPFNLRAEPTCETTFQPSPVTLAPSLDKLSRLDEQTFTTLFQQSPIRRAKIHGFQRNIAIAQKNAKRFEPPSRVSLSTTTAKPESH

SEQ ID NO: 78745 - protein, 318 aa, unidentified
  source 1..318: note = Nitrospiraceae bacterium
  REGION 1..318: note = tr|A0A354F613|A0A354F613_9BACT Epoxyqueuosine reductase OS=Nitrospiraceae bacterium OX=2026770 GN=queG; PE = 3 SV=1
MLMDTRSLTQEIKTFGLKLGFSHVGIASPDHSVWADRFRNWIKQGFHGEMGYMERSSERRIDPFAVFPEVKSVIVVSMNYYPGEKQRECLDNPGAGYIANYALNEDYHPVVETRLRELLQHIYEVTGGKVQGKIYADAGPILEKAYAVMAGIGWMGKNSLIINPETGSWIVLGVLLLDIELDFDKPIPDRCGECTRCMDACPTRAIVEPYMLDARRCISYILGELKGPIPVEIRPLIGNRVFGCDDCQWVCPWNEHVPVSNEAAFKPGNDLMSPGLMDLIQIVRDDDFKSRFKNSPIIRIKMERFLRNVSVALGNSTL

SEQ ID NO: 78746 - protein, 319 aa, unidentified
  source 1..319: note = Nitrospiraceae bacterium
  REGION 1..319: note = tr|A0A2E8GCR0|A0A2E8GCR0_9BACT Epoxyqueuosine reductase OS=Nitrospiraceae bacterium OX=2026770 GN=queG; PE = 3 SV=1
MVPDVNHDLSTRIKDKAYELGFNQVGISRADADGRAEDKLSVWLSRGFHGEMTWMERTADKRRNIKNVFPDIRSVVSVAVNYYTDHAPQETGGKGRISRYAWGDDYHYIITDWVRQLATWIDAEAEKEGIPCESRTYVDTGPILEKAWAQRAGIGWVGKHSNLVSAEYGSWLLLGEVLLTVDLEPDMPAPDQCGACRLCIEICPTDAIPEPYVLDATKCIAYLTIEHRGPIPAPYHFDMGNRIFGCDDCLDICPYNEHAVPTFERAFEPRTYALSPDLKELAEQTPAEFQITFKKSPLKRAKYEGLQRNVAIARKNDSQ

SEQ ID NO: 78747 - protein, 389 aa, unidentified
  source 1..389: note = Nitrospirae bacterium
  REGION 1..389: note = tr|A0A3M1R8Y0|A0A3M1R8Y0_9BACT tRNA epoxyqueuosine(34) reductase QueG OS=Nitrospirae bacterium; OX = 2026887 GN=queG PE=4 SV=1
MGRRPPLRLPRRRAAPPPGGARGAVAHGAAAREGERRGPGRGAGEGGGGPHPERLRGPPRRPRPHRPLRAAPGAGAPVARDPAEVVQALRAEARTLGIARLGVAAAVPRHRDHLERWLRLGRHGTMGYMAREPAVRADPRRLLPGARAVLCCAVHHDPAPERPAGPERVAIARYARGPDYHRVVHRLLRRLAATLDRLAPGHRHRVCVDTAPLLERAHAAAAGIGWIGKSTCLVHPRAGSYFLLGELLTTCPLPPDPPMADHCGTCTRCLDACPTGALVAPYELDARRCISYWTIEHRGPLPPEARLAGWAFGCDLCQEACPFNRFAPPGHPVLAPRPELVAPRLAELAAATAASFKGRFKGTPVVRAGKRQMLRNLAACAAEGGRNRG

SEQ ID NO: 78748 - protein, 352 aa, unidentified
  source 1..352: note = Nitrospirae bacterium
  REGION 1..352: note = tr|A0A1G1IEY4|A0A1G1IEY4_9BACT Epoxyqueuosine reductase OS=Nitrospirae bacterium RIFCSPLOWO2_02_FULL_62_14 OX=1801717 GN=queG PE=3 SV=1
MSLSTTIKEEARALGFDAVGISRVEDDGARCEVQGSRLTEHPESQTSNFEPRTSLPWLLRTRLSEWLRRGYHGTMGWIAREPARRADPQAVLNGCLSVISVGMNYYADRRPDERPGNGRIARYAWGEDYHGVLQARLEQLENRIKSLAPEAATRSYVDTGPVMEKGWAQQAGFGWIGKHSNLVSTRYGSWLVLGEVLTTLDLEPDEPAADLCGSCTLCIKACPTGAITEPYVVDARRCISYLTIELHKPGDEIPADLAPKLGNRIFGCDDCLDVCPYNVNATPSAEPAFQPTATSLAPDLEQLAGMDDRTFASTFRKSPIRRAKHAGFMRNVRLALHHLPVPFTDPSVATKT

SEQ ID NO: 78749 - protein, 368 aa, Nocardia africana
  REGION 1..368: note = tr|A0A378WRD2|A0A378WRD2_9NOCA Epoxyqueuosine reductase OS=Nocardia africana OX=134964 GN=queG PE=4 SV=1
MSSTDREPAEAGRYAEHPTVKHLAAQGRKAPDPVLTAARLREICLAAGADDVGFVSVDDPRVAEEREHARGILPSARTFVAFCIRMNRDNLRSPMRSLANAEFNHADDETNVVSRRITRALEEAGYRAVYPAPGYPMEVEQFPGRVWVLAHKVVAEAAGLGVMGIHRNVIHPKFGNFILLGTVVTDAVVDEPSAALDFTPCLECKLCVSACPVGAITHDGGFDFQACYTHNYREFMGGFTDWAETVADSADRDDYRERVTRGESFSMWQSLSFKPNYKAGYCMAVCPAGEDVIGAFLDDRKTHLDEVVRPLQNKAETVYVLPGSAAEEHVTRRFPNKTPKPVGNGFGDEVNDLLDQIGPRPRRGTPPR

SEQ ID NO: 78750 - protein, 368 aa, Nocardia cerradoensis
  REGION 1..368: note = tr|A0A231H5A2|A0A231H5A2_9NOCA Epoxyqueuosine reductase OS=Nocardia cerradoensis OX=85688 GN=queG PE=4; SV = 1
MSSTDREPTEAGRYAEHPTVKNLAAQPRRAPDPVLTAARLREICLAAGADDVGFVSVDDPKVAEEREHARGILPSARTFVAFCIRMNRDNLRSPMRSLANAEFNHADDETNGVSRRITRALEEAGYRAVYPAPGYPMEVEQFPGRIWVLAHKVVAEAAGLGVMGIHRNVIHPKFGNFILLGTVVTDAVVDEPSTALDFTPCLECKLCVSACPVGAITNDGGFDFQACYTHNYREFMGGFTDWAENVADSADRDDYRERVTRGESFSMWQSLSFKPNYKAGYCMAVCPAGEDVIGAFIDDRKTHLDEVVRPLQNKSETVYVLPGSAAEEHVTRRFPNKTPKPVGNGFGDDVNDLLDQIGPRPRRRDTPA

SEQ ID NO: 78751 - protein, 448 aa, Nocardia mexicana
  REGION 1..448: note = tr|A0A370GZY8|A0A370GZY8_9NOCA Epoxyqueuosine reductase QueG OS=Nocardia mexicana OX=279262; GN = DFR68_107177 PE=4 SV=1
MARRKKLDEHPTVLRVRERSGRPVRPSTPLDAEWLRDLALRSGADDVGFVEIERPELADERAEIDAALPGARALISFVCRLNRDSIRSPARSVANLEFHHGNDDTNDVARRIVTALERQGVRALNPSVGFPMEMDRFPDRMWVVSHKPVAVAAGLGRMGIHRNVIHPQFGNFVLLGTVVIDTEIGEYSRPIDFDPCLECKLCVSACPTGAISPDGHFDFSACYTHNYREFLGGFGDWVEQVADSRSAGDYRSKVADNETASMWQSLSFGANYKAAYCMSVCPAGEDVIGRYLDNSKEHLNDVVRPLQNKAETVYVVRGSDAEQHVAQRFPNKQAKLVARGLRPASIDGFVTGLPLLFQRGQARGMTATYHFTFTGAEQRRITVAIHDGDLDVTDGHQGEPDMRITADSRTWLRFLAKRSVLPRAILLGRLRIHGSPKLLLAFARCFPT

SEQ ID NO: 78752 - protein, 370 aa, Nocardia seriolae
  REGION 1..370: note = tr|A0A0B8N4G8|A0A0B8N4G8_9NOCA (4Fe-4S)-binding protein OS=Nocardia seriolae OX=37332 GN=queG PE=4 SV=1
MNGDELRWNRLHVPVERGTREHPHPSVAAARARVGGESDSEPAPLDADWLRERCLAAGIDDVGFVELSTPGLEGERDYVLEALPGTRSLIGFCLRTSRDNLQSRSVSAANRDVATTQELAHEAARHLCLELQRHGVRALYPAGGFPAEIHRYPNRSWVVSHKLVAVAAGLGQMGLHRNVIHPRFGTFIVLGTILLDRPISRYSRPTATNPCIDCGLCVTTCPVGAIHADGAFDFDACFTHNNHHELSNFAGWVEEVVDSKDAADYRRRVTPGETLSVWQSLSFQPQFRAGYCVAVCPAGEDVLGRYLADPDTHARDIVQPLLRKPEYVYVAPDSPAAAHVRDRFPHKTIRHSRRVEVPEPDIDPRPEPHA

SEQ ID NO: 78753 - protein, 349 aa, Nocardioides sp.
  REGION 1..349: note = tr|H0C134|H0C134_9BURK Epoxyqueuosine reductase; OS = Nocardioides sp. SLBN-35 OX=512030 GN=queG PE=3 SV=1
MQEWARELGFSQIGVAGVDLSAAEPGLEAWLAQGFHGDMHYMASHGLKRARPAELVPGTVSVITARMDYLPRDTAVHAPEGWQVVELSRLVRPQEGIVSVYARGRDYHKVLRARLQKLSDRIAEAIGPFGHRVFTDSAPVLEAELAARSGQGWRGKHTLVLNREAGSMFFLGEIYVDMALPRSAPVTAHCGSCSACIDVCPTQAIIAPHRIDARRCISYLTIEHAGPIPVELRPLMGNRIYGCDDCQLICPWNKFAQVSRLPDFDERKGLGGQQLVHLFAWDEPTFLRMTEGGPIRRIGHERWLRNVAVALGNALRATGDAAVRAALQSRADDPSELVREHVAWALDLG

SEQ ID NO: 78754 - protein, 348 aa, Nocardioides sp.
  REGION 1..348: note = tr|A0A542RX02|A0A542RX02_9BURK Epoxyqueuosine reductase OS=Nocardioides sp. SLBN-35 OX=512030 GN=queG; PE = 3 SV=1
MREWARELGFSQIGVAGVDLSAAEPGLSHWLEQGFHGEMHYMAAHGLRRARPAELVPGTVSVITARMDYLPRDTALDAPEGWQAMELSRLTRPQEGIVSVYARGRDYHKVLRARLQKLSDRIAEAVGPFGHRVFTDSAPVLEAELAARSGQGWRGKHTLVLSREAGSMFFLGEIYVDMALPESAPVTPHCGSCSACIDVCPTQAIIAPHRLDARRCISYLTIEHAGPIPLELRPLIGNRIYGCDDCQLICPWNKFAQVSRLPDFDERQGLSGQQLVHLFAWDEPTFLRMTEGGPIRRIGHERWLRNVAVALGNALRATGDEALRTALKARADDPSALVREHVAWALEC

SEQ ID NO: 78755 - protein, 317 aa, Nodularia sp.
  REGION 1..317: note = tr|A0A218Q0V4|A0A218Q0V4_9CYAN Epoxyqueuosine reductase OS=Nodularia sp. NIES-3585 OX=1973477 GN=queG; PE = 3 SV=1
MDQHSVTSSSVVKEKAKELGFHKVGITAVDGVDNTDAQRLQAWISLGYHADMEWMNSPKRQDMSLIMPEARSLISVALNYYTPDQRPEGEEYAKISRYGWGRDYHKVMHKKLKALMLWLESLGAGIQAKYYADTGPVQDKVWAQRAGIGWIAKNGNLITREYGSWVFLGEMITNLELESDRPHTEHCGSCTRCLDACPTGAITQPFVVDANRCIAYHTIENRSETLPETISSNLQGWVAGCDICQDVCPWNQRFAQTTDVADFQPYSGNIAPHLIELANISTHEWDQRFPASALRRIKPEMLRRNARANLDASKLNE

SEQ ID NO: 78756 - protein, 324 aa, Nodularia spumigena
  REGION 1..324: note = tr|A0ZK38|A0ZK38_NODSP Epoxyqueuosine reductase; OS = Nodularia spumigena CCY9414 OX=313624 GN=queG PE=3 SV=1
MDKHSVISSNVVKEKAKELGFHKVGITAVDGVDNTDAQRLQAWISLGYHADMEWMNSPKRQDISLIMPEARSLVCVALNYYTPDERPEGEEYAKISRYGWGRDYHKVMHKKLKALMLWLESLDAGIQARYYADTGPVQDKVWAQRAGIGWIAKNGNLITREYGSWVFLGEIVTNLELESDRPHTEHCGSCTRCLDTCPTGAITQPFVVDANRCIAYHTIENRSETLPETISSNLQGWVAGCDICQDVCPWNQRFAQTTDVADFQPYPANIAPGLIELANISTEEWNKRFPASALRRIKPEMLRRNARANLDASQLKNDPESNYF

SEQ ID NO: 78757 - protein, 324 aa, Nodularia spumigena
  REGION 1..324: note = tr|A0A161XPI5|A0A161XPI5_NODSP Epoxyqueuosine reductase OS=Nodularia spumigena CENA596 OX=1819295; GN = queG PE=3 SV=1
MDKHSVTSSSIVKEKAKELGFHKVGIAAVDGVDNTDAQRLQAWISLGYHADMQWMNSPKRQDISLIMPEARSLVCVALNYYTPDERPEGEEYAKISRYGWGRDYHKVMHKKLKALMLWLESLDAGIQARYYADTGPVQDKVWAQRAGIGWIAKNGNLITREYGSWVFLGEIVTNLELESDRPHTEHCGSCTRCLDTCPTGAITQPFVVDANRCIAYHTIENRSETLPETISSNLQGWVAGCDICQDVCPWNQRFAQTTDVADFQPYPANIAPGLIELANISTEEWNKRFPASALRRIKPEMLRRNARANLDASQLKNDPESNYF

SEQ ID NO: 78758 - protein, 375 aa, unidentified
  source 1..375: note = Nosocomiicoccus massiliensis
  REGION 1..375: note = tr|A0A2J6NG53|A0A2J6NG53_9STAP tRNA epoxyqueuosine(34) reductase QueG OS=Nosocomiicoccus massiliensis OX=1232430 GN=queG PE=4 SV=1
MDYQKLKDEIIEYAHTIGIDEIGFTTAEPFHEFRDKLISYYENNYESGFEKGTIEERVNPKLSLPSARSIIAIAVGYPNRLPKDAPKSRKGERRGIFARSSWGFDYHHLLRTRLEKLEAFIKERVDGVETMSMVDTGVLSDREVALRSGLGFVGKNGFIINPKLGTWTYLGEMLISIPFPPDKPLVGTCGDCTICIDRCPTGALVGNGQLDSKKCISFLTQTKTFVPDEYRKSIGNRIYGCDTCQQVCPLNVGINTQQDDIILEPEILKPELTSLLKVSNREFKETYGHLAGVWRGKNPLQRNAIIALAHFKEESAIPTLKDVAENDVRPVIKGTAYWAIGQILGDRALDYIHERYSKETDEAVKEEMLKGIQEG

SEQ ID NO: 78759 - protein, 323 aa, unidentified
  source 1..323: note = Nostoc azollae
  REGION 1..323: note = tr|D7E0M1|D7E0M1_NOSA0 Epoxyqueuosine reductase; OS = Nostoc azollae (strain 0708) OX=551115 GN=queG PE=3 SV=1
MNQCALNSSLVKEKAKEFGFHKVGIAAIEGIEKKDAQRLQAWTQLGYHAQMEWMKNPQRQDIRLVMPDVRSLVCVALNYYTPDQRPEGEEYAKISRYGWGRDYHKIMHKKLKQLATWLESLSEGIKARYYADTGPVQDKVWAERAGIGWIAKNGNVITREYGSWVFLGEVLTNIQLENDRQATQHCGTCTKCIQACPTGAITQPFVVDAKKCIAYHTIENRADTLPESLTPHLHGWVAGCDICQDVCPWNQRFAQVTDVTDFQPYNGNLAPKLVELAQISEEEWDKRFPASALRRIKPEMLRRNACANLDASRLKNDPESNNI

SEQ ID NO: 78760 - protein, 524 aa, Nostoc calcicola
  REGION 1..524: note = tr|A0A1U7IDU6|A0A1U7IDU6_9NOSO Epoxyqueuosine reductase OS=Nostoc calcicola FACHB-389 OX=1357508 GN=queG; PE = 3 SV=1
MNQCSVTSSLVKEKASELGFHKIGIAAVDRVDVTEAQRLKVWLALGYQADMEWMGNPKRQDIRLVMPEVRSLVCVALNYYTPHQRPEGKEYGKISRYGWGRDYHKVMHKKLKQLATWLKSLDESVQANYYADTGPVQDKVWAQQAGIGWIAKNGNVITREYGSWVFLGEVLTNLELESDRPHTEHCGSCTRCLQACPTGAITQPFVVDANRCIAYHTIENRAEELPQTLTPHLQGWVAGCDICQDVCPWNQRFAKTTDIAEFQPYPGNLAPQLLELAQISDREWDKRFPASALRRIKPEMLRRNARASLDASRPEMTQKVIIFDFDGTIADTVDALVSIANRLAVDFGYIQITPDQLALLKNLTSREIIKHSGVSLFKIPFLVKKVKGELKSKIPELKPIPGIKEALIELQAQGYKLGIITSNSKDNVTQFLQINDLNHLFDFIYSGITIFGKTTIINNVLRQKQLKPQDVIYVGDETRDIEASKKANIQVIAVTWGFNSPEVLAKQNPDYLIHKPSELLEVMK

SEQ ID NO: 78761 - protein, 324 aa, unidentified
  source 1..324: note = Nostoc carneum
  REGION 1..324: note = tr|A0A1Z4HYK5|A0A1Z4HYK5_9NOSO Epoxyqueuosine reductase OS=Nostoc carneum NIES-2107 OX=1973483 GN=queG; PE = 3 SV=1
MNNSGITTSDVVKKKAQELGFHQVGIAAVDGVDETAAQRLQAWLALGYNAEMAWMANPKRQDIRLVMPEARSLICVALNYYTPHQRPEGKEYAKISRYGWGRDYHKVMHKKLKALNNWVQSLSENVQVRYYADTGPVQDKLWAQKSGIGWIAKNGNVITREYGSWVFLGEMITNLELECDRPATEHCGTCTRCLEACPTGAITQPYVVDANRCIAYHTIENRAEQLPPNVKPHLQGWVAGCDICQDVCPWNQRFAKNTDVTEFNPYPGNLAPKLIELAEISEEEWEQQFTASALRRIKPEMLRRNARANLDASRQQNDADSDYF

SEQ ID NO: 78762 - protein, 324 aa, Nostoc commune
  REGION 1..324: note = tr|A0A2R5FUU2|A0A2R5FUU2_NOSCO Epoxyqueuosine reductase OS=Nostoc commune NIES-4072 OX=2005467 GN=queG; PE = 3 SV=1
MNQYSVTSSNVVKEKASELGFHKVGIAAVDRVDTTEAQRLQAWIELGYHADMEWMANPKRQDIRLVMPEARSLVCVALNYYTPHQRPEGEEYAKISRYGWGRDYHKVMHKKLKQLAVWLESLGEGVLARYYADTGPVQDKVLAQLAGIGWIAKNGNVITREYGSWVFLGEVLTNLELESDRPHTEHCGSCTRCLQACPTGAITQPFVVDANRCIAYHTIENRAKELPETVIPNLQGWVAGCDICQDVCPWNQRFANTTDIEEFQPNPGNIAPKLLELAQISDQEWDKRFPASALRRIKPEMLRRNALANLDASRRNNDPESNYF

SEQ ID NO: 78763 - protein, 324 aa, unidentified
  source 1..324: note = Nostoc cycadae
  REGION 1..324: note = tr|A0A2H6LN97|A0A2H6LN97_9NOSO Epoxyqueuosine reductase OS=Nostoc cycadae WK-1 OX=1861711 GN=queG PE=3; SV = 1
MNQSSVTSSRTVKEQALDLGFHKVGIAAVDEVDNTEVQRLQAWIALGYHADMEWMDNPKRQDIRLVMPEARSLVCVALNYYTPHQRPQGEEYAKISRYGWGRDYHKVMHKKLKQLTTWLESLGEGVTARYYADTGPVQDKVWAQKAGIGWIAKNGNVITREYGSWVFLGEVVTNLELECDRPHTQHCGSCTRCLTACPTGAITQPFVVDANRCIAYHTIENRGEKLPEAIAPHLQGWVAGCDICQDVCPWNQRFAKTTDVADFQPYPGNIAPKLIELAKISDEEWDRQFPASALRRIKPEMLRRNARANLDASQQNNDSKSNCF

SEQ ID NO: 78764 - protein, 514 aa, unidentified
  source 1..514: note = Nostoc linckia
  REGION 1..514: note = tr|A0A1Z4L8L3|A0A1Z4L8L3_NOSLI Epoxyqueuosine reductase OS=Nostoc linckia NIES-25 OX=1091006 GN=queG; PE = 3 SV=1
MKEKASELGFHQIGIAAVDRVDVTEAQRLKAWLALGYHADMEWMSNPKRQDIRLVMPEVRSLVCVALNYYTPYERPQGEEYAKISRYGWGRDYHKVMHKKLKQLATWLESLDESVRAIYYADTGPVQDKVWAQKAGIGWIAKNGNVITREYGSWVFLGEVLTNLELESDRPHTEHCGSCTRCLQACPTGAITQPFVVDANRCIAYHTIENRAEELPQTLTPHLQGWVAGCDICQDVCPWNQRFAKTTDITEFAPYPQNLAPQLLELAQISDGEWNKRFPASALRRIKPEMLRRNAQANLDASRRKMTQKVIIFDFDGTIADTVDALVSIANRLAVDFGYIQITPDQLALLKNLTSREIIKHTGVSLFKIPFLVKKVKGELKNKIRELKPIPGIKEALIELQTQGYKLGIITSNSKENVTEFLKINDLDYLFDFIYSGITIFGKTTIINNVLKQKQLKPEDVIYVGDETRDIEASKKANIQVIAVTWGFNSPEVLAKQNPDYLIHRPSELLEVMK

SEQ ID NO: 78765 - protein, 307 aa, unidentified
  source 1..307: note = Nostoc linckia
  REGION 1..307: note = tr|A0A2C6UP09|A0A2C6UP09_NOSLI Epoxyqueuosine reductase OS=Nostoc linckia z16 OX=1628751 GN=queG PE=3; SV = 1
MNSRTAYSDFIKSEAKRLGFLSCGISKAGFLEEEAPRLERWLTENRHGQMQYMENHFDKRLNPTLLVEGAKSVISLLLNYFPSQTQVDNTYKISKYAYGQDYHFVIKEKLRELLHSINENIGEVGGRAFVDSAPVLDKAWAARSGLGWIGKNSNLLSKQVGSFFFIAELIVDIELDYDTPVTDHCGTCTACIDACPTQAIIAPYVVDGSKCISYFTIELKENLPADMKGRFDGWAFGCDTCQDVCPWNRFSKTHREPLFEPHPELLSLSGQDWEELTEDTFRKVFKNSAVKRTKFEGLRRNINFLKE

SEQ ID NO: 78766 - protein, 324 aa, Nostoc minutum
  REGION 1..324: note = tr|A0A367RU60|A0A367RU60_9NOSO Epoxyqueuosine reductase OS=Nostoc minutum NIES-26 OX=1844469 GN=queG; PE = 3 SV=1
MNQCSVTSSSVVKNKAQELGFHKVGIAAVEKRDNTAAQRLQAWIALGYHADMEWMNNPKRQDISLVMPEARSLICVALNYYTPHQRPKSEEYAKISRYGWGRDYHKVMHKKLKALTSWLESLDPGILARYYADTGPVQDKVWAQRAGIGWIAKNGNVITREYGSWVFLGEILTNLELESDRPHTEHCGSCTRCLEACPTGAITQPFVVDANRCIAYHTIENRAEKLPETVTPHLQGWVAGCDICQDVCPWNQRFAQTTDVEDFQPYPGNLAPELIELAEISNEEWDRRFPASALRRIKPEMLRRNARANLDASKRKNDSESNYF

SEQ ID NO: 78767 - protein, 323 aa, unidentified
  source 1..323: note = Nostoc piscinale
  REGION 1..323: note = tr|A0A0M5MHE0|A0A0M5MHE0_9NOSO Epoxyqueuosine reductase OS=Nostoc piscinale CENA21 OX=224013 GN=queG; PE = 3 SV=1
MNQDSVTNQAIKEKAVELGFHKVGIAAVEGVDHTEVQRLQAWIALGYHADMKWMDNPKRQDIRLVMSEARSLVCVALNYYTPHQRPEGEEYAKISRYGWGRDYHKIMHKKLKQLNSWLESLGEGIKARYYADTGPVQDKVWAQTAGIGWIAKNGNVITREYGSWVFLGEIVTNLELEYDRPHTQHCGSCTRCLTACPTGAITQPFVVDANRCIAYHTIENRGEKLPEAIASHLQGWVAGCDICQDVCPWNQRFAQTTDVADFQPYPGNIAPKLIELAKISDEEWDQQFPASALRRIKPEMLRRNARANLDASRQNNDSESNCF

SEQ ID NO: 78768 - protein, 527 aa, unidentified
  source 1..527: note = Nostoc punctiforme
  REGION 1..527: note = tr|B2J278|B2J278_NOSP7 Epoxyqueuosine reductase; OS = Nostoc punctiforme (strain ATCC 29133 / PCC 73102); OX = 63737 GN=queG PE=3 SV=1
MSQYSVTSSSVVKEKASELGFHKVGIAAVDSIDATEAQRLQAWIELGYHADMEWMANPKRQDIRLVMPEARSLVCVALNYYTPHQRPEGEEYAKISRYGWGRDYHKVMHKKLKQLSTWLESLDESVRVRYYADTGPVQDKVLAQLAGIGWIAKNGNVITREYGSWVFLGEVLTNLELESDRPHTEHCGSCTRCLQACPTSAITQPFIVDANRCIAYHTIENRDEKLPQTLTSHLQGWVAGCDICQDVCPWNQRFASTTDIPEFQPYPGNIAPKLLELAQISDQEWNKRFPASALRRIKPEMLRRNALANLDASRQIMTPKVIIFDFDGTIADTVDALVSIANRLAVDFGYRHISPEQLSLLKNLTSREIIKYSGVSLFKIPFLVKKVKGELKNKIPELKPIPGIKEALIELQNKGYKLGIITSNSKDNVTQFLTINDLNHLFDFIYSGITIFGKTTIINNVLRQNQLQPQEVIYVGDETRDIEASKKANIQVIAVAWGFNSSEVLAKQNPDYLIQQPSELLEVMNGY

SEQ ID NO: 78769 - protein, 324 aa, unidentified
  source 1..324: note = Nostoc punctiforme
  REGION 1..324: note = tr|A0A367RG89|A0A367RG89_NOSPU Epoxyqueuosine reductase OS=Nostoc punctiforme NIES-2108 OX=1356359; GN = queG PE=3 SV=1
MNQYFVTSSSLVKEKASELGFHKVGITAVDRVNATEAQRLQAWIELGYHADMKWMANPKRQDIRLVMPEVRSLVCVALNYYTPHQRPESEEYAKISRYGWGRDYHKVMHRKLKQLSLWLKSLDASVLAIYYADTGPVPDKVLAQQAGIGWIAKNGNVITREYGSWVFLGEVLTNLELESDRPHTEHCGSCTRCLQACPTGAITQPFVVDANRCIAYHTIENRDKELPEAIAPHLQGWVAGCDICQDVCPWNQRFAQTTDIEEFQPYPGNIAPHLLELAQISDREWDKRFPASALRRIKPEMLRRNALANLDASRQKNDPESNYF

SEQ ID NO: 78770 - protein, 346 aa, Nostoc sp.
  REGION 1..346: note = tr|K9QZE4|K9QZE4_NOSS7 Epoxyqueuosine reductase; OS = Nostoc sp. (strain ATCC 29411 / PCC 7524) OX=28072; GN = queG PE=3 SV=1
MSVLNTLCIIVKPQFWQIFVIQIQHGSIVNSSVVKEKTKELGFHKVGIAAVDGGNHTEVERLQAWIRLGYHADMEWMANPKRQDISLVMPEARSLVCVALNYYTPHQRPPGKEYAKISRYGWGRDYHKVMHKKLKALTTWLQSLDPSIQARYYADTGPIQDKVWAQRAGIGWIAKNGNVITREYGSWVFLGEVVTNLELESDRPHTEHCGSCTRCLEACPTGAITQPFVVDANRCIAYHTIENRAEKLPAEITPHMQGWVAGCDICQDVCPWNQRFAQTTDVRDFEPYPENIAPKLLELAQISYEEWERKFPASALRRIKPEMLRRNARANLDASRQCNDTESNYL

SEQ ID NO: 78771 - protein, 324 aa, Nostoc sp.
  REGION 1..324: note = tr|A0A252DTA0|A0A252DTA0_9NOSO Epoxyqueuosine reductase OS=Nostoc sp. T09 OX=1932621 GN=queG PE=3 SV=1
MSKYAVISSDAIKEKAKELGFHKAGIAAVDGVDETAKQRLQAWIALGYNADMEWMANPKRQDIRLVMPEVRSLVSVALNYYTPHQRPEGEEYAKISRYGWGRDYHKVMHKKLKALSTWLQSLGEGVQARYYADTGPVQDKVWAQKAGIGWIAKNGNVITREYGSWVFLGEIFTNLELECDRPSTEHCGTCTRCLEACPTNAIINPYVVDANRCIAYHTIENRAEKLPQTVKSNLQGWVAGCDICQDVCPWNLRFAQGTDVAEFNPYPGNLAPKLIELAKITDEEWEQQFPASALRRIKPEMLRRNARANLDASRQQNDAESNYF

SEQ ID NO: 78772 - protein, 318 aa, unidentified
  source 1..318: note = Nostocales cyanobacterium
  REGION 1..318: note = tr|A0A1Y0RUA3|A0A1Y0RUA3_9CYAN Epoxyqueuosine reductase OS=Nostocales cyanobacterium HT-58-2 OX=1940762; GN = queG PE=3 SV=1
MNQSPGTNSTEVKEKALELGFHKVGIATIDGEDTTEAQRMRAWLALGYQADMEWMENPKRQDIRKIMPEVQTIISVALNYYTPHQRPDTEEYAKISRYAWGRDYHKVMHKKLKALTTWLQGLHEGIQARYYADTGPVQDKVWAQRAGLGWIAKNGNVITREYGSWVFLGEVLTNLELESDRPHTEHCGSCTRCLEACPTGAITQPFVVDANRCIAYHTIENRDETLPQTVTANLQGWVAGCDICQEVCPWNQRFAKETDVAEFEPYPGNLAPKLVELAQISDQEWDRRFPASALRRIKPQMLRRNAHANLNAFHRAKE

SEQ ID NO: 78773 - protein, 397 aa, unidentified
  source 1..397: note = Notoacmeibacter marinus
  REGION 1..397: note = tr|A0A231V190|A0A231V190_9RHIZ Epoxyqueuosine reductase OS=Notoacmeibacter marinus OX=1876515 GN=queG; PE = 3 SV=1
MRTPISSGTERAGRLGAFLRREADALGFDGVAITAPDAIPQAAERLARFVAEGHHGTMGWMAETAERRAHPSALWSDVRSVVMLSLNYGPDHDPLPLLEQRDRANISVYARHRDYHDLIKGRLKTLASKLLARARQINEDDNSEVKVFVDTAPLMEKPLAEAAGLGWQGKHTNLVSRSHGSWLFLGAILTTLDLPRDEPESDHCGSCRACLDICPTDAFPAPYRLDARRCISYLTIEHDGVIPLSFREKMGNRIYGCDDCLAVCPWNKFASETKEAKLAARHDLTAPPLTDFLTMDDVSFRAFFPGSPIKRIGRDRFVRNVLIATGNSKDPALVPKVTKLLDDPSSQVRAMAVWALSRLDRQALSCHQHRAATEENDEVRAEWRTALVDGEKGAGAA

SEQ ID NO: 78774 - protein, 390 aa, unidentified
  source 1..390: note = Notoacmeibacter sp.
  REGION 1..390: note = tr|A0A3L7J8Y4|A0A3L7J8Y4_9RHIZ Epoxyqueuosine reductase OS=Notoacmeibacter sp. M2BS9Y-3-1 OX=2448481; GN = queG PE=3 SV=1
MRIPTSDQSARAERLRAFLHKEARALGFDGVAITRPDAIPQAAERLSHFVAEGRHGTMGWIAETAERRGSPTGLWPEVRSVIMLAVNYGPEENPLPLLQRKEKANVSVYARHRDYHDLIKGRLKTLASKLLARVRQMDAEDRNEVKVFVDTAPLMEKPLAEAAGLGWQGKHTNLVSREHGSWLFLGSILTTLDLPADQAEIDHCGSCRACLDICPTNAFPAPYQLDARRCISYLTIEHDGLIPLEFRPAMGNRVYGCDDCLAICPWNKFASETKEAKLAARHDLKAPPLADFLEMDDAAFRAFFSGSPVKRIGRDRFVRNVLVAAGNSGKTELVPLVEALLDDPAPQVRGMAVWALSRLDHATLACHQGDASTDEDGAVRHEWRQALSNG

SEQ ID NO: 78775 - protein, 383 aa, unidentified
  source 1..383: note = Novibacillus thermophilus
  REGION 1..383: note = tr|A0A1U9K7B6|A0A1U9K7B6_9BACL Epoxyqueuosine reductase OS=Novibacillus thermophilus OX=1471761 GN=queG; PE = 3 SV=1
MNASALKAELFAYAREIGIDKIGVCSAEPFDELRVRLTEHRKKGYDSGFEEKDIEKRVDPSLTVPGAQSIIAIAVAYPSKMPYNPAQAPGAYRGVMARVSWGQDYHHVLKERLQALKDFLLERIPHAKAEIMVDTGVLSDRAVAERAGLGWIGKNTALITPEFGSWVYLGEMVTDVFLPRDEPMSDGCGECTRCLDACPTAALVQPRQLNARRCLAYLTLTRGSLEEKDREKIGARLYGCDTCQTVCPYNQRVNATHQEEFRPDPETSKPLLKPLLCMTKSEFREKYGASSASWRGKKPIQRNAIIALAHFKDTTAVPELAKLLYEDPRPVIRETAAWALHKIGGEEAERVLITAESKETDPTVKRQLQQYLEGSNKNCTGRS

SEQ ID NO: 78776 - protein, 373 aa, unidentified
  source 1..373: note = Noviherbaspirillum autotrophicum
  REGION 1..373: note = tr|A0A0C2BJ93|A0A0C2BJ93_9BURK Epoxyqueuosine reductase OS=Noviherbaspirillum autotrophicum OX=709839; GN = queG PE=3 SV=1
MTISDDNLATLVLAIKAWGRELGFAQIGVADVDLTRAEPGLQAWLDAGYHGDMHYMATHGMKRARPADLVPGTVRVITARMNYLPRDMGDGWCEREVRKAEDAQAAVVSVYARGRDYHKVLRARLQQLAQRIEHEAGVFGYRVFTDSAPVMEVELAEKSGIGWRGKHTLLLNRDAGSMYFLGEILTDLPLPVDAPATRHCGQCRACIDICPTQAILGPCKLDARRCISYLTIELRGSIPVELRPLIGNRIYGCDECQLVCPWNKFAQRASLPDFDVRNGLDGATLVELFAWEEDDFNSRLEGSPIRRIGHECWLRNLAVGLGNTLRQAPDAAHIVAALQARAGHPSELVREHVAWALAQGSSSQAQPERQRQD

SEQ ID NO: 78777 - protein, 361 aa, unidentified
  source 1..361: note = Noviherbaspirillum denitrificans
  REGION 1..361: note = tr|A0A254TD91|A0A254TD91_9BURK Epoxyqueuosine reductase OS=Noviherbaspirillum denitrificans OX=1968433; GN = queG PE=3 SV=1
MTAPDNNLSTLAFAIKAWGRELGFADIGIAGIDLGHTEAGLQAWLDAGFHGEMDYMAAHGMKRARPAELVPGTVRVITARMNYLPRDSADDWREDEVRRASDSRQAVISIYARGRDYHKVLRARLQQLADRIRAEVGDFGYRVFTDSAPVMEVALAEQSGTGWRGKHTLMLHREAGSMFFLGELFTDLPLPVDPPGTSHCGQCRACIDICPTQAILGPYKLDARRCISYLTIELKGSIPVELRSLIGNRVYGCDDCQLVCPWNKFAQRSTLPDFDPRNGLEHATMVELFGWEEDEFNRRLEGSPIRRIGHERWLRNLAVGMGNAARQYRGDPGIVAALEARSGHPSPMVREHVDWALGCHR

SEQ ID NO: 78778 - protein, 369 aa, unidentified
  source 1..369: note = Noviherbaspirillum humi
  REGION 1..369: note = tr|A0A239KBV7|A0A239KBV7_9BURK Epoxyqueuosine reductase OS=Noviherbaspirillum humi OX=1688639 GN=queG; PE = 3 SV=1
MDMIATDIDLNALAAAIKAWGRELGFADIGIADTDLSASEAGLQAWLDAGHHGEMDYMAAHGMKRARPAELVPGTMRVITARMNYLPRATDQQRWREQEAQRGADPSAAVISVYARGRDYHKVLRARLQQLAERIRTEIGEFGFRAFTDSAPVMEVGLAEKSGMGWRGKHTLLLSREAGSMFFLGEIYTDLPLPVDAPVTSHCGQCSACIAACPTGAIVAPYQLDARRCISYLTIELKGSIPAELRPLIGNRVYGCDDCQLACPWNKFAQVASLPDFDVRNGLDAAGMIALFAWDEEDFNRRLEGSPIRRIGHERWLRNLAVGLGNALARQPAPEIVAALRTREQHPSELVREHVAWALAQAGSSPHQA

SEQ ID NO: 78779 - protein, 360 aa, unidentified
  source 1..360: note = Noviherbaspirillum sp.
  REGION 1..360: note = tr|A0A3A3G2F8|A0A3A3G2F8_9BURK Epoxyqueuosine reductase OS=Noviherbaspirillum sp. K1S02-23 OX=2320865; GN = queG PE=3 SV=1
MTSQPDIAALAQAIPAWGRELGLAEVRIAGIDLTQEEAGLQAWLDAGMHGEMDYMASHGMKRARPAELVPGTLRVITARLDYLSQAGAQDWRVAERQRQADAGAAVVSVYARGRDYHKVLRSRLQRLAERIAQTAGPFGYRVFTDSAPVLEVALAGQAGLGWRGKHTLLLNRQAGSMFFLGEIYTDLPLPVDVPVDAHCGTCHACIDACPTQAIVGPYRLDARRCISYLTIELKGSIPEELRPLIGNRVYGCDDCQLACPWNKFAQRAVLPDFEVRNGLDGAGLVELFAWSEEEFNRRLEGSPIRRIGHERWLRNIAVALGNAATAGKAQPDMVAALQSRADHPSELVREHVAWALAQHQ

SEQ ID NO: 78780 - protein, 362 aa, unidentified
  source 1..362: note = Noviherbaspirillum sp.
  REGION 1..362: note = tr|A0A5B8N2W5|A0A5B8N2W5_9BURK Epoxyqueuosine reductase OS=Noviherbaspirillum sp. UKPF54 OX=2601898; GN = queG PE=3 SV=1
MTISDDNLATLALAIKAWGRELGFAQIGVADVDLARAEPGLQAWLDAGCHGDMHYMATHGMKRARPADLVPGTVRVITARMNYLPRDMGDGWCEREQRKADDAQAAVISVYARGRDYHKVLRARLQQLAQRIEREAGVFGYRVFTDSAPVMEVELAEKSGIGWRGKHTLLLNRDAGSMYFLGEILTDLPLPVDEPTTRHCGQCRACIDICPTQAILGPYQLDARRCISYLTIELRGPIPVELRPLIGNRVYGCDECQLVCPWNKFAQRASLPDFDVRNGLDGATLVELFAWEEDDFNRRLEGSPIRRIGYECWLRNLAVGLGNALRQEPDAQHIIAALKARSGHPSELVREHVAWALEQAGK

SEQ ID NO: 78781 - protein, 354 aa, unidentified
  source 1..354: note = Novimethylophilus kurashikiensis
  REGION 1..354: note = tr|A0A2R5FDL5|A0A2R5FDL5_9PROT Epoxyqueuosine reductase OS=Novimethylophilus kurashikiensis OX=1825523; GN = queG PE=3 SV=1
MQSDSFDFSQLASDIKAWGHALGFQAIGICDTDLSQAEPEFTAWLEQGFHGEMDYMARHGLKRLRPAELVPGTRRVITARMDYLPEQVESSETVMQDASRAFISRYALGRDYHKVLRSRLQQLCDRIAECVGEFGYRVFTDSAPVAEVHLAEKSGIGWRGKHTLLLSRDAGSWFFLGEIFTDLPLPADEATTSHCGSCSACITACPTGAIVAPYQVDARRCISYLTIELQGSIPEQLRPLMGNRIYGCDDCQLCCPWNKFAQLSVEPDFQARHGLDAASLRELFAWDQSAFETMTAGSAIRRIGHERWLRNIAVALGNAETAPENIAALESRADHPSPLVQEHVSWALARLRSK

SEQ ID NO: 78782 - protein, 349 aa, Novosphingobium aromaticivorans
  REGION 1..349: note = tr|Q2GBV8|Q2GBV8_NOVAD Epoxyqueuosine reductase; OS = Novosphingobium aromaticivorans (strain ATCC 700278 / DSM 12444 / CIP 105152 / NBRC 16084 / F199) OX=279238; GN = que G PE=3 SV=1
MVKTAVTSLEDRLKAEATRLGFAVCGIAPAADDPLRAERLEQWLGEGRHGSMEWMETRLHHRRGPQSLWPEARSVIALGMSYAPADDPRRLADAGDRGRISVYAQGADYHDVIKRNLKALARWLVAEEPGAGVKVFVDTAPVMEKPLGQMAGLGWQGKHTNLVSRSHGSWLFLGAIYTTLGLDLDAPHADRCGSCTACQTACPTEAFPAPYRLDARRCISYLTIEHKGPVPEEFRKALGNRIYGCDDCLAACPWNSFATTAQANRAFLPRAELAAPRLAELLALDDATFRQVFSGSPIKRIGRDRMVRNCLYAAGNSGDRALLPVVHNLLADPDPAVADAARWALVELG

SEQ ID NO: 78783 - protein, 363 aa, unidentified
  source 1..363: note = Novosphingobium barchaimii
  REGION 1..363: note = tr|A0A147EK66|A0A147EK66_9SPHN Epoxyqueuosine reductase OS=Novosphingobium barchaimii OX=1420591 GN=queG; PE = 3 SV=1
MVKSDLTAPDPARFIAALQEEARSVGFVAFGIAPAGFDPIHGDRLSAWLAQGMHGSMEWMADRAHQRRAPQALWPEARSVIALGMSYAPAGDPLKLADHTDRARISAYAQGADYHDALKKALKALARWMVAQAPRHGMGDPGVKVFTDTAPVMEKPLAQAAGLGWQGKHTNLVSRDHGSWLFLGEIYTTLDLPPDAPGQDRCGSCSACQDACPTQAFPAPYRLDARRCISYLTIEHKGPVPQDLREKLGNRIYGCDDCLAVCPWNKFAREARSFRAYLPRAELTAPELRDLLTLDDAGFRALFSGSPIKRIGRNRFVRNCLYAAGNSGRQDLLAQVQPLCDDADAVVADAARWAVRRITSTAT

SEQ ID NO: 78784 - protein, 373 aa, unidentified
  source 1..373: note = Novosphingobium barchaimii
  REGION 1..373: note = tr|A0A0J7XUF7|A0A0J7XUF7_9SPHN Epoxyqueuosine reductase OS=Novosphingobium barchaimii LL02 OX=1114963; GN = queG PE=3 SV=1
MTSPGSNISAHDGADLVKAKLNAFAKDAEAQARALGFCAFGIASAATDDARAARLDAWLAAGMHGTMGWMEERAHHRRSPQGMWPEARSVIALGMSYAPAADPLRLEGEPQIGRISTYAQGADYHDVVKKALKHLSRWIVAEGQARKIAPEVGVKVFTDTAPVMEKPLAASAGLGWQGKHTNVVSREHGSWLFLGEIYTTLEFEPAKPGRDSCGSCSACQDACPTNAFPAPYRLDARRCVSYLTIEHKGPVPEDLREGLGNRIYGCDDCLAVCPWNKFAQVSHTIKAYLPRAELTAPELADLLTLDDAGFRTLFSGSPIKRIGRNRFVRNCLYAAGNSGRAALLAPVEALLGDDDPVVAEAAQWARARLGAPA

SEQ ID NO: 78785 - protein, 355 aa, unidentified
  source 1..355: note = Novosphingobium fuchskuhlense
  REGION 1..355: note = tr|A0A117UWH9|A0A117UWH9_9SPHN Epoxyqueuosine reductase OS=Novosphingobium fuchskuhlense OX=1117702; GN = queG PE=3 SV=1
MVNGAETTLEDRIRAEAHRLGFAACGIAPAADDALRAARLEQWLAEGNHGSMEWMETRLEHRRGPQSLWPEAKSVIALGMSYAPAADPMVLAEAKDRARISVYAQGADYHDVVKRALKALARWIVADVPGAEVKVFVDTAPVMEKPLGEAAGIGWQGKHTNLVSRGHGSWLFLGAIYTTLALEPDAPHADRCGSCTACQRACPTDAFPAPYRLDARRCISYLTIEHKGPIPDAFRAAMGNRIYGCDDCLAVCPWNRFASTAATNKAFLPRAELAAPRLAELLVLDDAAFRALFAGSPIKRIGRDRFVRNCLYAAGNSGDPGLLAPVQRLLADPDPAVADAASWALDRLAEAMPVP

SEQ ID NO: 78786 - protein, 353 aa, unidentified
  source 1..353: note = Novosphingobium ginsenosidimutans
  REGION 1..353: note = tr|A0A5B8S3H2|A0A5B8S3H2_9SPHN Epoxyqueuosine reductase OS=Novosphingobium ginsenosidimutans OX=1176536; GN = queG PE=3 SV=1
MVNAAEIAALKADLAREARRLGFAACGVTAAAEDPLRAARLEEWLDQGRHGDMDWMEARAHHRRSPQGLWPEAQRVIALGMSYAPSADPLLERAGRARISVYAQGADYHDTVKKALKALARWLVAEAANRGLGEIGVKVFVDTAPVMEKPLGEAAGLGWQGKHTNLVSREHGSWLFLGAIYTTLALPVDDAGQDRCGSCSACQTACPTDAFPAPYQLDARRCISYLTIEHKGPVPEEFRPALGNRIYGCDDCLAVCPWNKFASTAHTMRAFLPRAELAAPRLADLLALDDAAFRKLFSGSPIKRIGRDRFVRNCLYAAGNSGDPALTPQVQALAGDPDPVVAEAAAWALAQLT

SEQ ID NO: 78787 - protein, 346 aa, unidentified
  source 1..346: note = Novosphingobium guangzhouense
  REGION 1..346: note = tr|A0A2K2FZB7|A0A2K2FZB7_9SPHN Epoxyqueuosine reductase OS=Novosphingobium guangzhouense OX=1850347; GN = queG PE=3 SV=1
MEGEARALGFCAFGVASAAPDEDRAARLDAWLAAGMHGSMGWMEERAHHRRSPQGLWPEARSVIALGMSYAPAADPLRLADEGGIGRISTYAQGADYHDTVKKALKNLARWMVSEGEKRGLGPLDVKVFTDTAPVMEKPLAAAAGLGWQGKHTNVVSREHGSWLFLGEIYTTLELPVSAPARDRCGSCRACQDACPTDAFPAPYRLDARRCVSYLTIEHKGPVPEDMREGLGNRIYGCDDCLAVCPWNKFAETAHTMKAFLPRAELTAPELADLLTLDDAGFRKLFSGSPIKRIGRDRFVRNCLYAAGNSGRRALLDQVERLKEDADPAIADAARWAAVRLGSSPD

SEQ ID NO: 78788 - protein, 352 aa, unidentified
  source 1..352: note = Novosphingobium kunmingense
  REGION 1..352: note = tr|A0A2N0H5I2|A0A2N0H5I2_9SPHN Epoxyqueuosine reductase OS=Novosphingobium kunmingense OX=1211806; GN = queG PE=3 SV=1
MQTQSLKHDLAQEARRLGFVACGVTAGTEDPSRAARLEQWLGEGMHGAMEWMETRAHHRRSPEGLWPKARSVIALGMSYAPAHDPLALEAEPSRARISVYAQGRDYHDTVKKALKALARWLVDEAKARGLGTVGVKVFVDTAPVMEKPLGQAAGLGWQGKHSNLVSRQHGSWLFLGAIYTTLELSPDGAEDDRCGSCTACQAACPTDAFPRPYVVDARRCISYLTIELKEAVPVEFRKALGNRIYGCDDCLAVCPWNKFADTAHRMQAFLPRAELVAPRLADLLALDDAGFRALFSGSPIKRIGRARFVRNCLYAAGNSGDAALRAPVAALTADPDPVVADAARWALAELSV

SEQ ID NO: 78789 - protein, 371 aa, unidentified
  source 1..371: note = Novosphingobium lindaniclasticum
  REGION 1..371: note = tr|T0IES1|T0IES1_9SPHN Epoxyqueuosine reductase; OS = Novosphingobium lindaniclasticum LE124 OX=1096930; GN = queG PE=3 SV=1
MVNDALNALARDLEAQARELGFCAFGVAAAEEDADRAARLDAWLADGMHGSMDWMADRAHHRRSPQGLWPEARRVIALGMSYAPAGDPLSLAEVPEVGRISVYAQGADYHDWVKKALKNLARWLVSEADKRRLGPAGVKVFTDTAPVMEKPLAAAAGLGWQGKHTNMVSREHGSWLFLGEIYTTLELPLSAEGRDRCGSCRACQDACPTQAFPSPYRLDARRCVSYLTIEHKGPIPEEFRVGLGNRIYGCDDCLAVCPWNKFAETAHRLKAFLPRAELTAPRLAELLTLDDAGFRKLFSGSPIKRIGRDRFVRNCLYAAGNSGNAALMAQVAPLQADPDPAVAEAARWAAQRLKASPPTGGEDPPKLTEAP

SEQ ID NO: 78790 - protein, 345 aa, unidentified
  source 1..345: note = Novosphingobium malaysiense
  REGION 1..345: note = tr|A0A0B1ZNH4|A0A0B1ZNH4_9SPHN Epoxyqueuosine reductase OS=Novosphingobium malaysiense OX=1348853; GN = LK12_05460 PE=4 SV=1
MEAEARMLGFCAFGIAPASDDPDRAARLDSWLQEGMHGTMGWMEERAHHRRSPQGLWPEAKSVIALGMSYAPADDPLHLADKSEVGRISIYAQGADYHDTVKKALKHLARWIVAETEKRGLGEAGVKVFTDTAPVMEKPLAATAGLGWQGKHTNMVSRDHGSWLFLGEIYTTLDLPVSNMGRDRCGSCRACQDVCPTDAFPAPYRLDARRCVSYLTIEHKGPVPEDLREGLGNRIYGCDDCLAVCPWNKFAETAHTMKAFLPRAELAAPDLADLLTLDDAGFRKLFSGSPIKRIGRNRFVRNCLYAAGNSKRPGLLAQVEPLLEDPDPVVAEAAHWARDRLTAVP

SEQ ID NO: 78791 - protein, 366 aa, Novosphingobium mathurense
  REGION 1..366: note = tr|A0A1U6IP96|A0A1U6IP96_9SPHN Epoxyqueuosine reductase OS=Novosphingobium mathurense OX=428990 GN=queG; PE = 3 SV=1
MVNSALVDVAPDTFIEDLLAQARSLGFCAFGVASASEDPVRAQRLETWLDEGMHGSMAWMKERAHHRRSPQELWPQARSVIALGMSYAPAADPLAHADRPEIARISVYAQGADYHDTVKKALKHLARWIVSEGEKRGLGGEDGSVGVKVFTDTAPVMEKPLGAAAGLGWQGKHTNMVSREHGSWLFLGEIYTTLDLAPSSPGRDRCGSCSACQDACPTQAFPAPYRLDARRCISYLTIEHKGEIPLEFREALGNRIYGCDDCLAVCPWNKFAQVAHVHRTFLPRGELTAPPLADLLTLDDAGFRKLFSGSPIKRIGRDRFVRNCLYAAGNSQRPDLLEQVGPLLDDPDPAVADAAQWAADKLQGVV

SEQ ID NO: 78792 - protein, 354 aa, Novosphingobium nitrogenifigens
  REGION 1..354: note = tr|F1Z4F3|F1Z4F3_9SPHN Epoxyqueuosine reductase; OS = Novosphingobium nitrogenifigens DSM 19370 OX=983920; GN = queG PE=3 SV=1
MVNNAAELVRKIRTEAENCGFVACGIAPAREDPLRASRLEQWLGEGCHGSMEWMETRLEHRRSPQGLWPQAQSVIALGMSYAPAADPRTLGAHADHGRISTYALGADYHDVVKRALKALARWLVAEVPGAEVKVFVDTAPVMEKPLGAAAGIGWQGKHTNLVSRRHGSWLFLGAIYTSLPLPADTPHADRCGSCSACQDACPTKAFPAPYRLDARRCVSYLTIEHKGPVPEDLRAGLGNRIYGCDDCLAACPWNSFAQAGAANRAFLPRAELTAPRLADLLRLDDAGFRALFSGSPIKRIGRDRFVRNCLYAAGNSRDPALFDEVRRLLDDPDPAIADAADWALDRLTAALPVP

SEQ ID NO: 78793 - protein, 371 aa, Novosphingobium pentaromativorans
  REGION 1..371: note = tr|A0A2W5NJA6|A0A2W5NJA6_9SPHN Epoxyqueuosine reductase OS=Novosphingobium pentaromativorans OX=205844; GN = queG PE=3 SV=1
MVNDALNALTRDLEVQARELGFCAFGVASAEEDPARAARLDSWLAAGMHGSMEWMADRAHHRRSPQGLWPEARRVIALGMSYAPSADPLALADVPEVGRISVYAQGADYHDWVKKALKNLARWLVSEADRRGLGPAGVKVFTDTAPVMEKPLAAAAGLGWQGKHTNMVSRDHGSWLFLGEIYTTLELPLSTEGRDRCGSCRACQDACPTQAFPAPYRLDARRCVSYLTIEHKGPIPEEFREGLGNRIYGCDDCLAVCPWNKFAETAHRLKAFLPRAELTAPRLAELLALDDAGFRKLFSGSPIKRIGRDRFVRNCLYAAGNSGNAAFMTQVSALRDDPDPAVAEAAQWAARRLQASPPRGGEDPVASTAIP

SEQ ID NO: 78794 - protein, 361 aa, Novosphingobium pentaromativorans
  REGION 1..361: note = tr|G6EC09|G6EC09_9SPHN Epoxyqueuosine reductase; OS = Novosphingobium pentaromativorans US6-1 OX=1088721; GN = queG PE=3 SV=1
MVDVAPDTFIEDLQAQARSLGFCALGIASASEDPVRAQRLETWLDDGMHGSMAWMKERAHHRRSPQGLWPEARSVIALGMSYAPAADPLAHADRPEIARISVYAQGADYHDTVKKALKHLARWIVLEGEKRGLGGADGSVGVKVFTDTAPVMEKPLGAAAGLGWQGKHTNMVSREHGSWLFLGEIYTTLDLAPSTPGRDRCGSCSACQDACPTQAFPAPYRLDARRCISYLTIEHKGEIPLEFREALGNRIYGCDDCLAVCPWNKFAQVAHVHRTFLPRGELAAPPLADLLTLDDAGFRKLFSGSPIKRIGRNRFVRNCLYAAGNSKRPDLLEQVGPLLNDPDPAVAGAAQWAASKLQSVP

SEQ ID NO: 78795 - protein, 382 aa, Novosphingobium resinovorum
  REGION 1..382: note = tr|A0A031K0W5|A0A031K0W5_9SPHN Epoxyqueuosine reductase OS=Novosphingobium resinovorum OX=158500 GN=queG; PE = 3 SV=1
MKPPGSSTCAPDGAVPVKTALSNFAEAVEGEARALGFCAFGVASAATDEDRAARLDAWLAAGMHGSMGWMEERAHHRRSPQGLWPEARSVIALGMSYAPATDPLRLAEEGGIGRISTYAQGADYHDTVKKALKNLARWMVSEGDKRGLGPVGVKVFTDTAPVMEKPLAAAAGLGWQGKHTNVVSREHGSWLFLGEIYTTLDLPLSAPARDRCGSCRACQDACPTDAFPAPYRLDARRCVSYLTIEHKGPVPEDMREGLGNRIYGCDDCLAVCPWNKFAETAHTMKAFLPRAELTAPELADLLTLDDAGFRKLFSGSPIKRIGRDRFVRNCLYAAGNSGRKVLLAQVEPLLADADDAVADAARWAREKLRSSLSRSDGEVAAT

SEQ ID NO: 78796 - protein, 346 aa, Novosphingobium resinovorum
  REGION 1..346: note = tr|A0A1D8A5Y8|A0A1D8A5Y8_9SPHN Epoxyqueuosine reductase OS=Novosphingobium resinovorum OX=158500 GN=queG; PE = 3 SV=1
MEGEARALGFCAFGVASAATDEDRAARLDAWLAAGMHGSMGWMEERAHHRRSPQGLWPEARSVIALGMSYAPAADPLRLADEGGIGRISAYAQGADYHDTVKKALKNLARWMVSEGDKRGLGPVGVKVFTDTAPVMEKPLAAAAGLGWQGKHTNVVSREHGSWLFLGEIYTTLDLPLSAPARDRCGSCRACQDACPTDAFPAPYRLDARRCVSYLTIEHKGPVPEDMREGLGNRIYGCDDCLAVCPWNKFAETAHTMKAFLPRAELTAPELADLLTLDDAGFRKLFSGSPIKRIGRDRFVRNCLYAAGNSGRKVLLAQVEPLLADADDAVADAARWARGKLTSSRT

SEQ ID NO: 78797 - protein, 355 aa, unidentified
  source 1..355: note = Novosphingobium sediminis
  REGION 1..355: note = tr|A0A512AII3|A0A512AII3_9SPHN Epoxyqueuosine reductase OS=Novosphingobium sediminis OX=707214 GN=queG; PE = 3 SV=1
MVNSAETTLASRIKAEAARLGFAACGIAPATDDPVRAERLEQWLAEGSHGSMEWMETRFEHRRGPQSLWPAARSVIALGMSYAPAADPLALAEARDRARISVYAQGADYHDVVKRALKALARWLVAEVPGAEVKVFVDTAPVMEKPLGEVAGIGWQGKHTNLVNRQHGSWLFLGAIYTTLDLPPDAPHADHCGSCTACQRACPTDAFPAPYRLDARRCISYLTIEHKGPIPAEFRAALGNRIYGCDDCLAVCPWNSFASTAATNKAFLPRAELTAPRLAELLALDDAAFRALFAGSPIKRIGRDRFVRNCLYAAGNSSHAALMAPVQRLLGDPDPAVADAASWALDRLAEAMPVP

SEQ ID NO: 78798 - protein, 105 aa, Novosphingobium sp.
  REGION 1..105: note = tr|A0A5C7U6K8|A0A5C7U6K8_9SPHN DUF1730 domain-containing protein (Fragment) OS=Novosphingobium sp. OX=1874826 GN=E6Q63_06670 PE=4 SV=1
MTLEGKLAAEATRLGFAACGVAPADDDPLRAARLEQWLGEGCHGSMEWMETRLHHRRGPQSLWPDAKSVIALGMSYAPAADPRALEAHPERGRISVYAQGCDYHD

SEQ ID NO: 78799 - protein, 343 aa, Novosphingobium sp.
  REGION 1..343: note = tr|A0A3B7DUL7|A0A3B7DUL7_9SPHN Epoxyqueuosine reductase OS=Novosphingobium sp. THN1 OX=1016987 GN=queG; PE = 3 SV=1
MTLEGKLAAEATRLGFAACGIAPADDDPLRAARLEQWLGEGCHGAMEWMETRLHHRRGPQSLWPDAKSVIALGMSYAPAADPRALEAHPERGRISVYAQGGDYHDVVKRNLKALARWLMAEVPGAEVKVFVDTAPVMEKPLGQMAGIGWQGKHTNLVSRTHGSWLFLGAIYTTLELTPDVPHADRCGSCTACQTACPTNAFPKPYQLDARRCISYLTIEHKGPVAEEFRAALGNRIYGCDDCLAACPWNSFARAAQANRAFLPRGELTAPKLAELLALDDATFRQVFSGSPIKRIGRDRMVRNCLYAAGNSGDRALLPVVQGLCGDPDPAVADAARWAVERLA

SEQ ID NO: 78800 - protein, 369 aa, Novosphingobium subterraneum
  REGION 1..369: note = tr|A0A0B9AEF4|A0A0B9AEF4_9SPHN Epoxyqueuosine reductase OS=Novosphingobium subterraneum OX=48936 GN=queG; PE = 3 SV=1
MVNSSPTLEGREATPGGRGATPGSERLTLEGKLAAEATRLGFAACGIAPAHDDPLRAARLEQWLGEGCHGSMEWMETRLHHRRGPQSLWPDARSVIALGMSYAPAADPRALEAHPERGRISVYAQGGDYHEVVKRNLKALARWLVAEVPGAEVKVFVDTAPVMEKPLAQAAGIGWQGKHTNLVSRTHGSWLFLGAIYTTLDLTPDAPHADRCGSCTACQTACPTNAFPKPYQLDARRCISYLTIEHKGPVAEEFREALGNRIYGCDDCLAACPWNSFARAAQANRAFLPRAELTAPKLKELLALDDATFRQVFSGSPIKRIGRDRMVRNCLYAAGNSGERALLPAVTALADDPDPAVADAARWAVARLA

SEQ ID NO: 78801 - protein, 332 aa, Novosphingobium taihuense
  REGION 1..332: note = tr|A0A562JSA9|A0A562JSA9_9SPHN Epoxyqueuosine reductase OS=Novosphingobium taihuense OX=260085 GN=queG; PE = 3 SV=1
MRLGFAACGIAPAEDDPLRAARLEQWLGEGHHATMEWMETRLHHRRGPQSLWPEAKSVIALGMSYAPASDPRALEARPDRGRISVYAQGGDYHDVVKRNLKALARWLVAEVPEAQVKVFVDTAPVMEKPLGQLAGIGWQGKHTNLVSRTHGSWLFLGAIYTTLELAADAPHADRCGSCTACQTACPTDAFPQPYQLDARRCISYLTIEHKGPVPQEFRAALGNRIYGCDDCLAACPWNSFAQAAQANRAFLPRAELAAPKLAELLALDDATFRQVFSGSPIKRIGRDRMVRNCLYAAGNSGDRTLLPSVTALAKDPDPAVADAARWAMDRLA

SEQ ID NO: 78802 - protein, 358 aa, Novosphingobium tardaugens
  REGION 1..358: note = tr|U2ZTQ4|U2ZTQ4_9SPHN Epoxyqueuosine reductase; OS = Novosphingobium tardaugens NBRC 16725 OX=1219035; GN = queG PE=3 SV=1
MVNNTATNALKDRFIAEARRQGFVAIGFAPAVDDALRGQRLDAWLADGAHGDMGWMADRADVRRGPAAMWPEARSVIALGMSYAPAIDPMALDGVPDRARISTYAQGADYHDVMKKALKRLARWLVAEAAQDGLGEIRLKLFVDTAPVMEKPLAAQAGLGWQGKHTNLVSRTHGSWLFLGAIYCTIDFPADAPHDDRCGSCDACQQACPTAAFPAPYQLDARRCISYLTIELKGPIPREFRKAMGNRIYGCDDCLAACPWNKFAQVGARNRAFLPRAELTAPRLAELLTLDDAGFRALFSGSPIKRIGRDRFVRNCLIAAGNSGDQALLAPVAALVADPDPVVAEAAAWALAELTAVP

SEQ ID NO: 78803 - protein, 381 aa, Obesumbacterium proteus
  REGION 1..381: note = tr|A0A4Q9DBU1|A0A4Q9DBU1_9GAMM Epoxyqueuosine reductase OS=Obesumbacterium proteus OX=82983 GN=queG PE=3; SV = 1
MTHPLDLNQLAQHIKQWGQSLGFQQVGICDTDLSVEEPRLQAWLDKQYHGEMEWMARHGMMRARPHELHPGTLRVISVRMNYLPANASFAKTLKNPQLGYVSRYALGRDYHKLLRNRLKRLGDMIQEYCVGIDVNSRPFVDSAPILERPLAAKAGIGWVGKHSLILNKEAGSWFFLGELLLDLPLPVDKPQDEQCGRCVACITTCPTGAIIEPYVVDARRCISYLTIELESAIPEEFRPLMGNRIYGCDDCQMICPWNRFSQLTEEGDFSPRQKLHTPELIELFQWDEKTFLKITEGSAIRRIGHLRWLRNISVALGNAPYDAQIIPLLQSRMGLSEVLDEHIEWAVKQQQEKRSENVIEIQTSQQKRLIRAIEKGLPRDA

SEQ ID NO: 78804 - protein, 381 aa, Obesumbacterium proteus
  REGION 1..381: note = tr|A0A1B7KHL3|A0A1B7KHL3_9GAMM Epoxyqueuosine reductase OS=Obesumbacterium proteus ATCC 12841 OX=1354268; GN = queG PE=3 SV=1
MTHPLDLNQLAQHIKQWGQSLGFQQVGICDTDLSVEEPRLQAWLDKQYHGEMEWMARHGMMRARPHELHPGTLRVISVRMNYLPANASFAKTLKNPQLGYVSRYALGRDYHKLLRNRLKRLGDMIQEYCVDIDVNSRPFVDSAPILERPLAAKAGIGWVGKHSLILNKEAGSWFFLGELLLDLPLPVDKPQDEQCGRCVACITTCPTGAIVEPYVVDARRCISYLTIELESAIPEEFRPLMGNRIYGCDDCQMICPWNRFSQLTEEGDFSPRQKLHTPELIELFQWDEKTFLKITEGSAIRRIGHLRWLRNISVALGNAPYDAQIIPLLQSRMGLSEVLDEHIEWAVKQQQEKRSENVIEIQTSQQKRLIRAIEKGLPRDA

SEQ ID NO: 78805 - protein, 354 aa, unidentified
  source 1..354: note = Oblitimonas alkaliphila
  REGION 1..354: note = tr|A0A0K1XDE9|A0A0K1XDE9_9GAMM Epoxyqueuosine reductase OS=Oblitimonas alkaliphila OX=1697053 GN=queG; PE = 3 SV=1
MSLSPEQLTALALQIKHWALDLGFQQVGITDTDLSHTEEQYQQWIDAGYAGEMEYMWSHGTKRLRPAELVPGTLRVISVRMDYLPADTQLTEQLRNPEAAYISRYALGRDYHKVLRKRLQQLASKISEAIGPFGYRAFVDSAPVMERQLAEKAGLGWTGKNTLILNRQAGSFFFLGELLVDLPLPIDAPNEKNHCGKCSSCLDQCPTNAFVAPGVLDARRCISYLTIELKGSIPEELRPLLGNRVYGCDDCQLVCPWNRFAKVSTEPDFTPRHQLATADLVTLFLWDEATFLRKTEGSPIRRIGFERWLRNLAVSLGNAPSTIPVLEALKQRLNYPSELVQEHVNWALQQHKQR

SEQ ID NO: 78806 - protein, 382 aa, unidentified
  source 1..382: note = Oceanibacterium hippocampi
  REGION 1..382: note = tr|A0A1Y5RV66|A0A1Y5RV66_9PROT Epoxyqueuosine reductase OS=Oceanibacterium hippocampi OX=745714 GN=queG; PE = 3 SV=1
MSGAEATTDGVTPSDRSEAIRVEARRLGFDAVGVTDADAIPDARARLDAYIALGRHGGMDWLARDPDRRGSPRGLWPDARSVVAVALNYGPAGDPMALLDHPDRGIVSVYARNRDYHDILKRRLKELARWMVGRFGGELKVFVDTAPVMEKPLAAAAGLGWQGKHSNLLSREHGSWLFLGTLYTSLELAPDQPSDGHCGSCRACLDICPTKAFPAPFQVDARRCISYLTIEHKGHIEVEFRAAMGNRIYGCDDCLAVCPWNKFARSTKEPGFLPRAELTAPRLRDLAELDDASFRALFAGSPIKRTGRDRFVRNVLIALGNSGDIDAVPLLERLTGDASPLVRAMAVWALSRLLPADAFAARRDDLMVRETDPEVRREWRDG

SEQ ID NO: 78807 - protein, 371 aa, Oceanibaculum indicum
  REGION 1..371: note = tr|A0A420WQN1|A0A420WQN1_9PROT Epoxyqueuosine reductase OS=Oceanibaculum indicum OX=526216 GN=queG PE=3; SV = 1
MTEDLKSRIREQALALGFDAVGFAPAQLSNQVRQWLADFLAEGRHGDMGWMVEKADRRGDPQVLWPEARSIVVLGMNYGPGRDPLAILGHPERAGISVYAQGRDYHDHVKNRLKALARWMAEEIDSGVKVFVDTAPVMEKPLGQQAGLGWQGKHTNLVSRGFGSWLFLGEVYSTLDLAPDTSETDHCGSCTSCLTACPTDAFPAPYQLDARRCISYLTIEHKGVIAREFREPMGNRIYGCDDCLAVCPWNKYAKPTGHEAFLPRAELMAPRLADLAQLDDAGFRQLFSGSPVKRIGRDRFVRNVLIAIGNSGSQALVPITESLLSDSSPLVRGMAVWALSRLLDADRFAGLRDRHLPDETDEDVREEWLEC

SEQ ID NO: 78808 - protein, 371 aa, Oceanibaculum indicum
  REGION 1..371: note = tr|K2KG56|K2KG56_9PROT Epoxyqueuosine reductase; OS = Oceanibaculum indicum P24 OX=1207063 GN=queG PE=3 SV=1
MTEDLKSRIREQALALGFDAVGFAPAQLSNQVRQWLADFLAEGRHGDMGWMVEKADRRGDPQVLWPEARSIVVLGMNYGPGRDPLAILDHPTRAGISVYAQGRDYHDHVKNRLKALARWMAEEIDSGVKVFVDTAPVMEKPLGQQAGLGWQGKHTNLVSRGFGSWLFLGEVYSTLDLAPDTSEIDHCGSCTSCLSACPTDAFPAPYQLDARRCISYLTIEHKGVIAREFREPMGNRIYGCDDCLAVCPWNKYAKPTGHDAFLPRAELMAPRLADLAQLDDAGFRQLFSGSPVKRIGRDRFVRNVLIAIGNSGSQTLVPITESLLSDSSPLVRGMAVWALSRLLDADRFAALRDRHLPTETDEDVRAEWLEG

SEQ ID NO: 78809 - protein, 377 aa, Oceanicaulis sp.
  REGION 1..377: note = tr|A0A3D5ZX60|A0A3D5ZX60_9RHOB Epoxyqueuosine reductase OS=Oceanicaulis sp. OX=1924941 GN=queG PE=3 SV=1
MSTASLSETVRAMAREAGFDGVRITRADAPWEAGDRLRAFVEAGHHGGMGWMEDTLERRVHPTAMWPEARSAVVVGLNYGPDHDPLEDLKNTGRAVISVYARNRDYHDLLKKRLKQMARAFHGETGKGVKVFVDTAPLMEKPLAALSGLGWQGKHTNLVSRDWGSWLFLGVMLTEAELEPDAPETDHCGSCRACLDICPTDAFPAPYRLDARRCISYLTIEHKGPVPREFRAAMGNRIYGCDDCLAVCPWNKFAARTAETAFHARAELEAPLLAELSRLDDAGFRTFFTASPIKRIGRDRFVRNVLIALGNDSGAAALDAVLARLDDESALVRGAAVWALSRLDAARFEAERETRLPAETDGDAAAEWKRSDAGAGG

SEQ ID NO: 78810 - protein, 372 aa, Oceanicaulis sp.
  REGION 1..372: note = tr|A0A2T4ZPH6|A0A2T4ZPH6_9RHOB Epoxyqueuosine reductase OS=Oceanicaulis sp. PT13A OX=2135616 GN=queG; PE = 3 SV=1
MSAPEEQAERVKALALEAGFSVVRVTRADDPWEAGARLREFVEAGRHGEMAWMEDTLERRSHPTAMWPDAKSAVVVGLDYGPERDPLDILERPVEAAISVYAQNKDYHDILKKRLKRFAGAFHRETGAEVKVFVDTAPLMEKPLAHKSGLGWQGKHTNLVSRSHGSWLFLGVMLTAAELTPDAPETDHCGSCRACLDICPTNAFPAPYQIDARRCISYLTIEHKDPIPVEFRAAMGNRIYGCDDCLAVCPWNKFAQASSEAAFHPREALTAPKLAELVQLDDPGFRAFFKGSPIKRIGRDRFVRNVLIALGNSGEPALAERAADLLDDPSELVRGAAIWALGRLDAKRFAAEKAQRRAMEPDPDVAAEWAQA

SEQ ID NO: 78811 - protein, 389 aa, unidentified
  source 1..389: note = Oceanicella actignis
  REGION 1..389: note = tr|A0A1M7T8T1|A0A1M7T8T1_9RHOB Epoxyqueuosine reductase OS=Oceanicella actignis OX=1189325 GN=queG PE=3; SV = 1
MTAAQPAPAADARALAEALRAQARAEGFAAMGVCRPDAVPEAAERLRAFLAAGRHGEMAWMAERAAWRGSAAALWPEARSVVMLAEPYQPDPAPWAPLTRPELGVVSCYARGKDYHDLVKKRLKRLGRWLIERAGGQIKVFVDTAPVMEKPLAAAAGLGWQGKHTNLVSRELGSWFFLGAIFTTLELPADAPAPQSCGSCRRCLDVCPTAAFPAPFQLDARRCISYLTIELKGPIPRPMRPLLGNRIYGCDDCLAVCPWNKFAGAAAEIGYLHRPELTRPRLAELAALDDGAFREVFSGSPVKRIGRGRFVRNVLVAIGNSGDRALADSARALLGDADPLVRGAAVWALGRLVGARALAELGPPPDERDPQVLDEWRAACAPACGLGQG

SEQ ID NO: 78812 - protein, 389 aa, unidentified
  source 1..389: note = Oceanicella actignis
  REGION 1..389: note = tr|A0A5D3WAF9|A0A5D3WAF9_9RHOB Epoxyqueuosine reductase OS=Oceanicella actignis OX=1189325 GN=queG PE=3; SV = 1
MTAAQPAPAADARALAEALRAQARAEGFAAMGVCRPDAVPEAAERLRAFLAAGRHGEMAWMAERAAWRGSAAALWPEARSVVMLAEPYQPDPAPWAPLTRPELGVVSCYARGKDYHDLVKKRLKRLGRWLIERAGGQIKVFVDTAPVMEKPLAAAAGLGWQGKHTNLVSRELGSWFFLGAIFTTLELPADAPAPQSCGSCRRCLDVCPTAAFPAPFQLDARRCISYLTIELKGPIPRPMRPLLGNRIYGCDDCLAVCPWNKFAGAAAEIGYLHRPELTRPRLAELAALDDGTFREVFSGSPVKRIGRGRFVRNVLVAIGNSGDRALADSARALLGDADPLVRGAAVWALGRLVGARALAELGPPPDERDPQVLDEWRAACAPACGLGQG

SEQ ID NO: 78813 - protein, 361 aa, unidentified
  source 1..361: note = Oceanicoccus sagamiensis
  REGION 1..361: note = tr|A0A1X9NHH2|A0A1X9NHH2_9GAMM Epoxyqueuosine reductase OS=Oceanicoccus sagamiensis OX=716816 GN=queG; PE = 3 SV=1
MTNHKDNSPEAISNIDLLSLMEDIRAWGRELGFQQIGISDINLDQPRQHLQSWLEKNFHGDMDYMASHGEKRSRPEQLLPGTLRVLSARMDYLPDTDSMEEVLADANKAYISRYALGRDYHKLMRKRLATLAQKISAVAGQHNHRAFVDSAPVLERALAEKAGLGWIGKNTMLINPKAGSWFFLGEIYTDLPLPLDPPQETMHCGSCTACLDDCPTGAIVAPNQVDARRCISYLTIELRESIPEELRPLMGNRIYGCDDCQLVCPWNKFSEHTQETDFQPRNNLQAAELVELFQWTEEEFLRRTEGSAIRRIGYECWLRNIAVALGNASSSDTVVAALKEKSQHSSALVREHSQWALAQHN

SEQ ID NO: 78814 - protein, 345 aa, Oceanicola granulosus
  REGION 1..345: note = tr|Q2CKC6|Q2CKC6_OCEGH Epoxyqueuosine reductase; OS = Oceanicola granulosus (strain ATCC BAA-861 / DSM 15982 / KCTC 12143 / HTCC2516) OX=314256 GN=queG PE=3 SV=1
MQDLKDRLEAQALAEGFSAMGVCRPDAAPETAGRLATFLAEGRHGQMAWMAERTHWRGDAAALWPEARSVVMLAEAYSPEHDPLEVLQRRDRAAISVYAQGRDYHDIVKKRLKRVGRWLLEQAPGEQIKVFVDTAPVMEKPLAAAAGLGWQGKHTNLLGRDLGNWVFLGAIFTTLELPPDPPGRDRCGSCRACLDICPTDAFPAPYQLDARRCISYLTIEHAGPVDEALRPLLGNRIYGCDDCLAVCPWNKFAATARETRYAGAGAGPPRLAELAALDDAAFRARFSGSPIKRIGRERFVRNVLYAIGNSGDRALLGAAEALLDDADETVRDAAGWAVGRLRNPA

SEQ ID NO: 78815 - protein, 349 aa, unidentified
  source 1..349: note = Oceanicola litoreus
  REGION 1..349: note = tr|A0A1N6HGH0|A0A1N6HGH0_9RHOB Epoxyqueuosine reductase OS=Oceanicola litoreus OX=1217970 GN=queG PE=3; SV = 1
MFAARKWGRRVKDAVVARALEEGFSLCRVARAGPLPGVPEGLRAFLAEGRHGEMDWMEKRLEWREDPSALWPEARSVIVLGESYGPEYDPLAGLEARERGLISAYARGRDYHDIVKKRLKRLGRWLIEEFGGEIKVFVDTAPVAEKPLAQAAGLGWQGKHTNLVSREMGSWFFIGSIFTTLDIEPDPAESDHCGGCRRCLDVCPTEAFPAPYQLDARRCISYLTIEHAGPVPEDLRSKLGNRIYGCDDCLAVCPWNKFAVAAADMRYRGGTETDLPALEELAGLDDAAFRARFSGSPIKRIGRARFVRNVLYAIGNSGAGRLRAVAQELCEDEDPVVADAARWAMARLG

SEQ ID NO: 78816 - protein, 350 aa, Oceanicola sp.
  REGION 1..350: note = tr|A0A254RGP1|A0A254RGP1_9RHOB Epoxyqueuosine reductase OS=Oceanicola sp. 22II-s10i OX=1317116 GN=queG; PE = 3 SV=1
MEHALKDRLRAQAEAEGFSDMGVCRPDAVPQVQARLARFLAEGRHGQMGWMERRAEWRGDPAALWPKARSVIMLAESYTPEEDPLAGLQARDRGVISVYARGADYHDLVKKRLKRLARWLIAEAGAQGPDEAPVEVKVFVDTAPVPEKALAEAAGLGWQGKHTNLLGRGFGNWVFLGAIFTTLDLPVDEAGRERCGSCRRCLDACPTDAFPAPFQLDARRCISYLTIEHHGPVDEALRPGIGNRIYGCDDCLAVCPWNKFAVEAREMRYAARPGTVLPPLAELAVLDDAGFRARFAGSPIKRIGRDRFVRNVLYAIGNSGDLALRAVAESLTGDPDPAVADAARWAVARL

SEQ ID NO: 78817 - protein, 339 aa, Oceanicola sp.
  REGION 1..339: note = tr|A0A5B8BMK1|A0A5B8BMK1_9RHOB tRNA epoxyqueuosine(34) reductase QueG OS=Oceanicola sp. D3; OX = 2587163 GN=queG PE=4 SV=1
MKDAIVARALEEGFSLCRVMRAGPLEGVPENLRQFLAEGRHGQMEWMERRVEWREDPSVLWPEAKSVIVLGESYGPEFDPLAALGEREKGLISAYARGRDYHDIVKKRLKRLGRWLIETYGGEIKVFVDTAPVAEKPLAQAAGLGWQGKHTNLVSRDMGSWFFIGSVFTTLELEADPAEEDHCGGCRRCLDVCPTGAFPAPYQLDARRCISYLTIEHAGPVDEALRGLMGNRIYGCDDCLAVCPWNKFAVEAADMRYRGGIETDLPDLAELAGLDDAAFRARFSGSPIKRIGRGRFVRNVLYAIGNSGVARLRPVAQGLCEDSDPVVADAARWAVAQLG

SEQ ID NO: 78818 - protein, 308 aa, unidentified
  source 1..308: note = Oceanihabitans sediminis
  REGION 1..308: note = tr|A0A368P6X9|A0A368P6X9_9FLAO Epoxyqueuosine reductase OS=Oceanihabitans sediminis OX=1812012 GN=queG; PE = 3 SV=1
MPNNKAKYTEIIKAEAKRLGFLSCGISKAAFLEAEAPRLEAWLNKSMNGEMHYMENHFDKRLDPTKLVEGSKSVISLLLNYYPEEKQQDNTYKLSKYAYGTDYHFIIKDKLKTLLHHIQEEIGEVDGRAFVDSAPVLDKAWAAKSGLGWIGKHSNLLTQQVGSFYFIAELIIDLELEYDSRVTDHCGTCTACIDACPTQAIVEPYVVDGSKCISYLTIELKDNLPTQFQGKMDDWMFGCDVCQDVCPWNRFSKAHAEPLFNPHPELLDMTKKDWEEITEETFRKVFKKSAVKRTKYSGLVRNIQFLKK

SEQ ID NO: 78819 - protein, 375 aa, Oceanimonas baumannii
  REGION 1..375: note = tr|A0A235CGH0|A0A235CGH0_9GAMM Epoxyqueuosine reductase OS=Oceanimonas baumannii OX=129578 GN=queG PE=3; SV = 1
MTTPDFDALAHDIKLWAAELGFDQAGITDTDLSDQEPLLAEWLAKGYHGEMEYMARHGMMRARPHELLPGTLRVISVRMSYLPEQAAIAHVLSNPDKGYISRYALGRDYHKVLRNRLKKLADKIQERAAELVARPFVDSAPVLERPLAVNAGLGWTGKHSLIINRKQGSFFFLGELLVNLPLPVDSPVEEGCGNCVACLTICPTQAIVEPYVVDARRCISYLTIELDGPIPEALRPLMGNRIYGCDDCQLICPWNRFANASKEPDFSPREQLHAPQLLALFDWSEAHFLKVTEGSPIRRIGYRRWLRNIAVALGNAPASPMVIQALEQKRDEVDEMVQEHIDWALTQQTEKLASQNRKTARLIRAVDKGMPAHAR

SEQ ID NO: 78820 - protein, 375 aa, Oceanimonas doudoroffii
  REGION 1..375: note = tr|A0A233RBF1|A0A233RBF1_9GAMM Epoxyqueuosine reductase OS=Oceanimonas doudoroffii OX=84158 GN=queG PE=3; SV = 1
MTTPDFAALAHDIKLWAAELGFDQAGITGTDLSEHESQLADWLAKGYHGEMDYMARHGMMRARPHELLPGTLRVISVRMNYMPEHAAIAHVLSDPDKGYISRYALGRDYHKVLRNRLKKLADKIAERAEKLVARPFVDSAPVLERPLAVNAGLGWTGKHSLVLNKEQGSFFFLGELLVNLPLPVDQPVAEGCGNCVACLTICPTQAIVEPYVVDARRCISYLTIELDGPIPEEFRPLMGNRIYGCDDCQLICPWNRFANASQEPDFAPRERLHAPQLLELFDWSETHFLSMTEGSPIRRIGHRRWLRNIAVALGNAPASPMVVFALEQKRDQVDDMVREHIDWALARQADKLARQDRKTARLIRAVDKGMPTHAR

SEQ ID NO: 78821 - protein, 376 aa, Oceanimonas sp.
  REGION 1..376: note = tr|H2G0J0|H2G0J0_OCESG Epoxyqueuosine reductase; OS = Oceanimonas sp. (strain GK1) OX=511062 GN=queG PE=3 SV=1
MTTPDFDALAHDIKLWAAELGFDQAGITGTDLSKHEPQLAAWLAKGYHGEMDYMARHGMMRARPQELLPGTLRVISVRMNYLPEHAAIAHVLSDPEKGYVSRYALGRDYHKVLRNRLKKLADRIAERAEGLVARPFVDSAPLLERPLATNAGLGWTGKHSLVINREQGSFFFLGELLVNLPLPVDVPETEDGCGHCVACLTICPTQAIVEPYVVDARRCISYLTIELDGPIPEEFRPLMGNRIYGCDDCQLICPWNRFANASQEPDFAPREPLHAPQLLALFDWSEDYFLKMTEGSPIRRIGHRRWLRNIAVALGNAPASPMVVFALEQKRDLVDDMVREHIDWALAQQQQKLARQDRKTARLIRAVDKGMPTHAR

SEQ ID NO: 78822 - protein, 348 aa, unidentified
  source 1..348: note = Oceaniovalibus guishaninsula
  REGION 1..348: note = tr|K2I6H8|K2I6H8_9RHOB Epoxyqueuosine reductase; OS = Oceaniovalibus guishaninsula JLT2003 OX=1231392 GN=queG; PE = 3 SV=1
MSADLKARLKNEALAAGFVRMGVCRPGAIPQAAGRLAAFLKAGRHGTMGWMTERQGWRGDPAALWPEARSVAMLAESYTPAHDPLDDLALADRGTVSVYAQGRDYHDVVKKRLKRVARWLVAAAPEAGVKVFVDTAPVMEKPLAQAAGLGWQGKHTNLLGRDIGNWVFLGAIFTTLDLPPDPPESEHCGTCRKCLDICPTDAFPAPFQLDARRCVSYLTIEHAGPVDEALRPGLGNRIYGCDDCLAICPWNKFAVAARDMRLTPRDGVRAQPLAELATLDDAGFRARFSTSAVKRIGRDRFVRNVCYAIGNSGLPALDPAVAELTQDADPAVADAARWARMRLARQGG

SEQ ID NO: 78823 - protein, 367 aa, unidentified
  source 1..367: note = Oceaniovalibus sp.
  REGION 1..367: note = tr|A0A5D0SDB3|A0A5D0SDB3_9RHOB Epoxyqueuosine reductase OS=Oceaniovalibus sp. ACAM 378 OX=2599923; GN = queG PE=3 SV=1
MSSALKSALIEEALADGFVSAGICRPDAIPAARARLDAYVGAGRHGQMGWMAERMGWRGDPAALWPEARSVVMLAESYAPEHDPLAVLEERDRAAISVYAHGRDYHDIVKKRLKRVGRWLLETAEKRGYRNRETGAWVALEIDPEQPQIKVFVDTAPVMEKPLAQAAGLGWQGKHTNLLSRDFGNWVFLGAIFTTLDLPADLPEQEHCGSCTACLDICPTRAFPAPFQLDARRCISYLTIEHKGPVDPELRPALGNRIYGCDDCLAVCPWNKFAVAASDMRYLGDGVAPALADLATLDDTGFRARFSGSPVKRIGRDRFVRNVCYAIGNSGDPALSVVLEPLLMDSDAAVADAARWAKMQLMGNRGE

SEQ ID NO: 78824 - protein, 377 aa, unidentified
  source 1..377: note = Oceanisphaera arctica
  REGION 1..377: note = tr|A0A2P5TJP2|A0A2P5TJP2_9GAMM Epoxyqueuosine reductase OS=Oceanisphaera arctica OX=641510 GN=queG PE=3; SV = 1
MTAPDFETLAHDIKLWAAELGFDQVGITDTDLTEHEPLLADWLDKGHHGEMDYMARHGMMRARPHELLPGTLRVISVRMNYLPEQAAIARVLSNPDQGYISRYALGRDYHKVLRQRLKKLADKIELRASDLVARPFVDSAPVLERPLAAKAGLGWTGKHSLLLNRQQGSFFFLGELLVNLPLPTDQPVEEGCGKCVACITACPTGAIVAPYVVDARRCISYLTIELDGPIPEDLRPLMGNRIYGCDDCQLICPWNRFADASQEPDFAARDNLHAPELLALFDWSEAHFLKQTEGSPIRRIGHRRWLRNIAIALGNAPASPAIIDALEQKREREEVDEMVQEHIDWALARQREGLAQVDRKTERLIRAVDKGMPKHAR

SEQ ID NO: 78825 - protein, 381 aa, unidentified
  source 1..381: note = Oceanisphaera avium
  REGION 1..381: note = tr|A0A1Y0CY57|A0A1Y0CY57_9GAMM Epoxyqueuosine reductase OS=Oceanisphaera avium OX=1903694 GN=queG PE=3; SV = 1
MTDFETLAHNIKLWAAELGFSQVGISDTNLSEHEPALADWLAKGHHGEMEYMARHGMMRARPQELLPGTLRVISVRLNYMPEHAAIAHVLSQPDLGYISRYALGRDYHKLMRQRLKKLADRIEQAAHELVARPFVDSAPVLERPLAAKAGLGWVGKHSLLINQQQGSFFFLGELLVNLPLPIDAPVAEGCGQCVACITACPTGAIVAPYVVDARRCISYLTIEQDGPIPLALRPLMGNRIYGCDDCQLICPWNKFTNASQEADFAARDNLHAPELLALFAWSEEYFLTQTQGSPIRRIGHRRWLRNIAVALGNAPVSPSIILALEEKLSQPALDAMVREHVEWALAQQQGALNPPQRKTQRLIRAVDKGMSAHARLSQPKP

SEQ ID NO: 78826 - protein, 384 aa, unidentified
  source 1..384: note = Oceanisphaera profunda
  REGION 1..384: note = tr|A0A1Y0D6B2|A0A1Y0D6B2_9GAMM Epoxyqueuosine reductase OS=Oceanisphaera profunda OX=1416627 GN=queG; PE = 3 SV=1
MSDFETLAHDIKLWAAELGFSQVGITDTDLTEHEPKLADWLAKGYHGDMEYMARHGMMRARPHELLPGTVRVISVRMNYLPEQAAIAHVLSDPTLGYISRYALGRDYHKLMRQRLKKLSDRIEQAASELVARPFVDSAPVLERPLAAKAGLGWVGKHSLLINRQQGSFFFIGELLINLPLPLSQQVDQPVEEGCGKCVACITACPTGAIVEPYVVDARRCISYLTIEQDGPIPLELRPLMGNRIYGCDDCQLICPWNKFTKASQEPDFAARDNLHAPELLALFDWSEDYFLKQTEGSPIRRIGHRRWLRNIAVALGNAPVSPTIILALEQKRLQDDLDEMVLEHIDWALAQQMAGLAKVGRKTERLIRAVDKGMPNHARFTELK

SEQ ID NO: 78827 - protein, 375 aa, unidentified
  source 1..375: note = Oceanisphaera psychrotolerans
  REGION 1..375: note = tr|A0A1J4QIJ2|A0A1J4QIJ2_9GAMM Epoxyqueuosine reductase OS=Oceanisphaera psychrotolerans OX=1414654; GN = queG PE=3 SV=1
MTAPDFETLAHDIKLWAAELGFDQVGITDTDLAEQEPLLADWLDQGYHGEMDYMARHGMMRARPHELLPGTLRVISVRMNYLPEQAAIARVLSNAEQGYISRYALGRDYHKVLRQRLKKLADKIEQRASDLVARPFVDSAPVLERPLAAKAGLGWTGKHSLLLNRQQGSFFFLGELLVNLPLPIDQPVEEGCGKCVACITACPTGAIVAPYVVDARRCISYLTIELDGPIPEELRPLMGNRIYGCDDCQLICPWNRFANASQEPDFAARDNLHAPELLALFDWSEAHFLKQTEGSPIRRIGHRRWLRNIAVALGNAPASPAIIAALEQKREEADEMVQEHIDWALARQRAGLAQVDRKTERLIRAVDKGMPKHAR

SEQ ID NO: 78828 - protein, 301 aa, unidentified
  source 1..301: note = Oceanispirochaeta sp.
  REGION 1..301: note = tr|A0A5C1QNM6|A0A5C1QNM6_9SPIO 4Fe-4S ferredoxin-type domain-containing protein; OS = Oceanispirochaeta sp. K2 OX=2518645 GN=EXM22_15265 PE=4; SV = 1
MVPPGDLKEKVLKDAGFPLNSTIIIAFFPFADTPPDERTSIAPFALKNHYKDLVIRMREALKSAGEPFSNLKRKEIRFFSNSRLPEKQMAKESGLGFIGKNTLLINKTFGSRGLLAGMILPLALNPSDEADSGKLKPGINSCGNCRLCEKSCPGGALEDYRLDREKCLQHWTSSDGPIPDRLKKEWGVRIYGCTICQDVCPWNRNLPRGNSITRGLIDPVPSLDFFLSHTEEEIKEFFRGSAMGMSWFKGRHMIRNALISTVSTEDSPPLDHIEAHGLSEDDGIKDAALWALKRLKRDQER

SEQ ID NO: 78829 - protein, 327 aa, unidentified
  source 1..327: note = Oceanispirochaeta sp.
  REGION 1..327: note = tr|A0A370B049|A0A370B049_9SPIO Epoxyqueuosine reductase OS=Oceanispirochaeta sp. M1 OX=2283433; GN = DV872_07330 PE=4 SV=1
MEEGQRLNCKPIIGSLNALGFHETAFLSSDNLPEKFFQNSEMPEYSTLIIGFFPFENTGKTGLIAPFALKNHYKDMVRRMKQALKEAGDPFSELNKRQVRFFSNSRFPEKEMAITGGLGFRGRNTLVINTEFGSRGLLGGMILPYRLEEQKQDGQINKINSEISCGTCRLCEEACPGAALKDYRLDRSKCLQHWTSEDGAVPDSLKEVWGERIYGCMICQDCCPWNKKDRKGNSIDLGMITPEPPLKFYLTKCKEDIKSEFKGTALGMSWIKAEHLIRNAIISSACSENKNLNEYISKFQDADDDGIKDAARWALKKSDHTGSQAGQ

SEQ ID NO: 78830 - protein, 363 aa, Oceanithermus desulfurans
  REGION 1..363: note = tr|A0A511RJ30|A0A511RJ30_9DEIN Epoxyqueuosine reductase OS=Oceanithermus desulfurans NBRC 100063; OX = 1227550 GN=ODE01S_10820 PE=4 SV=1
MNPLEELAHAARRRGFDVHFAPARLPEAYGRAYLDWLAAGRHAGMAYLARDPHARIDPARRFPWFRGALVLSLSYAYPEPPRPAGGVRLGRVARYAWVRDYHLRIDPRLRDLEDLCGRLGGRCRGYVDHGPVLEQAYAAAAGGGWIGRNGLWLTQQGGSYRHLAVLLTSWPAPPAAPHPNRCGRCAACVQACPTGAIVADGVVDARRCVSYWTIEHRGLVPLELWDGIGDRLFGCDDCQTVCPWNRRPRAADPLPDPELAWPDLEGFFRLSNRAFARRYAGSAFLRSGRAALARNALIVLANRDPEALARLLPAALADPSERVRATAAAAAARTGRGAEAAGARGSLGEAARGYVNRALELFG

SEQ ID NO: 78831 - protein, 363 aa, Oceanithermus profundus
  REGION 1..363: note = tr|E4U884|E4U884_OCEP5 4Fe-4S ferredoxin-type domain-containing protein OS=Oceanithermus profundus (strain DSM 14977 / NBRC 100410 / VKM B-2274 / 506); OX = 670487 GN=O cepr_0842 PE=4 SV=1
MNPLEELAHAARRRGFDVHPAPARLPEAWGRAYLDWLEAGRHAGMDYLARDPHARIDPARRFPWFRGALVLGLSYAYPEPPRPAGGLRLGRVARYAWVRDYHLRIEPHLCALEDLCARLGGQCRGYVDYGPVLERAYAAASGGGWIGRNGLWLTQSGGSYQHLAVLLTSWPVEPAQPHPNRCGRCAACVAGCPTGAIVADGVVDARRCVSYWTIEHRGLVPLERWAGIGDWLFGCDDCQTVCPWNRRPRAADPLPDPELAWPDLNAFFSLSSRAFARRYAGSAFVRSGRASLARNALIVLANRDPEALAGLLPAALDDPSERVRATAAAAAARTGRADQAARALGSLGEAARSYVARALELFG

SEQ ID NO: 78832 - protein, 381 aa, unidentified
  source 1..381: note = Oceanobacillus arenosus
  REGION 1..381: note = tr|A0A3D8PSJ7|A0A3D8PSJ7_9BACI Epoxyqueuosine reductase OS=Oceanobacillus arenosus OX=1229153 GN=queG; PE = 3 SV=1
MRTAELKQEIIDYAKEIGIDKIGFTTADVFGELRERLRRQQELNFQSGFEKGSVEERTEPVRLLPEAQSIISIAIAYPSRMKDAPRSTKEERRGIFARASWGIDYHVVMKDRLEKLAAFIMEKIPDAKNKVMVDTGELSDRAVAERAGIGFSGKNTSIITPEFGSFVYLGELITNIPFIPDDPIEDSCGECTKCMDACPTGALVQGGQLNAQRCIAFLTQTKDFLPDEFRTKIGNRVYGCDTCQQVCPRNKGIDFHTTPEFEPVHDIAKPKLKPMLKMSNRQFNETFGHISGSWRGKKPLQRNALIALGHYKDRTAVEEMITVMRDDPRPVIRGTAAWSLGKIGTDEAFEAINKAMETEQDEQVLFEMRKGLEFQERQVAN

SEQ ID NO: 78833 - protein, 381 aa, unidentified
  source 1..381: note = Oceanobacillus bengalensis
  REGION 1..381: note = tr|A0A494Z8A3|A0A494Z8A3_9BACI Epoxyqueuosine reductase OS=Oceanobacillus bengalensis OX=1435466 GN=queG; PE = 3 SV=1
MRTEKLKQEIKDYAKEIGIDKIGFAAADVFTELKERLRRQQELEYQSGFEKGSIEERTEPQRLLPEAQSIISIALAYPTRMKNAPKSTKEERRGLFARASWGMDYHDVLRNRLEKLNAFILERVPNAVNKVMVDTGELSDRAVAERAGIGFSGKNTSIITPEYGSFVYLGEMITNIPFIPDEPIEDGCGDCRKCLDACPTGALIEGGQLNAQRCIAFLTQTKDYLPDEFRTKIGNRVYGCDTCQQVCPKNKGIDFHIHPEFEPDPDISKPKLIPMLRISNREFKEKFDYISGSWRGKKPLQRNALIALGHYKDKTAVEEMIEVMKKDPRPVIRGTAAWSLGKIGTNQAFEAIKEAMKFEKDEQVLVEMEKGLEFNKEASIL

SEQ ID NO: 78834 - protein, 381 aa, Oceanobacillus caeni
  REGION 1..381: note = tr|A0A0N1N1B8|A0A0N1N1B8_9BACI Uncharacterized protein OS=Oceanobacillus caeni OX=405946 GN=AFL42_00590; PE = 4 SV=1
MRTEELQQEIREYAMKIGIDKIGFATADVFTELKERLRRQQELNYQSGFEKGTIEERTEPVRLLPEAQSIISIALAYPSRMKNAPKSTKEERRGLFARASWGIDYHEVLRDRLNKLADFIHEKVPEAITKIMVDTGELSDRAVAERAGIGFSGKNTSIITPEFGSFVYLGEMITNIPFIPDNPVEDSCGDCRKCLDACPTGALVGEGGQLNANRCIAFLTQTKDYLEDEFRIKLGNRLYGCDTCQQVCPKNKGVDFHTHPEFEPDPEVSKPKLIPMLRISNREFKEKFGFISGSWRGKKPLQRNALIALAHYKDKTAVTEIIEVMKNDPRPVIRGTAAWSLGKIGTEEAFLAIKEAIKVEKDDRVKYEMEKGLEFAETAFK

SEQ ID NO: 78835 - protein, 381 aa, unidentified
  source 1..381: note = Oceanobacillus chungangensis
  REGION 1..381: note = tr|A0A3D8PWC4|A0A3D8PWC4_9BACI Epoxyqueuosine reductase OS=Oceanobacillus chungangensis OX=1229152; GN = queG PE=3 SV=1
MRTAELKQEIIDYSKKIGIDKIGFTTADVFGELKERLRRQQELNYQSGFEKGSVEERTEPVRLLPEAQSIISIAIAYPSRMKDAPKSTKEERRGIFARASWGIDYHVVLKDRLEKLAAFIMEKVPDAKNKVMVDTGELSDRAVAERAGIGFSGKNTSIITPEFGSFVYLGELITNIPFIPDDPIEDSCGDCTKCMDACPTGALIQGGQLNAQRCIAFLTQTKDFLPDEFRTKIGNRVYGCDTCQQVCPRNKGIDFHIHPEFEPEHDIAKPKLKPMLKMSNRHFKETFGHISGSWRGKKPLQRNALIALGHYKDKTAVEEMINVMRDDPRPVIRGTAAWSLGKIGTEEAYEAIQAAMENEQDEQVLFEMRKGLDFQERQTVN

SEQ ID NO: 78836 - protein, 381 aa, unidentified
  source 1..381: note = Oceanobacillus halophilus
  REGION 1..381: note = tr|A0A494ZS23|A0A494ZS23_9BACI Epoxyqueuosine reductase OS=Oceanobacillus halophilus OX=930130 GN=queG; PE = 3 SV=1
MRTEELQQEIREYAKEIGIDKIGFAAADVFSELKERLRRQQELEYQSGFEKGSIEERTEPQRLLPEAQSIISIAIAYPSRMKNAPKSRKGERRGLFARASWGLDYHDVLRERLEKLSAFIQEKVPDAVNKVMVDTGELSDRAVAERAGIGFSGKNTSIITPEFGSFVYLGEMITNIPFVPDSPVEDSCGDCRKCMDACPTGAIVEGGQLNAQNCIAFLTQTKGFLEDEYRFKLGNRVYGCDTCQQVCPKNKGIDFHIHPEFEPDPEVSKPKLIPMLRISNREFKEKFGPLSGSWRGKKPIQRNALIALGHYKDETAVPEMIEVMKNDPRPVIRGTAAWSLGKIGTEEAFAAIREAMELEKDDQVLFEMEKGLEFETLTITN

SEQ ID NO: 78837 - protein, 382 aa, Oceanobacillus iheyensis
  REGION 1..382: note = tr|A0A2P1WI37|A0A2P1WI37_9BACI Epoxyqueuosine reductase OS=Oceanobacillus iheyensis OX=182710 GN=queG; PE = 3 SV=1
MDTAQLKKDIIAYSKKIGIDKIGFASADVFGELKERLRRQQELSYQSGFEKGTVEERTEPERLLPEAKSIISIALAYPSRMKGAPKSTKEERRGLFARASWGTDYHVVMRDRLEKLAAFIKEQVPDVANRLMVDTGELSDRAVAERAGIGFSGKNTSTITPEFGSYVYLGEMITNIPFVPDDPVDDSCGECTKCIDACPTGAIVQGGQLNAQRCIAFLTQTKDFLPDEFRTKIGNRVYGCDTCQVVCPKNQKIDFHIHPEFEPEHDVSKPVLKPMLRISNREFKETFGHISGSWRGKKPIQRNALIALGHYKDKTAVEDIIKVMCTDPRPVIRGTAAWSLGKIGTEEAYMAIKEAMESEQDEQVQVEMEKGMAFQEVYQAKT

SEQ ID NO: 78838 - protein, 378 aa, Oceanobacillus iheyensis
  REGION 1..378: note = tr|Q8CUM2|Q8CUM2_OCEIH Epoxyqueuosine reductase; OS = Oceanobacillus iheyensis (strain DSM 14371 / CIP 107618 / JCM 11309 / KCTC 3954 / HTE831) OX=221109 GN=queG PE=3 S; V = 1
MQVAQLKEDIQSYAKEIGIDKIGFTTADVFTELKERLRRQQELQYQSGFEKGSIEERTEPKRLLPEAKSIISIAVAYPQKMHDAPRSTKEERRGIFARASWGIDYHVALRERLNKLSEYIQTKYPDAVNKIMVDTGELSDRAVAERSGIGFSGKNTSIITPEFGSFVYLGEMITNIPFIPDSPVEESCGDCTICMDACPTGALVQGGQLNAQRCIAFLTQTKDFLPDEFRSKIGNRIYGCDTCQQVCPYNRGIDSHFHQELEPEPESAKPKLKPMLHLSNKEFKEKFGYMSGSWRGKKPLQRNALIAIGHYKDKSAIEDLIKVMNNDPRPVIRGTAAWSLGKIGSPKAYEAIISAMEKETDSQVLFEMEKGLSFQKQS

SEQ ID NO: 78839 - protein, 381 aa, unidentified
  source 1..381: note = Oceanobacillus limi
  REGION 1..381: note = tr|A0A1H9YFZ3|A0A1H9YFZ3_9BACI Epoxyqueuosine reductase OS=Oceanobacillus limi OX=930131 GN=queG PE=3; SV = 1
MHTDQLKQEIIQYSKEIGIDKIGFTTADVFSELKERLKRQQELAYQSGFEKGSIEERTEPKRLLPEAQSIISIAIAYPSRMKDAPKSTKEERRGIFARASWGTDYHHVLRNRLEKLEAFIQEKVNDANTKVMVDTGELSDRAVAERAGIGFSGKNTSIITPEFGSFVYLGEMITNIPFTPDSPVEDSCGDCRKCMDACPTGALVQGGQLNTQRCIAFLTQTKDYLPDEFRTKLGNRVYGCDTCQVVCPKNKKVDFHIHPEFEPEHDIAKPKLKPMLRISNREFKETFGHISGSWRGKKPIQRNAIIGLGHYKDTTAVEELIAVMNNDPRPVIRGTAAWSLGKIGTNEAYEAIREAMNTETDEQVLFEMEKGLAFQKEVTTK

SEQ ID NO: 78840 - protein, 379 aa, Oceanobacillus oncorhynchi
  REGION 1..379: note = tr|A0A0A1MK51|A0A0A1MK51_9BACI Epoxyqueuosine reductase OS=Oceanobacillus oncorhynchi OX=545501 GN=queG; PE = 3 SV=1
MVKVEELKKDIQAYAKTIGIDKIGFATADIFTEMKERLRRQQELKYQSGFEKGSIEERTEPRRLLPEAKSIISIAVAYPSRMETTPRGTKGDRRGIFARASWGIDYHVALRERLDKLGEYIKDKVPDAVIKSMVDTGELSDRAVAERAGIGFSGKNTSIITKEYGSFVYLGEMLTNIPFIPDSPVEDGCGDCTICLDACPTGAIVQGGQLNAQRCIAFLTQTKDFLPEEFRNKIGNRLYGCDTCQQVCPWNRDKDSHFHQELEPEPELVKPRLKPMLHLSNREFKEKFGHMSGFWRGKKPIQRNVILALGHYKEASAETDLIAVMENDPRPVIRGTAAWSLGKIGTDAAREALSKALEKENHEQVQFEMENALSAMTVK

SEQ ID NO: 78841 - protein, 382 aa, Oceanobacillus picturae
  REGION 1..382: note = tr|W9AIP1|W9AIP1_9BACI Epoxyqueuosine reductase; OS = Oceanobacillus picturae OX=171693 GN=queG PE=3 SV=1
MDTAQLKKDIIAYSKKIGIDKIGFASADVFGELKERLRRQQELSYQSGFEKGTVEERTEPERLLPEAKSIISIALAYPSRMKDAPKSTKEERRGLFARASWGTDYHVVMRDRLEKLAAFIKEQVPDVANRLMVDTGELSDRAVAERAGIGFSGKNTSIITPEFGSYVYLGEMITNIPFVPDDPVDDSCGECTKCIDACPTGAIVQGGQLNAQRCIAFLTQTKDFLPDEFRTKIGNRVYGCDTCQVVCPKNQKIDFHIHPEFEPEHGVSKPVLKPMLRISNREFKETFGHISGSWRGKKPIQRNALIALGHYKDKTAVDDIIKVMRTDPRPVIRGTAAWSLGKIGTEEAYMAIKEAMETEQDEQVQVEMEKGMAFQEVYQAKT

SEQ ID NO: 78842 - protein, 382 aa, Oceanobacillus picturae
  REGION 1..382: note = tr|A0A0U9HA94|A0A0U9HA94_9BACI Epoxyqueuosine reductase OS=Oceanobacillus picturae OX=171693 GN=queG; PE = 3 SV=1
MDTAQLKKDIIAYSKKIGIDKIGFASADVFGELKERLRRQQELSYQSGFEKGTVEERTEPERLLPEAKSIISIALAYPSRMKDAPKSTKEERRGLFARASWGTDYHVVMRDRLEKLAAFIKEQVPDVANRLMVDTGELSDRAVAERAGIGFSGKNTSIITPEFGSYVYLGEMITNIPFVPDDPVDDSCGECTKCIDACPTGAIVQGGQLNAQRCIAFLTQTKDFLPDEFRTKIGNRVYGCDTCQVVCPKNQKIDFHIHPEFEPEHDVSKPVLKPMLRISNREFKETFGHISGSWRGKKPIQRNALIALGHYKDKTAVDDIIKVMRTDPRPVIRGTAAWSLGKIGTEEAYMAIKEAMETEQDEQVQVEMEKGMAFQEVYQAKT

SEQ ID NO: 78843 - protein, 378 aa, Oceanobacillus profundus
  REGION 1..378: note = tr|A0A417YLN9|A0A417YLN9_9BACI Epoxyqueuosine reductase OS=Oceanobacillus profundus OX=372463 GN=queG; PE = 3 SV=1
MRTEQLKQEIIDYAKEIGIDKIGFASADVFGELRERLRRQQESNFQSGFEKGSLEERTEPQRLLPEAQSIISIAIAYPSRMKDAPRSTKEERRGLFARASWGIDYHVVLRDRLEKLAAFIQEKVPEVSNKVMVDTGELSDRAVAERAGIGFSGKNTSIITPEFGSFVYLGEMITNIPFVPDDPIEDSCGDCTKCMDACPTGALVEGGRLNAQRCIAFLTQTKDFLPDEFRTKLGNRLYGCDTCQQVCPRNKGIDSHIHPEFEPEHDLAKPKLEPMLRISNRSFKEKFGHMSGSWRGKKPLQRNALIALGHYKDKTAIPEMISVMKEDPRPVIRGTAAWALGKIGTVEAFRAIEAAMENEKDDQVLFEMEKGLEFKYKS

SEQ ID NO: 78844 - protein, 378 aa, Oceanobacillus sojae
  REGION 1..378: note = tr|A0A511ZE55|A0A511ZE55_9BACI Epoxyqueuosine reductase OS=Oceanobacillus sojae OX=582851 GN=queG PE=3; SV = 1
MRVDELKKDIQAYAKTIGIDKIGFTTADIFTEMKERLKRQQELKYQSGFEKGSIEERTEPKRLLPEAQSIISIAVAYPSRLEKTPRGTKGDRRGIFARASWGIDYHIALRKRLDKLGEYIKARVPDAIIKSMVDTGELSDRAVAERAGVGFSGKNTSIITKEHGSFVYLGEMLTNIPFIPDEKIEDGCGDCTICLDACPTGAIVQGGQLNAQRCIAFLTQTKDFLPEEFRTKIGNRLYGCDTCQQVCPWNRDKDSHFHKELEPDPELVKPKLKPMLHLSNREFKEKFGHMSGSWRGKKPIQRNVILALGHYKEASAENDLIALMKNDPRPVIRGTAAWSLGKIGTDAAKEALSKALEKEDNEQVQYEMQNALSAMNIK

SEQ ID NO: 78845 - protein, 383 aa, Oceanobacillus sp.
  REGION 1..383: note = tr|A0A345PF74|A0A345PF74_9BACI Epoxyqueuosine reductase OS=Oceanobacillus sp. 160 OX=2052660 GN=queG; PE = 3 SV=1
MRTAELKQELIDYSKKIGIDKIGFTTADVFGELRERLRRQQELNYQSGFEKGSIEERTEPVRLLPEAQSIISIAIAYPSRMKDAPRSTKEERRGIFARASWGIDYHVVMKERLEKLAAFIMEKIPDAKNKVMVDTGELSDRAVAERAGIGFSGKNTSIITPEFGSFVYLGELITNIPFIPDDPIEDSCGECTKCMDACPTGALIQGGQLNAQRCIAFLTQTKDFLPDEFRTKIGNRVYGCDTCQQVCPRNKGIDFHTTPEFEPEHDIAKPRLRPMLKMSNREFKETFGHISGSWRGKKPLQRNALIGLGHYKDKTAVKEMITVMQDDPRPVIRGTAAWSLGKIGTDEAFEAIQAALETEQDEQVLFEMRKGLDFKEGQEMMKK

SEQ ID NO: 78846 - protein, 380 aa, Oceanobacillus sp.
  REGION 1..380: note = tr|A0A498D675|A0A498D675_9BACI Epoxyqueuosine reductase OS=Oceanobacillus sp. YLB-02 OX=2448030 GN=queG; PE = 3 SV=1
MRTERLKEEIKQYAKEIGIDKIGFATADVFGELRERLRRQQELGYQSGFEKGTLEERTEPQRLLPEAQAIISIALAYPTRMKNAPKSTKEERRGLFARASWGVDYHHVLRDRLEKLTAFIEERVPNAVNKIMVDTGELSDRAVAERAGIGFSGKNTSIITKEFGSFVYLGEMMTNIPFIPDDPVEDSCGDCRKCLDACPTGALIEGGQLNAQRCIAFLTQTKDFLPDEFRTKIGNRVYGCDTCQQVCPRNKGVDFHLHPEFEPEHDIAKPKLKPMLRISNREFKEKFGHISGSWRGKKPLQRNALLALGHYKDTTAIAEMIDVMNNDPRPVIRGTAAWSLGKIGTNEAFRAIEAAMTAEKDERVLYEMKKGLAFGNETGA

SEQ ID NO: 78847 - protein, 371 aa, Oceanobacter sp.
  REGION 1..371: note = tr|A0A2G2JI65|A0A2G2JI65_9GAMM Epoxyqueuosine reductase OS=Oceanobacter sp. OX=2030817 GN=queG PE=3 SV=1
MPTPITTPKPALKPTPEQLQQLRLKISEWALEAGFQQAGISNVDTGQHAEYLQHWLDAGYHGEMEYMASHVTPRGNMRALPDELLPGTLSVISLRMDYLAPDIELVGHLKDPGNAYISRYALGRDYHKLIRKRLTQLGKRIQDAIGEFGFRAFVDSAPVLERALAEQAGLGWIGKNTMLINRKAGSYFFLGEILTDLPLAPTAQEQTDQQQKNHCGRCQACLDICPTQAFVGPNVLDARRCISYLTIELNGPIPEDLRPGIGNRIFGCDDCQIGCPWNRFSKATKEDDFTPRHQLDKATLLELFAWDEKTFLSKTEGMPIRRTGYENWMRNIAVALGNAPKSIEITEALNARRGTISELVDEHIDWALGRR

SEQ ID NO: 78848 - protein, 359 aa, unidentified
  source 1..359: note = Oceanococcus atlanticus
  REGION 1..359: note = tr|A0A1Y1SGS5|A0A1Y1SGS5_9GAMM Epoxyqueuosine reductase OS=Oceanococcus atlanticus OX=1317117 GN=queG; PE = 3 SV=1
MSTSSTPDPAHILHALSQWAGELGFSGLAVSRADLEKDEQLMQRWLDEGLHGEMDYLARNAEMRRNPAALVPETLSVISVRMPYWPQAAPAREILRSPHKAYISRYALGRDYHKTVRGRLRQLARRLQQQIGPFGFRAFADSAPVLEKALARDASLGWIGKNTLLIDKDQGSYFFLGELFTDLALPASQAAAVDNGCGACQACIRACPTGAILPQGQLDARRCISYLTIELKGAIPENMREAIGNRIFGCDDCQLVCPWNRHAQTAVDPDFAVRHGLDDVDLIALFGWTEETFLRNTEGMPLRRAGYISWLRNLAVALGNGPPTREAIDALNTRREHPSDIVREHVSWALERLTQPGAH

SEQ ID NO: 78849 - protein, 359 aa, unidentified
  source 1..359: note = Oceanococcus sp.
  REGION 1..359: note = tr|A0A520SLA2|A0A520SLA2_9GAMM Epoxyqueuosine reductase OS=Oceanococcus sp. OX=1958892 GN=queG PE=3 SV=1
MSTSSTPDPAHILHALSQWAGELGFSGLAVSRADLEKDEQLMQRWLDEGLHGEMDYLARNAEMRRNPAALVPETLSVISVRMPYWPQAAPAREILRSPHKAYISRYALGRDYHKTVRGRLRQLARRLQQQIGPFGFRAFADSAPVLEKALARDASLGWIGKNTLLIDKDQGSYFFLGELFTDLALPASQAAAVDNGCGACQACIRACPTGAILPQGQLDARRCISYLTIELKGAIPENMREAIGNRIFGCDDCQLVCPWNRHAQTAVDRDFAVRHGLDDVDLIALFGWTEETFLRNTEGMPLRRAGYISWLRNLAVALGNGPPTREAIDALSTRREHPSDIVREHVNWALERLTQPGAH

SEQ ID NO: 78850 - protein, 396 aa, unidentified
  source 1..396: note = Oceanospirillaceae bacterium
  REGION 1..396: note = tr|A0A350JD47|A0A350JD47_9GAMM Epoxyqueuosine reductase OS=Oceanospirillaceae bacterium OX=1899355; GN = queG PE=3 SV=1
MPTLNAPLSAAPPSPTSPPALTEQELADIALRIKQLAEEFGFADCGITDTDNEAAGQRLEQWLDLGYHANMDYMSKHGSKRYRAHELVPGTQRIICLRMDYLDPTLTTLSTLEDAEQAYIARYALGRDYHKLVRKRLAQLSKAIEALVGPFGHRVFVDSAPVLEKPLAQKAGLGWQGKHTLLINRKQGSWFFLGEIFIDLPLPIDPPYDKDHCSRCSSCMTVCPTSAFPEPYVLDANRCIAYLTIEHKGSIDEELRPLMGNRVFGCDDCQLACPWNRAPAVSHEDDFKPRHGLDQAKLAELFMWTQEQFLSRTEGSPIRRAGFEGWQRNLAIGLGNGPATENIIKALNDQQPLASPMVKEHIDWALKQLQQRQKQLIQLTPVPLRTHLIKKLKHLT

SEQ ID NO: 78851 - protein, 359 aa, unidentified
  source 1..359: note = Oceanospirillaceae bacterium
  REGION 1..359: note = tr|A0A2D9ZZX6|A0A2D9ZZX6_9GAMM Epoxyqueuosine reductase OS=Oceanospirillaceae bacterium OX=1899355; GN = queG PE=3 SV=1
MPEHALTRETLLQLRENIRNWALEAGFQQAGISGTDTGNHEDYLRRWLAAGYHGEMDYMARHDDDAGHMRAHPELLQPGTLSVISLRMDYLAPGTELLGQLSDPGKAYISRYALGRDYHKLIRKRLTELGKRIEAAIGPMGFRAFVDSAPLLERALAQQAGLGWIGKNTMLLNRHAGSYFFLGEILTDLPLPAETTQQSNHCGRCTACLDICPTQAFAGPYVLDARRCISYLTIELNGPIPEDLRKGMGNRIFGCDDCQIGCPWNRFSKTTTETDFTPRHQLDKATLLELFRWDEAEFLHKTEGMPIRRTGYENWVRNIAVALGNGPSSVEVTDALEQRLGSVSALVDEHIRWALAQQS

SEQ ID NO: 78852 - protein, 362 aa, unidentified
  source 1..362: note = Oceanospirillales bacterium
  REGION 1..362: note = tr|A0A3D1Y2B7|A0A3D1Y2B7_9GAMM Epoxyqueuosine reductase OS=Oceanospirillales bacterium OX=1914300; GN = queG PE=3 SV=1
MTSSRTVLTPEQLQKLRDDITQWSLEAGFQQCGFSSVDTGEHGDRLQQWLDAGYHGEMSYMADHVTERGPMRALPDELLPGTLSVISLRMDYLAPGVEVAKHLQDKNNAYISRYALGRDYHKLIRKRLTQLGKRIQSEIGDLGFRAFVDSAPILERALAEQAGIGWIGKNTMVLNRKAGSYFFLGEILTDLPLDPNNTPLKNHCGRCTSCLDICPTQAFVAPYVLDARKCISYLTIELDGPIPEELRSGIGNRIFGCDDCQIGCPWNRFSKSSEEPDFTPRHQLDKATLLELFQWDEATFLKKTEGMPIRRTGYENWMRNISVALGNAPQSIEVQEALKNQKGKISGLVDEHINWALQQQGH

SEQ ID NO: 78853 - protein, 381 aa, unidentified
  source 1..381: note = Oceanospirillales bacterium
  REGION 1..381: note = tr|A0A1Z9VVR2|A0A1Z9VVR2_9GAMM Epoxyqueuosine reductase OS=Oceanospirillales bacterium TMED91 OX=1986769; GN = queG PE=3 SV=1
  VARIANT 87..89: note = Xaa can be any naturally occurring amino acid
  VARIANT 91..92: note = Xaa can be any naturally occurring amino acid
  VARIANT 96: note = Xaa can be any naturally occurring amino acid
  VARIANT 192: note = Xaa can be any naturally occurring amino acid
MDASWHQSDQVLDRLREKALELGFTAIGVTDPDVSQHVSFLEHWLESGFHGSMEWFERHLDLRKDPTQLVPGTQRVISVRLDYLPEXXXCXXILNXPDMAYISRYALGRDYHKLMRKRLKHLGDWFSDEIAPHGFRVFSDSAPLLEKHLAEKAGLGWIGKHTLLLSRSAGSWFFLGELLTDFPLPVSDEHEXARCGSCTACLDICPTNAFPAPYQLDATKCISYLTIEHKGPIPEALRAPMGNRVFGCDDCQLVCPWNRYAAIGDPAFHPRHALDRQPLCELFGWTEAEFLMKTEGSPLRRAGYVKFLENLAIGLGNSHSDTERVIQTLGSKLGQHGPTLDEHILWAIAALQRRASENALGNASARQSNHAHQQAPDAGQI

SEQ ID NO: 78854 - protein, 358 aa, Oceanospirillum linum
  REGION 1..358: note = tr|A0A1T1H9Y3|A0A1T1H9Y3_OCELI Epoxyqueuosine reductase OS=Oceanospirillum linum OX=966 GN=queG PE=3 SV=1
MPTNSALPSPVRQQLREQIKVWGRELGFQQIGFADPDLGEHEQHLQDWLDAGYHGEMDYMASHGTKRSRPEELVEGTRTVITARMDYLPADVETTRLLSQGEKAYISRYALGRDYHKLIRKRLTQLAKKIEAEIGAYGYRAFVDSAPVLERALAMRSGLGWVGKNTMVIHPKAGSFFFLGEVMVELDLPKDPAYPKDHCGSCNACQVACPTQAIVGDKIVDGRRCISYLTIELKGSIPEALRPGIGNRIFGCDDCQLVCPWNRFTKPTQESDFTPRHSLDSADLVDLFLWDESTFLSKTEGTPIRRAGYERWLRNIAVALGNAPTTPAVIAALKHRENAPSEMVCEHVTWALRQHTVE

SEQ ID NO: 78855 - protein, 366 aa, Oceanospirillum multiglobuliferum
  REGION 1..366: note = tr|A0A1T4RIJ1|A0A1T4RIJ1_9GAMM Epoxyqueuosine reductase OS=Oceanospirillum multiglobuliferum OX=64969; GN = queG PE=3 SV=1
MSAEIFTSQSHPLKALTTEQDRFALREQIRVWGRELGFQQIGFAQPELAEHEQYLQAWIDNDYHGEMSYMAGHGHKRSRPNELVEGTQTVITARMDYLPADIETTTLLSQKDKAYISRYALGRDYHKLIRKRLTQLAKQIEQEIKPLGYRAFVDSAPLLERALATRSGLGWIGKNTMLIHPKAGSFFFLGEILIDLALPVDQPYPKDHCGSCRQCHLVCPTQAFVGDKLLDARRCISYLTIELKGAIPEPLRKGIGNRIFGCDDCQLACPWNRFSQHTQETDFSPRHNLDRVDLVELFAWDEETFLSKTEGTPIRRAGYERWLRNIAVALGNAPTSNEVLSALNTRLDHESPLVQEHVLWALHQHQ

SEQ ID NO: 78856 - protein, 362 aa, Oceanospirillum sp.
  REGION 1..362: note = tr|A0A2D5GC30|A0A2D5GC30_9GAMM Epoxyqueuosine reductase OS=Oceanospirillum sp. OX=2021254 GN=queG PE=3; SV = 1
MSTPIPVSLTSQQQQQLMDNIRQWGRELGFQQIGFARPQLDEHEAHLQEWLDKGDHGEMEYMASHGNKRSRPDELVEGTKTVITARMDYLPADVETTKLLTQGEKAYISRYALGRDYHKLIRKRLTQLAKQIEQAIGPFGYRAFVDSAPILERALATRSGLGWIGKNSMVIHPKAGSFFFLGEIMIDLGLPEDAAYPKDHCGSCNACHVACPTEAFVGDKILDGRRCISYLTIELKGPIPEDLRKGVGNRIFGCDDCQLVCPWNRFTKTTLEKDFTPRHNLDHVDLVTLFAWSEEQFLKATEGTPIRRAGYERWLRNIAVGLGNAPSTPKVITALESRQQEESALVREHVEWALAQHQSNHV

SEQ ID NO: 78857 - protein, 393 aa, Ochrobactrum anthropi
  REGION 1..393: note = tr|A0A3R8XTK4|A0A3R8XTK4_OCHAN Epoxyqueuosine reductase OS=Ochrobactrum anthropi OX=529 GN=queG PE=3 SV=1
MATSTSNSKTEKLKRFLIEEAKAVGFDAVAFTTPDAIPQAPERLRQYIADGHHADMEWMEETEARRSDPSVLWPEVRSIMMLAMNYGPDANPLAILEQQDRAAISVYAQNRDYHDIIKGKLKHVASRFAARAGQDVKVFVDTAPVMEKPLAEAAGLGWQGKHTNLVSRELGSWLFLGSIFTTAEIPPDVPERDHCGSCRACLDACPTKAFPSPYRIDARRCISYLTIENKGPIPHEFRKAMGNRIYGCDDCLSVCPWNKFAQATSEMKLKARDDLKAPRLADLLTLDGPAFRTLFSGSPVKRIGRDRFLRNVLIATGNSGDKTLLPDVERLLEDEAPVVRGAAIWALKQLANPDHVAEMQKRLASSEEDATVQAEWTTASTRKSEAILGKHDA

SEQ ID NO: 78858 - protein, 393 aa, Ochrobactrum anthropi
  REGION 1..393: note = tr|A6WYK0|A6WYK0_OCHA4 Epoxyqueuosine reductase; OS = Ochrobactrum anthropi (strain ATCC 49188 / DSM 6882 / JCM 21032 / NBRC 15819 / NCTC 12168) OX=439375 GN=queG; PE = 3SV=1
MATSTSNSKTEKLKRFLIEEAKAVGFDAVAFTTPDAIPQAPERLRQYIADGHHADMEWMEETEARRSDPSVLWPEVRSIMMLAMNYGPDANPLAILEQQDRAAISVYAQNRDYHDIIKGKLKHVASRFAARAGQDVKVFVDTAPVMEKPLAEAAGLGWQGKHTNLVSRELGSWLFLGSIFTTAEIPPDAPERDHCGSCRACLDACPTKAFPSPYRIDARRCISYLTIENKGPIPHEFREAMGNRIYGCDDCLSVCPWNKFAQATSEMKLKARDDLKAPRLADLLTLDDPAFRTLFSGSPVKRIGRDRFLRNVLIATGNSGDKTLLPDVERLLEDEAPVVRGAAIWALKQLANPDHVAEMQKRLASSEEDATVQAEWTTASTRKSEAILGKHDA

SEQ ID NO: 78859 - protein, 393 aa, Ochrobactrum cytisi
  REGION 1..393: note = tr|A0A1J6I462|A0A1J6I462_9RHIZ Epoxyqueuosine reductase OS=Ochrobactrum cytisi OX=407152 GN=queG PE=3; SV = 1
MATSTSNSKTEKLKRFLIEEAKAVGFDAVAFTTPDAIPQAPERLRQYIADGHHADMEWMEETEARRSDPSVLWPEVRSIMMLAMNYGPDANPLAILEQQDRAAISVYAQNRDYHDIIKGKLKHVASRFAARAGQDVKVFVDTAPVMEKPLAEAAGLGWQGKHTNLVSRELGSWLFLGSIFTTAEIPPDTPDRDHCGSCRACLDACPTNAFPSPYRIDARRCISYLTIENKGPIPHEFRKAMGNRIYGCDDCLSVCPWNKFAQATSEMKLKARDDLKAPRLADLLTLDDPAFRTLFSGSPVKRIGRDRFLRNVLIATGNSGDKTLLPDVERLLEDEAPVVRGAAIWALKQLANPDRVAEMQKRLASSEEDATVQAEWTTASTRKSEAILGKHDA

SEQ ID NO: 78860 - protein, 387 aa, Ochrobactrum gallinifaecis
  REGION 1..387: note = tr|A0A502BQ20|A0A502BQ20_9RHIZ Epoxyqueuosine reductase OS=Ochrobactrum gallinifaecis OX=215590 GN=queG; PE = 3 SV=1
MATSTSDKKQALEKALKLKRFLIEEAKAIGFDAVAFTGPDCIPQAPLRLRQYIADGHHADMLWMEETEERRANPSVLWPEVRSIMVLAMNYGPDNNPLEILEHKDRAAISVYAQNRDYHDIIKGKLKHIASRFAARAGQDVKVFVDTAPVMEKPLAQAAGLGWQGKHTNLVSRELGSWLFLGSIFTTADIPPDEADRDHCGSCRACLDACPTKAFPSPYRIDARRCISYLTIENKGPIPLEFRKAMGNRIYGCDDCLSVCPWNKFAQATSEMKLKARDDLKAPRLADFLALDDATFRTLFSGSPVKRIGRDRFLRNVLIAAGNSEDQTLVPLVESLLEDPAPVVRGAAVWALKQLASTDYFKTSHKRLASREEDATVRAEWIIDIGE

SEQ ID NO: 78861 - protein, 390 aa, Ochrobactrum grignonense
  REGION 1..390: note = tr|A0A256FGK2|A0A256FGK2_9RHIZ Epoxyqueuosine reductase OS=Ochrobactrum grignonense OX=94627 GN=queG; PE = 3 SV=1
MATSTSETKQVSGQVSERDLKLKRFLIEEAKAVGFDAVAFTTPDTIPQAPQRLRQYIADGHHADMLWMEETEDRRANPSVLWPEVRSIMILAMNYGPDSNPLGILEHKNRAAISVYAQNRDYHDIIKGKLKHVASRFAARAGQDVKVFVDTAPVMEKPLAEAAGVGWQGKHTNLVSRELGSWLFLGSIFTTAEIPPDEPDRDHCGSCRVCLDACPTKAFPSPYRIDARRCISYLTIENKGPIPHEFRKAMGNRIYGCDDCLSVCPWNKFAQATSEMKLKARDDLKAPRLADFLVLDDPAFRTLFSGSPVKRIGRDRFLRNVLIAAGNSQDPSLLPQIENLLEDPAPVVRGAAVWAFKQLATMERFKISKKRLASSEEDDTVRAEWILEDV

SEQ ID NO: 78862 - protein, 381 aa, Ochrobactrum haematophilum; identical to SEQ ID NO: 75253
  REGION 1..381: note = tr|A0A2P9HQ11|A0A2P9HQ11_9RHIZ Epoxyqueuosine reductase OS=Ochrobactrum haematophilum OX=419474 GN=queG; PE = 3 SV=1

SEQ ID NO: 78863 - protein, 381 aa, Ochrobactrum haematophilum
  REGION 1..381: note = tr|A0A397L2L6|A0A397L2L6_9RHIZ Epoxyqueuosine reductase OS=Ochrobactrum haematophilum OX=419474 GN=queG; PE = 3 SV=1
MATSISETRPEKLKRFLIEEAKAVGFDAVAFTTPDAIPQAPERLRQYIADGYHADMLWMEETEERRASPGVLWPEVRSIMMLAMNYGPDTDPLAILDRQDRAAISVYAQNRDYHDIIKGKLKHVASRFAARAGQDVKVFVDTAPVMEKPLAEAAGLGWQGKHTNLVSRELGSWLFLGSIFTTAEIPPDQPERDHCGSCRACLDACPTRAFPSPYRIDARRCISYLTIENKGPIPLEFRKVMGNRIYGCDDCLSVCPWNKFARATSEMKLKARDDLKAPRLCDLLALDDPAFRTLFSGSPVKRIGRDRFIRNVLIAAGNSGDTSLLPQIETLLGDAAPVVRGAAVWALKQLAEPHRIDALQKRLASTEEDATVQAEWRLETV

SEQ ID NO: 78864 - protein, 382 aa, Ochrobactrum intermedium
  REGION 1..382: note = tr|U4V9Q6|U4V9Q6_9RHIZ Epoxyqueuosine reductase; OS = Ochrobactrum intermedium 229E OX=1337887 GN=queG PE=3; SV = 1
MATSISDSRQQKLKCFLIEEAKAAGFDAVAFTTPDAIPQAPERLRQYIADGHHADMDWMEETEARRADPSVLWPEVRSIMMLAMNYGPDANPLAILEKQDRAAISVYAQNRDYHDIIKGKLKHIASRFAARAGQDVKVFVDTAPVMEKPLAQAAGLGWQGKHTNLVSRELGSWLFLGSIFTTAEIPPDEPERDHCGSCRACLDACPTKAFPAPYRIDARRCISYLTIENKGPIPQEFRKAMGNRIYGCDDCLSVCPWNKFAQATSEMKLKAREDLKEPRLNDLLALDDPAFRTLFSGSPVKRIGRDRFIRNVLIATGNSGDATLLPDVERLLEDEAPVVRGAAIWALKQLASPPDHAASVQKRLASLEEDATVQAEWDMEEV

SEQ ID NO: 78865 - protein, 381 aa, Ochrobactrum intermedium
  REGION 1..381: note = tr|M5JM59|M5JM59_9RHIZ Epoxyqueuosine reductase; OS = Ochrobactrum intermedium M86 OX=1234597 GN=queG PE=3; SV = 1
MATSISDSRQQKLKCFLIEEAKAAGFDAVAFTTPDAIPQAPERLRQYIADGHHADMDWMEETEARRADPSVLWPEVRSIMMLAMNYGPDANPLAILEKQDRAAISVYAQNRDYHDIIKGKLKHIASRFAARAGQDVKVFVDTAPVMEKPLAQAAGLGWQGKHTNLVSRELGSWLFLGSIFTTAEIPPDEPERDHCGSCRACLDACPTKAFPAPYRIDARRCISYLTIENKGPIPQEFRKAMGNRIYGCDDCLSVCPWNKFAQATSEMKLKAREDLKEPRLNDLLALDDPAFRTLFSGSPVKRIGRDRFIRNVLIATGNSGDATLLPDVERLLEDEAPVVRGAAIWALKQLASPDHAASVQKRLASLEEDATVQAEWDMEEV

SEQ ID NO: 78866 - protein, 393 aa, Ochrobactrum lupini
  REGION 1..393: note = tr|A0A256GVR9|A0A256GVR9_9RHIZ Epoxyqueuosine reductase OS=Ochrobactrum lupini OX=255457 GN=queG PE=3; SV = 1
MATSTSNSKTEKLKRFLIEEAKAVGFDAVAFTTPDAIPQAPERLRQYIADGHHADMEWMEETEARRSDPSVLWPEVRSIMMLAMNYGPDANPLAILEQQDRAAISVYAQNRDYHDIIKGKLKHVASRFAARAGQDVKVFVDTAPVMEKPLAEAAGLGWQGKHTNLVSRELGSWLFLGSIFTTAEIPPDAPDRDHCGSCRACLDACPTKAFPSPYRIDARRCISYLTIENKGPIPHEFRKVMGNRIYGCDDCLSVCPWNKFAQATSEMKLKARDDLKAPRLADLLTLDDPAFRTLFSGSPVKRIGRDRFLRNVLIATGNSGDKTLLPDVERLLEDEAPVVRGAAIWALKQLANPDRVAEMQKRLASSEEDATVQAEWTTASTRKSEAILGKHDA

SEQ ID NO: 78867 - protein, 393 aa, Ochrobactrum oryzae
  REGION 1..393: note = tr|A0A2S7IZR2|A0A2S7IZR2_9RHIZ Epoxyqueuosine reductase OS=Ochrobactrum oryzae OX=335286 GN=queG PE=3; SV = 1
MATSTSSLKTDKLKRFLIEEAKAVGFDAVAFTTPDAIPQAPERLRQYIADGHHADMEWMEETEARRSDPSVLWPEVRSIMMLAMNYGPDVNPLAILDEKDRAAISVYAQNRDYHDIIKGKLKHVASRFAARAGQDVKVFVDTAPVMEKPLAAAAGLGWQGKHTNLVSRELGSWLFLGSIFTTAEIPPDEPERDHCGSCRACLDACPTKAFPSPYRIDARRCISYLTIENKGPIPHEFRKLMGNRIYGCDDCLSVCPWNKFAQATNEMKLKARDDLKEPRLSDLLALDDPAFRTLFSGSPVKRIGRDRFIRNVLIAAGNSDDTALLPDIEHLLEDEAPVVRGAAIWALKQLADPDRVAEMQKRLASSEEDVTVRAEWNTASARKSESIFGKHDA

SEQ ID NO: 78868 - protein, 381 aa, Ochrobactrum pecoris
  REGION 1..381: note = tr|A0A5C5CHH8|A0A5C5CHH8_9RHIZ Epoxyqueuosine reductase OS=Ochrobactrum pecoris OX=867683 GN=queG PE=3; SV = 1
MATSTSSSKTEKLKRFLIEEAKAVGFDAVAFTTPDAIPQAPERLRQYIADGHHADMEWMEETEARRADPSVLWPEVRSIMMLAMNYGPDVNPLAILDEKDRAAISVYAQNRDYHDIIKGKLKHVASRFAARAGQDVKVFVDTAPVMEKPLAEAAGLGWQGKHTNLVSRELGSWLFLGSIFTTAEIPPDEPDRDHCGSCRACLDACPTKAFPSPYRIDARRCISYLTIENKGPIPHEFRRAMGNRIYGCDDCLSVCPWNKFAQATSEMKLMARDDLKAPRLADLLKLDDAAFRTLFSGSPVKRIGRDRFIRNVLIATGNSGDEALLPDVERLLEDEAPVVRGAAIWALKQLAEPNRVAQMQKRLASIEEDATVQAEWNTEAV

SEQ ID NO: 78869 - protein, 388 aa, Ochrobactrum pseudogrignonense
  REGION 1..388: note = tr|A0A256GQ78|A0A256GQ78_9RHIZ Epoxyqueuosine reductase OS=Ochrobactrum pseudogrignonense OX=419475; GN = queG PE=3 SV=1
MATSTSDTSQASDKALKLKRFLIEEAKAVGFDAVAFTGPDAIPQAPQRLRQYIADGHHADMLWMEETEERRANPSVLWPEVRSIMVLAMNYGPDSNPLSILEHKDRAAISVYAQNRDYHDIIKGKLKHIASRFAARAGQDVKVFVDTAPVMEKPLAQAAGLGWQGKHTNLVSRELGSWLFLGSIFTTAEIPPDEPDRDHCGSCRACLDACPTKAFPSPYRIDAGRCISYLTIENKGPIPHEFRKAMGNRIYGCDDCLSVCPWNKFAQATSEMKLKARDDLKAPKLADFLALDDPAFRTLFSGSPVKRIGRDRFLRNVLIATGNSEDQTLVPQVESLLEDPAPVVRGAAVWALKQLVSTDRFKISQKRLASREEDATVRAEWSLEHQSD

SEQ ID NO: 78870 - protein, 388 aa, Ochrobactrum pseudogrignonense
  REGION 1..388: note = tr|A0A1A9FN00|A0A1A9FN00_9RHIZ Epoxyqueuosine reductase OS=Ochrobactrum pseudogrignonense OX=419475; GN = queG PE=3 SV=1
MATSTSDTSQASDKALKLKRFLIEEAKAVGFDAVAFTGPDSIPQAPQRLRQYIADGHHADMLWMEETEERRANPSVLWPEVRSIMVLAMNYGPDSNPLSILEHKDRAAISVYAQNRDYHDIIKGKLKHIASRFAARAGQDVKVFVDTAPVMEKPLAQAAGLGWQGKHTNLVSRGLGSWLFLGSIFTTAEIPPDEPDRDHCGSCRACLDACPTKAFPSPYRIDAGRCISYLTIENKGPIPHEFRKAMGNRIYGCDDCLSVCPWNKFAQATSEMKLKARDDLKAPKLADFLALDDPAFRTLFSGSPVKRIGRDRFLRNVLIATGNSEDQTLVPQVESLLEDPAPVVRGAAVWALKQLVSTDRFKISQKRLASREEDATVRAEWSLEHQSD

SEQ ID NO: 78871 - protein, 390 aa, unidentified
  source 1..390: note = Ochrobactrum quorumnocens
  REGION 1..390: note = tr|A0A248UIJ1|A0A248UIJ1_9RHIZ Epoxyqueuosine reductase OS=Ochrobactrum quorumnocens OX=271865 GN=queG; PE = 3 SV=1
MATSTSETKQVSGQVSEKDLKLKRFLIEEAKAVGFDAVAFTTPDTIPQAPQRLRQYIADGHHADMLWMEETEDRRANPSVLWPEVRSIMILAMNYGPDSNPLSILEHKDRAAISVYAQNRDYHDIIKGKLKHVASRFAARAGQDVKVFVDTAPVMEKPLAEAAGIGWQGKHTNLVSREHGSWLFLGSIFTTAEIPPDKPDRDHCGSCRACLDACPTNAFPSPYRIDARRCISYLTIENKGPIPPEFRKSMGNRIYGCDDCLSVCPWNKFAQATSEMKLKARDDLKAPRLADFLVLDDPAFRTLFSGSPVKRIGRDRFLRNVLIAAGNSQDPSLLAQVENLLGDTSPVVRGAAVWAFKQLATTERFTILQKRLASSEEDDTVREEWILEDS

SEQ ID NO: 78872 - protein, 390 aa, Ochrobactrum rhizosphaerae
  REGION 1..390: note = tr|A0A256FAP8|A0A256FAP8_9RHIZ Epoxyqueuosine reductase OS=Ochrobactrum rhizosphaerae OX=571254 GN=queG; PE = 3 SV=1
MATSTSETKQVSGPASEKDLKLKRFLIEEAKAVGFDAVAFTTPDTIPQAPQRLRQYIADGHHADMLWMEETEDRRANPSVLWPEVRSIMILAMNYGPDSDPLTILEHKDRAAISVYAQNRDYHDIIKGKLKHVASRFAARAGQDVKVFVDTAPVMEKPLAEAAGIGWQGKHTNLVSREHGSWLFLGSIFTTAEIPPDKPERDHCGSCRACLDACPTNAFPSPYRIDARRCISYLTIENKGPIPHEFRKSMGNRIYGCDDCLSVCPWNKFAQATSEMKLKARDDLKAPRLADFLVLDDPGFRTLFSGSPVKRIGRDRFIRNVLIATGNSQDQSLLTQVENLLEDPAPVVRGAAVWAFKQLAPMERFTILQKRLASDEEDDTVRAEWILEDS

SEQ ID NO: 78873 - protein, 230 aa, Ochrobactrum sp.
  REGION 1..230: note = tr|A0A3D2CYD3|A0A3D2CYD3_9RHIZ tRNA epoxyqueuosine(34) reductase QueG (Fragment); OS = Ochrobactrum sp. OX=42190 GN=queG PE=4 SV=1
MATSISDSRPQKLKRFLIEEAKAAGFDAVAFTTPDAIPHAPERLRQYIADGHHADMDWMEETEARRADPSVLWPEVRSIMMLAMNYGPDANPLAILEKQDRAAISVYAQNRDYHDIIKGKLKHIASRFAARAGQDVKVFVDTAPVMEKPLAQAAGLGWQGKHTNLVSRELGSWLFLGSIFTTAEIPPDAPDRDHCGSCRACLDACPTKAFPAPYRIDARRCISYLTIENK

SEQ ID NO: 78874 - protein, 381 aa, Ochrobactrum sp.
  REGION 1..381: note = tr|A0A317L841|A0A317L841_9RHIZ Epoxyqueuosine reductase OS=Ochrobactrum sp. POC9 OX=2203419 GN=queG PE=3; SV = 1
MATSTSNSKTDKLKRFLIEEAKAVGFDAVAFTTPDAIPQAPERLRQYIADGHHADMEWMEETEARRSDPSVLWPEVRSIVMLAMNYGPDANPLAILEKRDCAAISVYAQNRDYHDIIKGKLKHVASRFAARAGQDVKVFVDTAPVMEKPLAEAAGLGWQGKHTNLVSRELGSWLFLGSIFTTAEIPPDEPERDHCGSCRACLDACPTKAFPSPYRIDARRCISYLTIENKGPIPHEFRKVMGNRIYGCDDCLSVCPWNKFAQATSEMKLKAREDLKAPRLADLLILDDPAFRTLFSGSPVKRIGRDRFIRNVLIATGNSGEAALLPDVERLLEDEAPVVRGAAIWALKQLANPDRVAEMQKRLASSEEDATVQAEWNTEAI

SEQ ID NO: 78875 - protein, 388 aa, Ochrobactrum thiophenivorans
  REGION 1..388: note = tr|A0A256FZ21|A0A256FZ21_9RHIZ Epoxyqueuosine reductase OS=Ochrobactrum thiophenivorans OX=571255; GN = queG PE=3 SV=1
MATSISDNNKAAEKALKLKRFLIEEAKAVGFDVVAFTGPDSIPQAPQRLRQYIADGHHADMLWMEETEERRGNPSVLWPEVRSIMVLAMNYGPDSNPLEILKHKDRAAISVYAQNRDYHDIIKGKLKHVASRFAARAGQDVKVFVDTAPVMEKPLAQAAGLGWQGKHTNLVSRELGSWLFLGSIFTTAEIPPDEPDRDHCGSCRACLDACPTKAFPSPYRIDAGRCISYLTIENKGPIPHEFRKAMGNRIYGCDDCLSVCPWNKFAQATSEIKLKARDDLKAPKLADFLALDDASFRTLFSGSPVKRIGRDRFLRNVLIATGNSEDQTLVPQVESLLEDPAAVVRGAAVWAFKQLAEEEHFKILKNRLASAEEDDTVREEWVLEPISI

SEQ ID NO: 78876 - protein, 345 aa, Octadecabacter antarcticus
  REGION 1..345: note = tr|M9RCM0|M9RCM0_9RHOB Epoxyqueuosine reductase; OS = Octadecabacter antarcticus 307 OX=391626 GN=queG PE=3; SV = 1
MVADMKDKLRAKALEEGFAGFGVCRPDAVPELPERLQRFVDEGHHGQMAWMAERMAWRSDPSALWPEARSVVMLAEPYTPQHDPLAVLEQKDRAAISVYAQNRDYHDVVKKRLKRVGRWLVDEAGCEIKVFVDTAPVMEKPLAAAAGLGWQGKHTNLLSRELGNWFFLGAIFTTLDLEPDTAEVEKCGSCTACLDICPTNAFPAPFQLDARRCISYLTIEHKGPVPEDLRALMGNRIYGCDDCLAVCPWNKFAVEAREIRYAARPELVAPPLRELVALDDGAFRAMFSGSPVKRIGRNRFVRNVLYAIGNSGDPALKDAAAALIGDPAEEVADAARWAVECLDKG

SEQ ID NO: 78877 - protein, 299 aa, Octadecabacter arcticus
  REGION 1..299: note = tr|M9RPL8|M9RPL8_9RHOB Putative iron-sulfur cluster-binding protein OS=Octadecabacter arcticus 238; OX = 391616 GN=OA238_c46910 PE=4 SV=1
MAWMAERMAWRSDPTALWPEARSVVMLAEPYTPEHDPLAVLEQRDRAAISVYAQNRDYHDLVKKRLKRVGRWLVDEAGCEIKVFVDTAPVMEKPLAAAAGLGWQGKHTNLLSRELGNWFFLGSIFTTLDLEPDKAEAEKCGSCTACLDICPTNAFPAPFQLDARRCISYLTIEHKGPVPEDLRALMGNRIYGCDDCLAVCPWNKFAVEAREIRYAARPELVAPPLRDLVALDDGAFRAMFSGSPVKRIGRNRFVRNVLYAIGNSGDAALTDAAAALTGDPAAEVADAAVWAVAQLGGKE

SEQ ID NO: 78878 - protein, 204 aa, unidentified
  source 1..204: note = Octadecabacter ascidiaceicola
  REGION 1..204: note = tr|A0A238K9V9|A0A238K9V9_9RHOB Epoxyqueuosine reductase OS=Octadecabacter ascidiaceicola OX=1655543; GN = queG_1 PE=4 SV=1
MTLDEVNAAASALHLTALGGFHEDGKTTILLGPLEPGFWPFVTDHPDFKGDDPLDNWSSAVISTLADNLNAQAVFPFGGPPFHPFIAWALRSGEVWTSPVGLLVHKDAGLLVSYRGALVFDCEIPLPAPATSPCDSCTDKPCLTACPVSALSPSGYDVVSCKAHMDVDETCRVACRVRMSCPVSQSYHRDPAQTAFHMEAFHPS

SEQ ID NO: 78879 - protein, 346 aa, unidentified
  source 1..346: note = Octadecabacter ascidiaceicola
  REGION 1..346: note = tr|A0A238KFA7|A0A238KFA7_9RHOB Epoxyqueuosine reductase OS=Octadecabacter ascidiaceicola OX=1655543; GN = queG_2 PE=3 SV=1
MVEALKDQLRAKALEEGFVGFGVCRPDAVPLLPDKLQTFVDEGRHGQMGWMAERMTWRSDPTALWPEAKSVVMLAEPYTPEHDPLAVLEQKDRGAISVYAQNRDYHDIVKKRLKRVGRWLVDQAACEIKVFVDTAPVMEKPLAAAAGLGWQGKHTNLLSRELGNWFFLGAIFTTVELEPDEAGVENCGSCTACLDVCPTKAFPAPFQLDARRCISYLTIEHRGPVPEDLRALMGNHIYGCDDCLAVCPWNKFAADAQEIKYAARAELVAPSLRELAGLDDGAFRVLFSGSPIKRIGRDRFVRNVLYAIGNSSDGALRDVAISLLEDPADEVSDAARWAAARLAETS

SEQ ID NO: 78880 - protein, 174 aa, Octadecabacter sp.
  REGION 1..174: note = tr|A0A3D3ZVK2|A0A3D3ZVK2_9RHOB tRNA epoxyqueuosine(34) reductase QueG (Fragment); OS = Octadecabacter sp. OX=1920174 GN=queG PE=4 SV=1
TTLELEPDVAGIENCGSCTACLDVCPTKAFPAPFQLDARRCISYLTIEHKGPIPEDLRALMGNHIYGCDDCLAVCPWNKFAQDAREIKYAARAELVAPSLRDLAGLDDGAFRALFSGSPIKRIGRDRFVRNVLYAIGNSGDLALRDVATGLQEDTADEVADAARWAAIRLVEKT

SEQ ID NO: 78881 - protein, 345 aa, Octadecabacter sp.
  REGION 1..345: note = tr|A0A5B9EW73|A0A5B9EW73_9RHOB Epoxyqueuosine reductase OS=Octadecabacter sp. SW4 OX=2602067 GN=queG; PE = 3 SV=1
MTADLKERLRAQALSEGFAQMGVCRPDAVPDLPDRLAAFLADGRHGQMSWMAERAGWRADPGALWPAVRSVIMLAEPYTPTHDPLAVLDQPDRAAISVYAQNRDYHDVVKKRLKRLARWLIDQADGAEIKVFVDTAPVMEKPLGAAAGLGWQGKHTNLLGRDLGNWFFLGAIFTTVTLEPDEAGVESCGSCTACLDICPTDAFPAPFQLDARRCISYLTIEHHGPVDEDLRALMGNRIYGCDDCLAVCPWNKFAQEAREAKYHARPELVAPDLAKLATLDDAVFRALFSGSPIKRIGRNRFLRNVLYAIGNSGEARLMDSARLHVDDPAAEVADAARWAIARLTP

SEQ ID NO: 78882 - protein, 204 aa, unidentified
  source 1..204: note = Octadecabacter temperatus
  REGION 1..204: note = tr|A0A0K0Y1S7|A0A0K0Y1S7_9RHOB Epoxyqueuosine reductase OS=Octadecabacter temperatus OX=1458307; GN = queG_1 PE=4 SV=1
MTLDEVNAAAKALHLTALSGFHEDGKTTILLGPLEPGFWSFVTDRPDFKGDDPLDNWSCATISSLADDLNAKAVFPFGGPPYHPFIAWALRSGEVWTSPVGLLVHKDAGLLVSYRGALVFDEVIDLPNPATSPCNSCTDKPCLTACPVSALGPDGYDVERCKAHMDVDETCRAACRVRMSCPVSQTYRRDPAQTTFHMEAFHPS

SEQ ID NO: 78883 - protein, 346 aa, unidentified
  source 1..346: note = Octadecabacter temperatus
  REGION 1..346: note = tr|A0A0K0Y9Q7|A0A0K0Y9Q7_9RHOB Epoxyqueuosine reductase OS=Octadecabacter temperatus OX=1458307; GN = queG_2 PE=3 SV=1
MTEALKDRLKIKALEEGFVGFGVCRPDAVPQLPERLKHFVDEGRHGQMAWMAERMTWRSDPSALWPEAKSVVMLAEPYTPEHDPMAVLEQKDRGAISVYAQNRDYHDIVKKRLKRVGRWLVDQAECEIKVFVDTAPVMEKPLAAAAGLGWQGKHTNLLSRELGNWFFLGAIFTTLELETDEAGVENCGSCTACLDVCPTKAFPAPFQLDARRCISYLTIEHKGPVPEDLRALMGNHIYGCDDCLAVCPWNKFAAEAREIKYAARPELVAPSLRELAGLDDGAFRTLFSGSPVKRIGRDRFVRNVLYAIGNSGDVALRDVVVGLMKDPADEVADAARWADARLEDSI

SEQ ID NO: 78884 - protein, 302 aa, Odoribacter laneus
  REGION 1..302: note = tr|R5VPF3|R5VPF3_9BACT Putative iron-sulfur cluster-binding protein OS=Odoribacter laneus CAG:561; OX = 1263089 GN=BN709_01719 PE=4 SV=1
MIFDPRGTLKLEDFCRKAATLGFDGIGVAPYEKLGQEIRHLQLWLQKGCQAGMSYMERNVDKREDPRLLVENAHSLIVTLTNYFHPFRQAEGIPVIARYAYGKDYHKIVKEKLEQLKGQIAGRCFVDSAPVLEHEWARRAGLGWVGKNTLLINREKGSFCFIGIIITPEKFDRYHIPFDKNYCGNCNRCIEACPTGALVPYQLDARKCISYHTIENKGEYPEFVKQKAGERIFGCDICQEVCPWNSRAKMHQVAAFLPSPERLNLQKEDWKKMDEFTFARLFKDTPLERTGLARILRNLSGA

SEQ ID NO: 78885 - protein, 302 aa, Odoribacter laneus
  REGION 1..302: note = tr|H1DJL3|H1DJL3_9BACT Putative iron-sulfur cluster-binding protein OS=Odoribacter laneus YIT 12061; OX = 742817 GN=HMPREF9449_02449 PE=4 SV=1
MISDPRGTLKLEDFCRKAATLGFDVIGVAPYEKLGQEIRHLQLWLQKGCQAGMSYMERNVDKREDPRLLVENAHSLIVTLTNYFHPFRQAEGIPVIARYAYGKDYHKIVKEKLEQLKGQIAGRCFVDSAPVLEHEWARRAGLGWVGKNTLLINREKGSFCFIGIIITPEKFDRYHIPFDKNYCGNCNRCIEACPTGALAPYQLDARKCISYHTIENKGEYPEFVKQKAGERIFGCDICQEVCPWNSRAKMHQVAAFLPSPERLNLQKEDWKKMDEFTFARLFKDTPLERTGLARILRNLSDA

SEQ ID NO: 78886 - protein, 299 aa, Odoribacter sp.
  REGION 1..299: note = tr|A0A416VQ59|A0A416VQ59_9BACT tRNA epoxyqueuosine(34) reductase QueG OS=Odoribacter sp. AF15-53 OX=2292236 GN=queG PE=4 SV=1
MKLEVLKNKAWECGFDACGVVPVEILTRERERLERWLGRGFHAGMNYMANNIEKRENPALLVEGARSVIVTLTNYYTSERQHPDAPIAARYAYGKDYHRVVKDRLFKLYSSLQEKDGRKITGRIFVDSAPVFEHEWARRAGLGWIGRNSLLIHPKLGSFCFIGVIISDFEPDSYSSSESRNFCGTCNRCVKACPTGALSPYEVNANLCISYNTIERKDEIPPLIKEKMGNRFFGCDACQDACPWNRGAVLHHVEEFASNPWVMTMSREDWLDMDEDTFKERFADTPFTRPGLERIKRNI

SEQ ID NO: 78887 - protein, 297 aa, Odoribacter sp.
  REGION 1..297: note = tr|A0A373U2D9|A0A373U2D9_9BACT tRNA epoxyqueuosine(34) reductase QueG OS=Odoribacter sp. AF21-41 OX=2293111 GN=queG PE=4 SV=1
MEALLEKAKECGFDACGIVPVDVLFRERERLERWIGQGFHAGMNYMANNIEKRENPALLVEGARSVIVTLTNYYTPKLQSEGIPVVARYAYGKDYHRVVKDRLFKLHTCLEEVTGRKITGRAFVDSAPVFEHEWARRAGLGWIGRNSLLIHPRLGSYCFIGVIISDFEPSRYSLPEERNFCGQCNRCVEACPTGALSSHEVNANLCISYNTIERKDDIPSEIKKKMGDRFFGCDACQEVCPWNRKAVLHHVEEFSPNEWLMRMSREEWLALDEETFQVRFKESPLQRPGLERIKHNL

SEQ ID NO: 78888 - protein, 339 aa, unidentified
  source 1..339: note = Oharaeibacter diazotrophicus
  REGION 1..339: note = tr|A0A4R6R6A4|A0A4R6R6A4_9RHIZ Epoxyqueuosine reductase OS=Oharaeibacter diazotrophicus OX=1920512; GN = queG PE=3 SV=1
MRARAAALGFAAVGVTTPDAIAAAGPRLAAFVAAGRHGTMSWLAERTDERADPGVLWPEVRSVVMLAANYGPEGDPLAGLADRAVGNVSVYARGRDYHDVLKGRLKEVAQLLEARSGARVKVFVDTAPVMEKPLAAAAGIGWQGRHTNLVSRDFGSWLFLGAIFTTAVLPVDAPAEDRCGSCRACLDACPTDAFPAPYQLDARRCISYLTIEHDGPIPEEFRAAIGNRVYGCDDCLAVCPWNKFAAAAAEIKLAARPELVAPRLADLAGLDDAGFRALFSASPVKRIGRARFLRNVLVAIGNSGDPALAAAAAPHRDDPDPVIADAARWALARLSDATA

SEQ ID NO: 78889 - protein, 308 aa, Ohtaekwangia koreensis
  REGION 1..308: note = tr|A0A1T5LLA3|A0A1T5LLA3_9BACT Epoxyqueuosine reductase OS=Ohtaekwangia koreensis OX=688867 GN=queG PE=3; SV = 1
MQPAQYTHLVKHIAAELGFSFCGISKAEFLHEEAPRLEAWLKRSYQGKMSYLENHFDKRLDPTLLVPGAKSVVSLIYNYFPKEDLAKEGQLKIAKYAYGEDYHFVVKDKLKLFMERLQQQVGEVNGRAFVDSAPVMERTWAKKSGLGWIGKNSLLLNRQMGSFFFLAELIIDLELEYDGPVKDYCGTCTACIDACPTDAIAEPYVVDGSKCISYFTIELKEEIPNDVKGKFENWIFGCDICQDVCPWNSFSKPHHEPRFMPDGDLEKMSLKDWKEITDEVFQKIFRHSPVKRTKLEGLKRNIQFIREE

SEQ ID NO: 78890 - protein, 307 aa, unidentified
  source 1..307: note = Okeania hirsuta
  REGION 1..307: note = tr|A0A3N6PPT7|A0A3N6PPT7_9CYAN Epoxyqueuosine reductase OS=Okeania hirsuta OX=1458930 GN=queG PE=3 SV=1
MKSALSISQIKQKALEVGFHKVGIASVNELGSDTERLQAWLNKGYQADLRWMANPKRQNLKLVMPEVESIICVALNYYTLHQHSENSEIGKISRYGWGRDYHKVMHQKLKALSNWLQEQEKEILTRYYADTGPVPEKPLAQQAGLGWIAKNGNLITREYGSWVFLGEVLTNLELTSDRPHAQHCGSCTRCLEACPTNAIVEPFVVDANFCIAYHTIENRNPELPEYIKSNLKGWVAGCDICQDVCPWNERFAQKTNIDDFQPYPGNVTPKLTELAEISQQDWDKQFPASALRRIKPEMLRRNACANL

SEQ ID NO: 78891 - protein, 367 aa, unidentified
  source 1..367: note = Oleiagrimonas soli
  REGION 1..367: note = tr|A0A099CVC8|A0A099CVC8_9GAMM Epoxyqueuosine reductase OS=Oleiagrimonas soli OX=1543381 GN=queG PE=3; SV = 1
MPRMPDLPAHLDPHALVADIRDWAKALGFSALGVAGTSLREDEAHLEDWLAQGLHGEMAYMQRHGRKRSRPDELEPGTRRVICVRMDYMPPGVRGAWSVIEDDQRGYVARYALGRDYHKLMRLRLQKLADRIADAVGPFGYRAFVDSAPVLEKALARDAGLGWIGKHTLLLSRDASSWFLLGELFTDLPLPLDEPASAHCGSCRRCIDICPTQAIVAPYRLDARRCISYLTIELKGAIPEPLRAPMGNRIFGCDDCQLVCPWNKFAQQATEPDFAPRHGLDGAKLTELFAWDEETFLQRTQGMAIRRTGYEGWLRNIAVALGNAAPSPAVVDALQARADHPSALVREHVAWALREQQGKRSKAEAAD

SEQ ID NO: 78892 - protein, 364 aa, unidentified
  source 1..364: note = Oleiagrimonas sp.
  REGION 1..364: note = tr|A0A328SYQ5|A0A328SYQ5_9GAMM Epoxyqueuosine reductase OS=Oleiagrimonas sp. MCCC 1A03011 OX=1926883; GN = queG PE=3 SV=1
MSALPDHIDPHALITDIRGWAKELGFSALGVTGTSLREDESHLEDWLDQGMHGEMAYMRRHGRKRSRPEELEPGTQRVICVRMDYMPPGVRGAWSVIEDPALGYVARYALGRDYHKLMRNRLQKLADRIAGVVGPFGYRAFVDSAPVLEKALARNAGLGWIGKHTLLLSRDASSWFLLGELFTDLPLPLDEPASAHCGSCRRCIDICPTQAIVAPYRLDARRCISYLTIELRGSIPEPLRAPMGNRIFGCDDCQLVCPWNKFAQQATEPDFAPRHGLDGAKLTELFAWDEDTFLLRTQGMAIRRTGYEGWLRNIAVALGNAAPSPAVVDALKARADHPSALVREHVAWALREQDKKAGCAGTAG

SEQ ID NO: 78893 - protein, 362 aa, Oleibacter marinus
  REGION 1..362: note = tr|A0A1N7NP62|A0A1N7NP62_9GAMM Epoxyqueuosine reductase OS=Oleibacter marinus OX=484498 GN=queG PE=3 SV=1
MTSSRTVLTPEQLQKLRDDITQWSLEAGFQQCGFSSVDTGEHGDRLQQWLDAGYHGEMSYMADHVTERGPMRALPDELLPGTLSVISLRMDYLAPGVEVAKHLQDKNNAYISRYALGRDYHKLIRKRLTQLGKRIQSEIGDLGFRAFVDSAPILERALAEQAGIGWIGKNTMVLNRKAGSYFFLGEILTDLPLDPNDTPLKNHCGRCTSCLDICPTQAFVAPYVLDARKCISYLTIELDGPIPEELRSGIGNRIFGCDDCQIGCPWNRFSKSSEEPDFTPRHQLDKATLLELFQWDEATFLKKTEGMPIRRTGYENWMRNISVALGNAPQSIEVQEALKNQKGKISGLVDEHINWALQQQGH

SEQ ID NO: 78894 - protein, 291 aa, Oleibacter sp.
  REGION 1..291: note = tr|A0A2D8ADK9|A0A2D8ADK9_9GAMM tRNA epoxyqueuosine(34) reductase QueG (Fragment) OS=Oleibacter sp. OX=2024845 GN=queG PE=4 SV=1
RSRPQELLPGTLRVISLRMDYLAPDVSITEQLQDKNQAYISRYALGRDYHKLVRKRLTQLGKLIQQAAGEMGFRAFVDSAPVLERALAQRAGLGWQGKNTMLINRKAGSYFFLGEILTDLPLPTDAAYEQEHCGRCTACLDICPTQAFVGPYTLDARRCISYLTIELDGPIPQDLRTGIGNRIFGCDDCQIGCPWNRFSHESSEPDFSPRANLDKASLLELFAWDEATFLKNTEGMPIRRTGYENWLRNIAVALGNAPASIEVEQALLAKRPQVGALVQEHIDWALTQQKL

SEQ ID NO: 78895 - protein, 370 aa, Oleiphilus messinensis
  REGION 1..370: note = tr|A0A1H5Z7G6|A0A1H5Z7G6_9GAMM Epoxyqueuosine reductase OS=Oleiphilus messinensis OX=141451 GN=queG PE=3; SV = 1
MSDPISQSDLKLLPTNSALPSPVRQQLREQIKVWGRELGFQQIGFADPDLGEHEQHLQDWLDAGYHGEMDYMASHGTKRSRPEELVEGTRTVITARMDYLPADVETTRLLSQGEKAYISRYALGRDYHKLIRKRLTQLAKKIEAEIGAYGYRAFVDSAPVLERALAMRSGLGWVGKNTMVIHPKAGSFFFLGEVMVELDLPKDPAYPKDHCGSCNACQVACPTQAIVGDKIVDGRRCISYLTIELKGSIPEALRPGIGNRIFGCDDCQLVCPWNRFTKPTQESDFTPRHSLDSADLVDLFLWDESTFLSKTEGTPIRRAGYERWLRNIAVALGNAPTTPAVIAALKHRENAPSEMVCEHVTWALRQHTVE

SEQ ID NO: 78896 - protein, 349 aa, Oleiphilus messinensis
  REGION 1..349: note = tr|A0A1Y0I655|A0A1Y0I655_9GAMM Epoxyqueuosine reductase OS=Oleiphilus messinensis OX=141451 GN=queG PE=3; SV = 1
MNFAQLALDIKQWASELGFAQAGITDTDLANTGDRLKQWLAAGYHGEMDYMASHGSKRYNPEELIPGTTRVISVRMDYYPEQRDEGKQQLDTPEKAYISRYTLGRDYHKTIRNRLKQLAQRIQEHVADTQYRVFVDSAPVMERAIAEKAGLGWIGKNTMLISKHAGSYFFLAEIFTNIPLPIDAPDNRNHCGSCQACLSACPTNAFVGPYILDARRCISYLTIELKGSIPTEFRKAMGNRVFGCDDCQISCPWTKFTDNTQEQDFLPRHNLNTADLIELFLWTESEFLDRTAGSAIRRTGYIGWLRNLAVALGNAPSSEAVINALKARQTHPSEVVQEHTNWALEQHTA

SEQ ID NO: 78897 - protein, 355 aa, Oleispira antarctica
  REGION 1..355: note = tr|R4YS44|R4YS44_OLEAN Epoxyqueuosine reductase; OS = Oleispira antarctica RB-8 OX=698738 GN=queG PE=3 SV=1
MTQTALSQSDLQDLADKIKVWGRELGFQQIGITHIELGEHETRLKEWLAKGYHGSMEYMAAHDNMRSRPADLLPGTLRVISARMDYLPADARIKEQLQDKSLAYISRYALGRDYHKVIRKRLTQLGKMIEEEVGHGYRAFVDSAPVLERALASNAGLGWLGKNTMLINKKAGSYFFLSELLTDLPLPIDQPDDKNHCGSCTSCIDICPTQAFVGEQVLDARRCISYLTIELKGPIPTDLRKGMGNRIFGCDDCQLCCPWNRFSKTTQETDFTPRHPLDNATLLELFAWDESTFLKHTEGNPIRRTGYQNWLRNIAVALGNAPASIEITEALKQRLPEASDLVKEHIEWALAQHAT

SEQ ID NO: 78898 - protein, 186 aa, Oleispira sp.
  REGION 1..186: note = tr|A0A2E3BET2|A0A2E3BET2_9GAMM tRNA epoxyqueuosine(34) reductase QueG (Fragment) OS=Oleispira sp. OX=2024846 GN=queG PE=4 SV=1
KAGSYFFLSELLTDLPLPIDEPDDKNHCGRCTACIDICPTQAFVGDQVLDARRCISYLTIELKGPIPTDLRKGMGNRIFGCDDCQLCCPWNRFSQTTQETDFTPRHPLDNATLLDLFAWDEQTFLKHTEGNPIRRTGYENWLRNIAVALGNAPTSIEIIEALKQRLPDASDLVKEHIVWALEQHSN

SEQ ID NO: 78899 - protein, 273 aa, Oleispira sp.
  REGION 1..273: note = tr|A0A2E3BFC1|A0A2E3BFC1_9GAMM tRNA epoxyqueuosine(34) reductase QueG (Fragment) OS=Oleispira sp. OX=2024846 GN=queG PE=4 SV=1
MTQAALTKSELQDLADKVKVWGRELGFQQIGITHIDLGDHEIRLKEWLEKGYHGSMEYMAAHDNMRSRPAELLPGTLRVISARMDYLPADARIKEQLHDKSLAYVSRYALGRDYHKVIRKRLTQLGKMIEEEVGHHGYRAFVDSAPVLERALASNAGLGWLGKNTMLINKKAGSYFFLSELLTDLPLPIDEPDDKNHCGRCTACIDICPTQAFVGDQVLDARRCISYLTIELKGPIPTDLRKGMGNRIFGCDDCQLCCPWNRFSQTTQETDFT

SEQ ID NO: 78900 - protein, 374 aa, unidentified
  source 1..374: note = Oleomonas sp.
  REGION 1..374: note = tr|A0A418WT51|A0A418WT51_9PROT Epoxyqueuosine reductase OS=Oleomonas sp. K1W22B-8 OX=2320859 GN=queG; PE = 3 SV=1
MTPKSPRDALEAEARRLGFDRIGVTTPDALARTGRDGDLHRWLAEGHQGEMAWLAETAARRADPRVLWAQTRAIVMVAQNYGPESDSLALLEARDRGLIAAYARMKDYHDVMKGRLKMLAQWTASRLHCDVKVFVDTAPVMEKPLAQAAGLGWQGKHTNLVSREFGSWLFLGALFTTAPLPADRSEEDHCGTCRRCLDICPTNAFPAPYRLDARRCLAYLSIEYGGVIPPEFRVAMGNRIYGCDDCLAVCPWNKWAQASHDTKLAERLDLTAPALADLATLDDAAFRTRFAGTPIKRIGRDRFLRNVAIAIGNSGNVSLLPAVERLLDDESPLVRGMAVWAYRRLSPDPLAAADQRLSAELDGEVREEWHRPID

SEQ ID NO: 78901 - protein, 311 aa, Olivibacter sp.
  REGION 1..311: note = tr|A0A5C0ZKA2|A0A5C0ZKA2_9SPHI Epoxyqueuosine reductase OS=Olivibacter sp. LS-1 OX=2592345 GN=queG PE=3; SV = 1
MLIAAEKYSKLIKDEAKRLGFAFCGIAKADFLEEEAPRLEKWLKEEMHGEMYYMENHFDKRLDPRLLVEGAKSIISLGFNYFTSDIQIDKDSPKISRYAYGVDYHTVIKNKLKSLLHFMQDEIGEVGGRAFVDSAPVLDRAWAKRSGLGWIGKNSNLINRKKGSFFFLCELIVDIELDYDLAPTKDYCGTCTRCIDACPTEAIVAPQIVDGSKCISYLTIELKNEIPDQFVGKMDNWMFGCDVCQDVCPWNRFAEPHTEESFKPHPDLLEMTKKDWEEITEETFQRVFKKSAVKRAKFSGLTRNIRFLGKS

SEQ ID NO: 78902 - protein, 308 aa, Olleya aquimaris
  REGION 1..308: note = tr|A0A327RXA4|A0A327RXA4_9FLAO Epoxyqueuosine reductase OS=Olleya aquimaris OX=639310 GN=queG PE=3 SV=1
MNNKAKYTQQIKAEAKRLGFLSCGISKAGFLEVEAPRLEKWLNNNMHGEMQYMENHFDKRLDPTKLVEDSKSVISLLLNYYPSQEQTDNSYKISKYAYGNDYHHVIKSKLKELTHFIQDEIGEVSGRAFVDSAPVLDKAWAAKSGLGWIGKHSNLLTQQVGSFYFIAELIIDLELEYDHATTDHCGTCTACIDACPTQAITEPYIVDGSKCISYFTIELKENIPTEFKGKMDDWMFGCDVCQDVCPWNKFSKPHNEPLFNPHPELLEMTKKDWEEITEDVFKKVFQKSAVKRTKFSGLQRNISFLKPN

SEQ ID NO: 78903 - protein, 307 aa, unidentified
  source 1..307: note = Olleya namhaensis
  REGION 1..307: note = tr|A0A1I3IM36|A0A1I3IM36_9FLAO Epoxyqueuosine reductase OS=Olleya namhaensis OX=1144750 GN=queG PE=3 SV=1
MINNRSKYTQLIKSEAKRLGFLSCGISKAEFLEVEAPRLEKWLNNNMHGQMSYMQNHFDKRLDPTLLVDDSKSVISLLLNYYPEQKQSDQSYKLSKYAYGKDYHEVIKSKLKELTHYIQTEIGAVSGRAFVDSAPVLDKAWAAKSGLGWIGKHSNLLTQKVGSFYFIAELIIDLDLEYDTIVSDHCGTCTACIDACPTQAITEPYVVDGSKCISYFTIELKDQLPNTMKGQFDDWMFGCDVCQDVCPWNKFSKPHSEPLFNPHPELLDMTKKDWDEITEDVFQKVFQKSAVKRTKFSGLQRNIDFLK

SEQ ID NO: 78904 - protein, 309 aa, Olleya sp.
  REGION 1..309: note = tr|A0A2K8WUC5|A0A2K8WUC5_9FLAO Epoxyqueuosine reductase OS=Olleya sp. Bg11-27 OX=2058135 GN=queG PE=3; SV = 1
MIENKAKYTKQIKAEAQRLGFLSCGISKAEFLEVEAPRLENWLNNNMHGQMSYMQNHFDKRLDPTKLVEDSKSVISLLLNYYPSDLQKHSDAPKLSKYAYGKDYHEVIKTKLQALANFIQEEIGAVSGRAFVDSAPVLDKAWAAKSGLGWIGKHSNLITQKTGSFYFIAELIIDLDLDYDYATTDHCGTCTACIDACPTAAIVEPYVVNGSKCISYFTIELKDQLPNTMKGKFDDWMFGCDICQDVCPWNKFSKPHKEPLFNPHPELLDMSKKDWEEITEDVFKKVFQKSAVKRTKFNGLKRNIEFLKP

SEQ ID NO: 78905 - protein, 308 aa, Olleya sp.
  REGION 1..308: note = tr|A0A559RBZ6|A0A559RBZ6_9FLAO Epoxyqueuosine reductase OS=Olleya sp. Hel_I_94 OX=1250001 GN=queG PE=3; SV = 1
MLDNKSKYTTQIKAEAKRLGFLSCGISKAGFLEKEAPRLENWLNKNMHGQMGYMQNHFDKRLDPTKLVDDSKSVISLLLNYYPSQVQEDKKAPKLSKYAYGQDYHFVIKEKLKELTHFIHQEIGDVSGRAFVDSAPVLDKAWAAKSGLGWIGKNSNLLTQQVGSFYFIAELIIDLDLEYDSIVSDHCGTCTACIDACPTQAITEPYVVDGSKCISYFTIELKEQLPTAMKGKFDDWMFGCDVCQDVCPWNKFSKPHNEPLFNPHPDMLAMTKQDWEDITEEVFKKVFQKSAVKRTKFEGLKRNIEFVK

SEQ ID NO: 78906 - protein, 358 aa, unidentified
  source 1..358: note = Unknown
  REGION 1..358: note = tr|A0A520S2N7|A0A520S2N7_9GAMM Epoxyqueuosine reductase OS=OM182 bacterium OX=2510334 GN=queG PE=3 SV=1
MEKYSELASLIKTWGNQLGFQQVGITDTDLEEHEKHLSSWLLNGYAADMEYMSKHGEKRTKPEMLLPGTIRIISARMDYLNRNAQTKKTLRSKSKAYVAQYAMGRDYHKVIRARLNQLSLRINDYIEAQGTQDFTARAFSDSAPVLEKGIAEKAGLGWIGKNTLILNENAGSWFFLGEIYTNIPLPIDKDAAVNRCGTCTACIDVCPTKAIVAPYQLDSRKCISYHTIENRGVIPVSIREKMGNRIFGCDDCQTVCPWNRYARPTEELDFKPRNNFDAALLLSLFKWTKSEFLKNTEGSAIRRTGYDGWLRNIGIALGNADYDDRIVEALKSKLQGASNMVKEHLNWAINRQVEKSSI

SEQ ID NO: 78907 - protein, 352 aa, unidentified
  source 1..352: note = Unknown
  REGION 1..352: note = tr|A0A2A5WEY2|A0A2A5WEY2_9GAMM Epoxyqueuosine reductase OS=OM182 bacterium MED-G28 OX=1986256 GN=queG; PE = 3 SV=1
MSEIDFSKLAADIKDWARDLGFQETAITDIDLEEYQSLLKSWIENDYHGAMDYMARNQDKRCNPGQLVPGTIRVVCVRMDYSLEKENSFSPLSKRNTAYISRYARGRDYHKLIRKRLQQLAHKIQITVGEFGYRAFVDSAPVLERALAEKAGLGWIGKNTMLLNKEAGSWFFLGELFTDLPLPVDNAVTHHCGSCRACLDICPTKAFVGPNILDAKRCISYLTIELRDAIPEEFRKAMGNRVFGCDDCQLVCPWNKFTNETAEDDFKPRHDFDDVALTILFMWSEEEFLTNTSGSAIRRIGYECWQRNLAIGLGNAESSDEVMNALQSGINNSSEMVREHVRWALDQHQKAQ

SEQ ID NO: 78908 - protein, 295 aa, unidentified
  source 1..295: note = Omnitrophica bacterium
  REGION 1..295: note = tr|A0A136M2D3|A0A136M2D3_9BACT Epoxyqueuosine reductase OS=Omnitrophica bacterium OLB16 OX=1617433; GN = queG PE=4 SV=1
MPSNARDLILSWFKEHGFDRAGCARVSSVNASTKAAYLSWLDRGYQASMGYMTRNVDKRLDPCLLLPGAKSVLVGLSNYCTPGRPPSNQPGKVAMYAGQRDYHKTLKKGLKKIADRIRAEFPEADTWIGVDTAPLLERYWAQQAGLGWIGKNTLLINRSLGSWTFIGCLLTTLEIEPDPPYGDYCGSCTRCLSACPTGAFVEPHVLDSRKCISYWTIEHRGEFEQNTFPGTHGWIFGCDDCQTVCPWNRFTNPTGQPDFQPIPWTRPPRPFRVAPVDTRRMGAGGDRHRAQENRL

SEQ ID NO: 78909 - protein, 401 aa, unidentified
  source 1..401: note = Omnitrophica bacterium
  REGION 1..401: note = tr|A0A1G1KTL1|A0A1G1KTL1_9BACT tRNA epoxyqueuosine(34) reductase QueG OS=Omnitrophica bacterium RIFCSPLOWO2_12_FULL_44_17 OX=1801832; GN = A3G33_01960 PE=4 SV=1
MSITSRQIKSLALDTGFDACGITNINISPHPNPLPKGEGKFPASPAGGQAGGEGMLVAEESYLKEWIRQGKHGGMHYLEEYPERQKKFFKEFPDAKNVIVLGVNYWTGGATVGATPRPPAGEAGVRPSSDKKRGQVLMPLYQNLSPFFDDSSTGQTHGSAPTNMVPSGRVARYAWGKDYHKIISEKLNKLIGKIKNVVAANRHACSLQTKNIHLETCVDTKPLLERSLAVEAGLGFIGRQSQLISPEFGPWLFLAEIVTNLQLEPDRPIEGNCGRCRKCIDQCPTGAIGENKSMDARKCIAYLTIEHKNEIPEELKPKIGDRIFGCDRCLEVCPYTSKQKETRWKEFKATSGAGSRLDLNELLAIKTNREYKEKFSDSAISRATRRQLLRNASIVIENFRK

SEQ ID NO: 78910 - protein, 296 aa, unidentified
  source 1..296: note = Unknown
  REGION 1..296: note = tr|A0A1G1LKK8|A0A1G1LKK8_9BACT tRNA epoxyqueuosine(34) reductase QueG OS=Omnitrophica WOR_2 bacterium GWA2_47_8 OX=1801840 GN=A2Z88_00340 PE=4 SV=1
MEDKFKTSIKTFAIERLKFDDCRFTGSRVDETIPLYEKWLKEGNHGEMTYLENHLKFKQNPELLLKSARSAIVVIKNYKNTKTRNLEGDLKVARYAAGEDYHLVMTEKLKELTAFIKNLDKTIECYSGVDSRPLPERALALKAGIGFLGKNSMVIKPGLGSYFFIGIILTTTSLEEDRPLSWNCGQCRLCLDACPTNALGEGFAFNATKCISYMTIEKKTPLTGEELKQTNGWIFGCDICQEVCPYNHDNITLTDWPQFLPSNGIGFDFKTDSIPKNTALYRSRKRLLANVNNLKR

SEQ ID NO: 78911 - protein, 336 aa, unidentified
  source 1..336: note = Unknown
  REGION 1..336: note = tr|A0A1G1PFF6|A0A1G1PFF6_9BACT tRNA epoxyqueuosine(34) reductase QueG OS=Omnitrophica WOR_2 bacterium RIFCSPHIGHO2_02_FULL_68_15 OX=1801861; GN = A3C53_04290 PE=4 SV=1
MVLLAEPTTVAQRAAAVKQAARELGFTAAGITTADAFDAPRARLARWISQGRHGEMAYLEQFAERHARFRTAFPDARSVIVVAAGRDYHKVLRARLKALARVVQGLAEGPVAVRWCVDTAPLHERSLAEAAGLGFIGKNTCLILPRGGSWVVLGVLATDLELAEDAPATHTCGACTRCLEACPTGALTAPYEMDARRCIAYLTLEHRGPLPEPLRPAVGTWLAGCDICQEVCPYNAKPAPASWPALTPAAGAGETLPLADLLACRDPQAFETRFAGTALMRPKYQGLVRNAALAAGNARAHELLPSLRARTQDPDPVIRDAAAWAVTRITAETPGD

SEQ ID NO: 78912 - protein, 405 aa, unidentified
  source 1..405: note = Opitutaceae bacterium
  REGION 1..405: note = tr|A0A2D8RPC7|A0A2D8RPC7_9BACT tRNA epoxyqueuosine(34) reductase QueG OS=Opitutaceae bacterium; OX = 2006848 GN=queG PE=4 SV=1
MTLRGEGKEALRKVLKEIGFDEVRFAELDPPIANRLSEWVEKGYHADMDWLARSVEKRIDPNRVMESAHSIIMLGTNYWPSDPAAGAQSRWAKYSLYRDYHDTIIRGLKKAGSILEAHLGLTESDYRYYVDTGPVMERGWAAASGMGWQGKNGMLISKRHGNWLFLSAILLKARIEKDPPLRKGSADQSNSPELGAHCGKCTRCINVCPTEAIVEPGIVDSRRCISYQTIENKGVIPRWIRPGIGRRIYGCDICLDVCPWNRFAKSGRHLLLESRYGITDLTLLDVLTMKIDSFREIFRKSPIKRLKLRGLLRNGCVVAGNLNSDSEWRQNLSPDWRTPVRDALLDLVAHEEAAVPPHAIWALYRLFGSSIREDVKPLIEESGNELAIDEFSWWERQSREEPECP

SEQ ID NO: 78913 - protein, 396 aa, unidentified
  source 1..396: note = Opitutaceae bacterium
  REGION 1..396: note = tr|A0A178IFA9|A0A178IFA9_9BACT Epoxyqueuosine reductase OS=Opitutaceae bacterium TSB47 OX=1184151; GN = AW736_19075 PE=4 SV=1
MSRSEELRRRLRGLGFDAVRFARIGPEAARPMSERFSQWLGAGYHADMHWMERGAEKRAHPGLVLADARSMILLGVNYGRAASGKGAPVWARYALYSDYHDTVKEGLVAAGRTLEELFGVAGADYRYYVDTGPVLERGWAERAGLGFVGKNAMLISREFGNWLFLAVILTRLELEPDEPLLEKFQIPNPKSQKNSKFQIPNHEMPAPPGFRFCGKCERCMTACPTAAITAPGVLDARRCVSYQTIENRGMIPRELRAGIGARIYGCDVCAEVCPWNRFAQDARSTLLEARGGVAALSLREVLELTPERFAEVFRKMPIKRVKLPGLLRNACVVAGNAGAADCLDVLARLAAHASPVVRAHAVWAVRRIAGPGKAPGLLEAVRMAERDEDVLAEYEG

SEQ ID NO: 78914 - protein, 344 aa, unidentified
  source 1..344: note = Opitutae bacterium
  REGION 1..344: note = tr|A0A357I2I9|A0A357I2I9_9BACT tRNA epoxyqueuosine(34) reductase QueG OS=Opitutae bacterium; OX = 2026771 GN=queG PE=4 SV=1
MFPSNHTILAHLKRESEALGFHSLGVTTVPLELRRKYYTQWIADGKHGSMAWMARNNDRRMHPERLIPEREAKSIISLALNYYQPNPKRGYRVAKYALGDDYHNFMLRRLKRLCRILREEYGGEQRPYVDTGPLLEKPIAASAGLGWQGKSTILIEPKRGTWNFLANIVTTLELPAGVPQKDRCGTCTRCLDACPTRAITAPYQLDASKCISYLTIEHDGAIPLAYRKAIGDRMYGCDECLDVCPWNKWAVPTVEPKFATRELPSLSEMLLWDEVTFSERMQGSPLRRLKVHRFKRNICVVLGNVGTEQDLAALKLVAADADAMVAEHAEWAIAQIMYRVDCLR

SEQ ID NO: 78915 - protein, 365 aa, unidentified
  source 1..365: note = Opitutae bacterium
  REGION 1..365: note = tr|A0A2A2RE42|A0A2A2RE42_9BACT tRNA epoxyqueuosine(34) reductase QueG OS=Opitutae bacterium Tous-C8FEB OX=1982323 GN=B9S27_04930 PE=4 SV=1
MRRRLLALGFDEARFATIPGPLPDPLPAWLAAGHHAEMHWMERTAAKRLDPSLVLPGARSVVMLGVNYWAEPLRKSPAGAPRWARYALHEDYHDTLRPALAAAARLLEELFGATPSDTRYYVDTGPVLERSWAVRAGVGFTGKNAMLISRQHGNWLFLAALLTRVPLPADPPAAPAGDRPAVGTWCGKCTRCLDQCPTAAFTAPGVLDARRCVSYQTIENKGVIPRDLRPGIGDRVYGCDTCLEVCPWNRFAQAGRAVLLSARHDLAGLTLPALLDLTPETFAATFRKTAVKRLKLTGLLRNACVVAGNSGDRSLLPQLLRLARTHTSPLVRAHAVWAVRQLDATALPPTAPADETDPAVLAEYA

SEQ ID NO: 78916 - protein, 340 aa, unidentified
  source 1..340: note = Opitutales bacterium
  REGION 1..340: note = tr|A0A424KE99|A0A424KE99_9BACT tRNA epoxyqueuosine(34) reductase QueG OS=Opitutales bacterium TMED207 OX=1986795 GN=queG PE=4 SV=1
  VARIANT 100: note = Xaa can be any naturally occurring amino acid
  VARIANT 117: note = Xaa can be any naturally occurring amino acid
MNAAILKSLKKESEALGFHNFGVAKVPMELRRDYYNQWIKEGKHGTMAWMENNNERRLNPESLMPEAKSILVFAMNYYQKDPERNFRVAKYALGKDYHSXIYKRLKKICRFLKENYXSDQKPYVDTGPVLEKPIAEAAGLGWQGKSTILVEKKRGTWSFLGSIVTTLDLPASKGGKDYCGNCTRCIDCCPTQAITSPYKLDASKCISYLTIEHKGSIPHEYREAVGDRVFGCDECLDVCPWNKWAKITNETQFAVRSLPDLKTILAWGEEDFKSNLVASPIKRVKLNGLKRNVALVLGNIGSKDDLPALESLANSNDIVLQEQAEWSIKAIKSRECTSFS

SEQ ID NO: 78917 - protein, 405 aa, Opitutus sp.
  REGION 1..405: note = tr|A0A2T6D6B4|A0A2T6D6B4_9BACT tRNA epoxyqueuosine(34) reductase QueG OS=Opitutus sp. ER46; OX = 2161864 GN=queG PE=4 SV=1
MPDLVSAASRQARLRARLHELGFDAVRFAQLEAGPAPPVPGGLAEWLAAGMHADMHWMERSLDKRLDPGLVLSGARSMILLGVSYWHGQLATPTGGADAPRWARYALHEDYHDTMKPALVAAGRAIEALYGVEATDYRYYVDTGPVIERGWAARAGLGFVGKNAMLIAPRDHGNWLILAAILTRLDFVPDEPLRKPAARADAATETASARPPVGLLCGKCTRCLDACPTRAFAAPGVVDARRCVSYQTIENKGVIPRELRAGIGQRIYGCDLCLEVCPWNRFAREGRRLLLAARHDLAALTLEDLLALTPERFAEVFRRTPIKRLKLAGLLRNACVVAGNSGDRLLLPQLLNLAVAHPLPLVRAHAVWAVRQLGGGDALVAARAKETDPLVLAEYDACRPAPGGA

SEQ ID NO: 78918 - protein, 398 aa, Opitutus sp.
  REGION 1..398: note = tr|A0A1H1QKL9|A0A1H1QKL9_9BACT Epoxyqueuosine reductase OS=Opitutus sp. GAS368 OX=1882749; GN = SAMN05444173_2296 PE=4 SV=1
MTAGAGLQVGGAEREALREKLRALGFDEVRFAAAGAEAGAGLRDWLAAGMHGDMAWMERTAEKRAAANLVLPGVRSVILLGVNYWSDPPSPSPGAAARQAEDRPVWARYAQHEDYHDTMKSGLEAAGRVLEEMGGITAADYRYYVDTGPVLERGWAARSGLGFRGKNAMLISKKHGNWLFLASILTRLEIAPDEPLRKKPAADGAEPAGLLCGKCTRCLDACPTDAFPAPGVVDARRCISYQTIENKGIIPPELRAGIGTHVYGCDICLEVCPWNRFAQAGRHLLLAARHDLAELTLPELLELTPARFAEVFRRTAIKRLKLTGLLRNACVVAGNAGGANLLPALVKLAAHESAVVRAHAVWAVRKIAGARAEELLRSVRQAETDATVLSEYSCSGGL

SEQ ID NO: 78919 - protein, 408 aa, Opitutus terrae
  REGION 1..408: note = tr|B1ZZW0|B1ZZW0_OPITP Uncharacterized protein; OS = Opitutus terrae (strain DSM 11246 / JCM 15787 / PB90-1); OX = 452637 GN=Oter_4019 PE=4 SV=1
MTDPRQEELRRRLLALGFDEVRFASATEPVRAEPLRAWIAAGMQAEMAWMERTVEKRADPQLVLPGARSIVLLGVNYARGDIVRAGRPRWARYALHEDYHDTLKPGLVAAGRALEELYGVANTDYRYYTDTGPVLERSWAARAGIGFVGKNAMLISREHGNWLLLAAIFTRVEFTPDLPLQKTVAAGESRPEQGRTGASVGDEVGLLCGKCTRCLDACPTNAFARPGVVDARRCISYQTIENKGVIPRELRRGIGDRIYGCDVCLEVCPWNRFAQAGRAVLLVARQELADLTLAELLALTPERFAEVFRRTPIKRVKFTGLLRNACVVAGNSGDGSLLPALVRLAAHASPLVRAHAVWAVFRLAGVARAAELLRDQRAVENDPMVLAEYAAEEHDASAKASDGRAGYP

SEQ ID NO: 78920 - protein, 253 aa, Orenia marismortui
  REGION 1..253: note = tr|A0A4R8GSA8|A0A4R8GSA8_9FIRM Epoxyqueuosine reductase QueG OS=Orenia marismortui OX=46469; GN = C7959_1421 PE=4 SV=1
MKQKIKKLIKEYVKDYPADKEVETKWREPIIKFADANDQGFIKLKEIISPTHALPQDFLADAQSVIAYFIPFDQAVVNSNIEGRYSSKAWAKAYIESNNLISKLNKYIKQKLDSLNYKSTIIPATHNFDQESLISDWSHRHVAYLTGLGKFGLNNMLITAKGCCGRVGSIVTNLKIEPNKINDKEYCLYYSSGVCKKCVQRCVNDALKVDSFDRHKCYEILLANDKLHADLGLTDVCGKCCVNLPCSFGDPVS

SEQ ID NO: 78921 - protein, 376 aa, Orenia marismortui
  REGION 1..376: note = tr|A0A4R8HGE3|A0A4R8HGE3_9FIRM Epoxyqueuosine reductase OS=Orenia marismortui OX=46469 GN=C7959_101204; PE = 4 SV=1
MNITEKIKSYAKSIGIDDMKITDAESFPELKEFLIELKEKEYLSTFVNDDLEKISDPKKVLAEASSVIVCAISYSVDDRYISESRNKAKEELRGSLSRFAWGQDYHHVLGNRLDELVKFIKSKKQEVEVFKFVDTGPTVDRALARRAGIGWQGKNCSIINPKYGSWIFLGGIITDLDLEYDSAIENKCGDCRRCIDACPTGALVDAYTLDSRKCLGYITLSKGYLDEEQRKKMGNRLWGCDSCQSVCPHNQRAKVGEHQEFRPQNLDAYPELVPLLTLTNKEYKEKFMITPMNWRGKRPIQRNVAIILGNLKDNRAVPYLLEALVDPKPIVRANVAWALGEIGDKAALDKLEKTLAKEKEDNVIEELKKAIVKLKN

SEQ ID NO: 78922 - protein, 384 aa, unidentified
  source 1..384: note = Orenia metallireducens
  REGION 1..384: note = tr|A0A1C0A5U9|A0A1C0A5U9_9FIRM tRNA epoxyqueuosine(34) reductase QueG OS=Orenia metallireducens OX=1413210 GN=U472_14330 PE=4 SV=1
MTLTTKLKDYAKSIGIDAIKITNAGSFPELKEFLIKMREKEYLSTFVHDDLEKITEPQRVLSEAKSVIVCAISYSIDDKYIAESRRKVKEELRGALSRFAWGQDYHQVLGDKLDKLIDFIKGKRKDVELFKFVDTGPSVDRALARRAGIGWQGKNCSIINPEYGSWIFLGGIITDLELEYDSPIEDKCDDCRRCINACPTGALVAPYTLDSRKCLGYITLSKGYLDEEQRKKMGNRLWGCDTCQSACPQNQDVKVGDHKEFRPQTLEAYPELIPLLTLSNKEYKDKFMITPMNWRGKRPIQRNAAIILGNLKDKRAVPYLLEALVDPKPIVRANVAWALGEIGDKGVLDRLEKELLKEKDEQVIGELERAIEKLGISCQELETS

SEQ ID NO: 78923 - protein, 386 aa, unidentified
  source 1..386: note = Orenia metallireducens
  REGION 1..386: note = tr|A0A285FX24|A0A285FX24_9FIRM Epoxyqueuosine reductase OS=Orenia metallireducens OX=1413210; GN = SAMN06265827_103114 PE=4 SV=1
MIITLTTEIKSYAKSIGIDDIKITNAESFPELKEFLIEMREKEYLSTLVHDDLEKISNPKEIVLEAKSVIVCAISYSVDDKYIFESRIRAKEELRGSLSRFAWGQDYHRVLGDRLDKLIEFIKTKKQRIEAFKFVDTGPTVDRALARRAGIGWQGKNCSIINPEYGSWIFLGGVITDLELEYDSPIEDKCGDCRRCIDACPTGALVDAYTLDSRKCLGYITLSKGYLDEKQRKKMGTRLWGCDTCQSVCPQNQGAKLGDHEEFSPQTLEAYPDLISLLTLSNKEYKDKFMITPMNWRGKRPIQRNAAIILGNLKDRRAVPYLLDALSDPKPIVRANVAWALGEIGDESALDRLEKALLKEKDKQVIEELEKATERLGIVGQESENS

SEQ ID NO: 78924 - protein, 385 aa, unidentified
  source 1..385: note = Oricola cellulosilytica
  REGION 1..385: note = tr|A0A4R0PG94|A0A4R0PG94_9RHIZ Epoxyqueuosine reductase OS=Oricola cellulosilytica OX=1429082 GN=queG; PE = 3 SV=1
MNGTKAKEALLADLRSEGFSGASVTAPGAIPQVPARLRAFLDAGRHGTMDWMPETEARRGDPRMLWPEARSVVMAAFNYAPEPGNDPLAAVGHKDRATISVYAQNRDYHEIVKGKLKQAAGRFAARTGAQVKVFVDTAPLMEKPLAEAAGLGWQGKHTNLVSRRLGSWFFLGSIFTDLELPADAPERDHCGSCRACLDTCPTDAFPAPYQLDARRCISYLTIEHKGSIPHEFRTAMGNRIYGCDDCLAVCPWNKFAHEAREAKLRARDDLKSPSLESLLQLDDASFRTYFSGSPIKRIGRNRFLRNVLIAAGNSGDTALVAEVRRLLSDADPIVRGAAVWAYGRLAGPESLQAARDRHLQNECDEGVRAEWHGTGTGKESEVTHV

SEQ ID NO: 78925 - protein, 388 aa, unidentified
  source 1..388: note = Oricola sp.
  REGION 1..388: note = tr|A0A3M8H412|A0A3M8H412_9RHIZ Epoxyqueuosine reductase OS=Oricola sp. OX=1979950 GN=queG PE=3 SV=1
MPTALSHRLTDPKKARAFIVRDLQSLGFDAIGVAPAGRIDRAAKGLDRFLDAGRHGTMGWMADTRDRRADPTTLWPDARSIVMAAMSYGPGDAYDPLAALERTDRATISCYAHNRDYHDVIKGKLKQAAGRFAARTGADVKVFVDTAPVMEKPLAERAGLGWQGKHTNLVSRNLGSWFFLGAIFTDMALPADEAETDHCGSCRACLDICPTDAFPAPYQLDARRCISYLTIEHKGPVPHPFRKAIGNRIYGCDDCLAVCPWNKFASAAREAKLQSRDDMRTPPLDELLILDDAAFRARFAGSPVKRIGRARFVRNCLIAAGNSGQPTLISHVIALLDDAEPIVRGGAVWALAQLAPGRIAHEAAARLSGEADRDVADEWIHAGATDGD

SEQ ID NO: 78926 - protein, 380 aa, unidentified
  source 1..380: note = Ornatilinea apprima
  REGION 1..380: note = tr|A0A0P6XDX8|A0A0P6XDX8_9CHLR Uncharacterized protein OS=Ornatilinea apprima OX=1134406 GN=ADN00_08200; PE = 4 SV=1
MTMDAKEMLKAEARRLGFSHLGITALDPTPHASAYLGWLEQGWHASMAYLSAPRAVEHRLNPQQVFPPARSLIVVTAAYPPPSTPNQAESQPGYGLVAAYARGVDYHTLLPPQLRRLVQWIQNEIDPRAQAAVYTDTGPILERDYASRAGLGWIGKNTCLINPQAGSYLLLAEIFLSTLLEPDEPFEKDLCGTCRRCIEACPTGCISEARLLDSRRCISYLTIENKGEIPIELRPLIGSHVFGCDICQQVCPWNQKIKTAPKTPLFQSDPALSELELAATLRLSPQEFNRRYRQTPLQRAKRRGLLRNAAVVAGNQRAEAALPVLINLLEEEFEPLVRAHAAWALGQFNNRAGRVALEKALKTESDPTILAEIRSALDSH

SEQ ID NO: 78927 - protein, 382 aa, unidentified
  source 1..382: note = Ornithinibacillus halophilus
  REGION 1..382: note = tr|A0A1M5HWC6|A0A1M5HWC6_9BACI Epoxyqueuosine reductase OS=Ornithinibacillus halophilus OX=930117; GN = queG PE=3 SV=1
MKIEDLKQEIIEYSKEIGIDKIGFASADVFSELKERLRRQQELGYQSGFEKGSIEERTEPKRLLPQAQSIISIAIAYPSRMKDAPKGTKENRRGIFCRASWGVDYHHVLKERLEKLEAFIKDKVAEASTKIMVDTGELSDRAVAERAGIGFSGKNASIITPEFGSFVYLGEMITNIPFIPDSPVEDSCGDCRKCLDACPTTALVDGGQLNAQRCIAFLTQTKDFLPEEFRSKIGNRVYGCDTCQQVCPKNKGIDFHIHPEFEPEPEVAKPKLKPMLRMSNREFKETFGHISGFWRGKKPLQRNAIIGLGHFKDKTAVEELIAVLQHDPRPVIRGTAAWSLGKIGTEEAIDAIKEAMEKEKDEQVLYEMEKGLAFQESTSTLN

SEQ ID NO: 78928 - protein, 382 aa, Ornithinibacillus sp.
  REGION 1..382: note = tr|A0A3C1HZH0|A0A3C1HZH0_9BACI Epoxyqueuosine reductase OS=Ornithinibacillus sp. OX=1898027 GN=queG PE=3; SV = 1
MNTNQLKEEIIAYSKEIGIDKIGFTTADVFSELKERLIRQQELGYQSGFEKGTNEERTEPRRLLPEAKSIISIAVAYPSRMRKDAPKSTKEERRGFFCRASWGTDYHHVLRERLKKIESFIHERIDNAITKIMVDTGELSDKAVAERAGVGFVGKNTLLITEEFGSFVYLGEIMTNIPFVPDTPAEDGCGDCRICIDACPTGAIVQGGQLNAQRCIAFLTQTKDFLPDEFRSKIGNRVYGCDTCQLVCPKNKKIDFHLHSEFEPEDDIAKPKLKPMLTITNREFKETFGHIAGSWRGKKPIQRNAIIGLGHYRDTTAVQDLIQVMKNDPRPVIRGTAAWSLGKIGTEEAFIAIENAMELEKDKDVLYEMEKGLAFREVQHSR

SEQ ID NO: 78929 - protein, 323 aa, unidentified
  source 1..323: note = Oryzisolibacter propanilivorax
  REGION 1..323: note = tr|A0A1G9RAZ8|A0A1G9RAZ8_9BURK Epoxyqueuosine reductase OS=Oryzisolibacter propanilivorax OX=1527607; GN = SAMN05428957_103103 PE=4 SV=1
MQWLAQGFHGEMHYMAAHGTKRARPAELVPGTVSVITARMDYLPRDTPPGWQAVEWQRLQRPGEAIVSVYARGRDYHKVLRARLQKLSERIAEAVGPFGHRVFTDSAPVLEAELASRSGQGWRGKHTLVLSREAGSMFFLGEIYVDMPLEVTEPVTAHCGSCQACIDICPTQAIIAPHRIDARRCISYLTIEHGGPIPLELRPLLGNRIYGCDDCQLVCPWNKYAQASSLPDFDPRRGLVGAQLVELFAWDEATFLRMTEGGPIRRIGHERWLRNIAVALGNALRGAREAGEVQALRAALATRAGDASALVREHVAWALAQEI

SEQ ID NO: 78930 - protein, 396 aa, unidentified
  source 1..396: note = Oryzomicrobium terrae
  REGION 1..396: note = tr|A0A5C1E7K5|A0A5C1E7K5_9RHOO Epoxyqueuosine reductase OS=Oryzomicrobium terrae OX=1735038 GN=fdx PE=3; SV = 1
MDDRDAPSSPDGVGAPTAVAGGAAPDHPRTPDALAGLPGQIRGWAGELGFASAHIGRARISPAAQAKLTAWLAAGCHGEMDYMARHADLRAAPDTLVPGALSVISVRLPYWPEGEGRPVLPAEQALTSPHLAYVSRYALGRDYHKVVRNRLQKLADRIAAAVGPHGYRVFSDSAPVMEVELASKNGLGWRGKHTLLLTRQGSYHFLGEILTDLPLPIDPPPDNNEGDDPDSPAGHGGHCGDCQRCLPACPTGAITAPYQMDARRCISYLTIELHGAIPEDLRPLMGNRIYGCDDCQLACPWNRFAHPGDPDFAPRNGLDGSTLAQLFAWSAEDFEQRLAGSPIRRIGWERWLRNIAVALGNAPTSPEVIAALVSRRDHPAELVREHVTWALRRHGQ

SEQ ID NO: 78931 - protein, 315 aa, Oscillatoria acuminata
  REGION 1..315: note = tr|K9TIL4|K9TIL4_9CYAN Epoxyqueuosine reductase; OS = Oscillatoria acuminata PCC 6304 OX=56110 GN=queG PE=3; SV = 1
MNPTVTEIKAKAQELGFHQVGIAAIAPPDPAPVAALQQWLAQGYHAQMDWMTNPKRQDIRQVMPEVQSAICVALNYYTEHQHPQDPAYAKISRYGWGRDYHKILHKKLKTLTLWLQGHNPEVQARYYADTGPVSDKVLAQRAGIGWIAKNGNVISRQYGSWIFLGEVLTNLPLTPDSPHTSHCGTCTRCIQACPTGAIAQPFVVDANRCIAYHTIENRAETLPDSIQPHLSGWVAGCDICQEVCPWNQRFAQPTDVGEFQPYPENVSPTLAELADISEEEWDRRFRASALRRIKPEMWRRNARANLERIKRGGNH

SEQ ID NO: 78932 - protein, 321 aa, unidentified
  source 1..321: note = Oscillatoria nigroviridis
  REGION 1..321: note = tr|K9VJR4|K9VJR4_9CYAN Epoxyqueuosine reductase; OS = Oscillatoria nigro-viridis PCC 7112 OX=179408 GN=queG; PE = 3 SV=1
MKKSINSDRIKQKALELGFHKVGIASTDTDFDLEKQRLQAWLDKGYQADMAWMANPKRQDIRSLMPEVQSLICVAINYYTPHQRPENSLCEGGDDAAVEYAKISRYGWGRDYHRILHKKLKVLANWLRSQGEGIEARYYADTGPIQDKMWAQRAGIGWIAKNGNVISREYGSWVFLGEILTNLELASDAAHTEHCGTCTRCIEACPTGAITEPFVVNADRCIAYHTIENRAEKLPDKIASNLQGWVAGCDICQDVCPWNQRFAKATDVAEFEPYPENIAPTLAELADISDEEWNRRFTASALRRIKPEMLRRNAKANQIND

SEQ ID NO: 78933 - protein, 317 aa, unidentified
  source 1..317: note = [Oscillatoria] sp.
  REGION 1..317: note = tr|D8G6B2|D8G6B2_9CYAN Epoxyqueuosine reductase; OS = [Oscillatoria] sp. PCC 6506 OX=272129 GN=queG PE=3 SV=1
MKSPITSTQIKQKALELGFHKVGIAQADDAPYSEVERLQGWLKAGYQADMAWMANPKRQDIRLVMPEVQSLICIALNYYTPHQRPQGSEYAKISRYGWGRDYHKVMHKKLKVLTNWLRSQGEGIEARYYADTGPVQDKVWAERAGIGWIAKNGNVISREYGSWIFLGEVLTNLELMPDTPHAEHCGTCTRCIDACPTGAITQSFVVDANRCIAYHTIENRDEKLPDAITSHLQNWVAGCDICQDVCPWNQRFAKETDMVEFQPYPENIAPTLTELAEISDDEWNRRFTASALRRIKPEMWRRNARLNQERNKSELND

SEQ ID NO: 78934 - protein, 309 aa, unidentified
  source 1..309: note = Oscillatoriales cyanobacterium
  REGION 1..309: note = tr|A0A1J5G460|A0A1J5G460_9CYAN Epoxyqueuosine reductase OS=Oscillatoriales cyanobacterium CG2_30_40_61; OX = 1805291 GN=queG PE=3 SV=1
MNSPINTNLVKQKALDLGFHQVGIAAITETEENRQHLQSWLDQGYAADMAWMNSPKRQNIRQLMPEVVSVICVALNYYTPDQVPDYPEWGKISRYARGRDYHRVLHKKLKTFCEWLQQQAPGIQARYYADTGPIQDKVWAQKAGIGWIAKNSNLITTKYGSWVFLGEILTNLTLTPDPPHTQHCGTCTRCLEACPTGAITQPFVVDANRCIAYHTIENRAETLPENISKNLKGWVAGCDICQEVCPWNQRFSQETDIPEFQPYPENIAPKLTELAELSETEWDQRFRASALRRIKPQMWRRNARANLDY

SEQ ID NO: 78935 - protein, 306 aa, unidentified
  source 1..306: note = Oscillatoriales cyanobacterium
  REGION 1..306: note = tr|A0A1C0VB43|A0A1C0VB43_9CYAN Epoxyqueuosine reductase OS=Oscillatoriales cyanobacterium USR001; OX = 1880991 GN=queG PE=3 SV=1
MKVAITSFQVKQKALELGFHKVGIAQAKDITHQEVQNLRYWLDAGYQADMAWMANPKRQNIHLVMPEVNSLISVALNYYTPHQRPEGSNYAKISRYGWGRDYHKVMHKKLKLLTTWLQLQDEGIKARYYADTGPIQDKVLAQSAGIGWIAKNGNVISREFGSWIFLGEILTNLALESDRPHTEHCGTCTRCIDACPTQAITQPFVVDANRCIAYHTIENRAEKLPEEIASNLQGWVAGCDICQDVCPWNQRFAKETDIPDFQPYPENIAPTLNELAEISDDEWNRRFTASALRRIKPEMLRRNARG

SEQ ID NO: 78936 - protein, 292 aa, unidentified
  source 1..292: note = Osedax sp.
  REGION 1..292: note = tr|A0A1Y5GJ77|A0A1Y5GJ77_9BACT tRNA epoxyqueuosine(34) reductase QueG OS='Osedax' symbiont bacterium Rs2_46_30_T18 OX=1856298 GN=A9R01_16875 PE=4 SV=1
MDYQPPAKDSIKILKDKDKAYIARYTLGRDYHKTVRKRLTNLGKLIQDKCNSLGYRAFVDSAPIMERAIAEQAGLGWSGKHTLLINREAGSYFFLAELFIDLPLPTTEKKLKNHCGKCTACLDICPTKAFVGANILDARRCISYLTIESKEAIPVHLRPMLGNRIFGCDDCQLICPWNKFAKFSQEDDFKPRNNLDDISLLELFDWDETTFLKKTEGSAIRRTGFDGWQRNIAVALGNSHGGTAVELALAAKLDSCSPLVGEHIRWALQQLQHRAQTPEQDPQIVKILSAKA

SEQ ID NO: 78937 - protein, 367 aa, unidentified
  source 1..367: note = Osedax symbiont
  REGION 1..367: note = tr|S6GK62|S6GK62_9GAMM Epoxyqueuosine reductase; OS = Osedax symbiont Rs1 OX=1330036 GN=queG PE=3 SV=1
MIADQQPTPEQLNQLAGNIEQWAKELGFQQASIIIPDLTEELKLMQEWLTKGYHGDMQYLANNLDLRGDPLNIVPGSCRIISLRMNYQPPGTEAIKILRNKDKAYIARYTLGRDYHKTVRKRLVVLAKRIEQECHSLGYRAFVDSAPIMERAIAEQAGLGWSGKHTLIINRKAGSYFFLAELFIDLPLPTTANKVSNHCGKCTACLDICPTQAFVSSSVLDARRCISYLTIESKTAIPLELRPKIGNRIFGCDDCQLVCPWNKFAKFSEEDDFKPRHNLDDISLLELFDWDEPTFLKKTEGSAIRRTGFQGWQRNIAVALGNSYGGLIVEQALSQKLADSSPLVSEHIQWALENLASKKPQAAIKDE

SEQ ID NO: 78938 - protein, 370 aa, unidentified
  source 1..370: note = Osedax symbiont
  REGION 1..370: note = tr|S6GNZ9|S6GNZ9_9GAMM Epoxyqueuosine reductase; OS = Osedax symbiont Rs2 OX=1330035 GN=queG PE=3 SV=1
MNQSQLQEMADNIDLWAKQLGFQQSSILIPSLDSENALMQQWLDRGYHGQMQYLANNLDLRKDPLKLVPGSCRIISLRMDYQPPAKDSIKILKDRDKAYIARYTLGRDYHKTVRKRLTNLGKRIQEQCDNLGFRAFVDSAPIMERAIAEQAGLGWSGKHTLLINREAGSYFFLAELFIDLPLPTTEKKLKNHCGKCTACLDICPTKAFVDANILDARRCISYLTIESKDAIPLELRPMLGNRIFGCDDCQLICPWNRFAKFSPEDDFKPRHNLDDISLLELFNWDESAFLKKTEGSAIRRTGFDGWQRNIAVALGNSRGGVAVESALTIKLNNCSPLVAEHINWALLQLKNRALVPDQEANIVTILTAKA

SEQ ID NO: 78939 - protein, 349 aa, unidentified
  source 1..349: note = Ottowia oryzae
  REGION 1..349: note = tr|A0A2S0MJM6|A0A2S0MJM6_9BURK Epoxyqueuosine reductase OS=Ottowia oryzae OX=2109914 GN=queG PE=3 SV=1
MGAWARELGFSHVGVAGVDLSSAEAGLLAWLADGFHGSMDYMAAHGLKRARPAELVPGTVSVITARMDYLPRSTPPDWQALELDRLNRPTEGIVSVYARGRDYHKVLRNRLQKLQQRLADAIGPFGHRVFTDSAPVLEAELAARSGQGWRGKHTLVLNREGGSMFFLGEIYIDLALPPTEPVAPHCGRCQACIDVCPTGAIVAPHRIDARRCISYLTIEHDGSIDESLRPWLGNRIYGCDDCQLICPWNKYAQRSALPDFDPRPGLTGAELVNLMRWSEAEFLQRTEGSPIRRIGHVRWLRNVAVAIGNALAALPAEDDRRAALRDALRAHAEHPSAIVREHVDWALRR

SEQ ID NO: 78940 - protein, 349 aa, Ottowia sp.
  REGION 1..349: note = tr|A0A5C7V4Y7|A0A5C7V4Y7_9BURK Epoxyqueuosine reductase OS=Ottowia sp. OX=1898956 GN=queG PE=3 SV=1
MRGWARELGFSHLGVADIDLSAAEPGLLAWLHNGFHGRMDYMAAHGLRRARPAELVPGTVSVITARMDYLPRATPEDWQDVELARLGRPQEGVVSLYARGRDYHKVLRGRLQKLQDRIALAIGPFGHRVFTDSAPVLEVELASRSGQGWRGKHTLLLSREGGSMFFLGEIYVDLHLPRTAPTGAHCGQCSACIDACPTGAIVAPYRLDARRCISYLTIEHDGAIDEALRPLIGNRIYGCDDCQLVCPWNKYAGRSALPDFDPREGLGGAQLTDLLDWSEDEFLRRTEGSPIRRIGHERWLRNVAVALGNALAALPPGDARRAPLHAALRRRANHPSALVREHVRWALGR

SEQ ID NO: 78941 - protein, 351 aa, Ottowia sp.
  REGION 1..351: note = tr|A0A0K1NGM4|A0A0K1NGM4_9BURK Epoxyqueuosine reductase OS=Ottowia sp. oral taxon 894 OX=1658672 GN=queG; PE = 3 SV=1
MRAWAKELGFSQIGVAGVDLSSAEAGLSQWLAQGFHGSMDYMAAHGVKRARPAELVPGTVSVITARMDYLPRSTPQGWQRVEFERLQRPQEGVVSVYARGRDYHKVMRARLQKLQARMAAELGPFGHRVFTDSAPVLEAELAARSGQGWRGKHTLVLSRDAGSMFFLGEIYVDIALPPSEPVTHYCGTCTACMDACPTGAIIAPHRLDARRCISYLTIELHGAIPEDMRPLIGNRIYGCDDCQRVCPWNKYAHVSALPDFDEREGLTDAPLTALLAWSEEEFLRRTEGSPIRRIGHARWLRNVAVALGNALARLPADDPARAPLLAALAARREHPDEMVREHVAWAMEQKA

SEQ ID NO: 78942 - protein, 310 aa, Owenweeksia hongkongensis
  REGION 1..310: note = tr|G8R2B0|G8R2B0_OWEHD Epoxyqueuosine reductase; OS = Owenweeksia hongkongensis (strain DSM 17368 / CIP 108786 / JCM 12287 / NRRL B-23963 / UST20020801) OX=926562; GN = qu eG PE=3 SV=1
MTSKLKYSEMIKAEAKRLGFLDCGISKATFLEEEAPRLEEWLKRGYQGEMKWMENHIDKRLDPRKLVDGAKSVVSVILNYYPEETQKHPDAPKIAKYAYGEDYHFVIKRKLKELTEFIQTEIGEVSGRAFTDSAPVMDRAWAERSGLGWTGKHSLLLSKGTGSFYLIGELILDLDLEDDTPVADHCGSCTKCIDACPTNAIVAPKLVDGSKCISYLTIELKDQISPSFKDQMEGWAFGCDICQDVCPWNRFSKPTKVEEFSPHPEMLDMNKQDWQEITEDVFRKVFKKSAVKRAKYAGLKQNIDFLKPTY

SEQ ID NO: 78943 - protein, 310 aa, Owenweeksia sp.
  REGION 1..310: note = tr|A0A2D8SPG4|A0A2D8SPG4_9FLAO Epoxyqueuosine reductase OS=Owenweeksia sp. OX=2024847 GN=queG PE=3 SV=1
MSHPSRYSTLIKDEASRLGFMSCGISRADFLEKEAPRLEEWLKRDYHGDMKWMENHFDKRLDPRKLVEGARSVVSVLLNYYPENRQTEPGAPRIAKYAYGEDYHFVIKRKLKELMQFIQSEIGEVGGRAFVDSAPVMDRAWAERSGLGWTGKHTLLLTKGAGSFYFIGELILDVELEPDTPVADHCGECTRCIDACPTDAIVAPQLLDSKKCISYLTIELKDEIPDAFSGKMENWAFGCDICQDVCPWNRFSKPHKTPEFEPHQALLEMTKEEWMEITEEVFQSVFKRSAVKRTKYSGFKRNLSFLKAKD

SEQ ID NO: 78944 - protein, 304 aa, Owenweeksia sp.
  REGION 1..304: note = tr|A0A1Z8LDL4|A0A1Z8LDL4_9FLAO tRNA epoxyqueuosine(34) reductase QueG OS=Owenweeksia sp. TMED14 OX=1986609 GN=CBB74_01965 PE=4 SV=1
  VARIANT 264: note = Xaa can be any naturally occurring amino acid
MNAKSFLQKEAQRLGFLSCRVSDAVFLEEDAPRLEQWLNKGYHGSMSYMENHFDKRLDPRKLVPGARSVVSLAYNYFPQKEISSTDDSMPQIAKYAYGEDYHYVIKDKLFELLDSLSSSYGDIQGRCFVDSAPVMERSWAKKSGLGWVGKNSLLLRKSEGSFFFLAELIIDLALPSDNIEIDHCGTCTKCIDACPTGAIVQPEVIDSNRCISHMTIELHGSLPSDYKDSISPWVFGCDICQDVCPWNRHSKPHQEKRFTPGPWXDWNINDWKEITEETFGRIFKRSAIKRAGFAGLKRNLNSHI

SEQ ID NO: 78945 - protein, 380 aa, Oxalobacter formigenes
  REGION 1..380: note = tr|C3XBA2|C3XBA2_OXAFO Putative iron-sulfur cluster-binding protein (Fragment) OS=Oxalobacter formigenes OXCC13 OX=556269 GN=OFBG_01506 PE=3 SV=1
YQQSSHSRQQVLLILMKFEGQLTDFVVKIKSWARELGFSELRIADVDPGIAEIRLQKWLACHFHGEMNYMAGHGTKRSRPDELVPGTRRVIVARMNYLSSDALDWKDTEQARMSDVLAARVSMYARGRDYHRVIRSRLQKLADRMQEEIGSFGYRVFADSAPVMEVAFASKAGLGWQGKNNLLINRNAGSLFFIGEMLVDLPLPVDEAVTSHCGQCRRCIDACPTGAIIGDKLIDARKCISYLTIEFKGVIPIEFRPLMGNRIYGCDDCQLVCPWNKFAEKTHIDDFSVRHELDSATLCDLFAWTEKEFLNNTEGSPIRRIGYECWCRNIAIALGNALRSKLDDETGKQILNMLSEKRKHASEMVTEHIDWAMNQSNESD

SEQ ID NO: 78946 - protein, 361 aa, Oxalobacter sp.
  REGION 1..361: note = tr|A0A3A6NR98|A0A3A6NR98_9BURK Epoxyqueuosine reductase OS=Oxalobacter sp. OX=2093374 GN=queG PE=3 SV=1
MALADLTELTRSIKAWGRDLGFADIRIADVHLPDAEAGLQAWLAAGRHGEMAYMANHGMMRARPTELVPGAQCVIVARMDYLPLGAEKNWREQEQARLRDPMAATVSVYARGRDYHRVLRSRLQQLADRITEAVGKFTYRVFTDSAPVMEVALAAKSGLGWRGKHTLLLQRDAGSMFFLGEILVDLPLPPDATEGEHCGRCRACISICPTQAITAPYQLDARRCISYLTIEHPGSIPEALRPLMGNHIYGCDDCQLICPWNRFAKTAVVPDFDVRNGLDRGSLVDLFSWDQAAFEQGLEGSPIRRIGHERWLRNIAVALGNALRELKRKGGDVSQIVTALQARADHPSALVREHVQWALVQ

SEQ ID NO: 78947 - protein, 302 aa, unidentified
  source 1..302: note = Oxalobacteraceae bacterium
  REGION 1..302: note = tr|A0A4Q3JCS2|A0A4Q3JCS2_9BURK tRNA epoxyqueuosine(34) reductase QueG (Fragment); OS = Oxalobacteraceae bacterium OX=1871070 GN=queG PE=4 SV=1
MSDSPTSSVDLPQLARAIKGWGVGLGFADVRIADVDLGHLEAGLQAWLDAGYHGEMDYMATHGMKRARPAELVPGTVRAIVVRMDYLPTERQGDWRAGERLRQADPNAAVVSVYARGRDYHKVLRNRLQALAEKIQQEIGPFGFRVFTDSAPVMELPLAEKAGLGWRGKHTLLLSRAAGSTFFIGEILIDLPLPVDPPTGKHCGGCTACIDMCPTGAILGPGKLDARRCISYLTIELKSSIPEELRPLIGNRIYGCDDCQVACPWNKFAQRAQVPDFDERNGLGEGDLVGLFAWEEAEFNRR

SEQ ID NO: 78948 - protein, 360 aa, unidentified
  source 1..360: note = Oxalobacteraceae bacterium
  REGION 1..360: note = tr|A0A4Q2J1H9|A0A4Q2J1H9_9BURK Epoxyqueuosine reductase OS=Oxalobacteraceae bacterium CAVE-383; OX = 2478672 GN=queG PE=3 SV=1
MAALAADIKAWGRELGFADIRITDVDLSHREAGFADWLAKGYHGEMDYMAAHGMKRARPAELVPGAVSVITARMPYLPQASGDDWRERETDRLQDAEAAVVSVYARGRDYHKVIRNRLQQLASRIEGRTGAFGYRVFTDSAPVMEVALAEKAGLGWRGKHTLLLNREAGSMFFLGEILTDLPLPKDEPASAHCGQCSACIDVCPTQAIVGPYELDARRCISYLTIELKGSIPLEFRPLIGNRVYGCDDCQVCCPWNKFAQPSTLDDFDERHGLGDAALVELFAWSAEEFDKKMEGSAIRRIGHERWLRNIAVGLGNAAAAGKKGAPAIIAALRARLDDASPIVREHVRWALEQHGAASLS

SEQ ID NO: 78949 - protein, 304 aa, Oxobacter pfennigii
  REGION 1..304: note = tr|A0A0P8WTN9|A0A0P8WTN9_9CLOT Epoxyqueuosine reductase OS=Oxobacter pfennigii OX=36849 GN=queG_1 PE=4; SV = 1
MIEDSLYSEIEAAGFKIKVFKAEHLKEISRDFKTFAEQGLIDKSFYRNNLADFNYDYISILPDAKSVMVIASPQGKSLAEFQFKGKSFDMVVPPTYIYPTIDNRVTGILNRVFAENGHDFVRVRLPFKLLAVRSGLGQYGRNNICYVSEFGSFFRLSAFVTDYEFEEDSWGEVKAIKSCSSCSLCIDNCPTGAIDKSRFVIRAHHCLTNFNESDEPIPEWVNADWHNAVVGCMRCQDVCPHNKDRINLVEDRICFSEKETEMILDGKDFESLPEEMRNKISFMGMESYLHILPRNIRLIKGLIK

SEQ ID NO: 78950 - protein, 235 aa, Oxobacter pfennigii
  REGION 1..235: note = tr|A0A0N8NSJ6|A0A0N8NSJ6_9CLOT Epoxyqueuosine reductase OS=Oxobacter pfennigii OX=36849 GN=queG_6 PE=4; SV = 1
MASNAEILKEKIIEWGASKVAFANAGDYLPAYFKNLKYAVSIAVRLSDAIIDEIKDAPTHTYFHHYKAVNALIDNITLRASLLIQDWGYLAAAIPASQTVKTSEDLYTGIFQHKTAANLSGLGWIGKSGLLITPEYGPRVRLGTILTDMELPGTEDIHNTDCKGCNICKIACPAMAITGKNWYKGVQRSEIIDAEACSKYMNTNFKHIGRGSVCGICMNVCPHGKNINKRKMERV

SEQ ID NO: 78951 - protein, 343 aa, unidentified
  source 1..343: note = Pacificibacter marinus
  REGION 1..343: note = tr|A0A1Y5THY2|A0A1Y5THY2_9RHOB Epoxyqueuosine reductase OS=Pacificibacter marinus OX=658057 GN=queG PE=3; SV = 1
MAEIDKETLRQHALAEGFSQVGFARPELPEAMERLQQFVDLERHGQMAWMADRMAWRGDPSALWPEAKSVIMLAEAYTPDDDPMAAIARTDTGAISVYARNRDYHDIVKKRLKRVGRWLIDQAGPDTQIKVFVDTAPVMEKPLGAKAGLGWQGKHTNLVGRDLGSWFFLGAIFTTHNFDPDPAEHDHCGSCTACLSACPTDAFPAPYQIDARRCISYLTIEHHGPVDAELRPLLGNRIYGCDDCLAACPWNKFAVDAADIRYHARADLVSPPLSELVALDDAAFRLRFSGSPIKRIGRNRFVRNVLYAIGNSHQPELRESILPLLSDPDGTVADAAAWALAQF

SEQ ID NO: 78952 - protein, 345 aa, Pacificibacter maritimus
  REGION 1..345: note = tr|A0A3N4U8T2|A0A3N4U8T2_9RHOB Epoxyqueuosine reductase OS=Pacificibacter maritimus OX=762213; GN = EDD53_2526 PE=4 SV=1
MDGLTKEAVRAQAIAEGFTMVGFTRPDIPEAMERLQKFVDLERHGQMAWMQDRMAWRGDPSALWSEANSVIMLAESYTPDDDPMAAIERTEAGAISVYARNRDYHDIVKKRLKRVGRWLIDVAGPDTQIKVFVDTAPVMEKPLGAKAGLGWQGKHTNLVGRELGSWFFLGAIFTTHTFEPDQEETDHCGSCTACLTACPTDAFPAPYQIDARKCISYLTIEHHGPVDPVMRPKLGNRIYGCDDCLAVCPWNKFAVEAADIRYRARADLVAPPLADLVVLDDRGFREKFSGSPIKRIGRDRFVRNVLYAIGNSNAPHFIDVIRPLLSDVDETVRDAANWAMTQLSK

SEQ ID NO: 78953 - protein, 353 aa, unidentified
  source 1..353: note = Pacificimonas flava
  REGION 1..353: note = tr|M2U238|M2U238_9SPHN Epoxyqueuosine reductase; OS = Pacificimonas flava OX=1234595 GN=queG PE=3 SV=1
MPLPDNKLLPALRQEAAEAGFAAFGIARWDAVPEAGARLDRWLKAGMHGDMLWMTEKADRRRAPRALWPAVNSVVALGMSYAPALDPLRHANSPEIGALSVYAHGADYHDVVKKALKRVARWMVAAATDAEVKVFVDTAPVMEKPLAAAAGLGWQGKHTNLVSTEQGSWLFLGCIYTTLALQPDAAHGDRCGSCRRCQDACPTAAFPEPYRLDARRCISYLTIEHDGPIPEEFRRAIGNRIYGCDDCLSVCPWNKFAEASRDMRFGPRAPLVRPRLTDLAQLSDSDFRTLFSGSPVKRVGRGRFVRNVCIALGNSGDPDARRVLMPLLQDESEQVRDAAGWALAELDRSGASA

SEQ ID NO: 78954 - protein, 351 aa, unidentified
  source 1..351: note = Pacificimonas flava
  REGION 1..351: note = tr|A0A219B2N9|A0A219B2N9_9SPHN Epoxyqueuosine reductase OS=Pacificimonas flava OX=1234595 GN=queG PE=3; SV = 1
MGDNKLLHDLRQQAEAAGFASLGICRADATPRAGPRLDRWLAEGMHGDMAWMVEKADRRRSPQDLWPDCRSVVILGMSYAPPVDPLRHHAQRGTGAVSVYAHGADYHNIVKKALKRVARWIVAERPDAEVKVFVDTAPVMEKPLAEAAGIGWQGKHTNLVSTSEGSWLFLGAIYTTLELPPDEPHGDRCGSCRRCQEACPTAAFPEPYRLDARRCLSYLTIEHSGPIPEEFRRAMGNRIYGCDDCLAVCPWNKFAETSRDLRFHPRRGLDDPDLADLARLDDDAFRELFSGSPVKRVGRERFVRNVAIALGNSGDPAARAALAPLVEDGSEVVREAAQWALAELDRQAAAA

SEQ ID NO: 78955 - protein, 418 aa, unidentified
  source 1..418: note = Paenibacillaceae bacterium
  REGION 1..418: note = tr|A0A3E0JLL7|A0A3E0JLL7_9BACL Epoxyqueuosine reductase OS=Paenibacillaceae bacterium OX=2003592 GN=queG; PE = 3 SV=1
MTERPAAFYAELKAEMKAAARSLGIDKIGVASAEPFTELRRTLERHRALGRESGFEEPDLDKRTNPALLMEEPQSIIAIAVAYPSKLRDAPKSEPGARRGILSRSAWGRDYHEVLRDRLARLEAWLRERAPELRALSMTDTGALVDRAVAERAGIGWSGKNCSIITPEFGSWVYLGEMITNLPLPPDAPVTEMCGECTKCIDACPTGALVGPGELNAQACVSYLTQTKGYLSDGQMRKIGNRLYGCDTCQIVCPVNRGKDWTHHEELQPDPDTVKPLLVPLLSMSNREFKERFGASAAAWRGKKPIQRNAVIALGHFREASAVPDLIRVLTDDPRPVLRGTAAWALGRIGGSEAERALRQALDREADPETSARIKAALEALENPEPRDAAGGRADDRRHGGADSGVPIYEEGAAKPGV

SEQ ID NO: 78956 - protein, 401 aa, unidentified
  source 1..401: note = Paenibacillaceae bacterium
  REGION 1..401: note = tr|A0A1H1X3A4|A0A1H1X3A4_9BACL Epoxyqueuosine reductase OS=Paenibacillaceae bacterium GAS479 OX=1882832; GN = SAMN05444162_2894 PE=4 SV=1
MAEPIRDAAFWSWLKAEMKEAAFGLGIDDIGVASAEPFTELKGRLIRHREQGFESGFEERDLDKRTDPSLLFEQPQSIIAISVAYPSKLPDPPRSEPGARRGILSRSAWGEDYHSVLRNRLQRLEEWLQARVPELRAESMVDTGELSDRAVAERAGIGWSGKNSFIMNRKHGTFIYLAEMITNLPLQPDSPLLDNCGSCTKCIDSCPTGALVGPGQLNAARCISYVTQTKEMVSEELMRKIGNRLYGCDTCQIVCPVNKGINVTRHPEFRADPEQVKPLLVPLLQLSNREFKERFGTNAASWRGKKPIQRNAVIALGNFREAAAVPELVQVLQEDPRPVLRGTAAWALGRIGGAEAEAALAQAAEQESDSEARSWAERSLAALRAERAAEAVAEPAAAGEE

SEQ ID NO: 78957 - protein, 383 aa, Paenibacillus agaridevorans
  REGION 1..383: note = tr|A0A2R5F2R5|A0A2R5F2R5_9BACL Epoxyqueuosine reductase OS=Paenibacillus agaridevorans OX=171404 GN=queG; PE = 3 SV=1
MTDEWQALKDEMKEAAQSLGIDAIGVASSDPFVTLKQRLIRHRELGYESGFEEQDIEKRTNPSLIFDRPQSIIAIAVAYPSKLIDPPKSEPGARRGIMSRSAWGEDYHKILRDRLARLEQWLRERVPNVRVESMVDTGELSDRAVAERAGLGWSAKNCSIISPELGSWIYLGEMITNLPLPPDEPVTEGCGSCTKCIDACPTGAIVAPGQLNAQRCISYVTQTKGMVTDEFMRKIGNRLYGCDTCQIVCPVNRGKNWTNQPELQPDNELAKPLLIPLLTMGNKEFKERYGHTSSAWRGRKPIQRNAVIALGNFKEASAVPDLIRVLHDDPRPVLRGTAAWSLGRIGGEAAAKALEQASMRERDEEAIASIEAAIGAIRERERA

SEQ ID NO: 78958 - protein, 388 aa, Paenibacillus algorifonticola
  REGION 1..388: note = tr|A0A1I2FB87|A0A1I2FB87_9BACL Epoxyqueuosine reductase OS=Paenibacillus algorifonticola OX=684063; GN = SAMN04487969_111138 PE=4 SV=1
MEERAYYAALKKEMKAAARSLGIDKIGIASADPFITLKQRLISHRELGYESGFEEPDLDKRTNPALLFDKPQSIIAIAIAYPSKLQQPPKSEPGARRGILSRSAWGEDYHKVLRNRLGRLESWLSERVPGFRAESMVDTGALSDRAVAERAGLGWSAKNCSILSEDLGSWIYLGEMITNLPFEPDELVTDGCGECTKCIDACPTDALVGPGQLNSSRCISFITQTKGFVEDGYMRKIGNRLYGCDTCQTVCPVNRGKNWTHQPELQPDHELVKPLLTPLLTIGNKEFQRLYASSSSAWRGKKPIQRNAVIALGNFKDRGAVPDLIQVLRQDVRPVMRGTAAWSLGRIGGAEAEKAIRQALLQEADDDARRYMEQALLSIADGADTVPR

SEQ ID NO: 78959 - protein, 584 aa, Paenibacillus alvei
  REGION 1..584: note = tr|A0A383RLG0|A0A383RLG0_PAEAL Methylated-DNA--protein-cysteine methyltransferase; OS = Paenibacillus alvei OX=44250 GN=PBLR_15931 PE=3 SV=1
MLDSKKPHGQQNHEERAKPGQGASKERWRKLKQEIIEAAPALGIDQVGFTTADPFIELKARLQHSIDQGYASGFEEPDLDKRTRPELLLEDARSIIAIAVAYPSKLEESPKSKAGSYRGMFARTAWGLDYHHVLRDRLAKLEAFLRERVPEQELRVRSMVDTGELSDRAVAERAGIGFSGKNCSIISPQWGSWIYLGEMITNIPFPSDEPVTEDCGECTRCLDACPTSALVGPGQLNANLCISFQTQSKDILSHEMMTKMGNRLYGCDTCQIVCPKNKGMNWTHQPEMQPDPEKAKPLLVPMLQLSNREFKEQFGSLSAAWRGKKPIQRNAIVALGNFRDRSAVGELRTLLREDTRYDIRATAAWALGQIGGTDAKQALLSAMNREKEDAVVQAIDDALQQFDNHVEPIYVQEMESPLGMLTVASSATGLCSIEFGSVLDTSARLNAWAQRTYGRAALQRHPERLQEAIRQLEEYFRGERQSFDLTLDFQGTPFQREVWRALMDIPYGETRSYKQIAEAIGRPQAVRAVGGANNRNPIPVIAPCHRVIGADGRLVGYGGGMDKKVTLLKLEGMQANEDRMLTAP

SEQ ID NO: 78960 - protein, 584 aa, Paenibacillus alvei
  REGION 1..584: note = tr|S9SHV7|S9SHV7_PAEAL Methylated-DNA--protein-cysteine methyltransferase; OS = Paenibacillus alvei TS-15 OX=1117108 GN=PAALTS15_19618; PE = 3 SV=1
MLDSKKPHGQQNHEERAMPDQGASKERWRKLKQDIIEAAPALGIDQVGFTTADPFIELKARLQHSIDQGYASGFEEPDLDKRTRPELLLEDARSIIAIAVAYPSKLEESPKSKAGSYRGMFARTAWGLDYHHVLRDRLAKLEAFLRERVPEQELRVRSMVDTGELSDRAVAERAGIGFSGKNCSIISPQWGSWIYLGEMITNIPFPSDEPVTEDCGECTRCLDACPTSALVGPGQLNANLCISFQTQSKDILSHEMMTKMGNRLYGCDTCQIVCPKNKGMNWTHQPEMQPDPEKAKPLLVPMLQLSNREFKEQFGSLSAAWRGKKPIQRNAIVALGNFRDRSAVGELRTLLREDTRYDIRATAAWALGQIGGTDAKQALLSALNREKEDAVVRAIDDALQQFDNHVEPIYVQEMESPLGMLTVASSATGLCSIEFGSVLDTSARLNAWAQRTYGRAALQRHPERLQEAIRQLEEYFRGERQSFDLTLDFQGTPFQREVWRALMDIPYGETRSYKQIAEAIGRPQAVRAVGGANNRNPIPVIAPCHRVIGADGRLVGYGGGMDKKVTLLKLEGMQANEDRMLTAP

SEQ ID NO: 78961 - protein, 627 aa, Paenibacillus amylolyticus
  REGION 1..627: note = tr|A0A100VSJ2|A0A100VSJ2_PAEAM Methylated-DNA--protein-cysteine methyltransferase; OS = Paenibacillus amylolyticus OX=1451 GN=PAHA3_5389 PE=3; SV = 1
MTSVQTGAAHAASVWEKLKQEIKAAGPGLGIDDIGFASAEPFVTLKSILEQHRAKGYESGFEEPDLEKRVRPELKDGEPASLIAIAVAYPSKMVNPPKSEPGAYRGIFARSAWGQDYHQVLRTAMDKLVNFIKERVPEAMIESMVDTGALVDRAVSQRAGIGFSAKNCAIISPKFGSWIFLGELVTNIPFQPDTPVTEDCGECTKCIDACPTGALVGPGQLNSQRCISFVTQTKGFVDEEFMLKIGNRLYGCDTCQIVCPKNRGKNWDHHPEFHPDPEIVKPLLLPLLDIGNREFKERFGQSSAAWRGKKPIQRNAVIALGNFKDKSAVPKLTEVLKRDPRPELRGTAAWALSRIGGEDAMRAIGEAAANEQDGNVLSMLQKAEERLSSSETLPKQPQAGQVNEKQPEEQKNNEHNSLQALQQDLKMEAANEPGNEQSGQSVKPEAAAWKPSAVTGLHGKPVYYDEVLTPIGTLTLCATDEGLCHIDFGAFHVREAHLQQWARTWIGEYRYEKNEEKLSEAAKQLQQYFAGERKTFDLQLDRLGTPFQLQVWQVLSDISYGEASSHQQVAEIIGRPKAVRAVLDAISKNPIPIIIPCHRISGKDGTLVGYVGGLQTKEQLLALEQQS

SEQ ID NO: 78962 - protein, 626 aa, Paenibacillus amylolyticus
  REGION 1..626: note = tr|A0A4R5Z673|A0A4R5Z673_PAEAM tRNA epoxyqueuosine(34) reductase QueG OS=Paenibacillus amylolyticus OX=1451 GN=queG PE=4 SV=1
MTSVQTGAAQDASVWEKLKQEIKAAGPGLGIDDIGFASADPFVSLKSLLEQSRDKGYASGFEEPDIEKRVHPALKDGEPASLIAIAVAYPSKMVNPPKSEPGAYRGIFARSAWGQDYHQVLRAAMDKLVNFIRERVPEAMIESMVDTGALVDRAVSQRAGIGFSAKNCAIISPKFGSWIFLGELVTNIPFQPDTPVTEDCGECTKCIDACPTGALVGPGQLNSQRCISFVTQTKGFVDEEFMLKIGNRLYGCDTCQIVCPKNRGKNWDHHPEFHPDPEIVKPLLLPLLDIGNREFKERFGQSSAAWRGKKPIQRNAVIALGNFKDKSAVPKLTEVLKRDPRPELRGTAAWALSRIGGEDAMRAIGEAAANEQDGNVLSMLQKAEERLSSSETLPKQPQAGQVSEKQQEERNNENNALRALQQDLKMEAGIEPGSEQSAQPAKPEAAAWKPSAVTGLHGKPVYYDEILTPIGTLTLCATDEGLCHIDFGAFHVREAHLQQWARTWIGEYRYEKNEEKLSEAAKQLKQYFAGERKTFDLQLDRLGTPFQLQVWQVLSDISYGEASSHQQVAEIIGRPKAVRAVLDAISKNPIPIIIPCHRISGRDGTLVGYVGGLQTKEQLLTLEQRS

SEQ ID NO: 78963 - protein, 383 aa, Paenibacillus anaericanus
  REGION 1..383: note = tr|A0A433XU10|A0A433XU10_9BACL tRNA epoxyqueuosine(34) reductase QueG OS=Paenibacillus anaericanus OX=170367 GN=queG PE=4 SV=1
MWAELKREIKEAAPSLGIDDIGFASADPFLSLKAVLLDRREKGYESGFEEPDIDKRIYPELSFDGQPASLISIAVAYPSKMENPPKSAPGERRGILARSAWGRDYHLVLREAMKKLEDFIRERIPEARIENMVDTGALVDRAVADRAGIGFKGKNCLIISPKWGTWVYLGELITNIPFPPDTPVTEDCGECTKCLDACPTGALVGPGVLNAQRCISFQTQTKGFVEEEFMLKIGNRLYGCDTCQVVCPKNKGKHWNHRPELQPDPETVKPLLLPILDLSNRQFKERFGTSAAAWRGKNPIQRNAIIALGNFKDPGSVPKLIDILIKDSRPVMRGTAAWALSRIGGTEALSAIVKAIATETDEEVLKRLRNAESKLMEAETPEV

SEQ ID NO: 78964 - protein, 572 aa, Paenibacillus antarcticus
  REGION 1..572: note = tr|A0A168NHP2|A0A168NHP2_9BACL Epoxyqueuosine reductase OS=Paenibacillus antarcticus OX=253703; GN = PBAT_12980 PE=4 SV=1
MTLEHVRSPYAPSPSVWEQLKRDIQLAAPSLGIDDIGFATADPFVSLKSILQNHRDKGYESGFEEPDLDKRVTPALPSSQPTSLISIAVAYPSKMVNPPKSEPGAYRGILARSAWGRDYHYVLREAMQKLEDFIRERVPEAVLESMVDTGALVDRAVAERAGIGFSAKNCMIISPKWGSWIYLGDMVTNIPFPPDTPVTEDCGECTKCIDACPTGALVGPGQLDAQRCVSFLTQTKGLLEEEQMRKIGNRLYGCDTCQIVCPKNRGKSWDHNQQLLPDPEITKPLLLPILDLTNREFKEKFGESAAAWRGKKPMQRNAIIALGNFKDRSAVPRLEEVLLKDPRFEMRGTAAWALGRIGGEEALNSVNKGLAIEDDVKVKEMLMKAKEKLEPSTALEEEHSQEIIYYDEITTPIGVLTLCTSVKGICLIEMDSFTTKEAVIQQWSRNWAQDAEFIYDGDRLSEAKTQLEQYFAGERKQFDLPIDMRGTLFQLQVWTAVADIPYGETCSYGQLAEAIERPKAVKAVGGATNKNPIPIIVPCHRIIGADNSLAGYVYGHEIRSQLLSLEGSLPER

SEQ ID NO: 78965 - protein, 567 aa, unidentified
  source 1..567: note = Paenibacillus aquistagni
  REGION 1..567: note = tr|A0A1X7LD37|A0A1X7LD37_9BACL Methylated-DNA--protein-cysteine methyltransferase; OS = Paenibacillus aquistagni OX=1852522; GN = SAMN06295960_3282 PE=3 SV=1
MEKQAFMNQEERFSVLKRDIQAAAASLGIDQIGFTSAEPFTLLKERLKQSVEQGYHSGFEEPDLDKRTQPKLLLEGAASIISIAVAYPSKLPYSPKSEPDSYRGMFARTAWGMDYHHVLRDRLQRLEAFIRERVHEPELKIKSMVDTGELSDRAVAERAGIGFSGKNCSIISPKLGSWIYLGEMITNIPFTPDHPITEDCGSCTKCLDACPTGAFVGPGQLNANRCISFQTQLKDMLTDEMMTKMGNRLYGCDTCQIVCPKNRGLNWTHQPELQPDPEQAKPLLVPMLSLSNREFKTSFGSSAAAWRGKKPIQRNAIIALGNFRDRSAVPELAGLLLRDERPDIRGTAAWALGRIGGELAKAKLQAAGKREEHEEVIRMIKDAVQEAANTPEPLYLIEMDSPIGKLTLSATLDGLCRIDFGTVLECSHDIQAWAEQAIGAVILQRNPERLKAAKKQLEEYFAGGRTTFDLKLDLRGGTPFQREVWQTLRDIPYGETWAYKDLAERIGNPKAVRAVGGANNKNPISIIIPCHRVIGASGQLVGYGGGLSKKVALLELERRTLSPSFSS

SEQ ID NO: 78966 - protein, 385 aa, unidentified
  source 1..385: note = Paenibacillus baekrokdamisoli
  REGION 1..385: note = tr|A0A3G9JI69|A0A3G9JI69_9BACL Epoxyqueuosine reductase OS=Paenibacillus baekrokdamisoli OX=1712516; GN = queG PE=4 SV=1
MDIQTTWDKLKTDMKAAAAELGIDKIGIASVEPFTELKQRLLRHRELGYESGFEEPDLNKRTEPALLFDNPQSIIAIAIAYPSKLQDPPKSEPGARRGILARSAWGEDYHTVLRDRLARLEAWLIERVPSCRVLSMVDTGALSDRAVAQRAGIGWSGSNCAIITPEWGSWVYLGEMITNLPLPPDKPVTESCGECTACIDACPTDALVAPGQLNSQRCISFVTQTKGVVTDELMRKIGNRLYGCDTCQVVCPENKGKNWTHQPELQPDNEKAKPLLVPLLTIGNRAFKDIYGSTSSAWRGRKPIQRNAIIALGNFKDASAIPALTGVLREDPRFELRATAAWSLGRIGGDTALAALEQALASERDAVVQEALHTALSSLNAAESR

SEQ ID NO: 78967 - protein, 614 aa, Paenibacillus barcinonensis
  REGION 1..614: note = tr|A0A2V4UUQ9|A0A2V4UUQ9_PAEBA Epoxyqueuosine reductase OS=Paenibacillus barcinonensis OX=198119; GN = DFQ00_1264 PE=4 SV=1
MTSVRTGAAQVASVWEALKQEIKAAGPELGIDDIGFASADPFVSLKSLLEQSRDKGYASGFEESDIEKRVHPALQGGEPASLIAIAVAYPSKMINPPKSEPGAYRGIFARSAWGQDYHQVLRTAMDKLVSFIRERVPEAMIESMVDTGALVDRAVSQRAGIGFSAKNCSIISPKFGSWIFLGELVTNIPFPPDTPVTEDCGECTKCIDACPTGALVGPGQLNAQRCISFLTQTKGFLDEEFMLKIGNRLYGCDTCQIVCPKNRGKNWDHHPEFHPDPEVVKPLLLPLLDIGNREFKERFGQSSASWRGKKPIQRNAVIALGNFKDKSAVPKLTQVLKRDPRPELRGTAAWALSRIGGEDAMRAIGEAAAIEQDGNVLSMLQKAKERLMSSTALPEQPQAGHASKLEGKSEGELERTTEINEKQSASTDKPEEAAAWKPSAVTGLHGKPVYYDELLTPIGTLTLCATDEGLCHIDFGAFHVREAHLQQWARTWIGEYRYEKNEEKLSDAAEQLRQYFAGERKTFDLQLERYGTAFQLQVWQVLSDISYGEALTHQEVAEKIGRPKAVRAVLDAISKNPIPIVIPCHRMSGKDGTLVGYAGGLQTKEQLLTLEQQT

SEQ ID NO: 78968 - protein, 396 aa, Paenibacillus barengoltzii
  REGION 1..396: note = tr|R9L830|R9L830_9BACL 4Fe-4S ferredoxin-type domain-containing protein OS=Paenibacillus barengoltzii G22 OX=1235795 GN=C812_03124 PE=4 SV=1
MSMAETGATRLPEGGNRWAQLKREIQEASTELGIDDIGFASADPFLSLKAILQDRRDKGYESGFEEPDLDKRVYPELSLTEPASLISIAVAYPSKMENPPKSSPGERRGILARSAWGRDYHQVLREAMAKLEAFIRERVPEARIESMVDTGALVDRAVADRAGIGFKGKNCAIISPKWGSWIYLGELITNIPFPPDTPVEEDCGECTKCIDACPTGALVGPGELNAQRCISFLTQKKGFLDEEFMVKMGNRLYGCDTCQIVCPKNKGKFWNHRPELAPDPETVKPLLLPLLDLSNREFKERFGDSAAAWRGKKPIQRNAVIALGNFKDSASVPKLIDILLHDPRPELRGTAAWALSRIGGKEAEEAIDRALDAEQEEEVRVRLQTAKQKLQASNGD

SEQ ID NO: 78969 - protein, 392 aa, unidentified
  source 1..392: note = Paenibacillus beijingensis
  REGION 1..392: note = tr|A0A0D5NHG9|A0A0D5NHG9_9BACL Epoxyqueuosine reductase OS=Paenibacillus beijingensis OX=1126833 GN=queG; PE = 3 SV=1
MTMREQERGAEERSFWEALKAELKEAAPGLGIDAVGVASPDPFTELKGRLMRHRELGYESGFEEADLQKRTDPALLFREPQSIIAIAVAYPSKLPDPPKSEPGARRGILSRSAWGEDYHRVLRSRLQRLEEWLRERVPWLRAESMVDTGALSDRAVAERAGIGWSGKNSFIMNEKLGSWMYLAEMITNLPLPPDAPAEEGCGTCTKCIDACPTGALVGPGQLNAQRCISYVTQTKEMVGDELMRKIGNRLYGCDTCQIVCPVNRGVNWTHHPELQPDAEKVKPLLEPLLQMSNKEYQRQYGSNASSWRGKKPIQRNAVIALGNFREAGAVPQLTEVLRSDPRPVLRGTAAWSLGRIGGEAALEALRQAKEEERDPEALAAIEKALADKKDEA

SEQ ID NO: 78970 - protein, 398 aa, Paenibacillus borealis
  REGION 1..398: note = tr|A0A089L5K8|A0A089L5K8_9BACL Epoxyqueuosine reductase OS=Paenibacillus borealis OX=160799; GN = PBOR_03160 PE=4 SV=1
MNSNFQSPYAPPPSKWEDLKAAIKAAAPALGIDDIGFTTAEPFLYLKNILQEHRDNGYDSGFEEPDLDKRTVPALKSGEKPLSIIAIAVAYPSKMEDPPKSEPGARRGILARASWGQDYHHVLREALAKLENFIRERVPDAVLESMVDTGALVDRAVAERAGIGFSGKNCAIISPKWGSWIYLGEMVTNIPLPPDQPVQEGCGDCTKCIDACPTGALVGPGQLNAQACISYLTQTKGFLSEDYMTKIGNRLYGCDTCQIVCPHNRGKNWNHRPQLLPDPEIVKPLLMPILDLSNREFKEKFGSSSAAWRGKKPIQRNAVIALGNFKEASAVPKLTEILLQEPRPEMRGTAAWALGRIGGSEALTAVEQALHKEEDVTVRGMLNRAQDKLLEQREADEE

SEQ ID NO: 78971 - protein, 408 aa, Paenibacillus borealis
  REGION 1..408: note = tr|A0A1R0YBD9|A0A1R0YBD9_9BACL tRNA epoxyqueuosine(34) reductase QueG OS=Paenibacillus borealis OX=160799 GN=BSK56_22240 PE=4 SV=1
MNIKTQSSYAPPPSIWEDLKAEIKAAAPALGIDDIGFATAEPFLYLKNILQDHRDKGYESGFEEPDLDKRTIPALPSGETPLSILAIAVAYPSKMENPPKSEPGARRGILARASWGQDYHHVLREALGKLEAFIRERVPDAVLESMVDTGVLVDRAVAERAGIGFSAKNCAIISPKWGSWIYLGEMVTNIPFPPDAPVEEGCGECTKCIDACPTGALVGPGQLNAQACISYLTQTKGFLSDEYMTKIGNRLYGCDTCQIVCPINRGKNWNHRPELLPDPEIVKPLLLPILELSNREFKEKFGSSSAAWRGKKPIQRNAIIALGNFKEAGAVPKLTEIVLRESRPEMRGTAAWALGRIGGGEALAAVEEALLAEGDNQVREMLERALDKLLKREEKESDEQAGGGQSGN

SEQ ID NO: 78972 - protein, 386 aa, unidentified
  source 1..386: note = Paenibacillus bovis
  REGION 1..386: note = tr|A0A172ZLY6|A0A172ZLY6_9BACL tRNA epoxyqueuosine(34) reductase QueG OS=Paenibacillus bovis; OX = 1616788 GN=AR543_05395 PE=4 SV=1
MIPSPTSRWEQLKLEIKAAAPSLGIDDIGFTTADPFLFLKEVLEEHRRKGYESGFEEPDLEKRINPSLTLEGARSIIAISVTYHSKMENPPKSEPGQYRGIMARSAWGRDYHYVLRDRMQRLEDFIHERVPEARIESMVDTGALSDRAVAQRAGIGFFGKNCAVISPTLGSWIFLGDMITDIPFPPDTPVTEDCGTCTKCIDACPTGALVGPGQLNSQICVSFLTQTKGMLSDEHMRKIGNRLYGCDTCQIVCPKNKGKHWNHQEDLRPDPEKAKPLLLPMLDLSNKEFKQEFGDTSAAWRGKNPIQRNAIIALGNFKDKSAVPRLTEMLLKDVRPMIRGTIAWALSRIGGPDALAAVERGLEREQEQDVIDRLIEAKRILEEESA

SEQ ID NO: 78973 - protein, 397 aa, unidentified
  source 1..397: note = Paenibacillus catalpae
  REGION 1..397: note = tr|A0A1I2D4R0|A0A1I2D4R0_9BACL Epoxyqueuosine reductase OS=Paenibacillus catalpae OX=1045775 GN=queG; PE = 3 SV=1
MLMDKSRLAQLKEEMREAAQSLGIDKIGIASADPFTELKNRLIRHRELGRESGFEEPDLDKRTNPALLFDQPQSIIAIAVAYPAKLPNPPKSEPGARRGILSRSAWGEDYHKVLRDRLARLEAWLKERVPEARVESMVDTGALSDRAVAERAGIGWSAKNCSILSEDLGSWIYLGEMITNIPFEPDTPVTEGCGECTKCIDACPTDALVGPGQLDSQRCISFVTQTKGFVSDELMRKIGNRLYGCDTCQTVCPVNRGKNWTHQPELQPDPEVVKPLLVPLLTIGNREFKERYGHTSSAWRGKKPIQRNAVIGLGNFKDKSAVPDLIGVLKEDSRPVLRGTAAWALGRIGGEEAMEGLRKALPDESDEEARVYLERAIASLEAGLNGAEEGAPIPRES

SEQ ID NO: 78974 - protein, 408 aa, Paenibacillus cellulosilyticus
  REGION 1..408: note = tr|A0A2V2YP85|A0A2V2YP85_9BACL Epoxyqueuosine reductase OS=Paenibacillus cellulosilyticus OX=375489; GN = DFQ01_11936 PE=4 SV=1
MEHPQQDEAQQQMDVEEAAWTGFDWHVLKAELKAAAPSLGIDDIGIASAEPFTELKERLLRHRELGRESGFEEPDIELRTNPSLLFDRPVSIIAIAVAYPSKLPDPPKSEPGARRGIFARASWGMDYHSVLRDRLARLEAWLEERVPGVRMMSMVDTGALSDRAVAERAGLGWSAKNCSIISPKLGSWIYLGETITNLPLPPDTPLEDQCGTCNKCIDACPTGALVGPGQLDSNKCISFLTQTKTMLSDTYMRKIGNRLYGCDTCQIVCPANRGKNWTHQPELQPDPEIAKPLLLPLLTIGNREFKETFGSASGSWRGKKPIQRNAIIALGNFRERSAVPAIIDVLRVDPRPELRGTAAWALGMIGGEEAAEALRIAHTTETNEEASSAIARAMTALTLASETVEDLQ

SEQ ID NO: 78975 - protein, 415 aa, Paenibacillus chitinolyticus
  REGION 1..415: note = tr|A0A410X3M7|A0A410X3M7_9BACL Epoxyqueuosine reductase OS=Paenibacillus chitinolyticus OX=79263 GN=queG; PE = 3 SV=1
MRITLADASERDLLLLKQEIIQAAPSLGIDKIGFASAEPFHELKDILLRHREKGYESGFEEPDIDKRVHPDRSFEGVKSILAIAVAYPSKLVNPPRSEAGAYRGILARAAWGDDYHLVLRERLKRLGAFLEERVEGVRFMDMVDTGALVDRAVAERAGIGWIGKNCAVITPEWGSWVYLGELLTNLPFPADTPIMDQCGECRICIDACPTGALVGPGQLNSSRCISFVTQTKGMIPDEFKEKIGNRLYGCDTCQIVCPVNKGKNWTHHEDLQPDHEVVKPLLIPLLTMGNREFKERFGRSSAAWRGRKPIQRNAVLALGNFKDRSAVPVLASLLKDDPRPELRATAAWSLGKIGGEAALEAVLRAQRSERDEAVLAELDNAARKLGGLTPSGGDAAAVEAGGPQADGAGAAPAAE

SEQ ID NO: 78976 - protein, 385 aa, Paenibacillus contaminans
  REGION 1..385: note = tr|A0A329LY62|A0A329LY62_9BACL Epoxyqueuosine reductase OS=Paenibacillus contaminans OX=450362 GN=queG; PE = 3 SV=1
MTEMSERDDKLAWQRLKEDILAAASALGIDKVGFASADPFLELKEILLRHREKGFESGFEEPDIDKRVYPELSFEEPRSIISIAIAYPSKLQDPPRSEPGAYRGIISRSSWGEDYHHVLRNRLARLEAFIRERVPSARMESMVDTGVLVDRAVAERAGIGWSGKNCSVITPEWGSWVYLGEMITNIPLPPDKPVTDSCGDCTRCIDACPTGALVGPGQLNAGLCISFITQTKGVVSDEMKEKIGNRLYGCDTCQIVCPVNKGKNWTHQPELQPDPELVKPLLIPLLTLGNKEFKERYGRSASSWRGKKPIQRNAIIALGNFKDRSALPILINIAKSDTRPEIRATAAWSLGKIGGAEAEEALREALGTEKEPIVLEALERALGSR

SEQ ID NO: 78977 - protein, 580 aa, unidentified
  source 1..580: note = Paenibacillus crassostreae
  REGION 1..580: note = tr|A0A162KMY0|A0A162KMY0_9BACL Methylated-DNA--protein-cysteine methyltransferase; OS = Paenibacillus crassostreae OX=1763538 GN=PNBC_21120; PE = 3 SV=1
MKNEIISLQTSYAPSTSPWEQLKRDIQEAAPSMGIDDIGFTTADPFVSLKSLLQEQRDRGYDSGFEEPDLDKRVTPTLATSQPASLIAIAVAYPSKMVNPPKSESGANRGILARTAWGRDYHHVLREAMEKLEKFIKDRVPEAVIENMVDTGALVDRAVAERAGIGFSGKNCLIISPKWGSWIYLGEMVTNIPFPPDTQVTEDCGECTKCIDACPTGAIVAPGQLNAQRCISFLTQTKGLLNEDQMVKIGNRLYGCDTCQIVCPKNRGKNWEHNEQLLPDPELVKSLLFPILDLSNREFKEKFGVSAAAWRGKKPIQRNAIIALGNFKDRTAVPRLEEVLLHDERVEMRGTAAWALGRIGGDEALNSIMKGIAVEQDESVQDMLKKAQDKLQPAQMEVDNSHEVIYYDEITTPIGVLTLCTTEIGICLVEFGSFFIREANIQQWARIWAKEAIFIQDGTRLNEVRIQLEQYFSNERKQFDLPMDMRGTPFQLQVWTALADIPYGDTSSYKQLAESIDRPKAIRAVGGANNKNPVPIIIPCHRVIGAQGELVGYGGGLEIKRHLLSVEGSLSERNQIRNGK

SEQ ID NO: 78978 - protein, 397 aa, Paenibacillus curdlanolyticus
  REGION 1..397: note = tr|E0IB04|E0IB04_9BACL Iron-sulfur cluster binding protein OS=Paenibacillus curdlanolyticus YK9 OX=717606; GN = PaecuDRAFT_2731 PE=4 SV=1
MERMEQGDGLPELDWHALKAEMKLAAASLGIDDIGIASADPFTELKDRLIRHREQGRESGFEEPDLDKRTNPSLLFDRPKSIIAIAVAYPSKLPDPPKSEPGARRGIFARASWGIDYHTALRNRLAKLEEWLYARVPGVRMESMVDTGALSDRAVAERAGIGWSGHNCSIISPKLGSWIYLGEIITNLPLPPDTPVTENCGECTKCIDACPTGALVGPGQLDSSKCVSFLTQTKGMLSDEYMRKIGNRLYGCDTCQIVCPANRGKNWTHHPELQPEPEQAKPLLLPLLKIGNREFKEQFGTVSGAWRGKKPIQRNAIIALGNFRERAAVPALADVLGTDPRPVMRGTAAWALGRIGGDAAEEALRQAQAVETDEEATAEIARAMIALSLQSEHDVEV

SEQ ID NO: 78979 - protein, 394 aa, unidentified
  source 1..394: note = Paenibacillus darwinianus
  REGION 1..394: note = tr|A0A015KWV8|A0A015KWV8_9BACL Epoxyqueuosine reductase OS=Paenibacillus darwinianus OX=1380763; GN = BG52_13265 PE=4 SV=1
MPGEWTQVRLAELKAEMAAALPALGIDKIGVASASPFTALKQTLVRHRELGRESGFEEPDLDKRTEPALLFDDPQSIIAIAVAYPSKLADAPKSEPGARRGILSRSAWGEDYHHVLRDRLARLEAWLSERLPGFRAESMVDTGALVDRAVAERAGIGWSGKNCAVITPEFGSWVYLGEMITNVPFPPDEPVIQGCGSCTKCIDACPTGALVGPGELDAQRCVSFVTQTKGFLSDEMMRKMGNRLYGCDTCQIVCPVNKGLNWTQHVELRPDPEQAKPLLVPLLSIGNREFKEKFGSSAASWRGKKPIQRNAVIALGNFKDASAVPALADVLRDDPRPVLRGTAAWSLGRIGGAGAAAALREASGQERDPEVSAMIREALSSRPAGAADGQAPNR

SEQ ID NO: 78980 - protein, 577 aa, Paenibacillus dendritiformis
  REGION 1..577: note = tr|A0A4R5YXT2|A0A4R5YXT2_9BACL Multifunctional fusion protein OS=Paenibacillus dendritiformis OX=130049; GN = queG PE=3 SV=1
MTEQKQTVRWTPYGTDQAAGTEASREADRWQRLKQEIMDAAPSMGIDQVGFTTADPFTELKARLQHSIDQGYASGFEEPDLDKRTKPALLLDGARSIIAIAVAYPSKLEGGPKSEPGAYRGMFARTAWGLDYHHVLRDRLQRLEQFLRERVPEVQVKSMVDTGELCDRAVAERSGLGFIGKNCSIISPKWGSWIYLGEMITNLPLPPDHPLTEDCGECTRCLDACPTGAFVGPGQLNAQRCISFQTQSKEMLPHEMMVKIGNRLYGCDTCQIVCPKNRGLNWTHHAEMQPDPEQAKPLLVPLLSLSNREFKSQFGSSAAAWRGKKPIQRNAIAALGNFRDRQAVPALEGLLRNDERPDIRAAAAWALGQIGGPDAKRILKAALSREEEPKVKEAVMQAQERAEAQQEPLYVQEMESPIGPLTLAATATGLFAIEFGDALSVAEGLQRRAARSYGRVVLQRHPERLQEAKRQLEEYFAGTRREFDLTLDIQGTPFQRQVWQALTDIPYGETRSYKQIAEAIGNPGAVRAVGGANNRNPLSIIVPCHRVIGADGKLVGYGGGMDKKITLLRLEGIPCRQ

SEQ ID NO: 78981 - protein, 577 aa, Paenibacillus dendritiformis
  REGION 1..577: note = tr|H3SKR0|H3SKR0_9BACL Multifunctional fusion protein OS=Paenibacillus dendritiformis C454 OX=1131935; GN = queG PE=3 SV=1
MTEQKHTVRWTPYGTDQAAGAEASPEADRWQRLKQEIMDAAPSMGIDQVGFTTADPFTELKARLQHSIDQGYASGFEEPDLDKRTKPALLLDGARSIIAIAVAYPSKLEGGPKSEPGAYRGMFARTAWGLDYHHVLRDRLQRLEQFLRERVPEVQLKSMVDTGELCDRAVAERSGIGFSGKNCSIISPKWGSWIYLGEMITNLPLPPDHPLTEDCGECTRCLDACPTGAFVGPGQLNAQRCISFQTQSKEMLPHEMMVKIGNRLYGCDTCQIVCPKNRGLNWTHHAEMQPDPEQAKPLLVPLLSLSNREFKSQFGSSAAAWRGKKPIQRNAIAALGNFRERQAVPALEGLLRNDERPDIRAAAAWALGQIGGPDAKRILKAALSREEEPKVKEAVMQAQERAEAQQEPLYVQEMESPIGPLTLAATATGLFAIEFGDALSVAEGLQRRAARSYGRVVLQRHPERLQEAKRQLEEYFAGTRREFDLTLDIQGTPFQRQVWQALTDIPYGETRSYKQIAEAIGNPGAVRAVGGANNRNPLSIIVPCHRVIGADGKLVGYGGGMDKKITLLRLEGIPCGQ

SEQ ID NO: 78982 - protein, 398 aa, unidentified
  source 1..398: note = Paenibacillus donghaensis
  REGION 1..398: note = tr|A0A2Z2KI10|A0A2Z2KI10_9BACL tRNA epoxyqueuosine(34) reductase QueG OS=Paenibacillus donghaensis OX=414771 GN=queG PE=4 SV=1
MNNYNQSAYAAPPSQWTKLKAELQEAASSLGIDSIGFATAEPFLYLKSILQQHRDNGYESGFEEPDLNKRTVPALPNGEQPLSIIAIAVAYPSKLVDPPKSEPGARRGILARASWGQDYHHVLREALMKLETYIRERVPGAVLESMVDTGVLVDRAVAERAGIGFSAKNCAVISPQWGSWIYLGEMVTNLPFPPDVPVEEGCGDCTKCIDACPTGALVGPGQLNAQACISYLTQTKGFLSEEHMTKIGNRLYGCDTCQVVCPHNRGKNWDHRPQLLPDPEIVKPLLLPMLDLSNREFKEQFGSSSAAWRGKKPLQRNAVIALGNFKDKTAVPKLTEVLLKDIRPEMRGTAAWALGRIGGSDALSAVRQAIQHEEDPEVCAMLERAEQVLLGGAEAQED

SEQ ID NO: 78983 - protein, 394 aa, Paenibacillus durus
  REGION 1..394: note = tr|A0A089HKA8|A0A089HKA8_PAEDU Epoxyqueuosine reductase OS=Paenibacillus durus OX=44251 GN=PDUR_03220; PE = 4 SV=1
MNTPEYTSYAPPSPRWESLKKEIKEAAQALGIDDIGFATAEPFLFLKNLLQEHRDKGYDSGFEEPDLDKRTIPALREGQPKSIIAIAVAYPSKMDNPPKSEPGERRGILARSAWGRDYHFVLREALERLEAFIRQRVPDAVMESMVDTGVLVDRAVAERAGIGFSGKNCSVISPKWGSWIYLGEMVTNIPFPPDTPVTEGCGTCTKCIDACPTGALVGPGELNAQACISYLTQTKGFLDETYMAKIGNRLYGCDTCQIVCPHNRGKNWDHRQELLPDPEQAKPLLLPILDLSNREFKEKFGSSAAAWRGKKPIQRNAVIALGNFKDAAAVPKLTEVLLKDPRPELRGAAAWALGAIGGEAALAAVELALESEQDEEVTRRLRRAKARLADPKES

SEQ ID NO: 78984 - protein, 394 aa, Paenibacillus durus
  REGION 1..394: note = tr|A0A0F7FF95|A0A0F7FF95_PAEDU Epoxyqueuosine reductase OS=Paenibacillus durus ATCC 35681 OX=1333534; GN = VK70_25315 PE=4 SV=1
MNTPEYTSYAPPPPRWESLKKEIKEAAQTLGIDDIGFTTAEPFLFLKNLLQEHRDKGYDSGFEEPDLDKRTIPALREGEAKSIIAIAVAYPSKMDNPPKSEPGERRGILARSAWGRDYHLVLREALERLEAFIRQRVPDAVMESMVDTGVLVDRAVAERAGIGFSGKNCAVISPKWGSWIYLGEMITNIPFPPDTPVTEGCGTCTKCIDACPTGALVGPGELNAQACISYLTQTKGFLDETYMAKIGNRLYGCDTCQIVCPHNRGKNWNHHEELLPDPEQAKPLLLPILDLSNREFKEKFGSSAAAWRGKKPIQRNAVIALGNFKDASAVPKLSEVLLRDPRPELRGAAAWALGAIGGEAALAAVELALESEQDEEVAGRLGRAKSRLAGPIDP

SEQ ID NO: 78985 - protein, 398 aa, Paenibacillus elgii
  REGION 1..398: note = tr|A0A2T6FU45|A0A2T6FU45_9BACL Epoxyqueuosine reductase OS=Paenibacillus elgii OX=189691 GN=queG PE=3; SV = 1
MAEELQPADWSRLKQQLQADAAQLGIDKIGFSSADPFVELKDILIRHREKGFESGFEEPDLEKRVDPALTLAEPRSIISIAVAYPSKLRNAPRSEPGAYRGILSRSAWGQDYHHVLRNRLARLEAWIRERVPGARTTSLVDTGALVDRAVAERAGIGWVGKNCCVITPEWGSWVFLGELITNVPFPPDTPITESCGDCTLCIDSCPTGALVGPGQLNAQRCVSFLTQTKGLIEDDELKRKIGNRLYGCDTCQIVCPKNKGIHAGHQPELQPDPELVKPLLLPLLSMSNREFKERFGHSAAAWRGRKPIQRNAILALGNFRDASSVPQLAELLRKDERPEIRGTAAWALGRIGGEAAREALDAAWETERDEAARREIGKARAQFTGERQGDEQDGDPIR

SEQ ID NO: 78986 - protein, 416 aa, Paenibacillus elgii
  REGION 1..416: note = tr|A0A165QEV4|A0A165QEV4_9BACL Epoxyqueuosine reductase OS=Paenibacillus elgii OX=189691 GN=queG PE=3; SV = 1
MEKKYSTMGTEQQSERFAAEEELQPADWSRLKQQLQADAAQLGIDKIGFASADPFVELKDILIRHREKGFESGFEEPDLEKRVDPALTLTEPRSIISIAVAYPSKLRNAPRSEPGAYRGILSRSAWGQDYHHVLRNRLARLEAWIRERVPGARTASLVDTGALVDRAVAERAGIGWVGKNCSVITPEWGSWVYLGELITNVPFPPDTPVTESCGDCTLCIDACPTGALVGPGQLNAQRCVSFLTQTKGHIEDDELKRKIGNRLYGCDTCQIVCPKNKGIHAGHHPELQPDPEIVKPLLLPLLSLSNREFKERFGHSAAAWRGRKPIQRNAILALGNFRDASSVPQLVELLRKDERPEIRGTAAWALGRIGGEAAREALGAAWESERDEAARREIGKARAQFTGERQGDEQDGDPIR

SEQ ID NO: 78987 - protein, 407 aa, unidentified
  source 1..407: note = Paenibacillus etheri
  REGION 1..407: note = tr|A0A0W1AQ38|A0A0W1AQ38_9BACL Epoxyqueuosine reductase OS=Paenibacillus etheri OX=1306852 GN=UQ64_02770; PE = 4 SV=1
MNDTFQSPYAPPPSKWAKLKAEIQEAATSLGIDDIGFTTAEPFLYLKNILQDHRDKGYESGFEEPDLDKRTIPALSSGDKPLSIISIAVAYPSKMENPPKSEPGARRGILARASWGRDYHHVLREALSKLEDFIHERVPEAVLESMVDTGVLVDRAVAERAGIGFSGKNCSIISPKWGSWIYLGEMVTNIPFAPDEPVEEGCGDCTKCIDACPTGALVGPGQLNAQACISFLTQTKGFLSDEYMTKIGNRLYGCDTCQIVCPKNRGKNWNHRPQMLPDPEIVKPLLMPILDLSNREFKERFGNSSAAWRGKKPMQRNAIIALGNFKEVEAVPKLTEIVLKEPRPEMRGTAAWALGRIGGEEALAAVESALEREEHDTVREMLSRALDVLLTAKQAREDSDVNEGKRS

SEQ ID NO: 78988 - protein, 392 aa, unidentified
  source 1..392: note = Paenibacillus faecis
  REGION 1..392: note = tr|A0A5D0CP47|A0A5D0CP47_9BACL tRNA epoxyqueuosine(34) reductase QueG OS=Paenibacillus faecis; OX = 862114 GN=queG PE=4 SV=1
MTENASAGGAGAGYARWDALKREIQEAAPSLGIDTIGFASADPFLSLKSILLDRREKGYESGFEEPDIDKRIYPELSLEQPASLIAIAVAYPSKMENPPKSEPGQRRGILARSAWGQDYHQVLRQAMAKLQAFIAERVPDARIESMVDTGALSDRAVAQRAGIGFYGKNCAIISPEFGSWIYLGELITNIPFRPDTPVTEDCGDCTKCLDACPTGALVEPGVLNAQRCISFLTQTKGFVEEEFMLKIGNRLYGCDTCQVVCPKNKGKSWNHRPELLPDPETAKPLLLPLLDISNREFKERFGNSAAAWRGKKPIQRNAVIALGNFKDSSSVPKLIDIMIHDPRPVLRGTAAWALSRIGGEEALLGIKRAAERETDPEVLERLETARAKLEES

SEQ ID NO: 78989 - protein, 393 aa, unidentified
  source 1..393: note = Paenibacillus ferrarius
  REGION 1..393: note = tr|A0A1V4HPA9|A0A1V4HPA9_9BACL tRNA epoxyqueuosine(34) reductase QueG OS=Paenibacillus ferrarius OX=1469647 GN=BC351_20465 PE=4 SV=1
MAVSTPIATGTPADFSKLQQEIVDAASSLGIDKIGFASAEPFTELKDILLRHREKGFESGFEEPDIEKRVNPGLSFDAPKSIISIAVAYPSKLPNPPRSEPGAYRGIISRSSWGSDYHDVLRDRLAKLEAFIAERVPDARLMSMVDTGVLVDRAVAERAGIGWSGKNCAVITPEWGSWVYLGDMITNIPFTPDTSIMDQCGDCTICIDACPTGALVGPGQLNSSRCISFITQTKGYIDDEYKRKIGNRIYGCDTCQIVCPKNKGMNWTHQPELQPDPEKVKPLLIPLLTMTNKEFKEQYGRIAASWRGKKPIQRNAIIALGNFRDQSAVPILSELLLADPRPEIRAACAWALGRIGGEEASSALNNAQAKEQEPVVREDIEKAITAVSQSASR

SEQ ID NO: 78990 - protein, 396 aa, Paenibacillus ginsengarvi
  REGION 1..396: note = tr|A0A3B0BG64|A0A3B0BG64_9BACL Epoxyqueuosine reductase OS=Paenibacillus ginsengarvi OX=400777 GN=queG; PE = 3 SV=1
MEKAAYDSKDYYAQLKEDIRAAAPELGIDKIGFASAEPFVELKQILIQHRERGYESGFEEPDLEKRTDPALSLERPQSLVSIAIAYPSKLKDAPKSAPGAYRGIISRSSWGEDYHKVLRKRIAALEEYIKERVPEARIESMVDTGSLSDRAVAQRAGIGWSGKNCAIITPEWGSWVYLGELITSIPFPPDRPITDQCGDCTICIDACPTGALVGPGQLNSSRCISFVTQTKGFVSEEMMRKIGNRLYGCDTCQVVCPVNKGKNWTHQPDLQPEPEKVKPLLKPLLSLSNKQFRELYGHLAASWRGRKPIQRNALIALGNFRDETAVPLLSDVMRTDERPELRAAAAWALGRIGGDEARSALEQAKRTEAHPVAAEYMETALKAIAGVDGGASDMYP

SEQ ID NO: 78991 - protein, 572 aa, Paenibacillus glacialis
  REGION 1..572: note = tr|A0A162PWC2|A0A162PWC2_9BACL Epoxyqueuosine reductase OS=Paenibacillus glacialis OX=494026; GN = PGLA_18605 PE=4 SV=1
MTLEHVKSPYAPSPSVWEQLKRDIQLAAPSLGIDEIGFATADPFVSLKSILQNHRDNGYESGFEEPDLDKRVTPALPSSQPASLIAIAVAYPSKMVNPPKSEPGAYRGILARSAWGRDYHYVLREAMQKLEDFIRERVPEAVIESMVDTGALVDRAVAERAGIGFSAKNCMIISPKWGSWIYLGDMVTNIPFPPDTPVTEDCGECTKCIDACPTGALVGPGQLNAQRCVSFLTQTKGLLEEEQMLKIGNRLYGCDTCQIVCPKNRGKSWDHHKELLPDYEIAKPLLLPILDLSNREFKEKFGESAAAWRGKKPMQRNAIIALGNFKDRSAVPRLEEVLLKDPRYEMRGTAAWALGRIGGEEALNSLNKGLAVEEDKLVQEMLMKAKEKIEPSTNVEEKHSQEIIYYDELTTPIGILTLCTSSKGICLVEMDSFTTKEAIIQQWSRNWTQDAVFIHDGERLTEAKIQLEQYFAGERKQFDLPIDMRGTLFQLQVWTTLADILYGETCSHGQLAEAIERPKAVKSVGVATNKNPIPIIVPCHRIIGADSSLAGYVYGHEIRSQLLSLEGSLPER

SEQ ID NO: 78992 - protein, 617 aa, Paenibacillus glucanolyticus
  REGION 1..617: note = tr|A0A163K0T7|A0A163K0T7_9BACL Methylated-DNA--protein-cysteine methyltransferase; OS = Paenibacillus glucanolyticus OX=59843 GN=AWU65_13795; PE = 3 SV=1
MTYTLGSHAPPPSVWEELKQELKSVAPELGIDDIGFASAEPFQSLKGILQNHRDKGYESGFEEPDLDKRVTPALPGSEPMSLIAIAITYHSKMDNPPKSEPGKYRGIMARSAWGRDYHQVLREAMSRLEAFIRERVPDARLESMVDTGALVDRAVSQRAGIGFSAKNCAIISPKLGSWIFLGEMITNIPFPPDTPVTEDCGECTKCIDACPTGALVGPGQLNAQRCISFLTQTKGFLDEEVMRKIGNRLYGCDTCQIVCPKNRGKNWTHQEAFKPDPEKAKPLLLPILDLSNREFKETFGDTSAAWRGRKPIQRNAVIALGNFKDISAVPKLSEVLLKDPRPELRGTAAWALGRIGGEEALNNLEKSMKSEGDSQVRDMLQQALNKLKPESNEKEAPTEAQAGAEALSSGNALPASPDKGDKPEQESPAIHGVEPMAIPEGGPEVLYYDEIQSPIGPLTVCATEKGLCLIEFGSFYVKEAVIQQWSRTWAGNGGYQRDEARLAPATAQLERYFSGELKEFEIPLDTRGTSFQLQVWEALKSIPYGTVCSYKDIAESIGRPKAVRAVGGANNKNPVPIIVPCHRVIGTDGALIGYAGGPEIKRTLLTLEGAMPDRKGS

SEQ ID NO: 78993 - protein, 390 aa, unidentified
  source 1..390: note = Paenibacillus hemerocallicola
  REGION 1..390: note = tr|A0A5C4TA09|A0A5C4TA09_9BACL tRNA epoxyqueuosine(34) reductase QueG OS=Paenibacillus hemerocallicola OX=1172614 GN=queG PE=4 SV=1
MSVTTASGTREHWAGLKEEIQEALPALGIDKIGFASAEPFAELKQILLRHRERGHESGFEEPDLDKRTDPALSLDRPQSLISIAIAYPSKLSDPPKSEPGAYRGIISRSSWGEDYHRVLRRRMASLEAFITERVPDARMESMVDTGALVDRAVAERAGIGWSGKNCAIITPEWGSWVYLGELVTNIPFPPDRPITDQCGECTICIDACPTGALVGPGQLNSSLCISFATQTKGFVGDDMMRKIGNRLYGCDTCQVVCPVNKGKNWTHQPDLQPDPEKVKPLLKPLLSMSNKQFREQYGDMAASWRGKKPIQRNAIIALGNFRDKSAVPLLAEMLNDDDRPEIRGTAAWALGRIGGSEALAALEEAERKEANPDVAERIRSAAKEISASGT

SEQ ID NO: 78994 - protein, 401 aa, unidentified
  source 1..401: note = Paenibacillus herberti
  REGION 1..401: note = tr|A0A229NVS1|A0A229NVS1_9BACL tRNA epoxyqueuosine(34) reductase QueG OS=Paenibacillus herberti OX=1619309 GN=queG PE=4 SV=1
MAEPIRDAAFWSWLKAEMKEAAFGLGIDDIGVASAEPFTELKGRLIQHREQGFESGFEERDLDKRTDPSLLFEQPLSIIAISVAYPSKLPHPPRSEPGARRGILSRSAWGEDYHSVLRNRLQRLEEWLQARVPELRAESMVDTGELSDRAVAERAGIGWSGKNSFIMNRKHGTFIYLAEMITNLPLQPDSPLLDNCGSCTKCIDSCPTGALIGPGQLNAQRCISFVTQTKEMVSEELMRKIGNRLYGCDTCQIVCPVNKGINVTRHPEFQADPEQVKPLLVPLLQLSNREFKERFGTNAASWRGKKPIQRNAVIALGNFREASAVPELVQVLQEDARPVLRGTAAWALGRIGGAEAEAALAQAAEQESDSEARSWAERSLAALRAERAATAVAEPAAAGEM

SEQ ID NO: 78995 - protein, 621 aa, unidentified
  source 1..621: note = Paenibacillus ihbetae
  REGION 1..621: note = tr|A0A1B2DZD7|A0A1B2DZD7_9BACL Methylated-DNA--protein-cysteine methyltransferase; OS = Paenibacillus ihbetae OX=1870820 GN=BBD41_10580 PE=3; SV = 1
MTYTLGSYAPPSSVWEELKQELKSAAPELGIDDIGFASAEPFASLRGILQNHRDKGYESGFEEPDLDKRVTPALPGTEPASLIAIAVAYPSKMENPPKSEPGKYRGIMARSAWGRDYHHVLREAMSRLEAFIRERVPDAVLESMVDTGALVDRAVAERAGIGFSAKNCAIISPKFGSWIYLGEMVTNIPFPPDQPVTEGCGECTKCIDACPTGALVGPGQLNAQRCVSFLTQTKGFLSEEVMRKIGNRLYGCDTCQIVCPKNRGKNWTHHEELQPDPEKAKPLLLPILDMSNREFKETFGDTAAAWRGRKPIQRNAVIALGNFKDISAVPKLSEVLLKDPRPELRGTAAWALGRIGGEEALNNLEKSMKTEGDAQVRDMLQQALAKLNADATSENTRIETAPPAPEAAEGPGTAGAAAGKASGGESAAVPEQPRPAIQGVEPMAVPEGGPEVLYYDELQSPIGTLTVCATEKGLCLIEFGSFYVKEAVIQQWCRTWSGNGGYERDEARLAPVTDQLKRYFAGELKEFTLPLDMRGTSFQLQVWEALKSIPYGTVCSYKDIAESIGRPKAVRAVGGANNKNPVPIVVPCHRVVGADGALIGYAGGPEIKRTLLAIEGIALGR

SEQ ID NO: 78996 - protein, 611 aa, Paenibacillus illinoisensis
  REGION 1..611: note = tr|A0A2W0CV87|A0A2W0CV87_9BACL Iron-sulfur cluster-binding protein OS=Paenibacillus illinoisensis; OX = 59845 GN=PIL02S_00039 PE=4 SV=1
MTSVQTGAAQAGSVWEQLKQEIKAAAPGLGIDDVGFASAEPFVSLKSLLEQHRDNGYASGFEEPDIEKRVRPALKEGEPASLIAIAVAYPSKMVNPPKSEPGAYRGILARSAWGRDYHHVLREAMDKLVQFIRERVPEAMIESMVDTGALVDRAVSQRAGIGFSAKNCSIISPKFGSWIYLGELVTNIPFQPDTPVTEDCGECTKCIDACPTGALVGPGQLNAQRCISFVTQTKGFVDEEFMLKIGNRLYGCDTCQIVCPKNRGKNWDHHPDLQPDPEIVKPLLLPLLDIGNREFKERFGQSSAAWRGKKPIQRNAVIALGNFKDKSAVPKLTEVLKRDPRPELRGTAAWALSRIGGEDAMRAIGEAAANEQDGNVLSMLQKAKERLSSSGTLPEKPQVGLMSDKQQEEQKNESTDTNSNTSGQPVKQEAAAWKPSAVTGLHGTPVFYDEVLTPIGTLTLCATEKGLCHIDFGAFHVREAHLQQWARTWIGEYRYEKNEDKLSEAAKQLQQYFAGERKSFELEMDLLGTPFQLQVWQVLSDISYGEASTHQQVAETIGRPKAVRAVLDAISKNPIPIIIPCHRISGKDGTLVGYVGGLQTKEQLLTLEQQS

SEQ ID NO: 78997 - protein, 394 aa, Paenibacillus jilunlii
  REGION 1..394: note = tr|A0A1G9WUF6|A0A1G9WUF6_9BACL Epoxyqueuosine reductase OS=Paenibacillus jilunlii OX=682956; GN = SAMN05216191_12050 PE=4 SV=1
MNNNIQTFYAPPPSKWEGLKAEIKAAAPEIGIDDIGFATAEPFLYLKNILQEHRDNGYDSGFEEPDLDKRTIPALQSGGQPQSIIAIAVAYPSKMENPPKSEPGARRGILSRASWGRDYHHVLREALAKLEAFIRERVPGAELESMVDTGVLVDRAVAERAGIGFSAKNCSIISPKWGSWIYLGEMVTNIPFPPDTPVEEGCGSCTKCIDACPTGALVGPGQLNAQACISYLTQTKGLLSDEYMTKIGNRLYGCDTCQIVCPKNRGKNWNHRPELLPDPEVVKPLLLPILELSNREFKEQFGSSSAAWRGKKPIQRNAVIALGNFKEAGAVPKLTEIMLKETRPELRGSAAWALGRIGGAEALAAVKLALHKEEDAAVREMLERAQDKLLEREG

SEQ ID NO: 78998 - protein, 565 aa, Paenibacillus kribbensis
  REGION 1..565: note = tr|A0A222WR49|A0A222WR49_9BACL Methylated-DNA--protein-cysteine methyltransferase; OS = Paenibacillus kribbensis OX=172713 GN=B4V02_21520 PE=3; SV = 1
MQHELIRTAAGTASTWASLKQEIIEAAPGLGIDSIGFASADPFLSLKAILEEHRAKGYESGFEEPDIDKRIYPELYGSQPASLIAIAVAYPAKMKNPPKSDKGKYRGIMARSAWGKDYHLVLREAMEKLEAFISERVPDAIMKNMVDTGELSDRAVAERAGIGFSGKNTMMISPTLGSWIYLGELLTNIPFQPDEPVTDGCGECTKCLDACPTGALVGPGELNAQRCVSFLTQTKGFLDEEFMLKIGNRLYGCDTCQMVCPKNRGLNWDHHPELAPDPEIVKPLLLPLLDLSNREFKERFGQSAAAWRGKKPIQRNAIIGLGNFKDISAVPKLTEVLLDDPRPELRGTAAWALSRIGGEDAMTAIKQASEKEQHEQVREMIAQAHSKLEEQQQVEQGPTTIYYDEMETPVGTLTLCATDRGLCRIEFGVFHAKEALLQQWARTWIGEYVYVQQPEKLREAADQLREYFAGERREFSIAYDLRGIPFQEQVWHALQNIPYGQSVSYKDIAESIGRAKAVRAVGDAINKNPLPILIPCHRVSGANGSLVGYAGGLPVKTKLVDLEKE

SEQ ID NO: 78999 - protein, 622 aa, Paenibacillus lactis
  REGION 1..622: note = tr|G4HPK0|G4HPK0_9BACL Methylated-DNA--protein-cysteine methyltransferase; OS = Paenibacillus lactis 154 OX=743719 GN=PaelaDRAFT_5911; PE = 3 SV=1
MTYTLGSYAPPPSVWEELKQELKTAAPELGIDDIGFASAEPFVSLRGILQNHRDKGYESGFEEPDLDKRVTPALPGTEPASLIAIAVAYPSKMENPPKSEPGKYRGIMARSAWGRDYHHVLREAMSRLEAFIRERVPDAVLESMVDTGALVDRAVAERAGIGFSAKNCAIISPKFGSWIYLGEMVTNIPFPPDQPVTEDCGECTKCIDACPTGALVGPGQLNAQRCVSFLTQTKGFLSEEVMRKIGNRLYGCDTCQIVCPKNRGKNWTHHEELQPDPEKAKPLLLPILDMSNREFKETFGDTAAAWRGRKPIQRNAVIALGNFKDISAVPKLSEVLLKDPRPELRGTAAWALGRIGGEEALNNLEKSMKTEGDPQVRDMLQQALAKLNADAATSENTRSESAAPVPEAAEEQGSAGAAAGKASAGNAAAEPEQPRPAIQGVEPMAVPEGGPEVLYYDELQSPIGTLTVCATEKGLCLIEFGSFHVKEAVIQQWCRTWSGNGGYERDEARLAPVTDQLKRYFAGELKEFTLPLDMRGTSFQLQVWEALKSIPYGTVCSYKDIAESIGRPKAVRAVGGANNKNPVPIVVPCHRVVGADGALIGYAGGPEIKRTLLAIEGITLGR

SEQ ID NO: 79000 - protein, 389 aa, Paenibacillus larvae
  REGION 1..389: note = tr|A0A2L1UII5|A0A2L1UII5_9BACL Putative iron-sulfur cluster binding protein OS=Paenibacillus larvae subsp. larvae OX=147375 GN=ERICIII_04171 PE=4 SV=1
MTKGHTNLKRDWRELKEEIIQAAPSLGIDKIGFASADPFLELKEILLQHREKGYESGFEEPDIDKRVYPELNFEGKPRSIISIAVAYPSKISNPPRSEPGAYRGIISRSAWGEDYHRVLKVRLERLEAFIRERVPEARMESMVDTGALVDRAVAERAGIGWTGKNCAIITPEYGSWVFLGDMITNIPFPADTSIMDQCGDCTICIDACPTGALVGPGQLNASRCISFLTQTKGVIEDEFKEKIGNRLYGCDTCQMVCPHNKGKNWTYHPEMQPDPEKVKPLLQPLLTMSNREYKEQYGSSASSWRGKKLIQRNAIIGLSKFKDRSAVPLLGKLLQTDPRPEIRETAAWALGKIGGDEAGTWIREFLEKEQDETVRFALQKAADRLNQEG

SEQ ID NO: 79001 - protein, 389 aa, Paenibacillus larvae; identical to SEQ ID NO: 79000
  REGION 1..389: note = tr|A0A1U9YM49|A0A1U9YM49_9BACL tRNA epoxyqueuosine(34) reductase QueG OS=Paenibacillus larvae subsp. pulvifaciens OX=1477 GN=B5S25_07770 PE=4 SV=1

SEQ ID NO: 79002 - protein, 614 aa, Paenibacillus lautus
  REGION 1..614: note = tr|A0A385TYQ7|A0A385TYQ7_PAELA Methylated-DNA--protein-cysteine methyltransferase; OS = Paenibacillus lautus OX=1401 GN=queG PE=3 SV=1
MTYTLGSYAPPPSVWEELKQELKAVAPELGIDDIGFASAEPFQSLKGILQSHRDKGFESGFEEPDLDKRVTPALPGTEPKSLIAIAITYHSKMENPPKSEPGKYRGIMARSAWGRDYHHVLREAMSRLEAYIKERVPDAELESMVDTGALVDRAVSQRAGIGFSAKNCAIISPKFGSWIFLGEMVTNIPFPPDTPITEDCGECTKCIDACPTGALVGPGQLNAQRCVSFLTQTKGFLDEEAMRKIGNRLYGCDTCQIVCPKNRGKSWTHQEDFKPDPEKAKPLLLPILDMSNREFKETFGDTSAAWRGRKPIQRNAVIALGNFKDISAVPKLSEVLLKDPRPELRGTAAWALGRIGGEEALNNLEKSMKSEGDSQVRDMLQQALNKLKPEQAGNEAPAQAQAAAEASSAGVPGSSNGGNPEQESSVIQGVEPMAIPEGGPEMLYYDEVQSPIGPLTVCATEKGLCLIEFGSFYVKEAVIQQWSRTWAGNGGYQRDEARLAPAITQLKQYFAGELKAFDVQLDMRGTSFQLQVWEALKSIPYGTVCSYKDVAESIGRPKAVRAVGGANNKNPVPIIVPCHRVVGTDGALIGYAGGPEIKRTLLTIEGAMPDRKGS

SEQ ID NO: 79003 - protein, 613 aa, Paenibacillus lautus
  REGION 1..613: note = tr|A0A328WEG1|A0A328WEG1_PAELA Methylated-DNA--protein-cysteine methyltransferase; OS = Paenibacillus lautus OX=1401 GN=queG PE=3 SV=1
MTYTLGSYAPPPSVWEELKQELKAVAPELGIDDIGFASAEPFESLKGILQNHRDKGYESGFEESDLDKRVTPALPGTKPKSLIAIAITYHSKMENPPKSEPGKYRGIMARSAWGRDYHQVLREAMSRLEEYIKERVPDAKLESMVDTGALVDRAVSQRAGIGFSAKNCAIISPKFGSWIFLGEMVTNIPFPPDTPVTEDCGECTKCIDACPTGALVGPGQLNAQRCVSFLTQTKGFLDEEAMRKIGNRLYGCDTCQIVCPKNRGKNWTHQEDFKPDPEKAKPLLLPILDMTNREFKEAFGDTSAAWRGRKPIQRNAVIALGNFKDISAVPKLSEVLLKDPRPELRGTAAWALGRIGGEEALNNLEKSMKSEGDSQVRDMLQQALNKLNKPTEKEAPAGAAADASSAGTPAAGSSNGDKPEQESPVIQGVEPMAIPEGGPEMLYYDELQSPIGPLTVCATEKGLCLIEFGSFYVKEAVIQQWSRTWAGNGGYQRDEARLAPAITQLKQYFAGELKAFDVQLDMRGTSFQLQVWEALKSIPYGTVCSYKDVAESIGRPKAVRAVGGANNKNPVPIIVPCHRVVGADGALIGYAGGPEIKRTLLTIEGAMPGRKGS

SEQ ID NO: 79004 - protein, 386 aa, unidentified
  source 1..386: note = Paenibacillus lentus
  REGION 1..386: note = tr|A0A3Q8S773|A0A3Q8S773_9BACL tRNA epoxyqueuosine(34) reductase QueG OS=Paenibacillus lentus; OX = 1338368 GN=queG PE=4 SV=1
MDWARLKQEIKDAAYSMGIDDIGFASADPFLSLKNVLLDRRAKGYESGFEEPDIDKRVYPELSLERPASLISIAVAYPSKLENPPKSEPGLRRGIFARAAWGQDYHTVLREAMARLEEFIMQRVEGARIESMVDTGALVDRAVAERAGIGYKAKNCMVISPKWGSWIYLGELITNIPFEPDTPVTEDCGECTKCIDSCPTGALVGPGELNAQRCVSFLTQTKGFLEDELMRKIGNRLYGCDTCQIVCPKNKGKSWNHRPELQPDPEMVKPLLLPILELSNREFKARFGSSAAAWRGKKPIQRNAVIALGNFKDPAAVPKLIDIMRNDPRPVLRGTAAWALSRIGGEEALQAIIGAITAEKDEEVLERLHAAQDKLSEEEVKVEAEN

SEQ ID NO: 79005 - protein, 389 aa, Paenibacillus macerans
  REGION 1..389: note = tr|A0A090Z8H1|A0A090Z8H1_PAEMA Epoxyqueuosine reductase OS=Paenibacillus macerans OX=44252 GN=queG PE=4; SV = 1
MKREIKENAASLGIDDIGFASADPFISLKAILLDRREKGYESGFEEPDIDKRIYPELSLEQPASLVSIAVAYPSKMDNPPKSEPGQRRGILARSAWGRDYHLVLREAMAKLEDFIRQRVPEARIESMVDTGALVDRAVAERAGIGFKGKNCAIISPKWGSWIYLGEMITNIPFPPDSPVTEDCGECTKCIDACPTGALVGPGVLNAQRCISFLTQTKGFVEEEFMLKIGNRLYGCDTCQIVCPKNRGKSWNHRPELQPDPETVKPLLLPLLDISNREFKERFGDSAAAWRGKKPIQRNAVIALGNFKDTASVPKLIDILFHDPRPVLRGTAAWALARIGGEAAAEAVSRALESEQDEEVLERLQAADRKLRGGASPGESRPTVKESKPD

SEQ ID NO: 79006 - protein, 572 aa, Paenibacillus macquariensis
  REGION 1..572: note = tr|A0A1N7AQ81|A0A1N7AQ81_9BACL Epoxyqueuosine reductase OS=Paenibacillus macquariensis OX=948756; GN = SAMN05421578_11362 PE=4 SV=1
MTLEHVRSPYAPSPSVWEQLKRDIKLAAPSLGIDDIGFATADPFVSLKSILQNHRDKGYESGFEEPDLDKRVTPVLPSSQPASLISIAVAYPSKMVNPPKSEPGAYRGILARSAWGRDYHYVLREAMQKLEDFIRERIPEAVLESMVDTGALVDRAVAERAGIGFSAKNCMIISPKWGSWIYLGDMVTNIPFPPDTPVTEDCGDCTKCIDACPTGALVGPGQLDAQRCVSFLTQTKGLLEEEQMRKIGNRLYGCDTCQIVCPKNRGKSWDHNKQLLPDPEITKPLLLPILDLTNREFKEKFGESAAAWRGKKPMQRNAIIALGNFKDRSAVPRLEEVLLKDPRFEMRGTAAWALGRIGGEEALNSVNKGLAVEEDVKVQEMLMKAKEKLEPSTSIEEEHSQEIIYYDEITTPIGVLTLCTSVKGICLIEMDSFTTKEAVIQQWSRNWAQDAEFIHDGERLSEAKTQLEQYFAGERKQFDLPIDMRGTLFQLQVWTTLADIPYGETCSYGQLAEAIERPKAVKAVQGATNKNPIPIIVPCHRIIGADNSLAGYVYGHEIRSQLLSFEGSLPER

SEQ ID NO: 79007 - protein, 572 aa, Paenibacillus macquariensis
  REGION 1..572: note = tr|A0A168G804|A0A168G804_9BACL Epoxyqueuosine reductase OS=Paenibacillus macquariensis subsp. defensor; OX = 467974 GN=PMSD_11505 PE=4 SV=1
MTLEHVQSPYAPSPSVWEQLKRDIKLAAPSLGIDDIGFATADPFVSLKSILQNHRDKGYESGFEEPDLDKRVTPALPSTQPASLISIAVAYPSKMVNPPKSEPGAYRGILARSAWGRDYHYVLREAMQKLEDFIRERVPEAVLESMVDTGALVDRAVAERAGIGFSAKNCMIISPKWGSWIYLGDMVTNIPFPPDTPVTEDCGECTKCIDACPTGALVGPGQLDAQRCVSFLTQTKGLLEEEQMRKIGNRLYGCDTCQIVCPKNRGKSWDHNKQLLPDPEIAKPLLLPILDLTNREFKEKFGESAAAWRGKKPMQRNAIIALGNFKDRFAVPRLEEVLLKDPRFEMRGTAAWALGRIGGEEALNSVNKGLAVEEDVKVQEMLMKAKEKLEPSTSIEEEHSQEIIYYDEITTPIGVLTLCTSVKGICLIEMDSFTTKEAVIQQWSRNWAQDAEFIHDGERLSDAKTQLEQYFAGERKQFDLPMDMRGTLFQLQVWTTLADIPYGETCSYGQLAEAIGRPKAVKAVQGATNKNPIPIIVPCHRIIGADNSLAGYVFGHEIRSQLLSLEGSLPER

SEQ ID NO: 79008 - protein, 382 aa, unidentified
  source 1..382: note = Paenibacillus montanisoli
  REGION 1..382: note = tr|A0A328TY19|A0A328TY19_9BACL tRNA epoxyqueuosine(34) reductase QueG OS=Paenibacillus montanisoli OX=2081970 GN=queG PE=4 SV=1
MNKIDWEQLKAEMKDAAASLGIDKIGIASAAPFTELRKRLERHRELGYESGFEEPDLAKRTEPSLLFEDPKSIIAIAVAYPSKLQDPPKSEPGARRGILSRSAWGEDYHGVLRERLRRLEAWLQERVPEGRFLGMVDTGALSDRAVAERAGIGWIGSNCSIITPEWGSWVYLGEMITNLPLPPDAPVTESCGSCTACIDACPTDALVGPGQLNSQRCISFVTQTKGIVSDELMRKIGNRLYGCDTCQIVCPENKGKNATHHPELMPDNEKVKPLLVPLLTMGNRAFKEQYGASSSAWRGRKPIQRNAVIALGNFKDASAIPDLAEVLHGDTRFELRATAAWSLGRIGGEAAAEALRAAQLREQDETVREAIMGALSSLAAST

SEQ ID NO: 79009 - protein, 410 aa, Paenibacillus mucilaginosus
  REGION 1..410: note = tr|F8FQ20|F8FQ20_PAEMK YhbA OS=Paenibacillus mucilaginosus (strain KNP414) OX=1036673 GN=yhbA PE=4 SV=1
MEDQHPDHDTELPAGLASLPDVPAGAWKRLKDKLRSAAPDLGIDKIGFASAEPFTELRDILERHREKGYESGFEERDIAKRVDPALTMERPRSILSIAVAYPSKLPNPPRSEPGRYRGILSRSAWGTDYHHVLRDRLQKLENWIRAEVPGARTVSMVDTGVLVDRAVAERAGIGWIGKNCSVITPEWGSWVYLGEMVTNVPFPPDVPVLQDCGDCTLCIDACPTGALVGPGQLNAQRCVSYLTQTKGIIEDDELKRKIGNRLYGCDTCQIVCPKNKGIHADHHPELQPDPEQVKPLLVPLLQMTNREFKEKFGTSSASWRGRKPIQRNAILALGNFRDREALPELLRVLRTDERPEIRATAAWAVGRIGGAAAEAALREALERETDEAARREIVKAQGLAQEQEQTAAQE

SEQ ID NO: 79010 - protein, 418 aa, Paenibacillus mucilaginosus
  REGION 1..418: note = tr|I0BB50|I0BB50_9BACL Epoxyqueuosine reductase; OS = Paenibacillus mucilaginosus K02 OX=997761 GN=queG PE=3; SV = 1
MEDQHPDHDTELPAGLASLPDVPAGAWKRLKDKLRSAAPDLGIDKIGFASAEPFTELRDILERHREKGYESGFEERDIAKRVDPALTMERPRSIISIAVAYPSKLPNPPRSEPGRYRGILSRSAWGTDYHHVLRDRLQKLENWIRAEVPGARTVSMVDTGVLVDRAVAERAGIGWIGKNCSVITPEWGSWVYLGEMVTNVPFPPDVPVLQDCGDCTLCIDACPTGALVGPGQLNAQRCVSYLTQTKGIIEDDELKRKIGNRLYGCDTCQIVCPKNKGIHADHHPELQPDPEQVKPLLVPLLQMTNREFKEKFGTSSASWRGRKPIQRNAILALGNFRDREALPELLRVLRTDERPEIRATAAWAVGRIGGAAAEAALREALERETDEAARREIVKAQGLAQEQEQTAAQEQHTRETGA

SEQ ID NO: 79011 - protein, 387 aa, Paenibacillus nanensis
  REGION 1..387: note = tr|A0A3A1VSG9|A0A3A1VSG9_9BACL Epoxyqueuosine reductase OS=Paenibacillus nanensis OX=393251 GN=queG PE=3; SV = 1
MTDRWDNLKREMKEAARELGIDAIGVASAEPFTTLKQRLIRHRELGRESGFEEKDLDKRTDPSLLFDKPQSIIAIAVAHPSKLPDPPKSEPGARRGIMARTSWGQDYHSVLRNRLQRLEEWLRERVPDLRAESMVDTGELSDRAVAERAGIGWSAKNCAIISPELGSWIYLGEMITNLPLPPDEPVTEGCGSCNKCIDACPTGALVGPGELDARKCVSFLTQTKEMLSDEFMRKIGNRLYGCDTCQIVCPANKGKNWTQHPELQPDPELAKPLLTPLLTIGNREFKERFGGTSGAWRGKKPIQRNAVIALGNFKDPSAVPDLIGVLENDTRPVLRGTAAWALGRIGGEQAEKALHEAKGKEEDKEALDAIEFALNMLRGGMKEEEVR

SEQ ID NO: 79012 - protein, 389 aa, Paenibacillus naphthalenovorans
  REGION 1..389: note = tr|A0A480BP00|A0A480BP00_9BACL Epoxyqueuosine reductase OS=Paenibacillus naphthalenovorans OX=162209; GN = queG PE=3 SV=1
MVKNEAVDWARLKEELRADAPRLGIDKIGFASADPFVELKDILLKHREKGYESGFEEPDIDKRVDPALTLKAPRSIISIAVAYPSKMKNPPRSEPGAYRGILSRSAWGTDYHHVLRNRLERLEQWIRERVPGARTVSMVDTGALVDRAVAKRAGIGWLGKNCSVITPEWGSWVYLGELITNVPFPPDTPVTESCGDCTLCIDACPTGALVGPGQLNAQRCVSYLTQTKGHIEDDELKRKIGNRLYGCDTCQIVCPKNKGMHADHHPELEPDPELVKPLLKPLLFLSNREFKERFGSSAAAWRGRKPIQRNAILALGNFRDKTAVPELIHLLRTDERPEIRGAAVWALGRIGGAEAREALEAAAGKEQDEAVRRELAKAISQYAEGQQVE

SEQ ID NO: 79013 - protein, 389 aa, Paenibacillus naphthalenovorans
  REGION 1..389: note = tr|A0A0U2N087|A0A0U2N087_9BACL Epoxyqueuosine reductase OS=Paenibacillus naphthalenovorans OX=162209; GN = queG PE=3 SV=1
MVKNEAVDWARLKEELRADAPRLGIDKIGFASADPFVELKDILLKHREKGYESGFEEPDIDKRVDPALTLKAPRSIISIAVAYPSKMKNPPRSEPGAYRGILSRSAWGTDYHHVLRNRLERLEQWIRERVPGARTVSMVDTGALVDRAVAKRAGIGWLGKNCSVITPEWGSWVYLGELITNVPFPPDTPVTESCGDCTLCIDACPTGALVGPGQLNAQRCVSYLTQTKGHIEDDELKRKIGNRLYGCDTCQIVCPKNKGMHADHHPELEPDPELVKPLLKPLLFLSNREFKERFGSSAAAWRGRKPIQRNAILALGNFRDKTAVPELIRLLRTDERPEIRGAAVWALGRIGGAEAREALEAAAGKEQDEAVRRELAKAISQYAEGQQVE

SEQ ID NO: 79014 - protein, 392 aa, unidentified
  source 1..392: note = Paenibacillus nuruki
  REGION 1..392: note = tr|A0A1E3KXS2|A0A1E3KXS2_9BACL Epoxyqueuosine reductase OS=Paenibacillus nuruki OX=1886670; GN = PTI45_04104 PE=4 SV=1
MTQQEVLQQTTTRWEQLKLEIKQAAPSLGIDDVGFTTADPFLYLKGVLEEHRRKGHESGFEEPDIEKRIHPSLALDGAKSIIAISVTYHSKMENPPKSEPGQYRGIMARSAWGKDYHYVLRDRMQRLEDFIREKVPEVRIESMVDTGVLSDRAVAQRAGIGFYGKNCAVISPTLGSWIFLGDMITDIPFPPDTPVTEDCGTCTKCIDACPTGALVGPGQLNSQVCVSFLTQTKGMLSDEHMRKIGNRLYGCDTCQIVCPKNKGKNWNHQEELRPDPEKAKPLLLPILDLSNREFKEQFGDTSAAWRGKKPIQRNAVIALGNFRDKSAVPKLTELLHRDPRPELRGTIAWALSRIGGEDALQAVIHALAKEVEPEVTERLLQAKAILEGEIAE

SEQ ID NO: 79015 - protein, 445 aa, unidentified
  source 1..445: note = Paenibacillus nuruki
  REGION 1..445: note = tr|A0A1E3L5W0|A0A1E3L5W0_9BACL Epoxyqueuosine reductase OS=Paenibacillus nuruki OX=1886670 GN=queG PE=4; SV = 1
MADMKKHPTVLRYYESVAQSANFDNEILDYDWIRELCLEAGADDVGVISIERSELDDQREDILSVFPHAKTMISFVSRMNREPIRTPARSLANIEFHHTGDKVADTSHNIVSALEARGVRALNAAMGFPMEMDKFPGKAWVVSLKPVAVAAGLGKMGIHRNVIHPKFGNFILLGAIMLDAKVNKEDRPIDYNPCLECKLCVAACPVGAIGADGQFNFSSCATHNYREFMGGFSDFVETIVDSKNTKEFRNEVPATESASWWQSLSFGANYKAAYCLSVCPAGDDVIGPFLQDRKGFMNDILKPLQAKEETIYVIPGSDAEAHVQKRFPHKTVKRVGNGLIPNSISLLVTLMPHVFQPNQATDVNCTYHFTFTGNETRQTTFDIRNKKLQVTDGLHGKPDIQITVDSKTWLKIVAKEKNVGVALLTGKLRFKGNPKLLIKFEKCFA

SEQ ID NO: 79016 - protein, 401 aa, Paenibacillus odorifer
  REGION 1..401: note = tr|A0A1R0ZC04|A0A1R0ZC04_9BACL tRNA epoxyqueuosine(34) reductase QueG OS=Paenibacillus odorifer OX=189426 GN=BSK65_21530 PE=4 SV=1
MNNTFQSPYAPPPSKWAQLKAEIQEAATSLGIDDIGFTTAEPFLYLKNILQDHRDKGYESGFEEPDLDKRTIPALSSGDKPLSIISIAVAYPSKMENPPKSEPGARRGILARASWGRDYHHVLREALSKLEDFIHERVPEAVLESMVDTGVLVDRAVAERAGIGFSGKNCSIISPKWGSWIYLGEMVTNIPFAPDEPVEEGCGECTKCIDACPTGALVGPGQLNAQACISFLTQTKGFLSDEYMTKIGNRLYGCDTCQIVCPKNRGKNWNHRPQMLPDPEIVKPLLMPILDLSNREFKERFGNSSAAWRGKKPMQRNAIIALGNFKEVEAVPKLTEIVLKESRPEMRGTAAWALGRIGGEEALAAVESALEREEHDTVKEMLSRAQDVLLTAKQAREDSDV

SEQ ID NO: 79017 - protein, 401 aa, Paenibacillus odorifer
  REGION 1..401: note = tr|A0A1R0YAF9|A0A1R0YAF9_9BACL tRNA epoxyqueuosine(34) reductase QueG OS=Paenibacillus odorifer OX=189426 GN=BSK52_02435 PE=4 SV=1
MNDTFQSPYAPPPSKWAQLKAEIQEAATSLGIDDIGFTTAEPFLYLKNILQDHRDKGYESGFEEPDLDKRTIPALSSGDKPLSIISIAVAYPSKMENPPKSEPGARRGILARASWGRDYHHVLREALSKLEEFIHERVPEAVLESMVDTGVLVDRAVAERAGIGFSGKNCSIISPKWGSWIYLGEMVTNIPFAPDEPVEEGCGECTKCIDACPTGALVGPGQLNAQACISFLTQTKGFLSDEYMTKIGNRLYGCDTCQIVCPKNRGKNWNHRPQMLPDPEIVKPLLMPILDLSNREFKERFGNSSAAWRGKKPMQRNAIIALGNFKEAGAVPKLTEIVLKEPRPEMRGTAAWALGRIGGEEALAAVESALEHEEHDTVRQMLSRAQDVLLTAKQTREDSDV

SEQ ID NO: 79018 - protein, 387 aa, unidentified
  source 1..387: note = Paenibacillus oryzae
  REGION 1..387: note = tr|A0A1A5YJM3|A0A1A5YJM3_9BACL tRNA epoxyqueuosine(34) reductase QueG OS=Paenibacillus oryzae; OX = 1844972 GN=A7K91_13440 PE=4 SV=1
MMDWSKLKQEMKAAATALGIDDIGVASADPFVTLKQRLIRHRELGRESGFEEPDLDRRTNPALLFEDPQSIIAIAIAYPSKLVDPPKSEPGERRGIMARSAWGEDYHHVLRDRLAKLESWLKERVPGTRVESMVDTGALSDRAVAERAGIGWSAKNCAIISPKLGSWIYLGEMITNLPLPPDVPVTEGCGSCTKCIDACPTGALVGPGELNAKRCISFVTQTKDMVSDEFMRKIGNRLYGCDTCQVVCPVNRGKNWTHQPELQPDNELAKPLLVPLLEMGNRQFKEAYGRTSSAWRGRKPIQRNAVIALGNFKDASAIPHLIKVLRDDPRPVLRGTAAWSLGRIGGAEAACALREALNNEQDEVALSAISEAVKSLEVPIRDCEFPL

SEQ ID NO: 79019 - protein, 393 aa, unidentified
  source 1..393: note = Paenibacillus oryzisoli
  REGION 1..393: note = tr|A0A198A8F0|A0A198A8F0_9BACL tRNA epoxyqueuosine(34) reductase QueG OS=Paenibacillus oryzisoli OX=1850517 GN=A8708_22045 PE=4 SV=1
MAVSHAETTDWRKLQQEIVEAASSLGIDKIGFTSAEPFHALKDILLRHREKGFESGFEEPDIEKRVHPELSFEAPRSIISIAVAYPSKLKNPPRSEPGAYRGMISRSSWGSDYHDVLRDRLAKLEAFIAERVPEARLMSMVDTGALVDRAVAERAGIGWSGKNCAVITPEWGSWVYLGEMITNIPFESDIGIMDQCGDCTICIDACPTGALVGPGQLNSSRCISFITQTKGYVDDEYKRKIGNRLYGCDTCQVVCPKNKGMNWTHHPELTPDPEKVKPLLIPLLTMSNKDFKEQYGRIAASWRGKKPIQRNAIIALGNFKDGTAVPVLTELLRSDPRPEIRATAAWALGRIGGEEAFAALRKAAAAEQEPQVQADIEKAIAGQNSQAVAVQEG

SEQ ID NO: 79020 - protein, 629 aa, Paenibacillus pabuli
  REGION 1..629: note = tr|A0A327PEG6|A0A327PEG6_9BACL Epoxyqueuosine reductase OS=Paenibacillus pabuli OX=1472 GN=DET54_11676; PE = 4 SV=1
MTSVQTGAAKAAAVWEKLKQEIKAAAPEMGIDDIGFASAEPFVTLKSILEQHRAKGFESGFEEPDIEKRIRPELKDGEPASLIAIAVAYPSKMVNPPKSEPGAYRGILARSAWGQDYHQVLRAAMDKLVHFIRERVPEAMIESMVDTGALVDRAVSQRAGIGFSAKNCAIISPKFGSWIFLGELVTNIPFQPDNPVTEDCGECTKCIDACPTGALVGPGQLNAQRCISFVTQTKGFVDEEFMLKIGNRLYGCDTCQIVCPKNRGKNWDHHPEFHPDPEIVKPLLIPLLDIGNREFKERFGQSSAAWRGKKPIQRNAVIALGNFKDKTAVPKLTEVLKRDPRPELRGTAAWALSRIGGEDAMRAIGEAAANEQEGNVLSMLQKAKERLSSSKTLPDKPQADLKSNDKPEDQKEQNNQINQLDVQQPNQKTEETPEQKSGQATEPAKPEAAAWKPSAVTGLHGTPVYYDELLTPIGTLTLCATDKGLCHIDFGAFHVREAHLQQWARTWIGEYRYEKNEEKLSEAAQQLKQYFAEERKAFDLKLDLFGTPFQLQVWQVLSDISYGEASTHQQVAEIIGRPKAVRAVLDAISKNPLPIIIPCHRISGKDGTLVGYVGGLQTKEQLLTLEQQS

SEQ ID NO: 79021 - protein, 382 aa, unidentified
  source 1..382: note = Paenibacillus paeoniae
  REGION 1..382: note = tr|A0A371PG40|A0A371PG40_9BACL tRNA epoxyqueuosine(34) reductase QueG OS=Paenibacillus paeoniae OX=2292705 GN=queG PE=4 SV=1
MNYDWIKLKQEMKDAAKELGIDSIGVASAEVFTTLKARLIRHRELGRESGFEEPDLDKRTDPSLLFDDPQSIIAIAIAYPSKLMDPPKSEPGARRGIMARSAWGEDYHKVLRNRLERLEAWLRERVPETRVESMVDTGALSDRAVAERAGIGWSAKNCAIISPEFGSWIYLGEMIANLPLPPDQPITESCGTCTKCIDACPTGALVGPGQLDAKKCISFITQTKGMVEDEYMRKIGNRLYGCDTCQVVCPVNRGKNWTHQPELQPDNELAKPLLVPMLTIGNREFKDMYGFTSSAWRGKKPIQRNAVIALGNFKEKTAVPDLIGVLKHDPRPVLRGTAAWSLGRIGGEEAATALHEAMRGESDAEARDAIASAIHMLASEQE

SEQ ID NO: 79022 - protein, 416 aa, Paenibacillus pasadenensis
  REGION 1..416: note = tr|A0A2N5NBP7|A0A2N5NBP7_9BACL Epoxyqueuosine reductase OS=Paenibacillus pasadenensis OX=217090 GN=queG; PE = 3 SV=1
MDRIAADAGFWSRLKSEMKEAAYGLGIDDIGVASPEPFAALKGRLIRHRELGYESGFEPKDIERRVDPSLLFDEPLSIIAIAVGYPSKLQDPPKSEPGARRGILSRSSWGEDYHTVLRDRLARLEAWLRERVPELRAESMVDTGELSDRAVAERAGIGWSGKNSFILNRKHGTYIFLAEMITNLPLEPDSPVEDGCGSCTKCIDACPTGALVGPGQLNAQRCVSYLTQTKEMVSDELMRKIGNRLYGCDTCQIVCPVNRGVNVTRHPEFQPDPEQVKPLLEPLLEIGNREYKERFGRNASSWRGKKPIQRNAVIALGNFKEKSAVPALIRVLQQDPRPVLRGTAAWSLGRIGGPEAEAALAEAAERESDEEARSWAARSLASLREQAEAGGAAAAKPEAKAADAAGTAIEIARPPR

SEQ ID NO: 79023 - protein, 397 aa, Paenibacillus pectinilyticus
  REGION 1..397: note = tr|A0A1C1A673|A0A1C1A673_9BACL tRNA epoxyqueuosine(34) reductase QueG OS=Paenibacillus pectinilyticus OX=512399 GN=A8709_10510 PE=4 SV=1
MTVSGEFSLDGTRLDWRKLKQEIVEAAPSLGIDKIGFTSAEPFHELRDILLRHREKGFESGFEEPDIDKRVYPELSFESPRSIISIAVAYPSKLADPPRSEPGAYRGIISRSSWGSDYHDVLRDRLAKLEAFIAERVPEARLQSMVDTGVLVDRAVAERAGIGWSGKNCAVITPEWGSWVYLGEIITNIPFESDISIMDQCGDCTICIDACPTGALVGPGQLNSSRCISFITQTKGYVDDEYKRKIGNRLYGCDTCQIVCPKNKGMNWTHHPEFTPDPEKVKPLLIPLLTMSNKDFKEQYGRIAASWRGKKPIQRNAIIALGNFKDRSAVPVLVDLLRSDPRPEIRATAAWALGRIGGEEAVSALERAAAAEQEPQVQTDIDKALAAQKSTAAVQEE

SEQ ID NO: 79024 - protein, 582 aa, Paenibacillus peoriae
  REGION 1..582: note = tr|A0A0K2F3V9|A0A0K2F3V9_9BACL Methylated-DNA--protein-cysteine methyltransferase; OS = Paenibacillus peoriae OX=59893 GN=ABE82_03675 PE=3 SV=1
MQRGLTQAAAGTASTWASLKQEIIEAAPGLGIDSIGFASADPFLSLKAILEEHRAKGYESGFEEPDIDKRIYPELYGSQPASLIAIAVAYPSKMKDPPKSDKGKYRGILARSAWGKDYHLVLREAMEKLEAFISERVPDAILKNMVDTGELSDRAVAERAGIGFSGKNTMMISPTLGSWIYLGELLTNIPFQPDEPITDGCGECTKCLDACPTGALVGPGQLNAQRCVSFLTQTKGFLDEEFMRKIGNRLYGCDTCQMVCPKNRGLNWDHHPELTPDPEIVKPLLLPLLDLSNREFKDQFGQSAAAWRGKKPIQRNAVIGLGNFKDISAVPKLTEVLLDDPRPELRGTAAWALSRIGGENAMTAIKQASEKEQHEQVREMIAQAHSKLEEQEQAEQQKASELPKSEVTAGDSQGPTTIYYDEMETPVGTLTLCSTDRGLCRIDYGVFHAKEALLQQWARTWIGEYVYVQEPEKLREAADQLREYFAGERREFSIAYDLRGTPFQEQVWRALQNIPYGQSVSYKDIAESIGRAKAVRAVGGANNKNPLPILFPCHRVSGANGSLVGYAGGLPVKTKLLDLEKQ

SEQ ID NO: 79025 - protein, 583 aa, Paenibacillus peoriae
  REGION 1..583: note = tr|A0A2S6NSX1|A0A2S6NSX1_9BACL Methylated-DNA--protein-cysteine methyltransferase; OS = Paenibacillus peoriae OX=59893 GN=queG PE=3 SV=1
MQRGLTQAAAGTASTWASLKQEIIEAAPGLGIDSIGFASADPFLSLKAILEEHRAKGYESGFEEPDIDKRIYPELYGSQPASLIAIAVAYPSKMKDPPKSDKGKYRGILARSAWGKDYHLVLREAMEKLEAFISERVPDAILKNMVDTGELSDRAVAERAGIGFSGKNTMMISPTLGSWIYLGELLTNIPFQPDEPVTDGCGECTKCLDACPTGALVGPGQLNAQRCVSFLTQTKGFLDEEFMRKIGNRLYGCDTCQMVCPKNRGLNWDHHPELTPDPEIVKPLLLPLLDLSNREFKDRFGQSAAAWRGKKPIQRNAVIGLGNFKDISAVPKLTEVLLDDPRPELRGTAAWALSRIGGENAMTAIKQASEKEQHEQVREMIAQAHSKLEEQEQAEQQKASELPKSEVTAGDSQGGPTTIYYDEMETPVGTLTLCATDRGLCRIDYGVFHAKEALLQQWARTWIGEYVYVQEPEKLREAADQLREYFAGERREFSIAYDLRGTPFQEQVWRALQNIPYGQSVSYKDIAESIGRAKAVRAVGGANNKNPLPILFPCHRVSGANGSLVGYAGGLPVKTKLLDLEKQ

SEQ ID NO: 79026 - protein, 186 aa, Paenibacillus pini
  REGION 1..186: note = tr|W7Z5N7|W7Z5N7_9BACL Iron-sulfur cluster-binding protein OS=Paenibacillus pini JCM 16418 OX=1236976; GN = JCM16418_3769 PE=4 SV=1
MTSQKKQAGYAPSPSPWEQLKQEIKEAAADFGIDDIGFASADPFVSLRSILQNHRDLGYESGFEEPDLDKRVTPALPSSEPASLIAIAVAYPSKMMNPPKNEPGQYRGILARSAWGRDYHQVLRDAMAKLEAFIRERVPEAVLESMVDTGALVDRAVSQRAGIGFSGKNCCIISPKWAHGYISARW

SEQ ID NO: 79027 - protein, 386 aa, unidentified
  source 1..386: note = Paenibacillus pinisoli
  REGION 1..386: note = tr|A0A3A6Q127|A0A3A6Q127_9BACL Epoxyqueuosine reductase OS=Paenibacillus pinisoli OX=1276110 GN=queG; PE = 3 SV=1
MMKYDWDKLKQEMKDAAKELGIDAVGVASAEVFTTLKARLVRHRELGRESGFEEPDLDKRTDPSLLFDDPQSIIAIAIAYPSKLIDPPKSEPGARRGIMARSAWGEDYHKVLRNRLERLEAWLRERVPEIRVESMVDTGALSDRAVAERAGLGWSAKNCAIISPEFGSWIYLGEMITNLPIQPDSPVTESCGTCTKCIDACPTGALVGPGELDAKKCISFLTQTKGMVSDEYMRKIGNRLYGCDTCQVVCPENRGKNWTHQPELQPDNELAKPLLLPLLTIGNREFKDMYGFTSSAWRGKKPIQRNAVIALGNFKEKAAVPDLIGVLKDDPRPVLRGTAAWSLGRIGGEEAAEALQAAMRTESDAEARDAIASAIQMLDSEHEQHP

SEQ ID NO: 79028 - protein, 583 aa, Paenibacillus polymyxa; identical to SEQ ID NO: 79025
  REGION 1..583: note = tr|A0A2N9Z640|A0A2N9Z640_PAEPO Methylated-DNA--protein-cysteine methyltransferase; OS = Paenibacillus polymyxa OX=1406 GN=queG PE=3 SV=1

SEQ ID NO: 79029 - protein, 577 aa, Paenibacillus polymyxa
  REGION 1..577: note = tr|E3ECK5|E3ECK5_PAEPS Methylated-DNA--protein-cysteine methyltransferase; OS = Paenibacillus polymyxa (strain SC2) OX=886882 GN=yhbA; PE = 3 SV=1
MQRELTRTATGTASTWASLKQEIIEAAPGLGIDSIGFASADPFLSLKAILEEHRAKGYESGFEEPDIDKRIYPELYGSQPASLIAIAVAYPSKMKDPPKSDKGKYRGILARSAWGKDYHLVLREAMEKLEAFISERVPDAILKNMVDTGELSDRAVAERAGIGFSGKNTMMISPTLGSWIYLGELLTNIPFQPDEPVTDGCGECTKCLDACPTGALVGPGQLNAQRCVSFLTQTKGFLDEEFMLKIGNRLYGCDTCQIVCPKNRGLNWAHHPELTPDPEIVKPLLLPLLDLSNREFKDRFGQSAAAWRGKKPIQRNAVIGLGNFKDVSAVPKLTEVLLDDPRPELRGTAAWALSRIGGENAMTAIKQASEKEQHEQVREMIAQAHSKLEEQEQAEQQTSAELKAEDSQGPTTIYYDEMETPVGTLTLCATDRGLCRIDYGSFYAKEALLQQWARTWVGEYVYVQEPEKLREAAEQLREYFAGERREFSIAYDLRGTPFQEQVWRALQNIPYGQSVSYQDIAESIGRAKAVRAVGGANNKNPLPILFPCHRVSGANGSLVGYAGGLPVKMKLLELEKE

SEQ ID NO: 79030 - protein, 638 aa, unidentified
  source 1..638: note = Paenibacillus polysaccharolyticus
  REGION 1..638: note = tr|A0A1G5LF25|A0A1G5LF25_9BACL Epoxyqueuosine reductase OS=Paenibacillus polysaccharolyticus OX=582692; GN = SAMN05720606_12466 PE=4 SV=1
MTNVRTGAAQAASVWEALKQEIKAAGPELGIDDIGFASADPFISLKSMLEQSRDKGYASGFEEPDIEKRVHPALPDSEPASLIAIAVAYPSKMVNPPKSEPGAYRGIFARSAWGQDYHQVLRAAMDKLVNFIRERVPEAIIESMVDTGALVDRAVSQRAGIGFSAKNCSIISPKFGSWIFLGELVTNIPFPPDTPVTEDCGECTKCIDACPTGALVGPGQLNAQRCISFLTQTKGFLDEEFMLKIGNRLYGCDTCQIVCPKNRGKNWDHHPEFHPDPEVVKPLLLPLLDIGNREFKERFGQSSAAWRGKKPIQRNAVIALGNFKDKSAVPKLTQVLKRDPRPELRGTAAWALSRIGGEDAMRAIGEAAAIEQDGNVLSMLQKAEERLLSSETLPDRPQAEQVKKQQADTVEAVQYTQAASFSQARDTEFGEETQRTANVIKSESDGEPEQSVASGRSEATAWKPSAVTGLHGKPVYYDEVLTPIGTLTLCATDEGLCHIDFGAFHVREAHLQQWARTWVGEYRYEKNEEKLSEAAGQLVQYFAGERTTFDLQLKQYGTAFQLQVWEVLSDISYGEALTHQEVAEKIGRPKAVRAVLDAISKNPIPIIIPCHRLSGKDGTLVGYVGGLQTKEQLLTLEQ

SEQ ID NO: 79031 - protein, 577 aa, Paenibacillus popilliae
  REGION 1..577: note = tr|M9M0F2|M9M0F2_PAEPP Multifunctional fusion protein OS=Paenibacillus popilliae ATCC 14706 OX=1212764; GN = queG PE=3 SV=1
MVEHKQKIRWTPYGTDQEAGAKAIREADRWQRLKQEIIDAAPSMGIDQVGFTTADPFTELKARLQHSIDQGYASGFEEPDLDRRTQPTLLLDRARSIIAIAVAYPSKMEGVPKSERGACRGMFARTAWGLDYHHVLRDRLQRLEQFLCERVPEVRVKSMVDTGELCDRAVAERSGIGFSGKNCSIISPKWGSWIYLGEMITNLPLPPDHPLTEDCGECTRCLDACPTGAFVGPGQLNAQRCISFQTQSKEILPHEMMVKIGNRLYGCDTCQIVCPKNRGLNWTHHAEMQPDPEQAKPLLVPLLSLSNREFKSRFGSSAAAWRGKKPIQRNAIAALGNFRDRQAVPVLEGLLCMDERPDIRAAAAWALGQIGGPDAKRILKAALSREEETKVKEAVMQAQECAEAQHEPLYVQEMESPLGPLTLAATATGLFALEFGNALSVAEGLQRRAARSYGRVVLQRHPERLQEAKRQMEAYFAGTRREFDLTLDIQGTPFQRQVWQALTDIPYGETRSYKQIAEAIGIPGAVRAVGGANNRNPLSIIVPCHRVIGADGKLVGYGGGMGKKITLLRLEGIPCGQ

SEQ ID NO: 79032 - protein, 383 aa, Paenibacillus prosopidis
  REGION 1..383: note = tr|A0A368W761|A0A368W761_9BACL Epoxyqueuosine reductase OS=Paenibacillus prosopidis OX=630520; GN = DFP97_101173 PE=4 SV=1
MTDRWAKLKEEMIQAAPSLGIDKIGVASADPFVSLKQVLLRHRELGRESGFEEPDIEKRTNPALLFENPQSIIAIAIAYPSKLTNPPKSEPGARRGILSRSAWGEDYHRVLRDRLARLEAWLRERVPELRAESMVDTGALSDRAVAERAGIGWSAKNCAVISPELGSWIYLGEMITNIPFAPDEPVTEGCGSCTKCIDACPTDALVGPGQLNSSRCISFVTQTKGMVSDELMRKIGNRLYGCDTCQTVCPVNRGKNWTHQPELQPDPEVVKPLLVPLLTIGNKEFQARYGHTSSAWRGKKPIQRNAVIALGNFKEASAVPDLIRVLEQDSRPVLRGTAAWALARIGGEQAKAALLSASGKERDEEVRTSISNALEQIAELPKK

SEQ ID NO: 79033 - protein, 445 aa, Paenibacillus prosopidis
  REGION 1..445: note = tr|A0A368VSH6|A0A368VSH6_9BACL Epoxyqueuosine reductase QueG OS=Paenibacillus prosopidis OX=630520; GN = DFP97_117127 PE=4 SV=1
MADMKKHPTVVRYYESSAESATLDNETLDYEWIRELCLEAGADDVGVISMERSELDDQRDDILSAFPHAKTMISFVARMNREPIRTPARSLANIEFHHTGDKVAETAHHIVSALEARGIRALNAAMGFPMEMDKFPGKTWVVSLKPVAVAAGLGHMGIHRNVIHPKFGNFILLGAVMMDARVNKEDRPIDYNPCLECKLCVSACPVGAIGADGQFNFSSCATHNYREFMGGFSDFVETVVDSKNFKEFRNEVPITETTSWWQSLSFGANYKAAYCLSVCPAGDDVIGPFLKDRKGFMNDILKPLQAKEETVYVTPGSDAEAYVMKRFPHKTVKRVGNGLRPNTIRLLVTLMPHAFQPKQATGLNCTYHFAFTGDETRQTTIDIRDNKLQIRDGFHGKPDIRITVDSKTWLKIVGKEKSVAAALLTRKLRIKGNPKLLMKFEKCFA

SEQ ID NO: 79034 - protein, 591 aa, Paenibacillus rhizosphaerae
  REGION 1..591: note = tr|A0A1R1EAG3|A0A1R1EAG3_9BACL Methylated-DNA--protein-cysteine methyltransferase; OS = Paenibacillus rhizosphaerae OX=297318 GN=BK138_31065; PE = 3 SV=1
MTSGKPQAAYAPSASPWEQLKQDIKEAAAGFGIDDIGFASADPFVSLKSILENHRKLGYESGFEEPDLDKRVTPALPDAQPASLIAIAVAYPSKMEHKPKQVPGQYRGILARSAWGRDYHQVLRDAMGKLEAFIRERVPDAVMESMVDTGALVDRAVSERAGIGFSAKNCCIISPKWGSWIYLGEMVTNIPFPPDTPVTEDCGDCTMCIDACPTGALVGPGQLNAQRCISFLTQTKGFLEDEVMRKIGNRLYGCDTCQVICPKNKGKNWTHHDYLLPDPEKDKPLLLPILDLSNKEFKEKFGESAAAWRGRKPIQRNAVIALGNFKDTSAVPRLGRVLLEDPRPELRGAAAWSLGRIGGEEALNWLNKGLASEQDEKVIDMMSEAQEKLQPAGSGQPADAEMAADDFSPGLGGEKETVYYSEMISPIGPLTLCATEKGLCLIEFGPFNVKEAVLQKWSRTWCGGGDFVQDDERLAEAKRQLGEYFAGERKTFDVQLDMRGTPFQLQVWSSLADIPYGEIRSYADIANAIGRPKAVRAVGGANNKNPVPLIVPCHRVIGADGSLVGYGGGMEIKRHLLTLENSLPERKGWAD

SEQ ID NO: 79035 - protein, 386 aa, Paenibacillus rigui
  REGION 1..386: note = tr|A0A229UNL7|A0A229UNL7_9BACL tRNA epoxyqueuosine(34) reductase QueG OS=Paenibacillus rigui; OX = 554312 GN=queG PE=4 SV=1
MSKGIAEMNSNDWQQLKLDMQAAAESLGIDKIGVASSDPFVELKQILLRHREKGFESGFEEKDLDKRTDPGLSFAAPRSIISIAVAYPSKLTDAPRSEKGAYRGILSRSAWGLDYHQVLRNRLQRLEAWIRDQVPDARMESMVDTGALVDRAVAERAGIGWLGKNCSVITPEFGSWVYLGEMITNLPLPADRPVTESCGDCTLCIDACPTGALVGPGQLNAQRCISFVTQTKGHIEDDELKKKIGNRLYGCDTCQTVCPQNKGKHWTQHAELQPDPEQAKPLLLPLLKMTNREFKERFGTSSAAWRGRKPIQRNAILALGHFKDASAVAALSELLLHDERAEIRSAAAWSLGRIGGSEAMEGLRRAMEREQDQVVIRELEKSLCLS

SEQ ID NO: 79036 - protein, 405 aa, Paenibacillus riograndensis
  REGION 1..405: note = tr|A0A132TZA5|A0A132TZA5_9BACL Epoxyqueuosine reductase OS=Paenibacillus riograndensis OX=483937; GN = AMQ84_14685 PE=4 SV=1
MNNNIQTAYAPPPSKWEGLKAEIKAAAPEIGIDDIGFATAEPFLYLKNILQEHRDNGYDSGFEEPDLDKRTIPALQSGGQPQSIIAIAVAYPSKMENPPKSEPGARRGILARASWGRDYHHVLREALAKLEAFIRERVPGAELESMVDTGVLVDRAVAERAGIGFSGKNCSIISPEWGSWIYLGEMVTNIPFPPDTPVEEGCGSCTKCIDACPTGALVGPGQLNAQACISYLTQTKGFLSEEYMTKIGNRLYGCDTCQIVCPKNRGKNWNHRPELLPDPEVVKPLLLPILELSNREFKEQFGSSSAAWRGKKPIQRNAVIALGNFKEDGAVPKLTEIVLKETRPELRGSAAWALGRIGGAEALAAVKLALHKEEDATVREMLERAQGKLLERGEAEGQDGASGQG

SEQ ID NO: 79037 - protein, 405 aa, Paenibacillus riograndensis
  REGION 1..405: note = tr|A0A0E4HAL8|A0A0E4HAL8_9BACL Epoxyqueuosine reductase OS=Paenibacillus riograndensis SBR5 OX=1073571; GN = queG PE=4 SV=1
MNNNIQTAYAPPPSKWEGLKAEIKAAAPGIGIDDIGFATAEPFLYLKNILQEHRDNGYDSGFEEPDLDKRTIPALQSGGQPQSIIAIAVAYPSKMENPPKSEPGARRGILARASWGRDYHHVLREALAKLEAFIRERVPGAELESMVDTGVLVDRAVAERAGIGFSGKNCSIISPEWGSWIYLGEMVTNIPFPPDTPVEEGCGSCTKCIDACPTGALVGPGQLNAQACISYLTQTKGFLSEEYMTKIGNRLYGCDTCQIVCPKNRGKNWNHRPELLPDPEVVKPLLLPILELSNREFKEQFGSSSAAWRGKKPIQRNAVIALGNFKEAGAVPKLTEIVLKETRPELRGSAAWALGRIGGAEALAAVKLALHKEEDATVREMLERAQGKLLERGEAEGQDGASGQG

SEQ ID NO: 79038 - protein, 394 aa, Paenibacillus sabinae
  REGION 1..394: note = tr|X4Z6V5|X4Z6V5_9BACL Iron-sulfur cluster-binding protein OS=Paenibacillus sabinae T27 OX=1268072; GN = PSAB_02775 PE=4 SV=1
MNNMKSASYSPPSSRWEELKKEMKEAAPSLGIDEIGFATAEPFLFLKDLLQEHRDKGYDSGFEEPDLDKRTIPALREGQPKSIIAIAVAYPSKMDKPPKSEPGERRGILARSAWGRDYHLVLREALERLEAFIRQRVPDAVLESMVDTGVLVDRAVAQRAGIGFSGKNCSIISLKWGSWIYLGEMVTDIPFPPDTPVTEGCGTCTKCIDACPTGALVGPGELNAQACVSYLTQTKGFLDETYMSKIGNRLYGCDTCQIVCPHNRGKNWDHHPGLLPDPEQAKPLLLPILDLSNREFKEKFGSSAAAWRGKKPIQRNAVIALGNFKDASAVPKLTEVLIGDPRPELRGAAAWSLGVIGGEAALAAVELALESERDDEVVRRLNRARGKLAGHAEA

SEQ ID NO: 79039 - protein, 561 aa, unidentified
  source 1..561: note = Paenibacillus selenitireducens
  REGION 1..561: note = tr|A0A1T2X6Q2|A0A1T2X6Q2_9BACL Methylated-DNA--protein-cysteine methyltransferase; OS = Paenibacillus selenitireducens OX=1324314; GN = BVG16_19635 PE=3 SV=1
MSEPWKPTAQAEAERWAQLKSDIIEAAPSLGIDSIGFASADPFTTLKNRLIEHRAKGYESGFEEPDLDKRVQPALLFDRPQSIIAIAVAYPSKLIDPPKSEPGAYRGILSRSAWGQDYHQALRERLARLEAFIQERVPEARMESMVDTGALSDRAVAERAGIGWSAKNCSIISPKLGSWMYLGEMITNLPFEPDTPVEEGCGDCNRCIDACPTGALVGPGQLNAQRCISFLTQTKGTLSEEFMTKIGNRLYGCDTCQIVCPPNRGKNWTQHPELQPDPETVKPLLIPLLSLSNKEFKARFGSNASSWRGKKPIQRNVIIGLGNFKDATAIPHLHTVMREDPRYELRYTAAWALSKIGGEASMDVLNDVIQRESHIEVLEAIQRARVKLGADTEPLFYREMDSPIGTLTLIRSMKGLCHIEFGTYADREEKIQQWTSRWYEHPELIPNSAALDDIVGQLKEYFGGQRTTFDIPLDMQGTPFQRKVWQALTEIPYGETWSYKQVAEQIGQPKAVRAVGGANNKNPVSIIVPCHRVIGASGAMVGYGGGLDKKQILLALEQRQD

SEQ ID NO: 79040 - protein, 614 aa, unidentified
  source 1..614: note = Paenibacillus silvae
  REGION 1..614: note = tr|A0A2W6ND94|A0A2W6ND94_9BACL tRNA epoxyqueuosine(34) reductase QueG OS=Paenibacillus silvae; OX = 1325358 GN=queG PE=4 SV=1
MTSVRTGAAQAASVWETLKQEIKAAGPELGIDDIGFASADPFVSLKSLLEQSRDKGYASGFEEPDIEKRVHPALQGGEPASLIAIAVAYPSKMINPPKSEPGAYRGIFARSAWGQDYHQVLRTAMDKLVNFIRERVPEAMIESMVDTGALVDRAVSQRAGIGFSAKNCSIISPKFGSWIFLGELVTNIPFPPDTPVTEDCGECTKCIDACPTGALVGPGQLNAQRCISFLTQTKGFLDEEFMLKIGNRLYGCDTCQIVCPKNRGKNWDHHPEFHPDPEVVKPLLLPLLDIGNREFKERFGQSSASWRGKKPIQRNAVIALGNFKDKSAVPKLTQVLKRDPRPELRGTAAWALSRIGGEDAMRAIGEAAAIEQDGNVLSMLQKAKERLMSSTALPEQPQAGNASKLESKSEGEPERTTETNGEPSASTDKSGEAAAWKPSPVTGLHGKPVYYDELLTPIGTLTLCATDEGLCHIDFGAFHVREAHLQQWARTWIGEYRYEKNEEKLSEAAKQLREYFAGERKTFDLQLERYGTAFQLQVWQVLTDISYGEALTHQEVAEKIGRPKAVRAVLDAISKNPIPIVIPCHRMSGKDGTLVGYVGGLQTKEQLLTLEQQT

SEQ ID NO: 79041 - protein, 615 aa, unidentified
  source 1..615: note = Paenibacillus solani
  REGION 1..615: note = tr|A0A0M1N4M8|A0A0M1N4M8_9BACL Methylated-DNA--protein-cysteine methyltransferase; OS = Paenibacillus solani OX=1705565 GN=AM231_23920 PE=3 SV=1
MTYTLGSYAPPPSVWEELKQELKVVAPELGIDDIGFASAEPFQSLKGILQNHRKLGYESGFEEQDLDKRVTPALPGTEPKSLIAIAITYHSKMNNPPKSEPGKYRGIMARSAWGRDYHHVLREAMDRLENYIKERVPDAKLESMVDTGALVDRAVSERAGIGFSAKNCAIISPKFGSWIFLGEMVTNIPFPPDTPVTEDCGECTKCIDACPTGALVGPGQLNAQRCVSFLTQTKGFLDEEAMRKIGNRLYGCDTCQIVCPKNRGKNWTHQEDFKPDPEKAKPLLLPILDMSNREFKEAFGDTSAAWRGRKPIQRNAVIALGNFKDISAVPKLSEVLLKDPRPELRGTAAWALGRIGGEEAMNNLEKSMKSEGDSRVRDMLQQALNKLKPETKGNEAGVEEDNAAGTSPAIDHSGSANGNQPEQQSPVIHGVEPMAVPEGGPEMLYYDELLTPIGSLTVCATEKGLCLIEFGSFYVKEAVIQQWSRTWAGNGGYTRDEERLAPVVTQLKQYFSGELEEFDLPLDLRGTSFQLQVWEALKSISYGTMCSYKDVAESIGRPKAVRAVGGANNKNPVPVVVPCHRVIGADGALIGYGGGPEIKRALLTLEGAMNDRKGS

SEQ ID NO: 79042 - protein, 394 aa, Paenibacillus sophorae
  REGION 1..394: note = tr|A0A1H8S8F0|A0A1H8S8F0_9BACL Epoxyqueuosine reductase OS=Paenibacillus sophorae OX=1333845; GN = SAMN04487895_11149 PE=4 SV=1
MNTPEYTSYAPPSPRWESLKNEIKEAAQTLGIDEIGFATAEPFLFLKNLLQEHRDKGYDSGFEEPDLDKRTIPALREGQPKSIIAIAVAYPSKMDDPPKSEPGERRGILARSAWGRDYHLVLREALERLEAFIRQRVPDAVMESMVDTGVLVDRAVAQRAGIGFSGKNCSIISPKWGSWIYLGEMVTSIPFPPDTPVTEGCGTCTKCIDACPTGALVGPGELNAQACISYLTQTKGFLDETYMAKIGNRLYGCDTCQIVCPHNRGKNWDHHQELLPDPEQAKPLLLPILDLSNREFKEKFGSSAAAWRGKKPIQRNAVIALGNFKDAAAVPKLKEVLLKDPRPELRGAAAWALSAIGGAAALAAVELALESEQDEEVAGRLHRAKSKLAGPMDP

SEQ ID NO: 79043 - protein, 629 aa, Paenibacillus sp.
  REGION 1..629: note = tr|A0A358GFH0|A0A358GFH0_PAESP tRNA epoxyqueuosine(34) reductase QueG OS=Paenibacillus sp.; OX = 58172 GN=queG PE=4 SV=1
MTSAQTGAANAAAVWEKLKQEIKAAAPEMGIDDIGFASAEPFVTLKSILEQHRAKGFESGFEEPDIEKRVRPELKDGEPASLIAIAVAYPSKMINPPKSEPGAYRGILARSAWGQDYHQVLRAAMDKLVHFIRERVPEAMIESMVDTGALVDRAVSQRAGIGFSAKNCAIISPKFGSWIFLGELVTNIPFQPDNPVTEDCGECTKCIDACPTGALVGPGQLNAQRCISFVTQTKGFVDEEFMLKIGNRLYGCDTCQIVCPKNRGKNWDHHPEFHPDPEIVKPLLIPLLDIGNREFKERFGQSSAAWRGKKPIQRNAVIALGNFKDKTAVPKLTEVLKRDPRPELRGTAAWALSRIGGEDAMRAIGEAAANEQDGNVLSMLQKAKERLSSSATLPDKPQVEQSSNNKPEDQKEQNNQLNQLNGQQPNQVTEEAPEQEKGQAKEPAKPEAAAWKPSAVTGLHGTPVYYDEVLTPIGTLTLCATEKGLCHIDFGAFHVREAHLQQWARTWIGEYRYEKNEEKLSEAAQQLKQYFAGERKAFELKLDLFGTPFQLQVWQVLSDISYGEASTHQQVAEIIGRPKAVRAVLDAISKNPIPIIIPCHRISGKDGTLVGYVGGLQTKEQLLTLEQQS

SEQ ID NO: 79044 - protein, 398 aa, Paenibacillus sp.
  REGION 1..398: note = tr|A0A1H0LHM8|A0A1H0LHM8_9BACL Epoxyqueuosine reductase OS=Paenibacillus sp. yr247 OX=1761880; GN = SAMN04487897_11947 PE=4 SV=1
MAVSIGAGTNEDFSWLKQEIVEAASSLGIDKIGFTSAEPFTELKEILLRHREKGFESGFEEPDIEKRVHPELSFDSPQSIISIAVAYPSKLHNPPRSEPGAYRGIISRSSWGSDYHDVLRDRLAKLEAFIAERVPDARLQSMVDTGALVDRAVAERAGIGWTGKNCAVITPEWGSWVYLGEIITNIPFTPDTSIMDQCGDCTICIDACPTGALVGPGQLNSSRCISFITQTKGYVDDEFKLKIGNRLYGCDTCQIVCPKNKGMNWTHQPELEPDPVKVKPLLIPLLTMTNKDFKEQYGRIAASWRGKKPIQRNAIIALGNFKDITAVPVLSELLLTDPRPEIRATAAWALGRIGGEEAAAALDKAQAGEQESAVQQDIEKAIAAVSHSARDEREKEQT

SEQ ID NO: 79045 - protein, 388 aa, unidentified
  source 1..388: note = Paenibacillus spiritus
  REGION 1..388: note = tr|A0A5J5FWL0|A0A5J5FWL0_9BACL tRNA epoxyqueuosine(34) reductase QueG OS=Paenibacillus spiritus OX=2496557 GN=queG PE=4 SV=1
MNPAAEVSASRRWEQLKAELTSAAPALGIDSIGFAAADPFLYLKERLQQHRDRGHESGFEEPDLDKRTTPALAAGTPRSILAVAVAYPSKMKNPPKSEPGARRGILARSAWGRDYHLVLREALEKLEAFIRERVPEAVMESMVDTGVLVDRAVAERAGIGFSGKNCSIISPEWGSWIYLGELVTDIPFPPDKPVEMGCGDCTKCIDACPTGALVGPGELNAQACVSYLTQTKGYLSDEYMAKIGNRLYGCDTCQIVCPYNRGKDWDHRPELQPDPEQAKPLLLPILDLSNKEFKEKFGSSAAAWRGRKPIQRNAVIALGNFKEAGAAPKLAGVLADDPRPELRAAAAWALSRIGGDEAREALEKARGREREGEVLAYISRGLERLDSR

SEQ ID NO: 79046 - protein, 396 aa, Paenibacillus stellifer
  REGION 1..396: note = tr|A0A089LL64|A0A089LL64_9BACL Epoxyqueuosine reductase OS=Paenibacillus stellifer OX=169760; GN = PSTEL_03370 PE=4 SV=1
MKHAAYAPPSSKWEELKREIKEAAPELGIDEIGFATAEPFLFLKNILQEHRDKGYESGFEEPDLDKRTVPALVEGQPMSIIAVAVAYPSKMDNPPKSEPGLRRGILARSAWGRDYHLVLRDALKRLEDFIRERVPDAVMESMVDTGVLVDRAVAERAGIGFSGKNCSIISPKMGSWIYLGEMVTNLPFPPDTPVTEGCGSCTKCIDACPTGALVGPGQLNAQACVSYLTQTKGFLDESYMAKIGNRLYGCDTCQMVCPHNRGKSWQQHPELLPDPEQAKPLLLPILDLSNREFKEKFGSSAAAWRGRKPIQRNAVIALGNFKDASSVPKLAEVLRHDPRPELRGSAAWALGRIGGPEALAALESALDTERDEEALAYVRRARESLAGEGKNQSDGE

SEQ ID NO: 79047 - protein, 389 aa, unidentified
  source 1..389: note = Paenibacillus swuensis
  REGION 1..389: note = tr|A0A172TEW0|A0A172TEW0_9BACL Epoxyqueuosine reductase OS=Paenibacillus swuensis OX=1178515 GN=queG; PE = 3 SV=1
MTTTGSVPEEAAFWHTLKEDIQKAAPGLGIDSIGFTTADPFLEMKDILRNHREQGYESGFEEPDLDKRVYPELSFAEPRSILSIAVAYPSKLANPPKSEPGARRGMISRTSWGRDYHQVLRDRLSRLEAFIRERVPGARLESMVDTGALVDRAVAARAGVGWSGKNCAIITPEWGSWVYLGEMITNLPFAPDTPITEDCGDCTLCIDACPTGALVAPGQLNASRCVSFVTQTKGWVDEEMMEKIGNRLYGCDTCQIVCPKNRKKNWTHHEDMQPDPELVKPLLVPLLTMTNKEFKDRFGGISASWRGKKPIQRNAVIALGNFKDPTSVPALTDMLMKDVRPEIRGTCAWALGKIGTAEARDSLERAVATEQDPQVTEALHKAINKLKTG

SEQ ID NO: 79048 - protein, 629 aa, Paenibacillus taichungensis
  REGION 1..629: note = tr|A0A2V3RZK0|A0A2V3RZK0_9BACL Epoxyqueuosine reductase OS=Paenibacillus taichungensis OX=484184; GN = DEU73_10572 PE=4 SV=1
MTSVQTGAAKAAAVWEKLKQEIKAAAPEMGIDDIGFASAEPFVTLKSILEQHRAKGFESGFEEPDIEKRIRPELKDGEPASLIAIAVAYPSKMVNPPKSEPGAYRGILARSAWGQDYHQVLRAAMDKLVHFIRERVPEAMIESMVDTGALVDRAVSQRAGIGFSAKNCAIISPKFGSWIFLGELVTNIPFQPDNPVTEDCGECTKCIDACPTGALVGPGQLNAQRCISFVTQTKGFVDEEFMLKIGNRLYGCDTCQIVCPKNRGKNWDHHPEFHPDPEIVKPLLIPLLDIGNREFKERFGQSSAAWRGKKPIQRNAVIALGNFKDKTAVPKLTEVLKRDPRPELRGTAAWALSRIGGEDAMRAIGEAAANEQDGNVLSMLQKAKERLSSSKTLPDKPQADLKSNDKPEDQKEQNNQINQLDVQQPNQKTEETPEQKSGQATEPAKPEAAAWKPSAVTGLHGTPVYYDELLTPIGTLTLCATDKGLCHIDFGAFHVREAHLQQWARTWIGEYRYEKNEEKLSEAAQQLKQYFAEERKAFDLKLDLFGTPFQLQVWQVLSDISYGEASTHQQVAEIIGRPKAVRAVLDAISKNPLPIITPCHRISGKDGTLVGYVGGLQTKEQLLTLEQQS

SEQ ID NO: 79049 - protein, 613 aa, Paenibacillus taichungensis
  REGION 1..613: note = tr|A0A329QZR4|A0A329QZR4_9BACL tRNA epoxyqueuosine(34) reductase QueG OS=Paenibacillus taichungensis OX=484184 GN=queG PE=4 SV=1
MTSVQTGAAKAAAVWEKLKQEIKAAAPEMGIDDIGFASAEPFVTLKSILEQHRAKGFESGFEEPDIEKRIRPELKDGEPASLIAIAVAYPSKMVNPPKSEPGAYRGILARSAWGQDYHQVLRAAMDKLVHFIRERVPEAMIESMVDTGALVDRAVSQRAGIGFSAKNCAIISPKFGSWIFLGELVTNIPFQPDNPVTEDCGECTKCIDACPTGALVGPGQLNAQRCISFVTQTKGFVDEEFMLKIGNRLYGCDTCQIVCPKNRGKNWDHHPEFHPDPEIVKPLLIPLLDIGNREFKERFGQSSAAWRGKKPIQRNAVIALGNFKDKSAVPKLTEVLKRDPRPELRGTAAWALSRIGGEDAMRAIGEAAANEQDGNVLSMLQKAKERLSSSQALPDKPQAEPNSNNKPEQQKELNMTSEQENGQKTEQTKPEAAAWKPSAVTGLSGTPVYYDEVLTPIGTLTLCATDKGLCHIDFGAFHVREAHLQQWARTWIGEYRYEKNEEKLSEAAQQIKQYFAGERKAFELKLDLFGTPFQLQVWQVLSDISYGEASTHQQVAEIIGRPKAVRAVLDAISKNPIPIIIPCHRISGKDGTLVGYVGGLQTKEQLLTLEQQS

SEQ ID NO: 79050 - protein, 383 aa, unidentified
  source 1..383: note = Paenibacillus taihuensis
  REGION 1..383: note = tr|A0A3D9SB69|A0A3D9SB69_9BACL Epoxyqueuosine reductase OS=Paenibacillus taihuensis OX=1156355 GN=queG; PE = 3 SV=1
MDSSMDWNQLKADMKAAAAELGIDKIGVASAAPFTELRERLERHRELGYESGFEEPDLAKRTEPELLFEDPQSIIAIAIAYPSKLQDPPKSEPGARRGIISRSAWGEDYHSVLRERLRRLEAWLLERVPEGRFLSMVDTGALSDRAVAERAGIGWIGSNCSIITPEWGSWVYLGEMITNLPIPPDAPVTESCGSCTACIDACPTDALIGPGQLNSQRCISYVTQTKGVVTDELMRKIGNRLYGCDTCQVVCPENKGKHATHQPELAPDNEKVKPLLVPLLAMGNREFKERYGASSSAWRGRKPIQRNAVIALGNFKDASAVPALADVLRGDPRFELRATAAWSLGRIGGAAAFDELRAARGRERDEAVIEAIDRALTGDTASI

SEQ ID NO: 79051 - protein, 577 aa, Paenibacillus terrae
  REGION 1..577: note = tr|A0A4U2Q5D5|A0A4U2Q5D5_9BACL Methylated-DNA--protein-cysteine methyltransferase; OS = Paenibacillus terrae OX=159743 GN=queG PE=3 SV=1
MQRGQTPTAAGTALVWASLKQEIIEAAPGLGIDSIGFASADPFLSLKAILEEHRAKGYESGFEEPDIDKRIYPELYGSQPASLIAIAVAYPSKMKDPPKSDKGKYRGILARSAWGKDYHMVLREAMEKLEAFIGERVPDAIMKNMVDTGELSDRAVAERAGIGFSGKNTMMISPTLGSWIYLGELLTNIPFQPDEPVTDGCGECTKCLDACPTGALVGPGQLNAQRCVSFLTQTKGFLDEEFMLKIGNRLYGCDTCQIVCPKNRGLNWDHHPELTPDPEIVKPLLLPLLELSNREFKERFGQSAAAWRGKKPIQRNAVIALGNFKDISAVPKLTEVLLDDPRPELRGTAAWALGRIGGGNAMTAIKQASEKEQHEQVREMVAQAHSKLEEREQAEQQQVSEVTVQGPQGPTTIYYDEIETPIGILTLCATDRGLCRIDFGVFHAKEALLQQWARTWIGEYVYVQEPEKLREAADQLREYFAGKRRDFTVAYDLRGTPFQEQVWRALQNIPYGQSVSYKDVAESIGRAKAVRAVGGANNKNPLPILIPCHRVSGANGSLVGYAGGLPTKMKLLDLEKE

SEQ ID NO: 79052 - protein, 570 aa, Paenibacillus terrae
  REGION 1..570: note = tr|G7VYQ6|G7VYQ6_PAETH Methylated-DNA--protein-cysteine methyltransferase; OS = Paenibacillus terrae (strain HPL-003) OX=985665; GN = HPL003_11445 PE=3 SV=1
MQRGQTPTAAGTALTWASLKQEIIEAAPGLGIDSIGFASADPFLSLKAILEEHRAKGYESGFEEPDIDKRIYPELYGSQPASLIAIAVAYPSKMKDPPKSDKGKYRGILARSAWGRDYHLVLREAMEKLEAFIGERVPDAIMKNMVDTGELSDRAVAERAGIGFSGKNTMMISPTLGSWIYLGELLTNIPFQPDEPVTDGCGECTKCLDACPTGALVGPGQLNAQRCVSFLTQTKGFLDEEFMLKIGNRLYGCDTCQIVCPKNRGLNWDHHPELTPDPEIVKPLLLPLLDLSNREFKERFGQSAAAWRGKKPIQRNAVIALGNFKDISAVPKLTEVLLDDPRPELRGTAAWALGRIGGENAMTAIKQASEKEQHEQVREMVAQAHSKLEEREQAEQQKVSEGPTTIYYDEMETPIGILTLCATDRGLCRIDFGVFHAKEALLQQWARTWIGEYVYVQEPEKLREAADQLREYFAGKRRDFTVVYDLRGTPFQEQVWRALQNIPYGQSVSYKDIAESIGRAKAVRAVGGANNKNPLPILIPCHRVSGANGSLVGYAGGLPTKMKLLDLEKE

SEQ ID NO: 79053 - protein, 409 aa, unidentified
  source 1..409: note = Paenibacillus thermophilus
  REGION 1..409: note = tr|A0A388NJ37|A0A388NJ37_9BACL tRNA epoxyqueuosine(34) reductase QueG OS=Paenibacillus thermophilus OX=1181891 GN=PbJCM17693_49150 PE=4 SV=1
MAKTIHDGSVVSANAGAWADLKREIKENAASLGIDDIGFASADPFISLKAILLDRREKGYESGFEEPDIDKRIYPELSLEQPASLVSIAVAYPSKMDNPPKSEPGQRRGILARSAWGRDYHLVLREAMAKLEDFIRQRVPEARIESMVDTGALVDRAVAERAGIGFKGKNCAIISPKWGSWIYLGEMITNIPFPPDSPVTEDCGECTKCIDACPTGALVGPGVLNAQRCISFLTQTKGFVEEEFMLKIGNRLYGCDTCQIVCPKNRGKSWNHRPELQPDPETVKPLLLPLLDISNREFKERFGDSAAAWRGKKPIQRNAVIALGNFKDTASVPKLIDILFHDPRPVLRGTAAWALARIGGEAAAEAVSRALESEQDEEVLERLQAADRKLRGGASPGESRPTVKESKPD

SEQ ID NO: 79054 - protein, 577 aa, Paenibacillus thiaminolyticus
  REGION 1..577: note = tr|A0A378X9G0|A0A378X9G0_PANTH Multifunctional fusion protein OS=Paenibacillus thiaminolyticus OX=49283; GN = yhbA PE=3 SV=1
MAEQKQTKRWTPCGTDQAPEANAIREAERWQRLKQEIMDAAASMGIDQIGFTTADPFTELKARLQHSIDQGYASGFEEPDLDKRTQPALLLDGARSIIAIAVAYPSKMEAGPKSEAGAYRGMFARTAWGLDYHHVLRDRLQRLEQFLRERVPEVRVKSMVDTGEMCDRAVAERSGIGFSGKNCSIISPKWGSWIYLGEMITNLPLPPDHPLTEDCGECTRCLDACPTAAFAGPGQLNAQRCISFQTQSKEMLPHEMMVKIGNRLYGCDTCQIVCPKNRGLNWTHHAEMQPDPEQAKPLLVPLLSLSNREFKSRFGSSAAAWRGKKPIQRNAIAALGNFRDRQAVPALEGLLRTDERPDIRAAAAWALGQISGPDAKRILKAALSREEEPKVKEAVMQAQERAEAQHEPLYVQEMESPLGPLTLAATATGLFAIEFGDALSVAEGLQRRAARSYGRVVLQRHPERLQAAKRQLEEYFAGTRREFDLTLDIQGTPFQRQVWQALTGIPYGETRSYKQIAEAIGNPGAVRAVGGANNRNPLSIIVPCHRVIGADGQLVGYGGGMDKKVTLLRLEGVSCGQ

SEQ ID NO: 79055 - protein, 577 aa, Paenibacillus thiaminolyticus
  REGION 1..577: note = tr|A0A515LWM0|A0A515LWM0_PANTH Multifunctional fusion protein OS=Paenibacillus thiaminolyticus OX=49283; GN = queG PE=3 SV=1
MAEQKQTKRWTPYGTDQAAEADAIREEERWQRLKQEIIDAAASMGIDQIGFTTADPFTELKARLQHSIDQGYASGFEEPDLDKRTQPALLLDGARSIIAIAVAYPSKMEGGPKSEAGAYRGMFARTAWGLDYHHVLRDRLQRLEQFLRERVPEVRVKSMVDTGELCDRAVAERSGIGFSGKNCSIISPKWGSWIYLGEMITNLPLPPDHPLTEDCGECTRCLDACPTGAFAGPGQLNAQRCISFQTQSKEMLPHEMMVKIGNRLYGCDTCQIVCPKNRGLNWTHHAEMQPDPEQAKPLLVPLLSLSNREFKSRFGSSAAAWRGKKPIQRNAIAALGNFRDRQAIPALEGLLRTDERPDIRAAAAWALGQIGGPDAKRILKAAFSREEEPKVKEAVMQAQERAEAQHEPLYVQEMESPLGPLTLAATATGLFAIEFGDALSVAEGLQRRAASSYGRVVLQRHPERLQVAKRQLEEYFAGTRREFDLTLDIQGTPFQRQVWQALTGIPYGETRSYKQIAEAIGNPGAVRAVGGANNRNPLSIIVPCHRVIGADGQLVGYGGGTDKKVTLLRLEGVSCGQ

SEQ ID NO: 79056 - protein, 415 aa, Paenibacillus tianmuensis
  REGION 1..415: note = tr|A0A1G4RXH2|A0A1G4RXH2_9BACL Epoxyqueuosine reductase OS=Paenibacillus tianmuensis OX=624147 GN=queG; PE = 3 SV=1
MEKEDSRAGTEQQSERFAATAKLQPADWRQLKQQLQADAAKLGIDKIGFASADPFVELKDILIRHREKGFESGFEEPDIEKRVDPALTLTEPRSIISIAVAYPSKLRNAPRSEPGAYRGILSRSAWGQDYHHVLRNRLARLEAWIRERVPGARTASLVDTGALVDRAVAERAGIGWVGKNCCVITPEWGSWVYLGELITNVPFPPDTPVTESCGDCTLCIDSCPTGALVGPGQLNAQRCVSFLTQTKGLIEDDELKRKIGNRLYGCDTCQIVCPKNKGIHAGHHPELQPDPEVVKPLLLPLLSMSNREFKERFGHSAAAWRGRKPIQRNAILALGNFRDASSVPQLAELLRKDERPEIRGTAAWALGRIGGVAAREALDAAWETERDEAARREIGKARAQFTGERQGDEQDGDSV

SEQ ID NO: 79057 - protein, 393 aa, unidentified
  source 1..393: note = Paenibacillus typhae
  REGION 1..393: note = tr|A0A1G8SUR0|A0A1G8SUR0_9BACL Epoxyqueuosine reductase OS=Paenibacillus typhae OX=1174501; GN = SAMN05216192_11563 PE=4 SV=1
MNIKALSAYAPPASRWEKLKAEIKEAAPQLGIDDIGFTTAEPFLYLKDILQDHRDKGYESGFEEQDLEKRTVPALKNGEPMSIIAIAVAYPSKMENPPKSEPGERRGILARASWGRDYHLVLREALAKLEGFIRERVPDAVLESMVDTGVLVDRAVAERAGIGFSGKNCAVISPDWGSWIYLGEMITNIPFPPDTPVEDGCGDCTKCIDACPTGALVGPGQLNAQACISFLTQTKGFLSEEYMTKIGNRLYGCDTCQIVCPKNRGKNWNHRPELQPDPDIVKPLLLPILDLSNREFKEKFGMSSAAWRGKKPIQRNAVIALGNFKEAAAVPKLTEIVLRETRPEMRGTAAWALGKIGGREALAAVEQALQREENITVREMLDRAHGRLLEQLQ

SEQ ID NO: 79058 - protein, 416 aa, unidentified
  source 1..416: note = Paenibacillus tyrfis
  REGION 1..416: note = tr|A0A081NTW2|A0A081NTW2_9BACL Epoxyqueuosine reductase OS=Paenibacillus tyrfis OX=1501230 GN=queG PE=3; SV = 1
MEKEGIRVGTEQQSERFAGAEELQPADWRQLKEQLQAEAAKLGIDKIGFSSADPFVELKDILIRHREKGFESGFEESDIEKRVDPALTLVEPRSIISIAVAYPSKLKDAPRSEPGAYRGILSRSAWGQDYHHVLRNRLARLEAWIRERVPGARTASLVDTGALVDRAVAERAGIGWVGKNCCVITPEWGSWVFLGELITNVPFPPDTPITESCGDCTLCIDSCPTGALVGPGQLNAQRCVSFLTQTKGLIEDDELKRKIGNRLYGCDTCQIVCPKNKGIHAGHQLELQPDPEVVKPLLLPLLSMSNREFKERFGHSAAAWRGRKPIQRNAILALGNFRDASSVPQLAELLRKDERPEIRGTAAWALGRIGGETAREALDAAWETERDEAARREIGKARAQFTGERQGDEQDGDPIR

SEQ ID NO: 79059 - protein, 616 aa, Paenibacillus uliginis
  REGION 1..616: note = tr|A0A1X7HQ15|A0A1X7HQ15_9BACL Methylated-DNA--protein-cysteine methyltransferase; OS = Paenibacillus uliginis N3/975 OX=1313296; GN = SAMN05661091_5171 PE=3 SV=1
MTSRLGAYAPSSSVWEELKEELKRAAPSMGIDDIGFASADPFVSLKSILQKHRDKGYESGFEEPDLDKRVTPSLPGTTPASIIAIAVAYPSKMSNPPKSEPGKYRGIMARSAWGRDYHHVLREAMAKLEAFIRERVPDAVLESMVDTGALVDRAVSQRAGIGFSAKNCAIISPKYGSWIYLGEMVTSIPFPPDSPVTEDCGECTKCIDACPTGALVGPGQLNAQRCVSFLTQTKGFLDEEVMRKIGNRLYGCDTCQIVCPKNKGLNWTQHEELQPDPEKAKPLLLPILDMSNREFKETFGDTSAAWRGRKPIQRNAVIALGNFKDASAVPKLSEVLLKDPRPELRGTAAWALGRIGGEEALNNLEKGMKSEQDHKVRNMLTQALNKLQPETKAVAETEKQEGVQHSSQQSEEAGQDVQSPGTSSVNIAPKGVEPMAAPTIESDVLYYNEVHTPIGTLTVVASDLGLCLIEFGTFTVKEAVLQQWSRTWAGGVGYERNEERLADVTSQIKQYFEGTLKEFTIPLDMRGTQFQLQVWEALKEIPYGEICSYKDIADAIERPKAVRAVGGANNKNPVPIIVPCHRVIGMDGTLVGYGGGLEIKRSLLTLEGYLPDRKGL

SEQ ID NO: 79060 - protein, 617 aa, unidentified
  source 1..617: note = Paenibacillus vortex
  REGION 1..617: note = tr|A0A2R9SZX3|A0A2R9SZX3_9BACL Methylated-DNA--protein-cysteine methyltransferase; OS = Paenibacillus vortex V453 OX=715225 GN=PVOR_06585 PE=3; SV = 1
MTYTLGSYAPPPSVWEELKQELKSVAPELGIDDIGFASAEPFQSLKGVLQNHRDKGYESGFEEPDLDKRVTPALPGNEPMSLIAIAITYHSKMDNPPKSEPGKYRGIMARSAWGRDYHQVLREAMSRLEAFIRERVPDARLESMVDTGALVDRAVSQRAGIGFSAKNCAIISPKLGSWIFLGEMITNIPFPPDTPVTEDCGECTKCIDACPTGALVGPGQLNAQRCISFLTQTKGFLDEEVMRKIGNRLYGCDTCQIVCPKNRGKNWTHQEAFKPDPEKAKPLLLPILDLSNREFKETFGDTSAAWRGRKPIQRNAVIALGNFKDISAVPKLSEVLLKDPRPELRGTAAWALGRIGGEEALNNLEKSMKSEGDSQVRDMLQQALNKLKPESNEKEAPTEAQAGGEALSSGNALPASPDKGDKPEQESPAIHGVEPMAIPEGGPEVLYYDEIQSPIGPLTVCSTEKGLCLIEFGSFYVKEAVIQQWSRTWAGNGGYQRDEARLAPATAQLERYFSGELKEFDIGLDMRGTSFQLQVWEALKSIPYGTVCSYKDIAESIGRPKAVRAVGGANNKNPVPIIVPCHRVIGTDGALIGYAGGPEIKRTLLTLEGAMPDRKGS

SEQ ID NO: 79061 - protein, 399 aa, unidentified
  source 1..399: note = Paenibacillus whitsoniae
  REGION 1..399: note = tr|A0A430JDU3|A0A430JDU3_9BACL tRNA epoxyqueuosine(34) reductase QueG OS=Paenibacillus whitsoniae OX=2496558 GN=queG PE=4 SV=1
MAKRTRADWVALQQEIVDAAPSLGIDKIGFASAAPFTELRDLLLRHREKGHESGFEEPDIEKRVRPELTFDAPQSIIAIAVAYPAKLKDPPRSAPGAYRGMISRTSWGRDYHEVLRDRLAKLEGFIAARVPDARLMSMVDTGVLVDRAVAERAGIGWSAKNCAVITQELGSWVFLGEMITNLPFPPDAPMLDQCGDCTICIDACPTGALVGPGQLNAQRCISFITQTKGYVDDEFKRKIGNRLYGCDTCQVVCPKNKGMNWTQHPEFEPDPEKVKPLLKPLLLMSNKEFKEQFGMISAAWRGRKPIQRNAIIALGNFRDSSAVPELSEVLRSDPRPELRETAAWALGRIGGADALAALERAQAVEAVPEVLHGIAKALHALSSPAPDKAEAAQEKEERA

SEQ ID NO: 79062 - protein, 393 aa, Paenibacillus wynnii
  REGION 1..393: note = tr|A0A098MBP6|A0A098MBP6_9BACL Epoxyqueuosine reductase OS=Paenibacillus wynnii OX=268407 GN=PWYN_09115; PE = 4 SV=1
MNPFNQSSIAPPPSKWDKLKSEIKAAAPALGIDDIGFATAEPFLYLKTILQDHRDKGYESGFEEPDLDKRTIPALESGEAKSIIAVAVAYPSKMEDPPKSEPGERRGIMARASWGQDYHHVLREALGKLEAFIRERVPDAVLESMVDTGVLVDRAVAERAGIGFSGKNCSIISPHYGSWIYLGEMITNIPFAPDTPVQEGCGDCTKCIDACPTGALVGPGQLNAQACISYLTQTKGFLSDDYMTKIGNRLYGCDTCQIVCPHNRGKNWDHRPELLPDPEIAKPLLLPILDLSNREFKEKFGSSSAAWRGKKPIQRNAIIGLGNFKEKAAIPKLREILLKEPRPEMRGTAAWSLGRIGGSEALAAVKQGLEQEEHETVLEMLHKAEDKLLNSQS

SEQ ID NO: 79063 - protein, 389 aa, unidentified
  source 1..389: note = Paenibacillus xerothermodurans
  REGION 1..389: note = tr|A0A2W1NVU7|A0A2W1NVU7_9BACL tRNA epoxyqueuosine(34) reductase QueG OS=Paenibacillus xerothermodurans OX=1977292 GN=queG PE=4 SV=1
MSEAAADWNDIDWHQLKLDMKEAAETLGIDKIGISSADPFVDLKSILKQHREKGFESGFEEPDLEKRTEPSLSLAGPRSIISITVAYPSKMKDAPRSEKGAYRGILSRSAWGMDYHQVLRNRLQRLEAWILGRVPDARLETMVDTGALVDRAVAERAGIGWVGKNCSVITPEFGSWVYLGEMITNLPLEPDVPVTESCGDCTLCIDACPTGALVGPGQLNAQRCISFVTQTKGHIEDDELKEKIGNRLYGCDTCQIVCPKNKGKNWTHHPELQPDPEQAKPLLTSLLHMSNREFKDRFGTSSAAWRGKKPIQRNAVLALGHFRDETAVPELVDLLRHDIRPEIRGAAAWALGRIGNSQAIDAINEARAEESDEIVLKELDKAYALHEVY

SEQ ID NO: 79064 - protein, 626 aa, Paenibacillus xylanexedens
  REGION 1..626: note = tr|A0A1L5LK36|A0A1L5LK36_9BACL Methylated-DNA--protein-cysteine methyltransferase; OS = Paenibacillus xylanexedens OX=528191 GN=BS614_06920; PE = 3 SV=1
MTSVQTGAAQDASVWEKLKQEIKAAGPGLGIDDIGFASADPFVSLKSLLEQSRDKGYASGFEEPDIEKRVHPALKDGEPASLIAIAVAYPSKMVNPPKSEPGAYRGIFARSAWGQDYHQVLRAAMDKLVNFIKERVPEAMIESMVDTGALVDRAVSQRAGIGFSAKNCAIISPKFGSWIFLGELVTNIPFQPDTPVTEDCGECTKCIDACPTGALVGPGQLNAQRCISFVTQTKGFVDEEFMLKIGNRLYGCDTCQIVCPKNRGKNWDHHPEFHPDPEIVKPLLLPLLDIGNREFKERFGQSSAAWRGKKPIQRNAVIALGNFKDKSAVPKLTEVLKRDPRPELRGTAAWALSRIGGEDAMRAIGEAAANEQDGNVLSMLQKAEERLSSSETLPKQPQAGQVSEKQSEEQNNENNALRALQQDLKMEAGIEPGSEQSAQPAKPEAAAWKPSAVTGLHGKPVYYDEVLTPIGTLTLCATDEGLCHIDFGAFHVREAHLQQWARIWIGEYRYEKNEEKLSEAAKQLKEYFAGERKTFDLQLDRLGTPFQLQVWQVLSDISYGEASSHQQVAEIIGRPKAVRAVLDAISKNPIPIIIPCHRISGKDGTLVGYVGGLQTKEQLLALEQLS

SEQ ID NO: 79065 - protein, 626 aa, Paenibacillus xylanexedens
  REGION 1..626: note = tr|A0A3N6DJU2|A0A3N6DJU2_9BACL Methylated-DNA--protein-cysteine methyltransferase; OS = Paenibacillus xylanexedens OX=528191 GN=EDO6_02793 PE=3; SV = 1
MTSVQTGAAQDASVWEKLKQEIKAAGPGLGIDDIGFASADPFVSLKSLLEQSRDKGYASGFEEPDIEKRVHPALKDGEPASLIAIAVAYPSKMVNPPKSEPGAYRGIFARSAWGQDYHQVLRAAMDKLVNFIRERVPEAMIESMVDTGALVDRAVSQRAGIGFSAKNCAIISPKFGSWIFLGELVTNIPFQPDTPVTEDCGECTKCIDACPTGALVGPGQLNAQRCISFVTQTKGFVDEEFMLKIGNRLYGCDTCQIVCPKNRGKNWDHHPEFHPDPEIVKPLLLPLLDIGNREFKERFGQSSAAWRGKKPIQRNAVIALGNFKDKSAVPKLTEVLKRDPRPELRGTAAWALSRIGGEDAMRAIGEAAANEQDGNVLSMLQKAEERLSSSETLPKQPQAGQVSEKQPEEQNNEHNALRALQQDLKMEAGIEPGSEQSAQPAKPEAAAWKPSAVTGLHGKPVYYDEVLTPIGTLTICATDEGLCHIDFGAFHVREAHLQQWARIWIGEYRYEKNEEKLSEAAKQLKEYFAGERKTFDLQLDRLGTPFQLQVWQVLSDISYGEASSHQQVAEIIGRPKAVRAVLDAISKNPIPIIIPCHRISGKDGTLVGYVGGLQTKEQLLALEQLS

SEQ ID NO: 79066 - protein, 575 aa, unidentified
  source 1..575: note = Paenibacillus yonginensis
  REGION 1..575: note = tr|A0A1B1N7I1|A0A1B1N7I1_9BACL Methylated-DNA--protein-cysteine methyltransferase; OS = Paenibacillus yonginensis OX=1462996 GN=AWM70_22010; PE = 3 SV=1
MNSNQASADWGWLKEEIQSAAFELGIDAVGFTTADPFLSLKPILEEIREKGYESGFEEKDIDKRVDPKLTMAEAESIIAIAVAYPSKMINPPKSEPGKTRGILARSAWGRDYHTVLREAMDKLADFIRERVPDARIESMVDTGVLNDRAVAQRAGIGFSGKNGLIISPTWGSWIYLGEMITNLPFEPDPPVLEDCGECTKCLDACPTGALLGDGMLNAQRCVSFLTQTKGFLSDEFMRKIGNRLYGCDTCQMVCPKNRGKHWDHRPELQPEPEIAKPLLLPLLDMSNREFKDRFGQSAAAWRGKKPIQRNAVIALGNFKDRASLPKLIEVLLHDPRPELRGTAAWAISRIGGEDAIKAINEALESERDEMVLNYIQEAQTKLQEAAGDAAADLSNEPVGEQTDGEVFFYEEMDSPIGALTLVQSSKGLCLIEFGGIEATREKTLKWVAKQRDGAQLIRSSDKLKETMAQLQGYFSGERTSFDLKLDMRGTPFQMKVWQALLDVPYGRTASYKEIAEQIGQPRAVRAVGGANNRNPLPVVVPCHRIIGVKGSMTGYAGGIEIKESLLTLERQGNKA

SEQ ID NO: 79067 - protein, 297 aa, unidentified
  source 1..297: note = Paeniclostridium sordellii
  REGION 1..297: note = tr|A0A0M1UZK1|A0A0M1UZK1_PAESO Putative iron-sulfur cluster-binding protein OS=Paeniclostridium sordellii; OX = 1505 GN=JGS6382_28301 PE=4 SV=1
MNSRKLKDYCEKIGIKTVGIAGVGPYYDLEKIILERDTKGYITGMEEPSIEKRINPRVTMENANSIIVCAFPYYTSDYKDSNLSKYCYGKDYHLVVKSKLEEIANYIKREVEDFEYMVFADNGPLVDRYLAKISGIGYYGINNNIITDEFGSYVFIGYIINNFKFELDEVNIKTCKQCGVCQTACPGGAILGNFNFNPKNCLSYITQKKEELTSEEVEALRRGYKVFGCDICQEVCPHNKGIEKTTIEEFHKDIKINLDKDEIYNISNKEFKRRYNDKAFSWRGRKIIQRNMEILDK

SEQ ID NO: 79068 - protein, 297 aa, unidentified
  source 1..297: note = Paeniclostridium sordellii
  REGION 1..297: note = tr|T0EB31|T0EB31_PAESO 4Fe-4S binding domain protein; OS = Paeniclostridium sordellii ATCC 9714 OX=1292036; GN = H477_0389 PE=4 SV=1
MNSRKLKNYCEKIGIKTVGIAGVGPYYDLEKIILERDTKGYITGMEEPSIEKRINPRVTMENANSIIVCAFPYYTSDYKDSNLSKYCYGKDYHLVAKSKLEEIANYIKSEVEDFEYMVFADNGPLVDRYLAKISGIGYYGINNNIITDEFGSYVFIGYIINNFKFELDEVNIKTCKQCGVCQTACPGGAILGNFNFNPKNCLSYITQKKEELTSEEIEALRRGYKVFGCDICQEVCPHNKCIEKTTIEEFHKDIKINLDKDEIYSISNKEFKRRYNDKAFSWRGRKIIQRNMEILDK

SEQ ID NO: 79069 - protein, 354 aa, unidentified
  source 1..354: note = Paenimaribius caenipelagi
  REGION 1..354: note = tr|A0A547Q6U9|A0A547Q6U9_9RHOB Epoxyqueuosine reductase OS=Paenimaribius caenipelagi OX=2489174 GN=queG; PE = 3 SV=1
MPISTSDALKAALRAEALEAGFLRMGICRPDAIPEAAGRLAAFLDAGRHGQMGWMAERTHWRSDPGALWPEARSVIMLAESYSPEHNPLDDLEHRDRGAISVYAHGRDYHDVVKKRLKRVGRWLLSQPGAESHQIKVFVDTAPVMEKPLAQAAGLGWQGKHTNLLGREIGNWVFLGAIFTTLELPPDAPEISHCGSCRACLDICPTAAFPAPYQLDARRCISYLTIEHEGPVDPELRPLMGNRIYGCDDCLAVCPWNKFAKAARDQRLMGDGTRRAPPLRALAHLDDAGFRARFAGSPIKRTGRDRFVRNVLYAIGNSGDPRLTDVAAGLTQDPDTAVSDAAQWALERLTTTRG

SEQ ID NO: 79070 - protein, 378 aa, unidentified
  source 1..378: note = Paenisporosarcina antarctica
  REGION 1..378: note = tr|A0A4P6ZV70|A0A4P6ZV70_9BACL tRNA epoxyqueuosine(34) reductase QueG OS=Paenisporosarcina antarctica OX=417367 GN=queG PE=4 SV=1
MNVNQFQQELILYAHSIGIDKIGFASSDPFRELKNRLKRQQDLGYQSGFEEKDLEKRTTPSLLLNEAESIIAIAIAHPSRMENAPQGKKGERRGIFARASWGIDYHTVLRDRLAKLEQFIAKYNVDAKTRSMVDTGELSDRAVAERAGIGWSAKNCAVITPEFGSYVYLGEIITNIPFTPDTPMEDECGECRLCLDVCPTGALIEGGQLNAQRCIAFLTQTKSLLPDEFRTKIGNRIYGCDTCQTVCPKNKGKFNKHQLEFQADPEIAKPLLIPLLKMSNKEFKTKFGHVSGSWRGKKPIQRNAILALAHFKEESAIPNLIDLLENDVRPVIRGTAAWAIGKIGTEEGRLALNKALQIEIDGEVLNEIHKGLAFLTVN

SEQ ID NO: 79071 - protein, 379 aa, Paenisporosarcina quisquiliarum
  REGION 1..379: note = tr|A0A1H8JVH3|A0A1H8JVH3_9BACL Epoxyqueuosine reductase OS=Paenisporosarcina quisquiliarum OX=365346; GN = SAMN04487786_0376 PE=4 SV=1
MNIIQFQQNLIDYSASIGIDKIGFTSVSPFHELKNRLIRQQELGYASGFEESNIEKRVHPKMLLEESSSIISIAIAYPSKMKDAPQSVKGARRGIFARASWGIDYHTVLREKLALLELYILTHIPDAKLRSMVDTGELSDRAVAERAGIGWSAKNCSIITPEFGSYVYLGEMITSIPFAPSEQMEEQCGDCRLCLDVCPTGALIQGGQLNAQRCIAFITQTKTMVPDEFRTKIGNRIYGCDTCQTVCPINKGKANLHQESFKPDPELVKPLLLPLLKMTNRTFKETYGHMSGAWRGKNPIQRNAIIALAHFKEQEAVPTLIDLMQNDARPVIRGTAAWAIGKINSKEGLLALKKAEQHEQVEEVLKEIRKGLEYYTIEN

SEQ ID NO: 79072 - protein, 378 aa, Paenisporosarcina sp.
  REGION 1..378: note = tr|S2XG06|S2XG06_9BACL 4Fe-4S ferredoxin-type domain-containing protein OS=Paenisporosarcina sp. HGH0030; OX = 1078085 GN=HMPREF1210_02711 PE=4 SV=1
MNVNQFQQELITYAHSIGIDKIGFASSDPFRELKNRLKRQQELGYQSGFEEPDIEKRTVPSLLLDEAESIISIAIAYPSRMENAPQGKKGERRGIFARASWGMDYHTVLRDRLSKLELFIAEHIKDAKTRSMVDTGELSDRAVAERAGIGWSAKNCSVITPEFGSYVYLGEVITNIPFAPDTPMEDECGDCRLCLDVCPTGALIEGGQLNAQRCIAFLTQTKTFLPDEFRTKIGNRIYGCDTCQTVCPKNKGKFNMHQIDFQPDPEIAKPLLLPLLKMSNKEFKTKFGHVSGSWRGKKPIQRNAILALAHFKEDSAIPDLIDLLQSDERPVIRGTAAWAIGKIGTSEGMEALQKALTVEKDPEVIEEILKGISFETIH

SEQ ID NO: 79073 - protein, 378 aa, Paenisporosarcina sp.
  REGION 1..378: note = tr|A0A2T6K0L6|A0A2T6K0L6_9BACL Epoxyqueuosine reductase OS=Paenisporosarcina sp. OV554 OX=2135694; GN = C8K15_1435 PE=4 SV=1
MNVNQFQQELVSYAHSIGIDKIGFASSDPFRELKNRLKRQQELGYQSGFEEPDLEKRTTPTLLLNDAESIISIAIAYPSRMENAPQGKKGERRGIFARASWGTDYHTVLRDRLAKLEEYIASHIIDAKTRSMVDTGELSDRAVAQRAGIGWSAKNCAVITPEFGSYVYLGEIITNIPFAPDTPMEDECGDCRLCLDVCPTGAIIEGGQLNAQRCIAFLTQIKTSLPDEFRTKIGNRIYGCDTCQTVCPKNKGKFNMHQLDFQPDPEIAKPLLLPLLKMSNKEFKTKFGHVSGSWRGKKPIQRNAILALAHFKEESSIPDLIDLLVNDERPVIRGTAAWAIGKIGTKEGRAALHQAVVTETDAEVVEEIHKGLAFQTVN

SEQ ID NO: 79074 - protein, 62 aa, unidentified
  source 1..62: note = Pajaroellobacter abortibovis
  REGION 1..62: note = tr|A0A1L6MX14|A0A1L6MX14_9DELT Uncharacterized protein OS=Pajaroellobacter abortibovis OX=1882918; GN = BCY86_04220 PE=4 SV=1
MHSRAICDTAPVLDRAWAARAGLGFIGRNGLPIGPEKGSMVLLGEVITTLSLNADTDVPIGG

SEQ ID NO: 79075 - protein, 391 aa, unidentified
  source 1..391: note = Palleronia abyssalis
  REGION 1..391: note = tr|A0A2R8BSZ8|A0A2R8BSZ8_9RHOB Epoxyqueuosine reductase OS=Palleronia abyssalis OX=1501240 GN=queG PE=3; SV = 1
MTIDERAKDAYPPPGGPQGASPRVTEGATLKTALGEFAYRAGFVKMGVCRPDAVAEAGARLDTFLGEGRQGQMHWMTEKRAWRRDPRALWPEARSVVMLAESYTPGHDPLDDLALHDRGAVSVYAQGRDYHDVVKKRLKRVGRWLLEAVEKGGYRDPAGTWVALGEKVRGTPEIKVFVDTAPVMEKPLAQAAGLGWQGKHTNLLGRDLGNWVFLGAIFTTLDLSPDVAEVEHCGSCRKCLDICPTDAFPAPFQLDARRCVSYLTIEHKGPVDEALRPGLGNRIYGCDDCLAICPWNKFAVDARDMRLSPQPGRRAPKLADLAALDDSGFREMFSGSPIKRIGRDRMVRNVCYAIGNSGDASLSQVVDPLTRDPDPAVADAARWARLRLDRG

SEQ ID NO: 79076 - protein, 374 aa, Palleronia marisminoris
  REGION 1..374: note = tr|A0A1Y5SVL8|A0A1Y5SVL8_9RHOB Epoxyqueuosine reductase OS=Palleronia marisminoris OX=315423 GN=queG; PE = 3 SV=1
MKTLKDALEDYALEAGFAKMGVCRPDAVAEAGARLDTFLGEGRQGQMHWMTEKQAWRRDPRALWPEARSVVMLAESYTPGHDPLDDVGLRDRGAVSVYAQGRDYHDVVKKRLKKVGRWFMETVEKGGYRSADGKWVPLSADAVHPPAALGAESAPPPEIKVFVDTAPVMEKPLAAAAGLGWQGKHTNLLGRDLGNWVFLGAIFTTLELEPDAPEAEHCGSCRKCLDICPTNAFPAPFQLDARRCVSYLTIEHKGPVDEALRPGLGNRIYGCDDCLAVCPWNKFAVEARDMRLSPQPGRRAPALAELAQLNDAGFREMFSGSPIKRIGRDRMVRNVCYAIGNSGDASLSQVLEPLTRDPDPGVADAARWARLRLS

SEQ ID NO: 79077 - protein, 236 aa, unidentified
  source 1..236: note = Paludibacter jiangxiensis
  REGION 1..236: note = tr|A0A161LFP3|A0A161LFP3_9BACT Epoxyqueuosine reductase QueG OS=Paludibacter jiangxiensis OX=681398; GN = PJIAN_414 PE=4 SV=1
MVNSDLVKEMVNSDLVKEMVLAAGADLCGIASVDRFDIAPEGFRPTDLFPDTKSVVVFAKKIPESILHSKSQIPYSFIEDMALQKVLQLSFDIAVSLERENVSALPVPSEPYEYWDKETMTGKGLLSLKHAGYLAGMGVIGRNTLLCTPEYGNLIKLGALLVNVPLEADPIMENNMCSEKCNACITNCPSGALHDGGVDQKKCRTYSEGSTVKGAPITVCYNCRKVCPNRSGWETA

SEQ ID NO: 79078 - protein, 323 aa, unidentified
  source 1..323: note = Paludibacter jiangxiensis
  REGION 1..323: note = tr|A0A170YGK9|A0A170YGK9_9BACT Epoxyqueuosine reductase OS=Paludibacter jiangxiensis OX=681398; GN = PJIAN_1376 PE=4 SV=1
MITGAKRYDPRVAAALIKEKALQLGFSACGIAQVHPLTDDSEYLQKWLAAGHNGKMGYLANHADLRSDPSVLVPGAKSVIVVLLNYATSFSQQSESLKIARYAHGDDYHFVVKQFLGELLRFIAEEIAPVEGRAFCDSAPVFERRWAHEAGLGWIGLNHCLIHPEFGSFCFIGELVVDLELEYDHPIEGDCGFCGRCVTSCPTQAIQPQGFLKAEKCISYLTVELKDEIPQEYQQKLGGYVAGCDRCQEVCPWNRKASGYTAPLWKVDKSLLMMSDQDWLALEQPEFKRKFSKSSLTRLGYKKLMKNCQIVFEAAGTDGEAHT

SEQ ID NO: 79079 - protein, 313 aa, Paludibacter propionicigenes
  REGION 1..313: note = tr|E4T8D9|E4T8D9_PALPW Uncharacterized protein; OS = Paludibacter propionicigenes (strain DSM 17365 / JCM 13257 / WB4) OX=694427 GN=Palpr_2854 PE=4 SV=1
MSFIKQTALSIGFDACGIAKAERLDEDAMFLRSWLDEGKNGDMHYLERNFEKRVDPRELVPGCKSIVVVLMNYFPQEKQNPQAPKIAKYAYSETDYHLIIKSKLKLFEQKIIDFYGVDCISTGNQHIFVDSAPVLERRWAERAGLGWIGKHTQLIHPGLGSYVFIGLIMLNIELEYDTPIKNRCGSCTRCMDTCPTQALKNSTIDANRCISYLTIESKNEIPEVFHDKLSSCSYGCDICADICPWNKKWAKPNEHVELSPNKKMLQWDYETWLNLSEANFNETFRNSAMKRAGFQKLKQSVKIVAAIENKKQQ

SEQ ID NO: 79080 - protein, 68 aa, Paludibacter sp.
  REGION 1..68: note = tr|A0A2G6QTH8|A0A2G6QTH8_9BACT tRNA epoxyqueuosine(34) reductase QueG (Fragment); OS = Paludibacter sp. OX=1898105 GN=CR965_01810 PE=4 SV=1
MSQELTQFIKTTALEIGFDACGIAKATRLDEDAERLKKWIKEGNHGEMSYMERNFEKRVDPRVLVEGC

SEQ ID NO: 79081 - protein, 301 aa, Paludibacter sp.
  REGION 1..301: note = tr|A0A1M3MC64|A0A1M3MC64_9BACT tRNA epoxyqueuosine(34) reductase QueG OS=Paludibacter sp. 47-17 OX=1895899 GN=BGP01_04785 PE=4 SV=1
MKEFIQKAAFSVGFDACGFAKAEELTDDAAFLRSWLDAGMNGDMQYLERNFEKRTDPRRMVPGCKTVIVLLLNFFPEQVQNLHSHKIAKYAYPETDYHYVIREKLQKLEQKIADEFGNDCFASEFQHSFIDSAPVLERRWAQKAGLGWIGKHTQLIAPGFGSYVFIATLMLNRELNAYDEPIRDRCGTCTKCIAACPTQALQPGILDARKCISYLTIETKSEVPEELKEKLSGYMVGCDICADVCPWNKKWSVSHLHDELKPSEAILTWNDDDWERADGEQLRRTFRKSAIMRALKNQRKV

SEQ ID NO: 79082 - protein, 348 aa, unidentified
  source 1..348: note = Paludibacterium purpuratum
  REGION 1..348: note = tr|A0A4R7AX24|A0A4R7AX24_9NEIS Epoxyqueuosine reductase OS=Paludibacterium purpuratum OX=1144873 GN=queG; PE = 3 SV=1
MARQIKAWSREFGFADAHITRPSLPAEAERRLADWLAAGFHGEMDYMQRHGAMRVRPDELVPGTLSIVSVRMNYWPAHAADAATQLQDGQQAYLSRYALGRDYHKVLRGRLQKLADRIQAAVGPIGHRAFTDSAPVAEVALAAQAGLGWRGKHTLLLTREQGSLFFLGELFTTLPLPADPPQQEHCGRCRSCLDACPTGAIVAPYQVDARRCISYLTIELAGAIPVALRPLIGNRVYGCDDCQLACPWNRFAAAGAEADFDVRHGLDRASLVELFAWSEADFGARMAGSPIYRIGYQRWLRNLAVGLGNAPSSDEVRAALLARADDPSALVREHVAWALARHGVPSRE

SEQ ID NO: 79083 - protein, 379 aa, unidentified
  source 1..379: note = Paludifilum halophilum
  REGION 1..379: note = tr|A0A235BA93|A0A235BA93_9BACL tRNA epoxyqueuosine(34) reductase QueG OS=Paludifilum halophilum OX=1642702 GN=queG PE=4 SV=1
MTPERVKEELIREAKRLGIDKIGFASADPFLELKERLIRHREAGYESGFEEPDIDKRTHPEKCLPEAKTIIAIALAYPTKIPDPPASEPGAYRGVFCRASWGEDYHRVLKRKLEGLKERLLELVPGATAEEMVDTGALSDRAVAERAGIGWSGKNTSIITEEFGSWVYLGEMITDVDLPPDTPVTEGCGDCTACLDACPTGALVSPGRLNSQACLAYLTQTKGFLPVEYRDRLGPYLYGFETCQAVCPYNRKVNFTHHNEFLPDPEQVKPLLKPLLSMSNREFRERFGKMAGSWRGKKPIQRNAIIALGRYRDRTAVPDLIRLLKTDPRPVIRGTAAWALGRIGGDEAGEALRNALAEETDDQVLWELKNALKEEKTGS

SEQ ID NO: 79084 - protein, 387 aa, unidentified
  source 1..387: note = Paludisphaera borealis
  REGION 1..387: note = tr|A0A1U7CJL8|A0A1U7CJL8_9BACT Epoxyqueuosine reductase OS=Paludisphaera borealis OX=1387353 GN=queG_1; PE = 3 SV=1
MSEADLTRRLKAKAVELGFDRVGVAGARTPPDYDRFREWLDAGRAAGMQYMERHAEARAHPDSVLEGVRAVVMVSLVYGEPTDADAPSRRLSGKIARYARGLDYHQVLRARLAALLDWLKLERPEVEGRAVVDTAPLLERDYGRLAGLGWIGKNTLLIDRRLGSFTFLGALLVDLDLEPDPPHVSSHCGTCTRCLDACPTGAFDGPYQLDAGRCISYWTIEHRGAIPDDQADRLDGWVFGCDVCQDVCPWNRKAPAGRVHELDARDEWVDADLVEWLNRSKGDWKRALRGSALERARRVGLVRNAALVLGSARDEGAAPALIDRLADRAEDPVIRAAAAWALGRIGSPIAREALERFQGDDDALVREAVARAVEGFGGVRSSSAACS

SEQ ID NO: 79085 - protein, 443 aa, unidentified
  source 1..443: note = Paludisphaera borealis
  REGION 1..443: note = tr|A0A1U7CWD9|A0A1U7CWD9_9BACT Epoxyqueuosine reductase OS=Paludisphaera borealis OX=1387353 GN=queG_2; PE = 4 SV=1
MPKLEDHPSVVRFRQSETRTEPGRIDIEKLRRICLDAGADDVGFVAIDRQELDDQRAEILGLYPWTKGLISIVCRMNREPVRSPARSVANLEFHNTGHEVDAVASGIVTALEVEGIRAVNPAMGFPMEVGRFPDKIWVVSHKPVAVAAGLGQMGIHRNVIHPKFGNFILLGTVLVEAEIPEQSRPIDYNPCLSCKLCVAACPVGAIGPDGHFDFTACLTHNYREFLGGFTDWVEQVADSKDALDYRRRVEDSETVSVWQSLSFGPNYKAAYCMAACPAGDDIIGPFLTDRKGFLKEVVTPLQEKVEPVYVVPGSDAEAYVSKRFPHKRPRRVGGGRRLRSIRSFLSALPHAFQRHASEGLEATYHFTFTGEEAAEATVVIRDKTIRVEPGHVGTPNLRIAADSMTWLGFLAKERNLAWALVRRKIRLKGSPRFLVAFGRCFPS

SEQ ID NO: 79086 - protein, 367 aa, Panacagrimonas perspica
  REGION 1..367: note = tr|A0A4S3K0K4|A0A4S3K0K4_9GAMM Epoxyqueuosine reductase OS=Panacagrimonas perspica OX=381431 GN=queG; PE = 3 SV=1
MTSLSADALRTLAVSIREWARELGFSDAGISRPELGDDLEHLRNWIASGHHGSMTYMARDPEMRASPQALRAGTLSVISVRLPYWPKAHDADEVLQNGELAYLSRYALGRDYHRVMRARLLKLARRIEREIGPLGHRVFADSAPILEKAVARNAGLGWIGKHTLLIQRAQDSVRSADGAPGGGSWFFLGELFVDVPLEADVREPVADGCGRCSACIRACPTGAIVAPYKVDARRCISYLTIEHHGPIPEEFRVPMGNRIFGCDDCQLACPWNRESGATAESDFTPRHGLDAARLLELWNWDEAEWLQRTEGMPLRRLDHARWLRNLAIALGNAPRSAEVVESLRKHVDHPDAAVRDHVEWALRRQAP

SEQ ID NO: 79087 - protein, 318 aa, unidentified
  source 1..318: note = Panacibacter ginsenosidivorans
  REGION 1..318: note = tr|A0A5B8VB13|A0A5B8VB13_9BACT Dehalogenase domain-containing protein OS=Panacibacter ginsenosidivorans OX=1813871 GN=FRZ67_13880 PE=4 SV=1
MKGSETSAPAFSWDDWYQSVGGRTISIAEVDNILYQIKEYQYPKFKGEVNPQQTFFQNAAAASEAIKQKAFALGADEVGVAEIEPSDIYKGREIKEKYAIVVGQKMLWRNFQQVPSHNSAVECLRIYFSLGEVVIQLADYIRSLGYACTVEHPIGDSDVLHIPLALKAGFGELGRHGSIIHPKMGPLFRLGSVITDMPLAIDHPIDAGIAAFCDNCKACRIYCPANAIPDERSVEAGKDHLGNYRYKVDTGKCFPYFAKHNYCSACLPVCVYHHKEWAKDFDGYKTKLFPVVDMQEAPQPTDPDVPKHWYPKIKRDAV

SEQ ID NO: 79088 - protein, 309 aa, unidentified
  source 1..309: note = Panacibacter ginsenosidivorans
  REGION 1..309: note = tr|A0A5B8VC86|A0A5B8VC86_9BACT Epoxyqueuosine reductase OS=Panacibacter ginsenosidivorans OX=1813871; GN = queG PE=3 SV=1
MRLNNTVIIKDTARHLGFDFCGIAKAVKLEDDARRLESWLNKGMQGSMQYMEKYFDMRIDPSLLVPGAKSVITLLLNYFPQQQQNNAAPLIAKYAYGMDYHEVIKNKLNHLLHVLNTEIGTINGRGFVDSAPVLERSWAQRSGLGWIGKNGNLITRQSGSFFFIATLIVDIELEYDDAFAKDYCGTCSKCVDTCPTEAINDNKVIDGSRCISYFTIELKDMLIPDEMKDKFQDWMFGCDICQDVCPWNRFSKPTTEIEFTPIPEILNLSSKDWEQMSEETFKQVFKHSPLKRAKYKGIQRNLKFIKNDM

SEQ ID NO: 79089 - protein, 342 aa, unidentified
  source 1..342: note = Panacibacter sp.
  REGION 1..342: note = tr|A0A4U3L9H2|A0A4U3L9H2_9BACT Epoxyqueuosine reductase OS=Panacibacter sp. 17mud1-8 OX=2575867 GN=queG; PE = 3 SV=1
MLNKAHGTTISRDLRLITVTLQKNFNITRLQLNSRIVYSNFIKKTAQELNFSLCGIAKAEELTEDARRLEQWLSQGRHGNMQYMERYFDMRINPSLLVPGAQSVITLLCNYFPAEKQQPHAPRISKYAYGKDYHEVIKAKLNEFLYRIQEEIGAVHGRGFIDSAPVLERAWATKSGLGWIGKNGNFITKQQGSFFFIATLIVDLALQPDDPFARDYCGSCSRCIDACPTGAILPNKEVQGNKCISYYTIELKDMLLPAEMRDKFQDWMFGCDVCQDVCPWNRFSKPHNEVAFTPIPEILNLSTREWQALSEESFRQIFKHSPLKRSKYKGIQRNVKFIAGEE

SEQ ID NO: 79090 - protein, 427 aa, Pandoraea apista
  REGION 1..427: note = tr|A0A5E5P382|A0A5E5P382_9BURK Epoxyqueuosine reductase OS=Pandoraea apista OX=93218 GN=queG PE=3 SV=1
MESMKASVIFPATAAQVELSTGPNPSEVSPSRDKATLQTLDPERLNALARQIREWASELGFGRVGITDTDLSHAEAGLQQWLDDGCHGDMDYMAAHGMKRARPAELVPGTVRVISARMNYLPRDTDMASWRQREAARVAMPAEAVVSLYARGRDYHKVMRNRLQQLADRITQAIGPFGYRAFTDSAPVLEVELAQKAGLGWRGKHTLLLSRDAGSLFFLGEIFVDLPLPVDIDAGTEANTGTEPTPDAVAARGMQRGEHCGQCQRCRDVCPTGAITEAFRVDARLCISYLTIEHKGAIPEALRAKMGNRIYGCDDCQLYCPWNKFAQPSPLIDFAPRNRLDCASLVELFAWSEADFMEKLAGSPIRRIGHERWLRNLAVGLGNALRETVDADARKPLRDALLAQRDHPSALVREHVEWALAQEGVTV

SEQ ID NO: 79091 - protein, 427 aa, Pandoraea apista
  REGION 1..427: note = tr|A0A0G4JB04|A0A0G4JB04_9BURK Epoxyqueuosine reductase OS=Pandoraea apista OX=93218 GN=queG PE=3 SV=1
MESMKASVIFPATAAQVELSTGPNPSEVSPSRDKATLQTLDPERLNALARQIREWASELGFGRVGITDTDLSHAEAGLQQWLDDGCHGDMDYMAAHGMKRARPAELVPGTVRVISARMNYLPRDTDMASWRQREAARVAMPAEAVVSLYARGRDYHKVMRNRLQQLADRITQAIGPFGYRAFTDSAPVLEVELAQKAGLGWRGKHTLLLSRDAGSLFFLGEIFVDLPLPVDIDAGTATDTGTEPTPDAVAARGMQRGEHCGQCQRCRDVCPTGAITEAFRVDARLCISYLTIEHKGAIPEALRAKMGNRIYGCDDCQLYCPWNKFAQPSPLTDFAPRNRLDCASLVELFAWSEADFMDKLAGSPIRRIGHERWLRNLAVGLGNALRETVDAAARKPLRDALLAQRDHPSALVREHVEWALAQEGVTV

SEQ ID NO: 79092 - protein, 425 aa, Pandoraea faecigallinarum
  REGION 1..425: note = tr|A0A0H3WWM2|A0A0H3WWM2_9BURK Epoxyqueuosine reductase OS=Pandoraea faecigallinarum OX=656179 GN=queG; PE = 3 SV=2
MKASVIFPATAAQVEPSTPPQTPEVSSSRDNATPPALDSEGLAALAVQIRAWARELGFGHVGIAHTDLSHAEAGLQQWLDDGCHGDMDYMAAHGMKRARPAELVPGTVRVISARMNYLPGDVDLAHWREHEAARAARPGEAIVSIYARGRDYHKVMRNRLQQLSDRITQAIGPFGYRVFTDSAPVLEVELAQKAGLGWRGKHTLLLSREAGSLFFLGEIFVDVPLPADADQADEAEEADQAGGGAMARGEHCGQCRRCLDVCPTGAITEPFRVDARLCVSYLTIEHKGAIPEPLRAKMGNRIYGCDDCQLYCPWNKFAQPSPLADFAPRNRLDGSSLVELFAWSETEFMERLAGSPIRRIGHERWLRNLAVGLGNALRETTAQEARTSIREALLARRAHPSALVREHVEWALAQQGQAPTEGALV

SEQ ID NO: 79093 - protein, 420 aa, unidentified
  source 1..420: note = Pandoraea fibrosis
  REGION 1..420: note = tr|A0A5E4U8F0|A0A5E4U8F0_9BURK Epoxyqueuosine reductase OS=Pandoraea fibrosis OX=1891094 GN=queG PE=3; SV = 1
MESMKASVIFPATAAQVELSTPPNPSEVSPSRDNATPQTLDAQRLNALAGQIREWASELGFGRIGITDTDLSHAEAGLQQWLDDGCHGDMDYMTAHGMKRARPAELVPGTVRVISARMNYLPSDTDMASWRQREAARAAMPAEAIVSVYARGRDYHKVVRNRLQQLADRITQAIGPFGYRAFTDSAPVLEVELAQKAGLGWRGKHTLLLSRDAGSLFFLGEIFVDVPLPVDVDTATDAAPGDEARGMQRGEHCGQCERCREVCPTGAITEAFRVDARLCISYLTIEHKGAIPEALRAKMGNRIYGCDDCQLYCPWNKFAQPSPLSDFAPRNRLDCASLIELFAWSEADFMDKLAGSPIRRIGHERWLRNLAVGLGNALRDTGDANARKPLRDALLARRAHPSALVREHVEWALAQEGAAV

SEQ ID NO: 79094 - protein, 395 aa, unidentified
  source 1..395: note = Pandoraea fibrosis
  REGION 1..395: note = tr|A0A0B3T3R8|A0A0B3T3R8_9BURK Epoxyqueuosine reductase OS=Pandoraea fibrosis OX=1891094 GN=queG PE=3; SV = 1
MSPSRDNATPQTLDAQRLNALAGQIREWASELGFGRIGITDTDLSHAEAGLQQWLDDGCHGDMDYMAAHGMKRARPAELVPGTVRVISARMNYLPSDTDMASWRQREAARAAMPAEAIVSVYARGRDYHKVVRNRLQQLADRITQAIGPFGYRAFTDSAPVLEVELAQKAGLGWRGKHTLLLSRDAGSLFFLGEIFVDVPLPVDVDTDTDTDAAPGDEARGMQRGEHCGQCERCREVCPTGAITEAFRVDARLCISYLTIEHKGAIPEALRAKMGNRIYGCDDCQLYCPWNKFAQPSPLTDFAPRNRLDCASLIELFAWSEADFMDKLAGSPIRRIGHERWLRNLAVGLGNALRDTGDANARKPLRDALLARRAHPSALVREHVEWALAQEGAAV

SEQ ID NO: 79095 - protein, 392 aa, Pandoraea norimbergensis
  REGION 1..392: note = tr|A0A0U2J0S4|A0A0U2J0S4_9BURK Epoxyqueuosine reductase OS=Pandoraea norimbergensis OX=93219 GN=queG; PE = 3 SV=1
MPDGPEVSPSRDNTAIVSLSAAQLSTLAGQIRTWAHELGFGEVGITDTDLSHAEPGLQQWLDDGCHGDMDYMAAHGMKRARPAELVPGTVRVISARMNYLPQDTDMTTWRAHEAARQHMPGEAVVSIYARGRDYHKVMRNRLQQLADRVSQAIGPFGYRVFTDSAPVLEVELAQKAGLGWRGKHTLLLSRDAGSLFFLGEIFVDVPLPVDEGASRGEHCGQCQRCRDVCPTGAITEAYRVDARLCVSYLTIEHKGAIPEPLRAKMGNRIYGCDDCQLFCPWNKFAQPSPLPDFDPRNGLDRASLVELFAWTEDEFLARLQGSPIRRIGHERWLRNLAVGLGNALREVSAPGEIANESARKPLRDALAARMDHPSALVREHVQWALAQEGATL

SEQ ID NO: 79096 - protein, 407 aa, Pandoraea oxalativorans
  REGION 1..407: note = tr|A0A0E3U9M6|A0A0E3U9M6_9BURK Epoxyqueuosine reductase OS=Pandoraea oxalativorans OX=573737 GN=queG; PE = 3 SV=1
MSPSRDIATPSAAASTLDQQGLASLAMQIRVWARELGFAHVGITDIDLSHAEAGLQQWLDDGCHGDMDYMAAHGMKRARPAELVPGTVRVISARMNYLPSDTDLAQWRKREMARADMPGEAVVSIYARGRDYHKVVRNRLQQLADRITQAIGPFGYRAFTDSAPVLEVELAQKAGLGWRGKHTLLLSRDAGSLFFLGEIFVDVPLPVDGDDSDDRHDGHEDGSGHDGVHPNTGMDRGEHCGQCRRCLDVCPTGAITEAFRVDARLCVSYLTIEHKGAIPEPLRARMGNRIYGCDDCQLYCPWNKFAQPSPLPDFAPRNKLDSASLVELFAWTETEFMDRLAGSPIRRIGHERWLRNLAVGLGNALRETPDADARLPMRDALLARRDHPSALVREHVEWALAQEGVPV

SEQ ID NO: 79097 - protein, 426 aa, Pandoraea pnomenusa
  REGION 1..426: note = tr|A0A5E4ZWF5|A0A5E4ZWF5_9BURK Epoxyqueuosine reductase OS=Pandoraea pnomenusa OX=93220 GN=queG PE=3 SV=1
MESMKASVIFPATAAQVEPSTPPNASEVSSSRDNATSLALDAGRLSALVAQIREWGRELGFDKVGITDTDLSHAEPGLQQWLDDGCHGDMDYMATHGMKRARPAELVPGTVRVISVRMNYLPSDTDTATWREREAARAAVPGEAVVSLYARGRDYHKVVRNRLQQLADRISAAIGPFGYRAFTDSAPVLEVELAQKAGLGWRGKHTLLLSRDAGSLFFLGEILVDLPLPVDVDAAIAPRDAHGSRGDAGARALQRGEHCGQCRRCRDVCPTGAITEDFRVDARLCVSYLTIEHKGAIPEPLRAKLGNRIYGCDDCQLYCPWNKFAQPASVPDFAVRNGLDRASLVELFAWSETEFTQKLAGSPIRRIGHERWLRNLAVGLGNALRETADAGARTSLRDALLARRDHSSALVREHIEWALAQEGVTD

SEQ ID NO: 79098 - protein, 426 aa, Pandoraea pnomenusa
  REGION 1..426: note = tr|A0A518R6N8|A0A518R6N8_9BURK Epoxyqueuosine reductase OS=Pandoraea pnomenusa OX=93220 GN=queG PE=3 SV=1
MESMKASVIFPATAAQVEPSTPPNASEVSSSRDNATSLALDAGRLSALVAQIREWGRELGFDRVGITDTDLSHAEPGLQQWLDDGCHGDMDYMATHGMKRARPAELVPGTVRVISVRMNYLPSDTDTTTWRAREAARAAVPGEAVVSLYARGRDYHKVVRNRLQQLADRISAAIGPFGYRAFTDSAPVLEVELAQKAGLGWRGKHTLLLSRDAGSLFFLGEILVDLPLPVDVDAAIAPRDAHGSRGDAGARALQRGEHCGQCRRCRDVCPTGAITEDFRVDARLCVSYLTIEHKGAIPEPLRAKLGNRIYGCDDCQLYCPWNKFAQPASVPDFAVRNGLDRASLVELFAWSETDFTQKLAGSPIRRIGHERWLRNLAVGLGNALRETADAGARTSLRHALLARRDHSSALVREHIEWALAQEGVTD

SEQ ID NO: 79099 - protein, 418 aa, Pandoraea pulmonicola
  REGION 1..418: note = tr|A0A378Z9C8|A0A378Z9C8_9BURK Epoxyqueuosine reductase OS=Pandoraea pulmonicola OX=93221 GN=queG PE=3; SV = 1
MEEMKAPVIFPATAAQVEPSTLPNTSEVSPSRDKASLAALDAEGLSALALRIREWAHELGFGQIGITDTDLSHAEAGLQRWLDDGCHGEMDYMAAHGMKRARPAELVPGTVRVISARMNYLPSDTDMAGWRRHEAERAKHPGEAIVSIYARGRDYHKVMRNRLQQLSERIAQAIGPFGYRVFTDSAPVLEVELAQKAGLGWRGKHTLLLSRDAGSLFFLGEIFVDVPLPVDMGELDERGDAHGAMQRGEYCGQCQKCRDVCPTGAITEAFRVDARLCISYLTIEHKGAIPESLRAKMGNRIYGCDDCQLFCPWNKFAQPSPLADFAPRNGLERASLVELFAWTEAEFMERLAGSPIRRIGHERWLRNLAVGLGNALRDTPDAAARIPLRNALLARRDHPSALVREHVEWALAQEGVPA

SEQ ID NO: 79100 - protein, 487 aa, Pandoraea sp.
  REGION 1..487: note = tr|A0A522JIC5|A0A522JIC5_9BURK Epoxyqueuosine reductase OS=Pandoraea sp. OX=1883445 GN=queG PE=3 SV=1
MIDLQSTFGKGDVVWFTQCVSRAAHPTGMPEGAQQCAHQRRFAGTEVARQMHVQTFGRTRRDGLRQARGKRPGGVLVGQIELFCRGGGGGHCVQSSQMNGSQTLTSAHASDPHEPGPPDGPEGLARLSARIKQWGRELGFGAIGVSDVDLRAAEAGLLSWLAQGCQGDMDYMANHGLKRARPAELVPGTVRVISARMDYLPAPEAAAAARDWRHVELARQEEPAAAVVSIYARGRDYHKIMRQRLQQLADRVATEIGPFGYRVFTDSAPVLEVELAQKAGLGWRGKHTLLLSRSAGSMFFLGEIYVDLPLPIDRADEDGAHCGHCERCRQACPTGAIVAPYRVDARRCISYLTIEHKGAIPLELRPLLGNRVYGCDDCQLVCPWNKFAQRSPMPDFAVRNGLDDVMLATLFAWSEAEFLERMAGSAIRRIGHERWLRNIAVALGNGLRATGQDALRQALRARANDPSALVREHVAWALAQDPVAMPP

SEQ ID NO: 79101 - protein, 415 aa, Pandoraea sp.
  REGION 1..415: note = tr|A0A411JHW6|A0A411JHW6_9BURK Epoxyqueuosine reductase OS=Pandoraea sp. XY-2 OX=2518599 GN=queG PE=3; SV = 1
MFPATAAQVESAAPPNASEVSSSRDNATSPALDAGDLAVLAGQIRAWASELGFGRVGITDIDLSHAEAGLQQWLDDGCHGDMDYMAAHGMKRARPAELVPGTVRVISARMNYLPNDTDMASWRERETARAAMPAEAVVSIYARGRDYHKVMRHRLQQLAERITQAIGPFGYRAFTDSAPVLEVELAQKAGLGWRGKHTLLLSRDAGSLFFLGEIFVDVPLPVDADALSTPSEVQGKATGHRLQPGEHCGQCQRCRDVCPTGAITEAFRVDARLCVSYLTIEHKGAIPENLRAKMGNRIYGCDDCQLYCPWNKFAQPSPLADFAPRNRLDSASLVELFAWSETEFMDKLAGSPIRRIGHERWLRNLAVGLGNALRDSADAAARAPLRDALLARRDHPSALVREHVEWALAQEGAAA

SEQ ID NO: 79102 - protein, 425 aa, Pandoraea sputorum
  REGION 1..425: note = tr|A0A239SRG7|A0A239SRG7_9BURK Epoxyqueuosine reductase OS=Pandoraea sputorum OX=93222 GN=queG PE=3 SV=1
MESMKASVIFPATAAQVEPSAPPNAKEVSPSRDIATSSALASTLDQQGLAALAVQIRGWARELGFGHVGITDIDLSHAEAGLQQWLDDGCHGDMDYMAAHGMKRARPAELVPGTVRVISARMNYLPSDTDLTHWRKREMARTGMPGEAVVSLYARGRDYHKVLRNRLQQLADRITQAIGPFGYRAFTDSAPVLEVELAQKAGLGWRGKHTLLLSRDAGSLFFLGEIFVDVPLPVDVDESDDEDDSASPSTRMDRGEHCGQCRRCLDVCPTGAITEAFRVDARLCVSYLTIEHKGAIPEPLRARMGNRIYGCDDCQLYCPWNKFAQPSPLPDFAPRNKLDGASLVELFAWTETEFMDRLAGSPIRRIGHERWLRNLAVGLGNALRETPDADARIPMRDALLARRDHPSALVREHVEWALAQEGVPV

SEQ ID NO: 79103 - protein, 425 aa, Pandoraea sputorum
  REGION 1..425: note = tr|A0A5E5BCH6|A0A5E5BCH6_9BURK Epoxyqueuosine reductase OS=Pandoraea sputorum OX=93222 GN=queG PE=3 SV=1
MESMKASVIFPATAAQVEPSAPPNAKEVSPSRDIATSSALASTLDQQGLAALAVQIRGWARELGFGHVGITDIDLSHAEAGLQQWLDDGCHGDMDYMAAHGMKRARPAELVPGTVRVISARMNYLPSDTDLAHWRKREMARAGMPGEAVVSLYARGRDYHKVLRNRLQQLADRITQAIGPFGYRAFTDSAPVLEVELAQKAGLGWRGKHTLLLSRDAGSLFFLGEIFVDVPLPVDVDESDDEDDSASPNTRMDRGEHCGQCRRCLDVCPTGAITEAFRVDARLCVSYLTIEHKGAIPEPLRARMGNRIYGCDDCQLYCPWNKFAQPSPLPDFAPRNKLDGASLVELFAWTETEFMDRLAGSPIRRIGHERWLRNLAVGLGNALRETPDADARIPMRDALLARRDHPSALVREHVEWALAQEGVPV

SEQ ID NO: 79104 - protein, 397 aa, unidentified
  source 1..397: note = Pandoraea terrae
  REGION 1..397: note = tr|A0A5E4ZFJ4|A0A5E4ZFJ4_9BURK Epoxyqueuosine reductase OS=Pandoraea terrae OX=1537710 GN=queG PE=3 SV=1
MKASVIFPAPAAQVETSSTSGVADAPHASLDAAALAALATRIKTWGRELGFGRIGIADTDLEHAEAGLQAWLDAGCHGDMDYMANHGMKRARPAELVPGTLRVISARMDYLPQDTDPATWRAQEDVRQQDPNAAVVSVYARGRDYHKVLRSRLQQLADRISAEIGPFGYRVFTDSAPVLEVALAQKAGIGWRGKHTLLLSRDAGSMFFLGELFVDVPLPVDVSLDAGEFCGQCRRCQEVCPTGAIVSPYRVDARLCVSYLTIEHKGAIPEALRAKMGNRVYGCDDCQLFCPWNKFARPSPLTDFAPRNRLDAASLAELFAWTESEFLERLSGSAIRRIGHERWLRNLAVGLGNALRAAADETARAPLRAALTARADHPSALVREHVAWALAQEGVSP

SEQ ID NO: 79105 - protein, 393 aa, Pandoraea thiooxydans
  REGION 1..393: note = tr|A0A0G3EZB4|A0A0G3EZB4_9BURK Epoxyqueuosine reductase OS=Pandoraea thiooxydans OX=445709 GN=queG PE=3; SV = 1
MNGSQTLTSAHASDSLEPALPDSPEGLARLSARIKRWGHELGFGAIGVSDVDLHAAEAGLLSWLEQGCQGDMDYMANHGLKRARPAELVPGTVRVISARMDYLPEAPATTTTAAARDWRQVELARQEEPVAAVVSVYARGRDYHKLMRQRLQQLADRIAAEIGPFGYRVFTDSAPVLEVELAQKAGLGWRGKHTLLLSRTAGSMFFLGEIYVDLPLPVDAADENGAHCGHCERCRQACPTGAIVAPYRVDARRCISYLTIEHKGSIPHELRPLMGNRVYGCDDCQLVCPWNKFAQRSPLPDFAVRHDLDDVTLAALFAWSEAEFLERMAGSAIRRIGHERWLRNIAVALGNGLRATGDDTLRQALRARADDPSALVREHVAWALAQDPMLMSR

SEQ ID NO: 79106 - protein, 395 aa, Pandoraea vervacti
  REGION 1..395: note = tr|A0A1J0LXJ8|A0A1J0LXJ8_9BURK Epoxyqueuosine reductase OS=Pandoraea vervacti OX=656178 GN=queG PE=3 SV=1
MSSSRDKATPSALDSGALATLAVQIRGWATELGFGHVGITDTDLSHAEAGLQQWLDDGCHGDMDYMAAHGMKRARPAELVPGTVRVISARMNYLPSDVDLSQWRAHEAARAAQPAEAVVSIYARGRDYHKVMRNRLQQLADRIAKAIGPFGYRVFTDSAPVLEVELAQKAGLGWRGKHTLLLSREAGSLFFLGEIFVDVPLPLDRDDHADHEKAAMARGEHCGQCRRCLDVCPTGAITEPFRVDARLCVSYLTIEHKGAIPEPLRAKMGNRIYGCDDCQLHCPWNKFAQASPLADFAPRNKLDDASLVELFAWSETEFMSRLEGSPIRRIGHERWLRNLAVGLGNALRDTADAQARKPMRDALLARRDHASALVREHVAWALAQEGAPEQKGSQV

SEQ ID NO: 79107 - protein, 391 aa, unidentified
  source 1..391: note = Pannonibacter indicus
  REGION 1..391: note = tr|A0A0K6HPK8|A0A0K6HPK8_9RHOB Epoxyqueuosine reductase OS=Pannonibacter indicus OX=466044 GN=queG PE=3; SV = 1
MPSNPVFPAKALDRLCRQLKDKAAQLGFDDLAITRPDAIPLAPQRLAQFLADGHHGSMGWMAETADRRASPSVLWPDVRSVIMLAMNYGPAGDALENLAHPDRGNISVYARHRDYHDVIKGKLKELASFLVSRAGGGDVKVFVDTAPVMEKPLAQAAGLGWQGKHTNLVSRRLGSWFFLASIFTTLDLAAGEPERDHCGSCRACLSACPTDAFPQPYRLDARRCISYLTIEHAGPIPDEFRVAFGNRIYGCDDCLAACPWNKFAVEAREAKLQAREDLEAPSLATLLRLDDPAFRQLFSGSPVKRIGRDRFIRNCLIAAGNSADAGHVPQAVVLLNDDAAVVRGAAVWALSRLLAPEAFAALAKDRLIQETDADVRREWQAAKARAASETG

SEQ ID NO: 79108 - protein, 386 aa, Pannonibacter phragmitetus
  REGION 1..386: note = tr|A0A0U3N1G2|A0A0U3N1G2_9RHOB Epoxyqueuosine reductase OS=Pannonibacter phragmitetus OX=121719 GN=queG; PE = 3 SV=1
MLSAKALDRLCRQLRDKAAQLGFDDLAITRPDAIPQAPQRLAQFLADGHHGSMGWMEETADRRASPGVLWPDVRSVIMLAMNYGPAGDALENLAHPDRGNISVYARHRDYHDVIKGKLKELASFLVSRAGGGDVKVFVDTAPVMEKPLAQAAGLGWQGKHTNLVSRRLGSWFFLASIFTTLDLAAAEPERDHCGSCRACLSACPTDAFPQPYRLDARRCISYLTIEHAGPIPDEFRVALGNRIYGCDDCLAACPWNKFAVEAREAKLQAREDLEAPSLATLLRLDDPVFRQLFSGSPVKRIGRDRFIRNCLIAAGNSADAGHVPQAVALLDDDAAVVRGAAVWALSRLLAPEAFAALAEDRLTQETDADVRREWQAAKARAASETR

SEQ ID NO: 79109 - protein, 366 aa, Pannonibacter phragmitetus
  REGION 1..366: note = tr|A0A378ZQ42|A0A378ZQ42_9RHOB Epoxyqueuosine reductase OS=Pannonibacter phragmitetus OX=121719 GN=queG; PE = 4 SV=1
MGFDDLAITRPNAIPQAPQRLAQFLADGHHGSMGWMEETADRRASPSVLWPEVRSVIMLAMNYGPAGDALENLAHPDRGNISVYARHRDYHDVIKGKLKELASFLVSRAGGGDVKVFVDTAPVMEKPLAQAAGLGWQGKHTNLVSRRLGSWFFLASIFTTLDLAAAEPERDHCGSCWACLSACPTGAFPQPYRLDARRCISYLTIEHAGPIPQEFRVALGNRIYGCDDCLAACPWNKFAVEAREAKLQAREDLEAPSLATLLRLDDPAFRQLFSGSPVKRIGRDRFIRNCLIAAGNSADAGHVPQAVALLDDDAAVVRGAAVWALSRLLEPEAFAVLAEDRLTPEADADVRREWQAAKAKAASETR

SEQ ID NO: 79110 - protein, 379 aa, unidentified
  source 1..379: note = Pantoea alhagi
  REGION 1..379: note = tr|A0A1W6B5C6|A0A1W6B5C6_9GAMM Epoxyqueuosine reductase OS=Pantoea alhagi OX=1891675 GN=queG PE=3 SV=1
MSHPLDLQQLAQDIKQWGLSLGFQQVGICDTDLSLEEPRLQAWLDKQYHGEMEWMARHGMMRARPHELLPGTLRVISVRMNYLPAKAAFASTLKNPRLGYVSRYALGRDYHKVLRNRLKKLGDLIRERCETVNFRPFVDSAPILERPLAAKAGLGWTGKHSLILNREAGSWFFLGELLIDLPLPVDRPQEEQCGRCVACITTCPTGAIVEPYVVDARRCISYLTIELEGAIPEAFRPLIGNRIYGCDDCQLICPWNRFGQLSDEDDFSPRAALHAPPLTELFAWDEAKFLRVTEGSAIRRIGHLRWLRNIAVALGNAPWDTENIAALSSRLGENPMLDEHIHWALEQQKIKRAENAIEVQRPQQKRLVRAIEKGLPRDA

SEQ ID NO: 79111 - protein, 379 aa, Pantoea allii
  REGION 1..379: note = tr|A0A4S3BER1|A0A4S3BER1_9GAMM Epoxyqueuosine reductase OS=Pantoea allii OX=574096 GN=queG PE=3 SV=1
MSYPLDLHQLAQQIKQWGLDLGFQQVGITDTDLSAEEPRLQAWLDKQYHGEMEWMARHGMMRARPHELLPGTLRVISVRMNYLPAKAAFASTLKNPQLGYVSRYALGRDYHKVLRNRLKKLGEMIQQHCGELNFRPFVDSAPLLERPLAAKAGLGWTGKHSLILNREAGSWFFLGELLIDIPLPLDAPQEEQCGRCVACMTICPTSAIVEPYVVDARRCISYLTIELEDAIPEEFRPLIGNRIYGCDDCQLICPWNRYGQLSDETDFSPRAALHAPELVDLFQWDEAKFLRITEGSAIRRIGHLRWLRNIAVALGNAPWSPAVVQVLEQRLGESELLDEHILWAITQQQQKREQLVVEVQPAQQKRLVRAVEKGLPRDA

SEQ ID NO: 79112 - protein, 325 aa, Pantoea allii
  REGION 1..325: note = tr|A0A2V2BIF2|A0A2V2BIF2_9GAMM Epoxyqueuosine reductase OS=Pantoea allii OX=574096 GN=C7431_10345 PE=4; SV = 1
MARHGMMRARPHELLPGTLRVISVRMNYLPAKAAFASTLKNPQLGYVSRYALGRDYHKVLRNRLKKLGEMIQAHCGESHFRPFVDSAPLLERPLAVKAGLGWTGKHSLILNREAGSWFFLGELLIDLPLPVDTPQEEQCGRCVACMTICPTGAIVAPYTVDARRCISYLTIELEGAIPEALRPLMGNRIYGCDDCQLICPWNRYGQLTDEEDFSPRAALHAPELTALFQWDEAKFLRITEGSPIRRIGYQRWSRNIAVALGNAPWSTEILTVLEQRRGESDLLDEHIQWAITQQQVKRKRDEIDVQPAQQKRLVRAVEKGLPRDA

SEQ ID NO: 79113 - protein, 379 aa, unidentified
  source 1..379: note = Pantoea ananas
  REGION 1..379: note = tr|A0A2S7ZTJ8|A0A2S7ZTJ8_PANAN Epoxyqueuosine reductase OS=Pantoea ananas OX=553 GN=queG PE=3 SV=1
MSYPLDLHQLAQQIKQWGLDLGFQQVGITDTDLSAEEPRLQAWLDKQYQGEMAWMARHGMMRARPHELLPGTLRVISVRMNYLPAKAAFASTLKNPQLGYVSRYALGRDYHKVLRNRLKKLGEMIQQHCGELNFRPFVDSAPLLERPLAAKAGLGWTGKHSLILNREAGSWFFLGELLIDIPLPSDAPQEEQCGRCVACMTICPTSAIVEPYVVDARRCISYLTIELEGAIPEEFRPLMGNRIYGCDDCQLICPWNRYGQLSDESDFSPRAALHAPELIDLFQWDEAKFLRITEGSAIRRIGHLRWLRNIAVALGNAPWSPEIIQILEQRLGESELLDEHILWAIAQQQQKREQIVVEVQPAQQKRLVRAVEKGLPRDA

SEQ ID NO: 79114 - protein, 325 aa, unidentified
  source 1..325: note = Pantoea ananas
  REGION 1..325: note = tr|A0A2U1D512|A0A2U1D512_PANAN Epoxyqueuosine reductase OS=Pantoea ananas OX=553 GN=C7427_109137 PE=4; SV = 1
MARHGMMRARPHELLPGTLRVISVRMNYLPAKAAFASTLKNPQLGYVSRYALGRDYHKVLRNRLKKLGEMIQAHCGESQFRPFVDSAPLLERPLAEKAGLGWTGKHSLILNREAGSWFFLGELLIDLPLPIDSPQEEQCGRCVACMTICPTGAIVAPYTVDARRCISYLTIELEGAIPEALRPLMGNRIYGCDDCQLICPWNRYGQLTDEADFSPRAALHAPALNALFQWDEAKFLRITEGSPIRRIGYQRWSRNIAVALGNAPWSAEILPILEQRLGESDLLDEHIQWAIAQQQDKRKHVEIDVQPAQQKRLVRVIEKGLPRDA

SEQ ID NO: 79115 - protein, 379 aa, Pantoea ananatis
  REGION 1..379: note = tr|A0A0H3L7K7|A0A0H3L7K7_PANAA Epoxyqueuosine reductase OS=Pantoea ananatis (strain AJ13355) OX=932677; GN = yjeS PE=3 SV=1
MSYPLDLDQLAQHIKQWGRDLGFQQVGITDTDLSAEEPRLQAWLDKQYHGEMEWMARHGMMRARPHELLPGTLRVISVRMNYLPAKAAFASTLKNPQLGYVSRYALGRDYHKVLRNRLKKLGEMIQAHCGESQFRPFVDSAPLLERPLAEKAGLGWTGKHSLILNREAGSWFFLGELLIDLPLPIDSPQEEQCGRCVACMTICPTGAIVAPYTVDARRCISYLTIELEGAIPEALRPLMGNRIYGCDDCQLICPWNRYGQLTDEADFSPRAALHAPALTALFQWDEAKFLRITEGSPIRRIGYQRWSRNIAVALGNAPWSAEILPILEQRLGESDLLDEHIQWAIAQQQDKRKHVEIDVQPAQQKRLVRVIEKGLPRDA

SEQ ID NO: 79116 - protein, 379 aa, Pantoea ananatis; identical to SEQ ID NO: 79115
  REGION 1..379: note = tr|D4GC99|D4GC99_PANAM Epoxyqueuosine reductase; OS = Pantoea ananatis (strain LMG 20103) OX=706191 GN=yjeS; PE = 3 SV=1

SEQ ID NO: 79117 - protein, 379 aa, unidentified
  source 1..379: note = Pantoea coffeiphila
  REGION 1..379: note = tr|A0A2S9IDU7|A0A2S9IDU7_9GAMM Epoxyqueuosine reductase OS=Pantoea coffeiphila OX=1465635 GN=queG PE=3; SV = 1
MSHPLDFHQLALDIKQWGLSLGFQQVGICDTDLTLEEPRLQAWLDKQYHGEMDWMARHGMMRARPHELMPGTLRVISVRMNYLPAKASFASTLRNPRLGYVSRYALGRDYHKVLRNRLKKLGDMIRERCEEAQFRPFVDSAPVLERPLAAKAGLGWTGKHSLILNREAGSWFFLGELLIDLPLPVDSPVEENCGRCVACITTCPTGAIVEPYKVDARRCISYLTIELEGVIPEEFRPLIGNRIYGCDDCQLICPWNRYGQLTDEDDFSPRAVLHAPPLIDLFAWDEAKFLRVTEGSAIRRIGHLRWLRNVAVALGNAPWDESHLQALEARLGENEMLDEHIRWAIACQLAKRDENVVEVQSSQQRRLVRAIEKGLPRDA

SEQ ID NO: 79118 - protein, 379 aa, Pantoea cypripedii
  REGION 1..379: note = tr|A0A1X1EZK5|A0A1X1EZK5_PANCY Epoxyqueuosine reductase OS=Pantoea cypripedii OX=55209 GN=queG PE=3 SV=1
MSYPLDLHQLAQQIKQWGRELGFQQVGICDTDLSAEEPRLQAWLEKQYHGEMEWMARHGMMRARPHELLPGTLRVISVRMNYLPAKAAFASTLKNPQLGYVSRYALGRDYHKVLRNRLKKLGDKIQEHCGELNFRPFVDSAPLLERPLAAKAGLGWTGKHSLILNREAGSWFFLGELLIDLPLPVDTPQEEQCGRCVACMTICPTAAIVEPYTVDARRCISYLTIELEGAIPEEFRPLIGNRIYGCDDCQLICPWNRYGQLTDEDDFSPRAVLHAPPLTTLFMWDEAKFLRVTEGSAIRRIGHLRWLRNVAVALGNAPWSEENITVLQQRSGEHPLLDEHIDWALDQQRQKRAALAIDVQPARKLRLVRAIEKGLSRDA

SEQ ID NO: 79119 - protein, 379 aa, Pantoea deleyi
  REGION 1..379: note = tr|A0A506PV92|A0A506PV92_9GAMM Epoxyqueuosine reductase OS=Pantoea deleyi OX=470932 GN=queG PE=3 SV=1
MSYPLDLHQLAQQIKQWGAELGFQQVGITDTDLSAEEPRLQAWLDKQYHGEMEWMARHGMMRARPHELLPGTLRVISVRMNYLPAKAAFASTLKNPRLGYVSRYALGRDYHKVLRNRLKKLGEMIQEHCGALNFRPFVDSAPLLERPLAAKAGLGWTGKHSLILNREAGSWFFLGELLIDIPLPVDTPQPEQCGRCVACMTICPTGAIVEPYVVDARRCISYLTIELEGAIPEAFRPLMGNRIYGCDDCQLICPWNRYGQLSDESDFSPRAALHAPELIDLFQWDETKFLRITEGSAIRRIGHLRWLRNIAVALGNAPWSADIMPVLERRLGESELLDEHIQWAIAQQQQKREQLVVDVQPAQQKRLVRAVEKGLPRDA

SEQ ID NO: 79120 - protein, 379 aa, Pantoea dispersa
  REGION 1..379: note = tr|A0A518XG38|A0A518XG38_9GAMM Epoxyqueuosine reductase OS=Pantoea dispersa OX=59814 GN=queG PE=3 SV=1
MSYPLDLEQLALHIKQWGRDLGFQQVGICDTDLRAEEPKLQAWLEKQYHGEMDWMARHGMMRARPHELLPGTLRVISVRMNYLPAKAAFASTLKNPQLGYVSRYALGRDYHKVLRNRLKKLGEMIQAHCGELNFRPFVDSAPVLERPLAAKAGLGWTGKHSLILNREAGSWFFLGELLIDLPLPVDLPQQEQCGRCVACMTICPTGAIVEPYVVDARRCISYLTIELEGAIPEALRPLIGNRIYGCDDCQLICPWNRYGQLTDEPDFSPRAVLHAPQLIDLFQWDEAKFLRVTEGSAIRRIGHLRWLRNVAVALGNAPWSEDNVAALTLRRGEHPLLDEHIDWAIAQQLQKRAAQAIEVQPAQKQRLVRAVEKGLPRDA

SEQ ID NO: 79121 - protein, 379 aa, Pantoea dispersa
  REGION 1..379: note = tr|A0A437T777|A0A437T777_9GAMM Epoxyqueuosine reductase OS=Pantoea dispersa OX=59814 GN=queG PE=3 SV=1
MSYPLDLQQLAQQIKQWGRELGFQQVGICDTDLSAEEPKLQQWLEKQYHGEMDWMARHGMMRARPHELLPGTLRVISVRMNYLPAKAAFASTLKNPQLGYVSRYALGRDYHKVLRNRLKKLGEKIQAHCGELNFRPFVDSAPILERPIAVKAGLGWTGKHSLVLNREAGSWFFLGELLIDLPLPVDEPQQEQCGRCVACMTICPTGAIVEPYVVDARRCISYLTIELEGAIPEALRPLIGNRIYGCDDCQLICPWNRYGQLTDEEDFSPRAVLHAPQLVELFGWDEARFLRVTEGSAIRRIGHLRWLRNVAVALGNAPWAPENLTALEQRRGEHPLLDEHIDWAIAQQRQKRAAQAVEVQSAQQQRLVRAVEKGLPRDA

SEQ ID NO: 79122 - protein, 379 aa, Pantoea eucalypti
  REGION 1..379: note = tr|A0A506PBC6|A0A506PBC6_9GAMM Epoxyqueuosine reductase OS=Pantoea eucalypti OX=470933 GN=queG PE=3 SV=1
MSYPLDLHQLAQQIKQWGLDLGFQQVGITDTDLSAEEPRLQAWLDKQYQGEMAWMARHGMMRARPHELLPGTLRVISVRMNYLPAKAAFASTLKNPQLGYVSRYALGRDYHKVLRNRLKKLGEMIQQHCGELNFRPFVDSAPLLERPLAAKAGLGWTGKHSLILNREAGSWFFLGELLIDIPLPLDAPQEEQCGRCVACMTICPTSAIVEPYVVDARRCISYLTIELEGAIPEEFRPLMGNRIYGCDDCQLICPWNRYGQLSDESDFSPRAALHAPELIDLFQWDEAKFLRITEGSAIRRIGHLRWLRNISVALGNAPWSPEIIQILEQRLGESELLDEHILWAIAQQQQKREQIVVEVQPAQQKRLVRAVEKGLPRDA

SEQ ID NO: 79123 - protein, 379 aa, unidentified
  source 1..379: note = Pantoea latae
  REGION 1..379: note = tr|A0A1V9DD79|A0A1V9DD79_9GAMM Epoxyqueuosine reductase OS=Pantoea latae OX=1964541 GN=queG PE=3 SV=1
MSYPLDLHQLAQQIKQWGKDLGFQQVGITDTDLSAEEPRLQAWLDKQYHGEMEWMARHGMMRARPHELLPGTLRVISVRMNYLPAKAAFASTLKNPQLGYVSRYALGRDYHKVLRNRLKKLGEMIQEACGELNFRPFVDSAPLLERPLAAKAGLGWTGKHSLILNREAGSWFFLGELLIDLPLPIDAPQEEQCGRCVACMTICPTSAIVEPYVVDARRCISYLTIELEGAIPEALRPLMGNRIYGCDDCQLICPWNRYGQLSDEADFSPRAALHAPELMTLFQWDEKTFLRVTEGSAIRRIGHLRWLRNIAVALGNAPWTGEIVEVLAKRLGENPLLDEHIEWALRQQHAKRQALAIEVQPAQQKRLVRAVEKGLPRDA

SEQ ID NO: 79124 - protein, 379 aa, unidentified
  source 1..379: note = Pantoea rodasii
  REGION 1..379: note = tr|A0A0B1R9K1|A0A0B1R9K1_9GAMM Epoxyqueuosine reductase OS=Pantoea rodasii OX=1076549 GN=queG PE=3 SV=1
MSYPLDLHQLAQQIKLWGRELGFQQVGICDTDLSAEEPKLQEWLEKQYHGEMDWMARHGMMRARPHELLPGTLRVISVRMNYLPAKAAFATTLKNPHLGYVSRYALGRDYHKVLRNRLKKLGEMIQAHCGELNFRPFVDSAPILERPIAAKAGLGWTGKHSLILNREAGSWFFLGELLIDLPLPVDQPQEEQCGRCVACITICPTAAIVEPYVVDARRCISYLTIELEGAIPEEFRPLIGNRIYGCDDCQLICPWNRYGQLTDEDDFSPRAVLHAPPLVELFAWDEAKFLRITEGSAIRRIGHLRWLRNIAVALGNAPWADENLAVLQMRKGEHPLLDEHIDWAIAQQLQKRAAEAVDVQPAKKLRLVRAVEKGLPRDA

SEQ ID NO: 79125 - protein, 379 aa, unidentified
  source 1..379: note = Pantoea rodasii
  REGION 1..379: note = tr|A0A2M9W7D8|A0A2M9W7D8_9GAMM Epoxyqueuosine reductase OS=Pantoea rodasii OX=1076549 GN=queG PE=3 SV=1
MSYPLDLQQLAQLIKQWGRELGFQQVGICDTDLSAEEPKLQDWLEKQYHGEMDWMARHGMMRARPHELLPGTLRVISVRMNYLPAKAAFASTLRNPQLGYVSRYALGRDYHKVLRNRLKKLGEMIQAHCGELNFRPFVDSAPILERPIAAKAGLGWTGKHSLILNREAGSWFFLGELLIDLPLPVDQPQEEQCGRCVACITICPTSAIVEPYVVDARRCISYLTIELEGAIPEEFRPLIGNRIYGCDDCQLICPWNRYGQLTDEDDFSPRAVLHAPPLVDLFKWDEAKFLRVTEGSAIRRIGHLRWLRNIAVALGNAPWAEENLAALQTRSGEHTLLDEHIEWAIAQQIEKRAAQAVNVQPAKKLRLVRAVEKGLPRDA

SEQ ID NO: 79126 - protein, 379 aa, unidentified
  source 1..379: note = Pantoea rwandensis
  REGION 1..379: note = tr|A0A1X1CR47|A0A1X1CR47_9GAMM Epoxyqueuosine reductase OS=Pantoea rwandensis OX=1076550 GN=queG PE=3; SV = 1
MSYPLDLQQLAQQIKQWGRELGFQQVGICDTDLSAEEPKLQAWLEKQYHGEMDWMARHGMMRARPHELLPGTLRVISVRMNYLPAKAAFASTLKNPQLGYVSRYALGRDYHKVLRNRLKKLGEMIQEHCGELNFRPFVDSAPILERPIAVKAGLGWTGKHSLILNREAGSWFFLGELLIDLPLPVDNPQEEQCGRCVACITICPTSAIVEPYVVDARRCISYLTIELEGAIPEEFRPMIGNRIYGCDDCQLICPWNRYGQLTDEEDFSPRAVLHAPALIDLFKWDEAKFLRVTEGSAIRRIGHLRWLRNVAVALGNAPYRAEIIETLKLRQGEHPMLDEHIHWAISQQRQKRSENAIEVQLAQQKRLVRVIEKGLPRDA

SEQ ID NO: 79127 - protein, 379 aa, unidentified
  source 1..379: note = Pantoea sesami
  REGION 1..379: note = tr|A0A1M5N291|A0A1M5N291_9GAMM Epoxyqueuosine reductase OS=Pantoea sesami OX=1881110 GN=queG PE=3 SV=1
MSQPLDLNELAQKIKQWGAELGFQKVGITDTDLSASEPKLQAWLDKQYHGEMEWMARHGMMRARPHELLPGTLRVISVRMNYLPANAAFARTLKNPSLGYVSRYALGRDYHKLLRNRLKKLGETIQQHCVSLNFRPFVDSAPILERPIAEKAGLGWTGKHSLILSRDAGSFFFLGELLIDLPLPVDGPVEEGCGRCVACMTICPTGAIVEPYTVDARRCISYLTIELEGAIPEEFRPLIGNRIYGCDDCQLICPWNRYSQLTDEEDFSPRKALHAPQLVELFAWTEAWFLKVTEGSAIRRIGHLRWLRNVAVALGNAPWDEANIRALESRKGEHPLLDEHIEWAIAQQIEKRNACTIEVQLPKKQRLVRVIEKGLTRDA

SEQ ID NO: 79128 - protein, 379 aa, Pantoea sp.
  REGION 1..379: note = tr|A0A3D0EQL3|A0A3D0EQL3_9GAMM Epoxyqueuosine reductase OS=Pantoea sp. OX=69393 GN=queG PE=3 SV=1
MSYPLDLHQLAQQIKQWGRELGFQQVGICDTDLSAEEPRLQEWLDKQYHGEMDWMARHGMMRARPHELLPGTLRVISVRMNYLPAKAAFASTLKNPQLGYVSRYALGRDYHKVLRNRLKKLGEMIQAHCGELNFRPFVDSAPILERPIAVKAGLGWTGKHSLVLNREAGSWFFLGELLIDLPLPVDQPQEEQCGRCVACITICPTAAIVEPYVVDARRCISYLTIELEGAIPEEFRPLIGNRIYGCDDCQLICPWNRYGQLTDEDDFSPRAVLHAPPLTELFKWDEAKFLRITEGSAIRRIGHLRWLRNIAVALGNAPWAEENMAVLALRSGEHPMLDEHITWAMAQQLEKRAAQAVEVQPAKKQRLVRAVEKGLPRDA

SEQ ID NO: 79129 - protein, 379 aa, Pantoea sp.; identical to SEQ ID NO: 77489
  REGION 1..379: note = tr|A0A3S0LX46|A0A3S0LX46_9GAMM Epoxyqueuosine reductase OS=Pantoea sp. YU22 OX=2497684 GN=queG PE=3 SV=1

SEQ ID NO: 79130 - protein, 379 aa, Pantoea stewartii
  REGION 1..379: note = tr|H3RHI1|H3RHI1_PANSE Epoxyqueuosine reductase; OS = Pantoea stewartii subsp. stewartii DC283 OX=660596; GN = yjeS PE=3 SV=1
MSYPLDLDQLAQHIKQWGRDLGFQQVGITDTDLSAEEPRLQDWLDKQYHGEMEWMARHGMMRARPHELLPGTLRVISVRMNYLPAKAAFASTLKNPQLGYVSRYALGRDYHKVLRNRLKKLGEMIQTHCGESQFRPFVDSAPLLERPLAAKAGLGWTGKHSLILNREAGSWFFLGELLIDLPLPIDTPQEEQCGRCVACMTICPTGAIVEPYTVDARRCISYLTIELEGAIPEEFRPLMGNRIYGCDDCQLICPWNRYGQLTDEADFSPRAALHAPELTALFQWDEAKFLRITEGSPIRRIGYQRWSRNIAVALGNAPWHTEILSVLEQRRGESDLLDEHIEWAITQQLHKRKALAIDVQPAQQKRLVRVIEKGLPRDA

SEQ ID NO: 79131 - protein, 379 aa, Pantoea vagans; identical to SEQ ID NO: 79113
  REGION 1..379: note = tr|A0A501S5B3|A0A501S5B3_9GAMM Epoxyqueuosine reductase OS=Pantoea vagans OX=470934 GN=queG PE=3 SV=1

SEQ ID NO: 79132 - protein, 379 aa, Pantoea vagans
  REGION 1..379: note = tr|E1SFL1|E1SFL1_PANVC Epoxyqueuosine reductase; OS = Pantoea vagans (strain C9-1) OX=712898 GN=queG PE=3 SV=1
MSYPLDLHELAQQIKQWGLDLGFQQVGITDTDLSAEEPRLQEWLDKQYHGEMAWMARHGMMRARAHELLPGTLRVISVRMNYLPAKAAFASTLKNPRLGYVSRYALGRDYHKVLRNRLKKLGEMIQQHCGELNFRPFVDSAPLLERPLAAKAGLGWTGKHSLILNREAGSWFFLGELLIDIPLPVDSPQQEQCGRCVACMTICPTSAIVEPYVVDARRCISYLTIELEGAIPEEFRPLMGNRIYGCDDCQLICPWNRYGQLSDESDFSPRAALHAPELLDLFQWDEAKFLRITEGSAIRRIGHLRWLRNIAVALGNAPWSPHIIHVLEQRLGESELLDEHIQWAVMQQQQKREQLVVEVQPAQQKRLVRAVEKGLPRDA

SEQ ID NO: 79133 - protein, 379 aa, unidentified
  source 1..379: note = Pantoea wallisii
  REGION 1..379: note = tr|A0A1X1CTT8|A0A1X1CTT8_9GAMM Epoxyqueuosine reductase OS=Pantoea wallisii OX=1076551 GN=queG PE=3 SV=1
MSYPLDLQQLAQHIKQWGRDLGFQQVGICDTDLRAEEPRLQAWLDKQYHGEMDWMARHGMMRARPHELLPGTLRVISVRMNYLPAKAAFASTLKNPQLGYVSRYALGRDYHKVLRNRLKKLGEMIQAHCGELNFRPFVDSAPILERPIAAKAGLGWTGKHSLILNREAGSWFFLGELLIDLPLPVDQPQGEQCGRCVACITICPTAAIVEPYVVDARRCISYLTIELEGAIPEAFRPLIGNRIYGCDDCQLICPWNRYGQLTDEQDFSPRAVLHAPQLVELFGWDEAKFLRVTEGSAIRRIGHLRWLRNVAVALGNAPWAEENLSALQQRSGEHPLLDEHIDWAIAQQLEKRTAQAVEVQPPKKQRLVRAVEKGLPRDA

SEQ ID NO: 79134 - protein, 346 aa, Papillibacter cinnamivorans
  REGION 1..346: note = tr|A0A1W2CUG9|A0A1W2CUG9_9FIRM Epoxyqueuosine reductase OS=Papillibacter cinnamivorans DSM 12816; OX = 1122930 GN=SAMN02745168_0233 PE=4 SV=1
MVSTEQRIQSKAYELGYIKCGIVSIEELEEYERRLEERMEKVPEASKKFYERQKRLTNTKIREQFPWARSAVVVAAHYGRYKIPETLKGHIAKYYLFDFRVRSEKAEYERFAEMEDFLGQLGLQTASNQKFGVFSLRWAAMKAGLGVIRNNNFFYTEHGSWVNLDGWLIDQKMELRETARLPACPPGCTRCVSACPSGSLSARLTMSPCDCISYLTTFGGRDLPKDAHRGQFGPWIYGCDACQDACPMNKGKWEEKYEYSGLKELELYLSLEEILNMDEEFYKRKIQPKFFYIGADELWKWKVNVLCYMRNNYQESYKPSIAAARESENEKVREMARLVSEELHIA

SEQ ID NO: 79135 - protein, 289 aa, Papillibacter cinnamivorans
  REGION 1..289: note = tr|A0A1W2A7V0|A0A1W2A7V0_9FIRM Epoxyqueuosine reductase QueG (Queuosine biosynthesis) OS=Papillibacter cinnamivorans DSM 12816 OX=1122930 GN=SAMN02745168_1595; PE = 4 S V=1
MPDLEGYLKIWGAAQSGAVAASRLFEQMSPRARERAEELCPGLAGVLVGAFPYYAGEREGNLSLYSRGEDYHIAVKRLLAEAGAALRREYPRSRFVPLVDASPLPEVRAAELAGIGLVGEHGLIICPPYGSYVFLGCILTDLPLETPGRKSPPCIRCGRCAEACPSGALRWRDGAAVFDSALCLSGVSQRKGALTPEEERRLKTLPTVWGCDLCQNACPYNASPAVTAIDALAGRTETAPYLADLQREALEGLPEKAFREKYRNRAFSWHGKSPLIRNLGLHKEWEHKA

SEQ ID NO: 79136 - protein, 317 aa, unidentified
  source 1..317: note = Parabacteroides chartae
  REGION 1..317: note = tr|A0A1T5A7D1|A0A1T5A7D1_9BACT Epoxyqueuosine reductase OS=Parabacteroides chartae OX=1037355 GN=queG; PE = 3 SV=1
MNLEQKIKEEALRLGFAACGIAEVAPAESEAIYFDTWLANGMHAGMTFMENYRNVRLNPAGLLEGARSIISVALNYYPADLQPQDVPQLAYYAYGRDYHDVIKEKLNELVDYIRREVSINARCFTDSAPILERYWAWKAGLGWIGKNTHLIIPGKGSYFFLGEIVTDLALIPDRPMESMCGKCTRCMEACPTKAIEAPRTLNAGKCISYLTIENRKEIPEKLAPLIGNRIYGCDTCQQVCPWNRFARPTTEESFKMKDELAEMTADKWYALSREQYTRIFKGSAVKRAKYEGLLRNIANYKAINFRKEEEQNTNTYK

SEQ ID NO: 79137 - protein, 305 aa, unidentified
  source 1..305: note = Parabacteroides chinchillae
  REGION 1..305: note = tr|A0A1H5U771|A0A1H5U771_9BACT Epoxyqueuosine reductase OS=Parabacteroides chinchillae OX=871327; GN = SAMN05444001_10536 PE=4 SV=1
MFVSSKIKELACKHGFGACGIARVEPADTEIVYLDQWIANGCHGEMKYMENYRDIRFNPSGLVEGACSVISVALNYYPGKKLSPDMPHIAYYAYGKDYHIVLKNKLRLLWESITSSLDKTHEARFFTDSAPILERYWAWRAGIGFIGKNTNLIIPGKGSYFFLGEIVTTLEVDEYDTPQKNRCGNCNRCIEFCPTGALESERHLNASRCLSYLTIEHKGEIPPEQAARLGNRLYGCDTCQQVCPWNRFATPTQEEQFCPTEAFLSLNKEQLRMLTKEEYNCIFAYSAVKRAKYEGLLRTIKYLKE

SEQ ID NO: 79138 - protein, 305 aa, Parabacteroides distasonis
  REGION 1..305: note = tr|A0A355XJU3|A0A355XJU3_9BACT tRNA epoxyqueuosine(34) reductase QueG OS=Parabacteroides distasonis OX=823 GN=queG PE=4 SV=1
MGISQFIKDKAMELGFSACGIAEVAKAGSEEAYFDQWIAEGYHAGMKYMENHREIRLNPDGLVEGAKSVISVALNYYPKVLRNPAEPYISYYAYGEDYHGVVKDKLRQLWKAITEHHPSNNEARVFTDSAPLLERYWAWKAGLGWIGKNTNLIIPGKGSFFFLGEIVTTLVVDTYDSPKKNHCGSCIRCLNACPTGALEGPKRLNARKCISYLTIEHRGEIPVEQAVLLGNRVYGCDTCQAVCPWNRFAMPTAVAAFHPTPSLLSLKKDDLKALSREDYNRIFAHSAVKRAKYEGLLRTIQYLKD

SEQ ID NO: 79139 - protein, 305 aa, Parabacteroides distasonis
  REGION 1..305: note = tr|A0A078SAG1|A0A078SAG1_9BACT Epoxyqueuosine reductase OS=Parabacteroides distasonis str. 3999B T(B) 4; OX = 1339344 GN=queG PE=4 SV=1
MGISQFIKDKAMELGFSACGIAEVAKAGSEEAYFDQWIAEGYHAGMKYMENHREIRLNPDGLVEGAKSVISVALNYYPKVLRNPAEPYISYYAYGEDYHGVVKDKLRQLWKAITEHHPSNNEARVFTDSAPLLERYWAWKAGLGWIGKNTNLIIPGKGSFFFLGEIVTTLVVDTYDSPKKNHCGSCIRCLDACPTGALEGPKRLNARKCISYLTIEHRGEIPVEQAVLLGNRIYGCDTCQAVCPWNRFAMPTAVAAFHPTPSLLSLKKDDLKALSREDYNRIFAHSAVKRAKYEGLLRTIQYLKD

SEQ ID NO: 79140 - protein, 287 aa, Parabacteroides goldsteinii
  REGION 1..287: note = tr|A0A0J6CSU1|A0A0J6CSU1_9BACT Epoxyqueuosine reductase (Fragment) OS=Parabacteroides goldsteinii; OX = 328812 GN=ACM15_02525 PE=4 SV=1
YRDIRLDPAGLVEGARSVISVALNYYPPQKQFPGSPRISYYAYGKDYHIVVKDKLRQLWEYITSLVPVLDTGPQESRPFRPENEETSSSAAPCQARGQADSTLPAARLFTDSAPILERYWAWKAGLGWIGKNTNLIIPGKGSFFFLGEIVTTLELDYDTPQKNRCGACRRCLDACPTGALERPGHLNANKCISYLTIEHKGDIPSEQASRLGDRLYGCDTCQEVCPWNRFASPTREAAFSPSPAFLSLKKEDLRCFTRDDYNRIFAGSAVKRAKYEGLIRTINNKKE

SEQ ID NO: 79141 - protein, 339 aa, Parabacteroides goldsteinii
  REGION 1..339: note = tr|A0A0F5JDG9|A0A0F5JDG9_9BACT Epoxyqueuosine reductase OS=Parabacteroides goldsteinii DSM 19448 = WAL 12034 OX=927665 GN=queG PE=3 SV=1
MHSLSILIKNKAKELGFDACGIAEVASADTEALFFDRWIAEGCHAGMKYMENYRDIRLDPAGLVEGARSVISVALNYYPPQKQFPGSPRISYYAYGKDYHIVVKDKLRQLWEYITSLVPVLDTGPQVSRPFRPENEETSSSAAPCQARGQADSTLPAARLFTDSAPILERYWAWKAGLGWIGKNTNLIIPGKGSFFFLGEIVTTLELDYDTPQKNRCGACRRCLDACPTGALERPGHLNANKCISYLTIEHKGDIPSEQASRLGDRLYGCDTCQEVCPWNRFASPTREAAFSPSPAFLSLKKEDLRCFTRDDYNRIFAGSAVKRAKYEGLIRTINNKKE

SEQ ID NO: 79142 - protein, 328 aa, Parabacteroides gordonii
  REGION 1..328: note = tr|A0A0F5JHJ9|A0A0F5JHJ9_9BACT Epoxyqueuosine reductase OS=Parabacteroides gordonii MS-1 = DSM 23371; OX = 1203610 GN=queG PE=3 SV=1
MADLSTQIKNKANQLGFDACGIAEVASADTEALFFDRWIAEGCHAGMKYMENYRDIRLNPVGLVEGARSVISVALNYYPAVKQSPDAPRISYYAYGKDYHLVVKDKLRQLWQYITDLVPVLDTGSQANRPDQSDIHTDHPSVARIFTDSAPILERYWAWKAGLGWIGKNTNLIIPGKGSFFFLGEIVTTLELDYDHPQANRCGSCRRCLDACPTGALERPGHLDAGKCLSYLTIEHKGDIPTEQAARLGNRLYGCDTCQEVCPWNRFARPTREAAFHPTPDFLSLQKESLQDFTREDYNRIFAKSAVKRAKYEGLIRTISNKKDINNK

SEQ ID NO: 79143 - protein, 332 aa, Parabacteroides johnsonii
  REGION 1..332: note = tr|A0A1Y3ZIG5|A0A1Y3ZIG5_9BACT Epoxyqueuosine reductase OS=Parabacteroides johnsonii OX=387661; GN = B5F96_02430 PE=4 SV=1
MLPASEIKEKAKEIGFDACGIAQVATADSEALFFDKWLKEGNHAGMAYMENHREIRLNPARLVEGAKTVISVALNYYPEQKLPPEAPHIAYYAYGKDYHLVVKEMLSELWTALFPRGAREQGGKGMDRNGQFFCDPARGAGTGQADVTAARFFTDSAPILERYWAWKAGLGWIGKNTNLIIPGKGSFFFLGEIVTTLEADHYDTPQKNRCGSCSRCLEACPTGALEGPCHLNARKCLSYLTIENRGEIPAEQAVRLGSRLYGCDTCQEVCPWNRFARPTRIEAFRPKPALLSLRKEDLKVFSREEYNRIFAKSAVKRAKYEGLIRNIHNLKD

SEQ ID NO: 79144 - protein, 339 aa, Parabacteroides johnsonii
  REGION 1..339: note = tr|B7B6Q6|B7B6Q6_9BACT Putative iron-sulfur cluster-binding protein OS=Parabacteroides johnsonii DSM 18315 OX=537006 GN=PRABACTJOHN_00701 PE=4 SV=1
MSSKCFNMLPASEIKEKAKEIGFDACGIAQVATADSEALFFDKWLKEGNHAGMAYMENHREIRLNPARLVEGAKTVISVALNYYPEQKLPPEAPHIAYYAYGKDYHLVVKEMLSELWTALFPRSAREQGGKGMDRNGQFFCDPARGAGTGQADVTAARFFTDSAPILERYWAWKAGLGWIGKNTNLIIPGKGSFFFLGEIVTTLEADHYDTPQKNRCGSCSRCLEACPTGALEGPCHLNARKCLSYLTIENRGEIPAEQAVRLGSRLYGCDTCQEVCPWNRFARPTRIEAFRPKPALLSLRKEDLKVFSREEYNRIFAKSAVKRAKYEGLIRNIHNLKD

SEQ ID NO: 79145 - protein, 335 aa, Parabacteroides merdae
  REGION 1..335: note = tr|A0A3E4ZZT2|A0A3E4ZZT2_9BACT tRNA epoxyqueuosine(34) reductase QueG OS=Parabacteroides merdae OX=46503 GN=queG PE=4 SV=1
MLPAIEIKEKAKEIGFDACGIAQVAAADSEALFFDRWLKEGNHAGMAYMENHREIRLNPAGLVEGAKTVISVALNYYPEQKLPPEAPHIAYYAYGKDYHLVVKEMLSELWTALFPRPARDRIETDRKDMDRNGLFFCDPASSAGTEQADVTAARFFTDSAPILERYWAWKAGLGWIGKNTNLIIPGKGSFFFLGEIVTTLEADQYDTPQKNRCGSCSRCLDACPTGALEGPRHLNARKCLSYLTIENRGEIPTEQASRLGNRLYGCDTCQEVCPWNRFARPTQIEAFRPKPALLSLRKEDLKVFSREDYNRIFAKSAVKRAKYEGLIRNIHNLKD

SEQ ID NO: 79146 - protein, 335 aa, Parabacteroides merdae
  REGION 1..335: note = tr|K5ZMP1|K5ZMP1_9BACT Uncharacterized protein; OS = Parabacteroides merdae CL03T12C32 OX=999420; GN = HMPREF1060_02005 PE=4 SV=1
MLPAIEIKEKAKEIGFDACGIAQVAAADSEALFFDRWLKEGNHAGMAYMENHREIRLNPAGLVEGAKTVISVALNYYPEQKLPPEAPHIAYYAYGKDYHLVVKEMLSELWTALFPRPARDRIETDGKGMDRNGLFFCDPASSAGTEQADVTAARFFTDSAPILERYWAWKAGLGWIGKNTNLIIPGKGSFFFLGEIVTTLEADQYDTPQKNRCGSCSRCLDACPTGALEGPRHLNARKCLSYLTIENRGEIPTEQASRLGNRLYGCDTCQEVCPWNRFARPTQIEAFRPKPTLLSLRKEDLKVFSREDYNRIFAKSAVKRAKYEGLIRNIHNLKD

SEQ ID NO: 79147 - protein, 327 aa, Parabacteroides sp.
  REGION 1..327: note = tr|A0A354WUY7|A0A354WUY7_9BACT tRNA epoxyqueuosine(34) reductase QueG OS=Parabacteroides sp.; OX = 1869337 GN=queG PE=4 SV=1
  VARIANT 123..125: note = Xaa can be any naturally occurring amino acid
MVTAEYVKQEALKNGFAACGIAPAMAASSEAVFLDEWLKSGSHAGMSYMANHRDLRLDPQKLVEGAKSIISVALNYYPSKKRAAEELYIAYYAYGKDYHRVLKDKLYTLWQVILGAMPETKGXXXVFTDSAPILERYWAWRAGLGWIGKNTNLIIPRRGSFFFLGEIVTTLELDAYDVPLKSRCGTCTRCLDACPTKALHRPYCLDANRCLSYLTIENRGGIPEGLAKSLGNRLYGCDTCQLVCPWNRFASPTEEPAFQPSMELLRLRWDDLNEFSREDYARIFSGSAVKRAKYEGLVRTIHCLKANDEKENNAKNNDLESDSFGKK

SEQ ID NO: 79148 - protein, 348 aa, Parabacteroides sp.
  REGION 1..348: note = tr|A0A417L7H3|A0A417L7H3_9BACT tRNA epoxyqueuosine(34) reductase QueG OS=Parabacteroides sp. TM07-1AC OX=2292363 GN=queG PE=4 SV=1
MNLSAQIKNKTKELGFDACGIAEVASADTEALFFDRWIAEGCHAGMKYMENYRDIRLNPAGLVEGARSVISVALNYYPAQKQSPDAPRISYYAYGKDYHLVLKDKLRQLWQYITEELLPTFPQALDSFGQQVVTGSNFSPLERGQEGGNPSAPENLEARVFTDSAPLLERYWAWKAGLGWIGKNTNLIIPGKGSFFFLGEIVTTLELDYDSPQENRCGNCRRCLDACPTGALESARHLNANKCISYLTIEHKEDIPSELASRLGNRLYGCDTCQEVCPWNRFAVPTREETFIPSPAFLSFKKEDLTDFTREDYNRIFAKSAVKRAKYEGLIRTIANKRKIINNKKDKP

SEQ ID NO: 79149 - protein, 412 aa, unidentified
  source 1..412: note = Paraburkholderia aromaticivorans
  REGION 1..412: note = tr|A0A248VHG6|A0A248VHG6_9BURK Epoxyqueuosine reductase OS=Paraburkholderia aromaticivorans OX=2026199; GN = queG PE=3 SV=1
MNRSPESPVSCTPASDDDARAERHFDETALNALALNIKAWGRELGFGAIGISDTDLSAAEAPLAAWLEAGCHGEMDYMAKHGMKRARPAELVAGTRRVITARIAYLPALTLNGKAPESALQDGAPTQDWRAAEHARLADPSAAVVSVYARGRDYHKVMRNRLQQLAEKIEAAIGAFGYRVFTDSAPVLEVELAQKAGIGWRGKHTLLLQRDAGSLFFLGEIYVDVPLPTDADTLPEVAPETPGSHCGSCTRCIGACPTGAIVAPYKVDARLCISYLTIELKGSIPLDMRPLIGNRVYGCDDCQLVCPWNKFAQAAPVADFDVRHGLDRASLVELFSWSADEFDTRMQGSAIRRIGYESWLRNLAVGMGNALRASPDSLSGTAREAIVHALRARAGDASPVVREHVEWALEAA

SEQ ID NO: 79150 - protein, 413 aa, unidentified
  source 1..413: note = Paraburkholderia aspalathi
  REGION 1..413: note = tr|A0A1I7DLT7|A0A1I7DLT7_9BURK Epoxyqueuosine reductase OS=Paraburkholderia aspalathi OX=1324617 GN=queG; PE = 3 SV=1
MNRSPESPVPCTPASNDDVRAERHFDEAALSALALNIKTWGRELGFGAIGISDTDLSAAEAPLAAWLEAGCHGEMDYMAKHGMKRARPAELVAGTRRVITARIAYLPAETLSGKAHESALQDVPPAPPDWRAAEHARLADPSAAVVSIYARGRDYHKVMRNRLQHLAEKIEAEIGAFGYRVFTDSAPVLEVELAQKAGIGWRGKHTLLLQRDAGSLFFLGEIYVDVPLPTDAETSPDDAPETPGSHCGSCTRCIDACPTGAIVAPYKVDARLCISYLTIELKGNIPLEMRPLIGNRVYGCDDCQLVCPWNKFAQAAPVADFDVRHGLDRATLVELFAWSADEFDTRMQGSAIRRIGYESWLRNLAVGMGNALRASSESLSVDAREAIVDALKLRVEDPSAVVREHVEWALEAA

SEQ ID NO: 79151 - protein, 434 aa, unidentified
  source 1..434: note = Paraburkholderia azotifigens
  REGION 1..434: note = tr|A0A5C6VVU9|A0A5C6VVU9_9BURK Epoxyqueuosine reductase OS=Paraburkholderia azotifigens OX=2057004; GN = queG PE=3 SV=1
MNQGQQHPTPDPQEDPKRDPHSSPRATDDEAPVTRRFDEAQLAALASRIREWGRELGFGAVGISDIDLSHAEAGLAAWLDAGCHGEMDYMAKHGMKRARPAELVAGTRRVISVRMAYLPAHLPAHLHAHPTDSTDARKAAESVVSDVQHDWRLEERARLDDPSAAVVSIYARGRDYHKVMRNRLQQLAERIEGEIGPYGYRVFTDSAPVLEVELAQKAGTGWRGKHTLLLQRDAGSLFFLGEIFVDLPLPTDAETSPESAPEKSGAHCGSCTRCIGACPTGAIVGPYQVDARRCISYLTIELKGSIPQDLRPLIGNRVYGCDDCQLACPWNKFAQAAPVADFDVRHGLDRASLVELFGWSAADFDTRMQGSAIRRIGYECWLRNIAVGMGNALRAARDALSADARAAIVDALRKRADDPSPLVREHVEWALEAA

SEQ ID NO: 79152 - protein, 421 aa, unidentified
  source 1..421: note = Paraburkholderia bryophila
  REGION 1..421: note = tr|A0A329D103|A0A329D103_9BURK Epoxyqueuosine reductase OS=Paraburkholderia bryophila OX=420952 GN=queG; PE = 3 SV=1
MNRSPESPVSSTPASSHDAGAERPFDEAALNALALDIKSWGRELGFGAIGISDTDLSAAEAPLAAWLEAGCHGEMDYMAKHGMKRARPAELVAGTRRVITARIAYLPAQTLTGKAQESALQDAPLNAPLMTPLTQDWRAAETARLADPAAAVVSIYARGRDYHKVMRNRLQQLAEKIEAGIGAFGYRVFTDSAPVLEVELAQKAGIGWRGKHTLLLQRDAGSLFFLGEIYVDVPLPTDAEIAPELAPQTPGAHCGSCTRCIGACPTGAIVAPYKVDARLCISYLTIELKGSIPVEMRPLIGNRVYGCDDCQLVCPWNKFAQAAPVADFDVRHGLDRASLVELFAWSADDFDTRMQGSAIRRIGYESWLRNLAVGMGNALRAASPDSLSEEARERIVESLRLRADDPSAVVREHVEWALEAA

SEQ ID NO: 79153 - protein, 434 aa, unidentified
  source 1..434: note = Paraburkholderia caballeronis
  REGION 1..434: note = tr|A0A1H7R0B5|A0A1H7R0B5_9BURK Epoxyqueuosine reductase OS=Paraburkholderia caballeronis OX=416943; GN = queG PE=3 SV=1
MQAPSDAHVCAAGDARPPREAPAPGVHPLDEAALAALAARIRAWGRELGFGAIGISDTDLSDAEAGLAAWLEAGNHGEMDYMAKHGMKRARPAELVAGTRRVITARMAYLPASTLAPHADGKARESLAPSVSDSGAADERVLRDDESALDWRAREQARLADPQAAVVSIYARGRDYHKVLRARLQQLATRIEAEVGAYGYRVFTDSAPVLEVELAQKAGIGWRGKHTLLLQRDAGSLFFLGEIYVDLPLPADADEPSSAAPETPGAHCGSCARCIGACPTGAITGPYRVDARRCISYLTIELAGSIPEELRPLIGNRVYGCDDCQLVCPWNKFAQAAPVADFDVRHGLDRATLAELFGWTDAQFDERMQGSAIRRIGYERWLRNVAVAIGNALRSGGGALPAAARAELVAALRAREHDASALVREHVQWALAAA

SEQ ID NO: 79154 - protein, 415 aa, unidentified
  source 1..415: note = Paraburkholderia caledonica
  REGION 1..415: note = tr|A0A2Z5MDC2|A0A2Z5MDC2_9BURK Epoxyqueuosine reductase OS=Paraburkholderia caledonica OX=134536 GN=queG; PE = 3 SV=1
MNRSPESPVSPAPNAPTSSDEARAERQFDEAALHALARNIKTWGRELGFGAIGISDTDLSAAEAPLAAWLEAGCHGEMDYMAKHGMKRARPAELVAGTLRVITARIAYLPAHAMSGKPGESEPQEAPPSEDWRAVEHARLADPSAAVVSIYARGRDYHKVMRNRLQHLSEKIQAEIGAFGYRVFTDSAPVLEVELAQKAGIGWRGKHTLLLQRDAGSLFFLGEIYVDVPLPTDAETSPERAPETPGSHCGSCARCIGACPTGAIVAPYKVDARLCISYLTIELKGSIPVDMRPLIGNRVYGCDDCQLVCPWNKFAQAAPVADFDVRHGLDRASLVELFGWSADEFDTRMQGSAIRRIGYESWLRNLAVGMGNALRAPRESLSADARKAIVEALERRADDSSHVVREHVQWALEAA

SEQ ID NO: 79155 - protein, 422 aa, unidentified
  source 1..422: note = Paraburkholderia caribensis
  REGION 1..422: note = tr|A0A2T3Y3M9|A0A2T3Y3M9_9BURK Epoxyqueuosine reductase OS=Paraburkholderia caribensis OX=75105 GN=queG; PE = 3 SV=1
MNQGQQHSMSDPHRDPLSPLETTNDEAPATRHYDEAQLAALASRIKGWGRELGFGAVGISDIDLSHAEAGLAAWLDAGCHGEMDYMAKHGMKRARPAELVAGTRRVISVRMAYLPASSGARKGDESAVADVQHDWRLDERARLDDPAAAVVSIYARGRDYHKVMRNRLQQLAERIEAEIGPYGFRVFTDSAPVLEVELAQKAGTGWRGKHTLLLQRDAGSLFFLGEIFIDVPLPTDADASPESAPGSAPETPGAHCGSCTRCIGACPTGAIVAPYQVDARRCISYLTIELKGSIPQDLRPLIGNRVYGCDDCQLVCPWNKFAQAAPVADFDVRHGLDRASLVELFGWTASDFDTRMQGSAIRRIGYECWLRNLAVGMGNALRAARDTLSADARAAIVDALRQRAGDPSPLVREHVEWALEAA

SEQ ID NO: 79156 - protein, 418 aa, unidentified
  source 1..418: note = Paraburkholderia caribensis
  REGION 1..418: note = tr|A0A0P0R4P1|A0A0P0R4P1_9BURK Epoxyqueuosine reductase OS=Paraburkholderia caribensis MBA4 OX=1323664; GN = queG PE=3 SV=1
MNQGQQHSMSDPHRDPLSPLETTNDEAPATRHYDEAQLAALASRIKGWGRELGFGAVGISDIDLSHAEAGLAAWLDAGCHGEMDYMAKHGMKRARPAELVAGTRRVISVRMAYLPASSGARKGDESAVADVQHDWRLDERARLDDPAAAVVSIYARGRDYHKVMRNRLQQLAERIEAEIGPYGFRVFTDSAPVLEVELAQKAGTGWRGKHTLLLQRDAGSLFFLGEIFVDVPLPTDADTSPESAPETPGAHCGSCTRCIGACPTGAIVAPYQVDARRCISYLTIELKGSIPQDLRPLIGNRVYGCDDCQLVCPWNKFAQAAPVADFDVRHGLDRASLVELFGWTASDFDTRMQGSAIRRIGYECWLRNLAVGMGNALRAARDTLSADARAAIVDALRQRAGDPSPLVREHVEWALEAA

SEQ ID NO: 79157 - protein, 396 aa, unidentified
  source 1..396: note = Paraburkholderia diazotrophica
  REGION 1..396: note = tr|A0A1H6XMW6|A0A1H6XMW6_9BURK Epoxyqueuosine reductase OS=Paraburkholderia diazotrophica OX=667676; GN = queG PE=3 SV=1
MRHYDEAQLAALASRIRSWARELGFGAVGISDIDLSNAEAGLAAWLDAGCHGEMDYMAKHGMKRARPAELVAGTRRVISVRMAYLPAHLHRSSDVRKDDESASADTRSVQHDWRLEERARLNDPSAAVVSIYARGRDYHKVMRNRLQQLAGRIEAEVGPYGHRVFTDSAPVLEVELAQKAGTGWRGKHTLLLQRDAGSLFFLGEIFVDLPLPTDAETAPERAPETTGAHCGSCTRCIGACPTGAIVGPYQVDARRCISYLTIELKGSIPQDLRPLIGNRVYGCDDCQLVCPWNKFAQAAPVDDFHVRHGLDRASLVELFGWSAEDFDTRMQGSAIRRIGYECWLRNLAVGMGNALRAAPQSLSADARAAIVDALRKRADDPSPLVREHVEWALEAA

SEQ ID NO: 79158 - protein, 412 aa, unidentified
  source 1..412: note = Paraburkholderia dipogonis
  REGION 1..412: note = tr|A0A4Y8N9M9|A0A4Y8N9M9_9BURK Epoxyqueuosine reductase OS=Paraburkholderia dipogonis OX=1211383 GN=queG; PE = 3 SV=1
MNRSPESPVSCTPASSDDARAERHFDEAALKALALNIKTWGRELGFGAVGISDTDLSAAEAPLAAWLEAGCHGEMDYMAKHGMKRARPAELVAGTRRVITARIAYLPAQTLSGKARESALQDGPLTQDWRAAEHARLADPSAAVVSIYARGRDYHKVMRNRLQHLAEKIEAEIGAFGYRVFTDSAPVLEVELAQKAGIGWRGKHTLLLQRDAGSLFFLGEIYVDVPLPTDADTMPEVAPETPGSHCGSCTRCIGACPTGAIVAPYKVDARLCISYLTIELKGSIPLELRPLIGNRVYGCDDCQLVCPWNKFAQAAPVADFDVRHGLDRASLVELFAWSADEFDTRMQGSAIRRIGYESWLRNLAVGMGNALRASPDSLSEPAREAIVQALRMRADDASAVVREHVEWALEAA

SEQ ID NO: 79159 - protein, 439 aa, unidentified
  source 1..439: note = Paraburkholderia eburnea
  REGION 1..439: note = tr|A0A2S4MMW3|A0A2S4MMW3_9BURK Epoxyqueuosine reductase OS=Paraburkholderia eburnea OX=1189126 GN=queG; PE = 3 SV=1
MNPLLSPSNEARTLNAATASNPSNTASNLASGAGAAAREPAAPLDEAALAALAARIRAWGRELGFGAIGISDTDLSHAEAGLAAWLEAGCHGEMDYMAKHGMKRARPAALVAGTRRVITARMAYLPAATLDGGPHANASGKTPETPETPESPSQDWRRREHARLADPHAAVVSIYARGRDYHKVMRARLQQLAERIEAEIGAFGFRVFTDSAPVLEVELAQKAGIGWRGKHTLLLQRDAGSLFFLGEIYVDIPLPTDADDPASAAPETPGAHCGSCTRCIDACPTGAITGPYRVDARRCISYLTIELKGSIPLEMREQIGNRVYGCDDCQLVCPWNKFAQAAPVADFDVRHGLDRASLVELFGWSAAQFDERMQGSAIRRIGYESWLRNIAVAMGNALRNASAHDAPERREAIVAALRERAHDESAIVREHVTWALEAA

SEQ ID NO: 79160 - protein, 383 aa, unidentified
  source 1..383: note = Paraburkholderia endofungorum
  REGION 1..383: note = tr|A0A2P5K9T2|A0A2P5K9T2_9BURK Epoxyqueuosine reductase OS=Paraburkholderia endofungorum OX=417203; GN = queG PE=3 SV=1
MKQPPDTEICRAPLTDAELASLARRVREWARELGFSAIGICDTDLSHAEAALAAWIDAGYHGEMDYMAKHGMKRARPAELVPGTQRVISARMPYLPAETPASWRAREHARLADPNAAVVSIYARGRDYHKVMRQRLQRLAERIEAAIGPLGYRVFTDSAPVLEVELAQKAGLGWRGKHTLLLDRDAGSLFFLGEIFVDVPLPTDAQSQPSRAPQHAGAHCGACTRCIDACPTGAIVAPYRLDARKCISYLTIELRGSIPVELREAIGNRVYGCDDCQLVCPWNKFAQPSGCADFDVRNGLDGAQLTELFSWSEQDFDTRLAGSAIRRIGYERWLRNLAVGLGNALRAGGGAAGRDAVLAALRKREDDPSALVREHVRWALDHG

SEQ ID NO: 79161 - protein, 417 aa, unidentified
  source 1..417: note = Paraburkholderia fungorum
  REGION 1..417: note = tr|A0A1H1DZH5|A0A1H1DZH5_9BURK Epoxyqueuosine reductase OS=Paraburkholderia fungorum OX=134537 GN=queG; PE = 3 SV=1
MNRSPESPESTVTSAHSSIATNAAESARHYDDAALNALALNIKSWGRELGFGAIGISDTDLSAAEAPLAAWLEAGCHGEMDYMAKHGMKRARPAELVAGTRRVITARIAYLPAETLNGAAHESGSSGGLSAQDWRSAEHARIADPSAAVVSVYARGRDYHKVMRNRLQHLAEKIEAEIGAFGFRVFTDSAPVLEVELAQKAGIGWRGKHTLLLQRDAGSLFFLGEIYVDVPLPTDAETSPDIAPETPGSHCGSCTRCIGACPTGAIVAPYKVDARLCISYLTIELKGSIPLEMRPLIGNRVYGCDDCQLVCPWNKFAQAAPVADFDVRHGLDRASLVDLFAWTADEFDTRMQGSAIRRIGYESWLRNLAVGMGNALRASPESLNTQARDAIVQALRQRAGDASDVVREHVQWALEAA

SEQ ID NO: 79162 - protein, 413 aa, unidentified
  source 1..413: note = Paraburkholderia fungorum
  REGION 1..413: note = tr|A0A2N8QJ72|A0A2N8QJ72_9BURK Epoxyqueuosine reductase OS=Paraburkholderia fungorum OX=134537 GN=queG; PE = 3 SV=1
MNRSPESPVSCTPASDDDAHAERRFDETALNALALDIKTWGRELGFGAIGISDTDLSAAEAPLAAWLDAGCHGEMDYMAKHGMKRARPAELVAGTRRVITARIAYLPAQTLSGKAHESALQDSPRIPQDWRAAEHARLADPSAAVVSIYARGRDYHKVMRNRLQQLAEKIEAAIGAFGYRVFTDSAPVLEVELAQKAGIGWRGKHTLLLQRDAGSLFFLGEIYVDVPLPTDAETSPDDAPETPGAHCGSCTRCIGACPTGAIVAPYKVDARLCISYLTIELKGNIPLEMRPLIGNRVYGCDDCQLVCPWNKFAQAAPVADFDVRHGLDRATLVELFAWSAEDFDTRMQGSAIRRIGYESWLRNLAVGMGNALRAPSEHLDAEARAAIVHALELRVGDPSAVVREHVEWALEAA

SEQ ID NO: 79163 - protein, 409 aa, unidentified
  source 1..409: note = Paraburkholderia ginsengiterrae
  REGION 1..409: note = tr|A0A1A9NH00|A0A1A9NH00_9BURK Epoxyqueuosine reductase OS=Paraburkholderia ginsengiterrae OX=1462993; GN = queG PE=3 SV=1
MNRSPESPVSCTPASVDDARAERHFDEAALKALALNIKTWGRELGFGAIGISDTDLSAAEAPLAAWLEAGCHGEMDYMAKHGMKRARPAELVAGTRRVITARIAYLPAHASSGKPHESASQDWQDWRLAEHARLADPSAAVVSIYARGRDYHKVMRNRLQHLAEKIEAEIGAFGYRVFTDSAPVLEVELAQKAGIGWRGKHTLLLQRDAGSMFFLGEIYVDVPLPTDAETVPEAAPETPGSHCGSCTRCIGACPTGAIVAPYKVDARRCISYLTIELKGRIPLEMRPLIGNRVYGCDDCQLVCPWNKFAQAAPVDDFDVRHGLDRASLVELFAWSAHEFDTRMQGSAIRRIGYESWLRNLAVGMGNALRASPESLSVPAREAIVQALRSRADDPSAIVREHVEWALEAA

SEQ ID NO: 79164 - protein, 407 aa, unidentified
  source 1..407: note = Paraburkholderia graminis
  REGION 1..407: note = tr|B1G269|B1G269_PARG4 Epoxyqueuosine reductase; OS = Paraburkholderia graminis (strain ATCC 700544 / DSM 17151 / LMG 18924 / NCIMB 13744 / C4D1M) OX=396598 GN=queG; PE = 3 SV=1
MCPVSNAPATGDEARAERQFDEAALHALAQNIKTWGRELGFGAIGISDTDLSAAEAPLAAWLEAGCHGEMDYMAKHGMKRARPAELVAGTLRVITARIAYLPADVLNGKQPESDSSKGPLNQDWRGAEHARLADPAAAVVSIYARGRDYHKVMRNRLQHLSEKIQAEIGAFGYRVFTDSAPVLEVELAQKAGIGWRGKHTLLLQRDAGSLFFLGEIYVDVPLPTDAETSPEVAPETPGSHCGSCSRCIDACPTGAIVGPYKVDARLCISYLTIELKGSIPVEMRPLIGNRVYGCDDCQLVCPWNKFAQAAPVADFDVRHGLDRASLVELFGWSADDFDTRMQGSAIRRIGYESWLRNLAVGMGNALRASRDALSAEAREAIVEALRRRADDPSALVREHVQWALEAA

SEQ ID NO: 79165 - protein, 410 aa, unidentified
  source 1..410: note = Paraburkholderia hospita
  REGION 1..410: note = tr|A0A1H6PD11|A0A1H6PD11_9BURK Epoxyqueuosine reductase OS=Paraburkholderia hospita OX=169430 GN=queG; PE = 3 SV=1
MSDPHRDPHSPLETTNNEAPVTRRHDDAQLAALASRIKGWGRELGFGAVGISDIDLSHAEAGLAAWLDAGCHGEMDYMAKHGMKRARPAELVAGTRRVISVRMAYLPASSGARKGDESAVADVQHDWRLDERARLEDPTAAVVSIYARGRDYHKVMRNRLQQLAERIEAEIGPYGYRVFTDSAPVLEVELAQKAGTGWRGKHTLLLQRDAGSLFFLGEIFVDVPLPTDAETSPESAPETPGAHCGSCTRCIGACPTGAIVAPYQVDARRCISYLTIELKGSIPQDLRPLIGNRVYGCDDCQLVCPWNKFAQAAPVADFDVRHGLDRASLVELFGWSASDFDTRMQGSAIRRIGYECWLRNLAVGMGNALRAARDTLSADARAAIVDALRQRADDPSPLVREHVEWALEAA

SEQ ID NO: 79166 - protein, 418 aa, unidentified
  source 1..418: note = Paraburkholderia hospita
  REGION 1..418: note = tr|A0A244DYZ7|A0A244DYZ7_9BURK Epoxyqueuosine reductase OS=Paraburkholderia hospita OX=169430 GN=queG; PE = 3 SV=1
MNQGQQHSMSDPHRDPHSPLETTNNEAPVTRRHDDAQLAALASRIKGWGRELGFGAVGISDIDLSHAEAGLAAWLDAGCHGEMDYMAKHGMKRARPAELVAGTRRVISVRMAYLPASSGARKGDESAVADVQHDWRLDERARLEDPTAAVVSIYARGRDYHKVMRNRLQQLAERIEAEIGPYGYRVFTDSAPVLEVELAQKAGTGWRGKHTLLLQRDAGSLFFLGEIFVDVPLPTDAETSPESAPETPGAHCGSCTRCIGACPTGAIVAPYQVDARRCISYLTIELKGSIPQDLRPLIGNRVYGCDDCQLVCPWNKFAQAAPVADFDVRHGLDRASLVELFGWTASDFDTRMQGSAIRRIGYECWLRNLAVGMGNALRAAPDTLTADARAAIVDALRQRADDPSPLVREHVEWALEAA

SEQ ID NO: 79167 - protein, 402 aa, unidentified
  source 1..402: note = Paraburkholderia insulsa
  REGION 1..402: note = tr|A0A2T1B1T0|A0A2T1B1T0_9BURK Epoxyqueuosine reductase OS=Paraburkholderia insulsa OX=1441714 GN=queG; PE = 3 SV=1
MPASDDDAHAERRFDETALNALALDIKTWGRELGFGAIGISDTDLSAAEAPLAAWLDAGCHGEMDYMAKHGMKRARPAELVAGTRRVITARIAYLPAQTLSGKAHESALQDSPRIPQDWRAAEHARLADPSAAVVSIYARGRDYHKVMRNRLQQLAEKIEAAIGAFGYRVFTDSAPVLEVELAQKAGIGWRGKHTLLLQRDAGSLFFLGEIYVDVPLPTDAETSPDDAPETPGAHCGSCTRCIGACPTGAIVAPYKVDARLCISYLTIELKGNIPLEMRPLIGNRVYGCDDCQLVCPWNKFAQAAPVADFDVRHGLDRATLVELFAWSAEDFDTRMQGSAIRRIGYESWLRNLAVGMGNALRAPSEHLDADARAAIVHALELRVGDPSAVVREHVEWALEAA

SEQ ID NO: 79168 - protein, 395 aa, unidentified
  source 1..395: note = Paraburkholderia megapolitana
  REGION 1..395: note = tr|A0A1I3II56|A0A1I3II56_9BURK Epoxyqueuosine reductase OS=Paraburkholderia megapolitana OX=420953; GN = queG PE=3 SV=1
MRRFDEAALTALALRIKTWGRELGFGALGISDTELPDAESGLAAWLEAGYHGEMDYMAKHGMKRARPAELVAGTRRVITARIAYLPAMTLTGTHAGKVTESDSSPAPDAPDWRADEMARLADPSAAVVSIYARGRDYHKVMRQRLQQLAERIEAEIGAYGYRVFTDSAPVLEVAFAQNAGIGWRGKHTLLLQRDAGSLFFLGEIYVDLPLPTDASIDPDSAPETAGAHCGSCTRCIDACPTGAIVEPYKVDARRCISYLTIELKGSIPEDMRPLIGNRVYGCDDCQLVCPWNKFAQAAPVADFDVRHGLDRASLVELFDWSASDFDTRMQGSAIRRIGYECWLRNLAVGMGNALRADAATLAGAARSAIVDALRRRADDPSPLVREHVQWALEAA

SEQ ID NO: 79169 - protein, 409 aa, unidentified
  source 1..409: note = Paraburkholderia monticola
  REGION 1..409: note = tr|A0A149PZ24|A0A149PZ24_9BURK Epoxyqueuosine reductase OS=Paraburkholderia monticola OX=1399968 GN=queG; PE = 3 SV=1
MNRSPKSPDSCTPATADDAARVSCAMSRFDEAALHALALDIKTWGRELGFGAIGISDTDLSAAEAPLAAWLEAGCHGEMDYMAKHGMKRARPAELVAGTRRVITARIAYLPAQTLEGAAAQAARDWRAAEHARLADPSTAVVSIYARGRDYHKVMRQRLQQLADRIEAAIGPFGYRVFTDSAPVLEVELAQKAGIGWRGKHTLLLQRDAGSLFFLGEIYVDIPLPTDAETVPEAAPETPGSHCGSCTRCIDACPTGAIVAPYKVDARRCISYLTIELKGSIPLDLRPLIGNRVYGCDDCQLVCPWNKFAQAAPVADFDVRHGLDRASLVELFAWSADEFDTRMQGSAIRRIGYESWLRNLAVGMGNALRAAPASLDAEARAAIVRALRQRVDDPSTVVREHVEWALEAA

SEQ ID NO: 79170 - protein, 421 aa, unidentified
  source 1..421: note = Paraburkholderia phenazinium
  REGION 1..421: note = tr|A0A1N6L2I8|A0A1N6L2I8_9BURK Epoxyqueuosine reductase OS=Paraburkholderia phenazinium OX=60549 GN=queG; PE = 3 SV=1
MNRSPESPVSCTPASDDDAPAMRRFDEAALAALALRIKAWGRELGFGAVGISDTDLSAAEANLAAWLEEGCHGEMDYMAKHGMKRARPAELVAHTRRVISARMAYLPAHLSSHSPSRSSPTEEAGKAGESPQQEGRNWRAVEHARLGDPAAAVVSIYARGRDYHKVMRNRLQQLAEKIEAEIGAYGYRVFTDSAPVLEVELAQKAGVGWRGKHTLLLQRDAGSLFFLGEIYVDVPLPTDAETSPDDAPQTPGAHCGSCTRCIDACPTGAIVAPYKVDARLCISYLTIELKGSIPPDLRPLIGNRVYGCDDCQLVCPWNKFAQAAPVADFDVRHGLDRATLVDLFDWSADEFDTRMQGSAIRRIGYECWLRNLAVGMGNALRADPASFAGGARAAIVDALRRRVEDPSPLVREHVEWALEAA

SEQ ID NO: 79171 - protein, 420 aa, unidentified
  source 1..420: note = Paraburkholderia phenazinium
  REGION 1..420: note = tr|A0A4R7RHD1|A0A4R7RHD1_9BURK Epoxyqueuosine reductase OS=Paraburkholderia phenazinium OX=60549 GN=queG; PE = 3 SV=1
MNRSPESPVSCTPASDDDARAMRHLDEAALALRIKAWGRELGFGAIGISDTDLSAAEAGLAAWLEEGCHGEMDYMAKHGMKRARPAELVAHTRRVISARMAYLPGDSLSYGLLVCLTRQRGKLGESVLTEPTEARNWRADEFARINDPSAAVVSIYARGRDYHKVMRNQLQRLADKIEAEIGAYGYRVFTDSAPVLEIELAQKAGIGWRGKHTLLLQRDSGSLFFLGEIYVDVPLPTDAQTTPERAPETPGAHCGSCTRCIDACPTGAIVAPYKVDARLCISYLTIELKGSIPLELRPLIGNRVYGCDDCQLVCPWNKFAQAAPVADFDVRHGLDRATLVELFAWSADDFDTRMQGSAIRRIGYEAWLRNLAVGMGNALRADPASLSGDARAAIVDALRQRADDPSALVREHVEWALEAA

SEQ ID NO: 79172 - protein, 404 aa, unidentified
  source 1..404: note = Paraburkholderia phenoliruptrix
  REGION 1..404: note = tr|K0DSQ3|K0DSQ3_9BURK Epoxyqueuosine reductase; OS = Paraburkholderia phenoliruptrix BR3459a OX=1229205; GN = queG PE=3 SV=1
MSDASASGGEARAERQFDEAALRALAQNIKTWGRELGFGAIGISDTDLSAAEAPLAAWLEAGCHGEMDYMAKHGMKRARPAELVAGTLRVITARIAYLPQQSMSGKPAESERHEAPHNRDWRAAEQARLADPSAAVVSIYARGRDYHKVMRNRLQHLSEKIQAEIGAFGYRVFTDSAPVLEVELAQKAGIGWRGKHTLLLQRDAGSLFFLGEIYVDVPLPTDAETSPEVAPETPGSHCGSCSRCIGACPTGAIVGPYKVDARLCISYLTIELKGSIPVEMRPLIGNRVYGCDDCQLVCPWNKFAQAAPVADFDVRHGLDRASLLELFAWSADEFDTRMQGSAIRRIGYESWLRNLAVGMGNALRASPDALSDEAREAIVEALTRRADDPSPLVREHVQWALEAA

SEQ ID NO: 79173 - protein, 430 aa, unidentified
  source 1..430: note = Paraburkholderia phymatum
  REGION 1..430: note = tr|B2JDT7|B2JDT7_PARP8 Epoxyqueuosine reductase; OS = Paraburkholderia phymatum (strain DSM 17167 / CIP 108236 / LMG 21445 / STM815) OX=391038 GN=queG PE=3 SV=1
MNQGQQHPMPDPQTGAQCDPHSSPRATDEATDVTRRFDEAQLAALASRIRDWGRELGFGAVGISDIDLSHAEAGLAAWLDAGCHGEMDYMAKHGMKRARPAELVAGTRRVISVRMAYLPTHATPHAADSPAARKDAESAAADVQHDWRLEERARLNDPSAAVVSIYARGRDYHKVMRNRLQHLAERIEGEIGPYGYRVFTDSAPVLEVELAQQAGTGWRGKHTLLLQRDAGSLFFLGEIFVDLPLPTDAETSPERAPETPGAHCGSCTRCIGACPTGAIVAPYQVDARRCISYLTIELKGSIPQDLRPLIGNRVYGCDDCQLACPWNKFAQAAPVADFDVRHGLDRASLVELFGWSADEFDTRLQGSAIRRIGYECWLRNLAVGMGNALRAARESLPAEARAAIVDALRRRAGDPSPLVREHVAWALEAA

SEQ ID NO: 79174 - protein, 412 aa, unidentified
  source 1..412: note = Paraburkholderia phytofirmans
  REGION 1..412: note = tr|B2SY71|B2SY71_PARPJ Epoxyqueuosine reductase; OS = Paraburkholderia phytofirmans (strain DSM 17436 / LMG 22146 / PsJN) OX=398527 GN=queG PE=3 SV=1
MNRSPESPVSCTPASNDDARAERHFDEAALKALALNIKTWGRELGFGAVGISDTDLSAAEAPLAAWLEAGCHGEMDYMAKHGMKRARPAELVAGTRRVIMARIAYLPAQTLSGKARESALQDGPLTQDWRAAEHARLADPSAAVVSIYARGRDYHKVMRNRLQHLAEKIEAEIGAFGYRVFTDSAPVLEVELAQKAGIGWRGKHTLLLQRDAGSLFFLGEIYVDVPLPTDADTMPEIAPETPGSHCGSCTRCIGACPTGAIVAPYKVDARLCISYLTIELKGSIPLELRPLIGNRVYGCDDCQLVCPWNKFAQAAPVADFDVRHGLDRASLVELFAWSADEFDTRMQGSAIRRIGYESWLRNLAVGMGNALRASPDSLSEAAREAIVQALRMRMDDASAVVREHVEWALEAA

SEQ ID NO: 79175 - protein, 431 aa, unidentified
  source 1..431: note = Paraburkholderia piptadeniae
  REGION 1..431: note = tr|A0A1N7STN3|A0A1N7STN3_9BURK Epoxyqueuosine reductase OS=Paraburkholderia piptadeniae OX=1701573; GN = yjeS PE=3 SV=1
MNQSQQHPNALSEQHRERRPDAHSPPRAANDEAPATPHYDEAQLAALASRIRSWARELGFGAVGISDIDLSNAEAGLAAWLDAGCHGEMDYMAKHGMKRARPAELVAGTRRVISVRMDYLPAHLPRSSDARKDDESAHSDVQHDWRLEERARLNDPSAAVVSIYARGRDYHKVMRNRLQQLADRIEAEVGPYGHRVFTDSAPVLEVELAQKAGTGWRGKHTLLLQRDAGSLFFLGELFVDLPLPTDAETAPERAPETPGAHCGSCARCIGACPTGAIVGPYQVDARRCISYLTIELKGSIPQDLRPLIGNRVYGCDDCQLVCPWNKFAQAAPVDDFDVRHGLDRASLVELFGWSAEDFDTRMQGSAIRRIGYECWLRNLAVGMGNALRAAPQSISAGAREAIVDALRKRADDPSPLVREHVEWALEAAWQR

SEQ ID NO: 79176 - protein, 433 aa, unidentified
  source 1..433: note = Paraburkholderia rhizosphaerae
  REGION 1..433: note = tr|A0A4V3HFI3|A0A4V3HFI3_9BURK Epoxyqueuosine reductase OS=Paraburkholderia rhizosphaerae OX=480658; GN = queG PE=3 SV=1
MDRSQQHPVSGTPDSNGGPRAHPTLPYRFDDAALAALASRIRTWGRELGFGEVGISDTDLASAEAGLAAWLDAGWHGEMDYMAKHGMKRARPAELVAGTLRVITARMAYLPASTEAGKGGESGVESAAAREPGDGVRGKLVADSPAQQDWRRDEHARLADPSAAVVSIYARGRDYHKVMRNRLQQLAERIEHEVGGYGFRVFTDSAPVLEVELAQKAGVGWRGKHTLLLQRDAGSLFFLGEIYVDLPLPTDAQRTPERAPQTAGAHCGHCTRCIDACPTGAIVGPYKVDARRCISYLTIELKGSIPQDLRPLIGNRVYGCDDCQLACPWNKFAQAAPVADFDVRHGLDRASLTDLFGWSAADFDARMQGSAIRRIGYECWLRNLAVGMGNALRADPASLAPHVREAIVDALRQRADDASPLVREHVQWALEAA

SEQ ID NO: 79177 - protein, 399 aa, unidentified
  source 1..399: note = Paraburkholderia rhizoxinica
  REGION 1..399: note = tr|E5AMA7|E5AMA7_PARRH Epoxyqueuosine reductase; OS = Paraburkholderia rhizoxinica (strain DSM 19002 / CIP 109453 / HKI 454) OX=882378 GN=queG PE=3 SV=1
MDEARLVHLALRTIERMKQPPDTEIHRAMLTDADLASLARRVREWARELGFSAIGICDIDLSHAEAGLAAWIDAGYHGEMDYMAKHGMKRARPAELVPGTQRVISARMPYLPAGTPASWRAREHARLADPSAAVVSIYARGRDYHKVMRQRLQRLAERIEAAIGPLGYRVFTDSAPVLEVELAQKAGLGWRGKHTLLLDRDAGSLFFLGEIFVDVPLPTDAQSQPSRAPQQAGAHCGACTRCIDACPTGAIVAPYRLDARKCISYLTIELRGSIPVELREAIGNRVYGCDDCQLVCPWNKFAQPSGCADFDVRNGLDGAQLIELFGWSEQDFDTRLAGSAIRRIGYERWLRNLAVGLGNALRAGGGAQGRDAVLAALRKREDDPSALVREHVRWALGYE

SEQ ID NO: 79178 - protein, 415 aa, unidentified
  source 1..415: note = Paraburkholderia rhynchosiae
  REGION 1..415: note = tr|A0A2N7WRE0|A0A2N7WRE0_9BURK Epoxyqueuosine reductase OS=Paraburkholderia rhynchosiae OX=487049; GN = queG PE=3 SV=1
MNRSPESPVSPVSNAPTPCDEARAERQFDEAALQALARNIKTWGRELGFGAIGISDTDLSAAEAPLAAWLEAGCHGEMDYMAKHGMKRARPAELVAGTLRVITARIAYLPAHASSGKPDESERWEGPLTQDWRAVEHARLADPSAAVVSIYARGRDYHKVMRNRLQHLSEKIQAEIGAFGYRVFTDSAPVLEVELAQKAGIGWRGKHTLLLQRDAGSLFFLGEIYVDVPLPTDAETSPEVAPETPGSHCGSCARCISACPTGAIVAPYKVDARLCISYLTIELKGSIPVDMRPLIGNRVYGCDDCQLVCPWNKFAQAAPVADFDVRHGLDRASLVDLFGWSADDFDTRMQGSAIRRIGYESWLRNLAVGMGNALRASRETLNADARKAIVEALKRRADDPSAVVREHVQWALEAA

SEQ ID NO: 79179 - protein, 415 aa, unidentified
  source 1..415: note = Paraburkholderia ribeironis
  REGION 1..415: note = tr|A0A1N7S3E0|A0A1N7S3E0_9BURK Epoxyqueuosine reductase OS=Paraburkholderia ribeironis OX=1247936; GN = yjeS PE=3 SV=1
MKRSPESPLSSAPASVDAKGAVRHFDEAALNALALNIKTWGRELGFGAIGISDTDLRAAEAPLAAWLEAGCHGEMDYMAKHGMKRARPAELVAGTRRVITARIAYLPIETLSGKAHESTAQDGPLVPHWPQWRAAEQAQLADPSAAVVSIYARGRDYHKVMRNRLQHLAEKIEAEIGPFGYRVFTDSAPVLEVELAQKAGIGWRGKHTLLLQREAGSLFFLGEIYVDVPLPTDAETSPDAAPETPGSHCGSCTRCIGACPTGAIVAPYKVDARRCISYLTIELKGSIPLDMRPLIGNRVYGCDDCQLVCPWNKFAQAAPVADFDVRHGLDRASLVELFAWSADEFDTRMQGSAIRRIGYECWLRNLAVGMGNALRAPSGSLSAEAREAIVHALKLRADDPSALVREHVEWALEAA

SEQ ID NO: 79180 - protein, 401 aa, unidentified
  source 1..401: note = Paraburkholderia sacchari
  REGION 1..401: note = tr|A0A0A6T045|A0A0A6T045_9BURK Epoxyqueuosine reductase OS=Paraburkholderia sacchari OX=159450 GN=queG; PE = 3 SV=1
MPVETPANSPAPLDEAALAALADRIRAWGRELGFGAIGISDTDLSHAEAGLAAWLEAGCHGEMDYMAKHGMKRARPAELVAGTRRVITARMAYLPAATLADKALSDSWRQHERARLGDPHAAVVSIYARGRDYHKVLRARLQQLAERIEAEIGAFGFRVFTDSAPVLEVELAQKAGIGWRGKHTLLLQRDAGSLFFLGEIYVDVPLPTDAENTHDARDRVSQAPEQPGAHCGSCTRCIGACPTGAIVGPYRVDARRCISYLTIELKGSIPLELRELIGNRVYGCDDCQLVCPWNKFAQAAPVADFDVRHGLDRASLVELFGWSAEQFDERMQGSAIRRIGHEAWLRNIAVAMGNALRAPRDSEEGLDRQEGRAAIVAALRAREHDASALVREHVQWALEAA

SEQ ID NO: 79181 - protein, 421 aa, unidentified
  source 1..421: note = Paraburkholderia sartisoli
  REGION 1..421: note = tr|A0A1H3YRT4|A0A1H3YRT4_9BURK Epoxyqueuosine reductase OS=Paraburkholderia sartisoli OX=83784 GN=queG; PE = 3 SV=1
MNRSPEPPESCTPASDDDVRAVRHFDEAALEALAQRIKTWGRELGFSAVGISDTDLTAAEAGLAAWLEAGCHGEMDYMAKHGMKRARPAELVAGTLRVITARIAYLPAETLVGKRVESHAAAASNLAESAAQAVPHDWRAQETLRLADPSAAVVSIYARGRDYHKVMRNRLQQLAEKVEAEIGAFGFRVFTDSAPVLEIELAQKAGIGWRGKHTLLLQRDAGSLFFLGEIYVDVPLPTDAQTTPERAPETPGAHCGSCTRCIEACPTGAIVEPYRVDARRCISYLTIELKGSIPQDLRPLIGNRVYGCDDCQTVCPWNKFAQAAPVADFDVRHGLDRATLVDLFAWSADDFDTRMQGSAIRRIGYESWLRNLAVGMGNALRVDRASLSIDARAAIVDALRGRAGDASAIVREHVEWALEAA

SEQ ID NO: 79182 - protein, 413 aa, unidentified
  source 1..413: note = Paraburkholderia sediminicola
  REGION 1..413: note = tr|A0A419U9Y2|A0A419U9Y2_9BURK Epoxyqueuosine reductase OS=Paraburkholderia sediminicola OX=458836; GN = queG PE=3 SV=1
MNRSPESPVSCTPASNDDARAERHFDEAALNALALNIKTWGRELGFGAIGISDTDLSTAEAPLAAWLDAGCHGEMDYMAKHGMKRARPAELVAGTRRVITARIAYLPAQTLSGKAHESALQDTPLAPQDWRAAEHARLADPSAAVVSIYARGRDYHKVMRNRLQHLAEKIEAEIGAFGYRVFTDSAPVLEVELAQKAGIGWRGKHTLLLQRDAGSLFFLGEIYVDVPLPTDAETSPDDAPETPGSHCGSCTRCIGACPTGAIVAPYKVDARLCISYLTIELKGNIPLEMRPLIGNRVYGCDDCQLVCPWNKFAQAAPVADFDVRHGLDRATLVELFAWSADEFDTRMQGSAIRRIGYESWLRNLAVGMGNALRSSSESLSADAREAIVQALKLRADDPSAVVREHVEWALEAA

SEQ ID NO: 79183 - protein, 413 aa, unidentified
  source 1..413: note = Paraburkholderia sediminicola
  REGION 1..413: note = tr|A0A495G7Y4|A0A495G7Y4_9BURK Epoxyqueuosine reductase OS=Paraburkholderia sediminicola OX=458836; GN = queG PE=3 SV=1
MNRSPESPVSCTPASNDDARAERHFDEAALNALALNIKTWGRELGFGAIGISDTDLSTAEAPLAAWLDAGCHGEMDYMAKHGMKRARPAELVAGTRRVITARIAYLPAQTLSGKAHESALQDTPLAPQDWRAAEHARLADPSAAVVSIYARGRDYHKVMRNRLQHLASKIEAEIGAFGYRVFTDSAPVLEVELAQKAGIGWRGKHTLLLQRDAGSLFFLGEIYVDVPLPTDAETSPDDAPETPGSHCGSCTRCIGACPTGAIVAPYKVDARLCISYLTIELKGNIPLEMRPLIGNRVYGCDDCQLVCPWNKFAQAAPVADFDVRHGLDRATLVELFAWSADEFDTRMQGSAIRRIGYESWLRNLAVGMGNALRSSSESLSADAREAIVQALKLRADDPSAVVREHVEWALEAA

SEQ ID NO: 79184 - protein, 419 aa, unidentified
  source 1..419: note = Paraburkholderia silvatlantica
  REGION 1..419: note = tr|A0A2V4TNK8|A0A2V4TNK8_9BURK Epoxyqueuosine reductase OS=Paraburkholderia silvatlantica OX=321895; GN = queG PE=3 SV=1
MPLDEAALAALAARIRTWGRELGFGAIGISDTDLSHAEAGLAAWLEAGCHGEMDYMAKHGMKRARPAELVAGTRRVITARMAYLPIDTLAPNAVGKTRESVSQGGPDRSGSAGTEAGTNGARERIHADWRLREHARLADPHAAVVSIYARGRDYHKVLRARLQQLAERIEAEIGQFGFRVFTDSAPVLEVELAQKAGVGWRGKHTLLLQRDAGSLFFLGEIYVDVPLPTDADAHERGAAGAAPETPGAHCGSCTRCIDACPTGAITGPYRVDARRCISYLTIELKGSIPLELRELIGNRVYGCDDCQLVCPWNKFAKAAPVADFDVRHGLDRASLVDLFGWSAAQFDERMQGSAIRRIGYESWSRNIAVAMGNALRAPREGADNGRAAARAAIVKALREREHDASAVVREHVLWALEAA

SEQ ID NO: 79185 - protein, 421 aa, unidentified
  source 1..421: note = Paraburkholderia sp.
  REGION 1..421: note = tr|A0A522HLD2|A0A522HLD2_9BURK Epoxyqueuosine reductase OS=Paraburkholderia sp. OX=1926495 GN=queG PE=3; SV = 1
MNRSPEPPESCTPASDDDARAVRHFDEAALEALAQRIKTWGRELGFSAVGISDTDLTAAEAGLAAWLEAGCHGEMDYMAKHGMKRARPAELVAGTLRVITARIAYLPAETLEGKRVESHAAAASNLAESAAQAVPHDWRAQETLRLADPSAAVVSIYARGRDYHKVMRNRLQQLAEKVEAEIGAFGFRVFTDSAPVLEIELAQKAGIGWRGKHTLLLQRDAGSLFFLGEIYVDVPLPTDAQTTPERAPETPGAHCGSCTRCIEACPTGAIVEPYRVDARRCISYLTIELKGSIPQDLRPLIGNRVYGCDDCQTVCPWNKFAQAAPVADFDVRHGLDRATLVDLFAWSADDFDTRMQGSAIRRIGYESWLRNLAVGMGNALRADRASLSIDARAAIVDALRGRAGDASAIVREHVEWALEAA

SEQ ID NO: 79186 - protein, 440 aa, unidentified
  source 1..440: note = Paraburkholderia sp.
  REGION 1..440: note = tr|A0A4Q6X2I9|A0A4Q6X2I9_9BURK Epoxyqueuosine reductase OS=Paraburkholderia sp. UYCP14C OX=2511130; GN = queG PE=3 SV=1
MNRSPKSPVSCTPASADDAARASGATSCFDEATLRALALDIKTWGRELGFGAIGISDTDLSAAEAPLAAWLEAGCHGEMDYMAKHGMKRARPAELVAGTRRVITVRIAYLPAQTPGGAASEQAHGQSHRSASESASQDVPQAIPQHTPHSTPHTRDWRAAEQARLADPSAAVVSIYARGRDYHKVMRQRLQHLAERIEAAIGPFGYRVFTDSAPVLEVELAQKAGIGWRGKHTLLLQRDAGSLFFLGEIYVDIPLPTDAETSPQAAPETPGSHCGSCTRCIGACPTGAIVAPYKVDARRCISYLTIELKGSIPLDLRPLIGNRVYGCDDCQLVCPWNKFAQAAPVADFDVRHGLDRASLVELFGWSAEDFDTRMQGSAIRRIGYECWLRNLAVGMGNALRAAPASLKADARAAIVRALRQRVDDPSALVREHVEWALEAA

SEQ ID NO: 79187 - protein, 436 aa, unidentified
  source 1..436: note = Paraburkholderia sprentiae
  REGION 1..436: note = tr|A0A1I9YKE0|A0A1I9YKE0_9BURK Epoxyqueuosine reductase OS=Paraburkholderia sprentiae WSM5005 OX=754502; GN = queG PE=3 SV=1
MNRSPKSPVSCTPASADDAARASGATSRLDEAALRALALDIKTWGRELGFGAIGISDTDLSAAEAPLAAWLEAGCHGEMDYMAKHGMKRARPAELVAGTRRVITARIAYLPALTLGADASERAPEGAAPGSPESLSQDVAQSASRPTPRARDWRAAEYARLADPSTAVVSIYARGRDYHKVMRQRLQQLADRIEAAIGPFGYRVFTDSAPVLEVELAQKAGIGWRGKHTLLLQRDAGSLFFLGEIYVDVPLPTDADTSPELAPETPGSHCGSCARCIGACPTGAIVAPYKVDARRCISYLTIELKGSIPLDMRPLIGNRVYGCDDCQLVCPWNKFAQAAPVADFDVRHGLDRASLVELFGWSAEDFDTRMQGSAIRRIGYESWLRNLAVGMGNALRAAPASLDADARAAIVRALRQRVDDPSGLVREHVEWALEAA

SEQ ID NO: 79188 - protein, 430 aa, unidentified
  source 1..430: note = Paraburkholderia susongensis
  REGION 1..430: note = tr|A0A1X7M4P8|A0A1X7M4P8_9BURK Epoxyqueuosine reductase OS=Paraburkholderia susongensis OX=1515439; GN = queG PE=3 SV=1
MSASADAEPTPRDMPRFDEAALRALALDIKTWGRELGFGAIGISDTDLCAAEAPLAAWLEAGCHGEMDYMAKHGMKRARPAELVAGTRRVITARIAYLPASTLAGSAPGRAWEEASEGAYEGAYEAPESVSGSAPQDAQHTPRTRDWRAAEHARLADPSAAVVSIYARGRDYHKVMRNRLQHLAEKIEAAIGPFGYRVFTDSAPVLEVELAQKAGIGWRGKHTLLLQRDAGSLFFLGEIYVDIPLPTDAQTSPEAAPETPGSHCGSCTRCLGACPTGAIVAPYKVDARRCISYLTIELKGSIPLDMRPLIGNRVYGCDDCQLVCPWNKFAQAAPLADFDVRHGLDRASLVELFAWSADEFDTRMQGSAIRRIGYESWLRNLAVGMGNALRAAPGSLGDEARAAIVQALRQRAGDPSAVVREHVEWALEAA

SEQ ID NO: 79189 - protein, 418 aa, unidentified
  source 1..418: note = Paraburkholderia terrae
  REGION 1..418: note = tr|A0A2I8EGA5|A0A2I8EGA5_9BURK Epoxyqueuosine reductase OS=Paraburkholderia terrae OX=311230 GN=queG; PE = 3 SV=1
MNQGQQHSMSDPHRDPHSPLETTNDEAPVTRRHDDAQLAALASRIKDWGRELGFGAVGISDIDLSHAEAGLAAWLDAGCHGEMDYMAKHGMKRARPAELVAGTRRVISVRMAYLPASSGARKGDESAVADVQHDWRLDERARLQDPAAAVVSIYARGRDYHKVMRNRLQQLAERIEAEIGPYGYRVFTDSAPVLEVELAQKAGTGWRGKHTLLLQRDAGSLFFLGEIFVDVPLPTDAETSPESAPETPGAHCGSCTRCIGACPTGAIVAPYQVDARRCISYLTIELKGSIPQDLRPLIGNRVYGCDDCQLVCPWNKFAQAAPVADFDVRHGLDRASLVELFGWSASDFDTRMQGSAIRRIGYECWLRNLAVGMGNALRAARDTLSADARAAIVDALRQRADDPSPLVREHVEWALEAA

SEQ ID NO: 79190 - protein, 418 aa, unidentified; identical to SEQ ID NO: 79166
  source 1..418: note = Paraburkholderia terrae
  REGION 1..418: note = tr|I5D1I2|I5D1I2_9BURK Epoxyqueuosine reductase; OS = Paraburkholderia terrae BS001 OX=1171375 GN=queG PE=3; SV = 1

SEQ ID NO: 79191 - protein, 405 aa, unidentified
  source 1..405: note = Paraburkholderia terricola
  REGION 1..405: note = tr|A0A1M6JCA7|A0A1M6JCA7_9BURK Epoxyqueuosine reductase OS=Paraburkholderia terricola OX=169427 GN=queG; PE = 3 SV=1
MSRTPASDDDARAERRLDEAALHALALDIKTWGRELGFAAIGISDTDLSAAEAPLAAWLEAGCHGEMDYMAKHGMKRARPAELVAGTRRVITARIAYLPARTLNGKANESALPDVPPAPRDWRAAEHARLADPSAAVVSIYARGRDYHKVMRNRLQQLAEKIEAAIGVFGYRVFTDSAPVLEVELAQKAGIGWRGKHTLLLQRDAGSLFFLGEIYVDVPLPTDAETSPDVAPETPGSHCGSCTRCIGACPTGAIVAPYKVDARRCISYLTIELKGNIPLEMRPLIGNRVYGCDDCQLVCPWNKFAQAAPVDDFDVRHGLDRASLVELFAWSAQEFDTRMQGSAIRRIGYESWLRNLAVGMGNALRASSESLSGDARKAIVEALRSRADDPSAVVREHVEWALEAA

SEQ ID NO: 79192 - protein, 458 aa, unidentified
  source 1..458: note = Paraburkholderia tropica
  REGION 1..458: note = tr|A0A1A5XN94|A0A1A5XN94_9BURK Epoxyqueuosine reductase OS=Paraburkholderia tropica OX=92647 GN=queG; PE = 3 SV=1
MNPSHSPLNQTLAAEAARAPDKASASRASSCAQQTQGAGASATLDAAALAALATQIRAWGRELGFGAIGISDTDLSHAEAGLAAWLEAGCHGEMDYMAKHGMKRARPVELVAGTRRVITARMAYLPAATLDPSAAAATEHATGQAAESASQGADEGRRGHAIHDDWRQREHARLADPHAAVVSIYARGRDYHKVMRARLQQLAERIEGEIGAFGFRVFTDSAPVLEVELAQKAGIGWRGKHTLLLQRDAGSLFFLGEIYVDVPLPTDADDPASAAPETPGAHCGSCTRCIDACPTGAITEPYRVDARRCISYLTIELKGSIPLDMRPLIGNRVYGCDDCQLVCPWNKFAKAAPVADFDVRHGLDRASLVELFGWSAAQFDERMQGSAIRRIGYESWSRNIAVAMGNALRAPRVDEATGTSETSEASARREAIVDALRVRAQDESAVVREHVQWALEAA

SEQ ID NO: 79193 - protein, 464 aa, unidentified
  source 1..464: note = Paraburkholderia tropica
  REGION 1..464: note = tr|A0A2V3XWU5|A0A2V3XWU5_9BURK Epoxyqueuosine reductase OS=Paraburkholderia tropica OX=92647 GN=queG; PE = 3 SV=1
MNPSHSPLNQTLAAEAARAPDKASASRASSCAQQTQGAGASATLDAAALAALATQIRAWGRELGFGAIGISDTDLSHAEAGLAAWLEAGYHGEMDYMAKHGMKRARPAELVAGTRRVITARMAYLPAATLDPSAAAATEHATGQAAESASQGADEGRRGHAIHDDWRQREHARLADPHAAVVSIYARGRDYHKVMRARLQQLAERIEGEIGAFGFRVFTDSAPVLEVELAQKAGIGWRGKHTLLLQRDAGSLFFLGEIYVDVPLPTDADDPASAAPETPGAHCGSCTRCIDACPTGAITGPYRVDARRCISYLTIELKGSIPLDLRPLIGNRVYGCDDCQLVCPWNKFAKAAPVADFDVRHGLDRASLVELFGWSAAQFDERMQGSAIRRIGYESWSRNIAVAMGNALRAPRVDDATGTSETSETSETSETHARREAIVDALRARAQDESAVVREHVQWALEAA

SEQ ID NO: 79194 - protein, 436 aa, unidentified
  source 1..436: note = Paraburkholderia tuberum
  REGION 1..436: note = tr|A0A1H1BHU9|A0A1H1BHU9_9BURK Epoxyqueuosine reductase OS=Paraburkholderia tuberum OX=157910 GN=queG; PE = 3 SV=1
MNRSPKSPVFCTPASADDAARASGATSRFDEAALRALALDVKTWGRELGFGAIGISDTDLSAAEAPLAAWLEAGCHGEMDYMAKHGMKRARPAELVAGTRRVITARIAYLPAQTLEAEAAEGAHEEGHESAPESMPQDVTQPASRATPRARDWRAAEHARLADPSTAVVSIYARGRDYHKVMRQRLQQLADRIEAVIGPFGYRVFTDSAPVLEVELAQKAGIGWRGKHTLLLQRDAGSLFFLGEIYVDVPLPTDAETSPEAAPETPGSHCGSCARCIGACPTGAIVAPYKVDARRCISYLTIELKGSIPLDLRPLIGNRVYGCDDCQLVCPWNKFAQAAPVADFDVRHGLDRASLVELFAWSAEEFDTRMQGSAIRRIGYESWLRNLAVGMGNALRAAPGSLDLDARGAIVLALRQRADDPSAVVREHVEWALEAA

SEQ ID NO: 79195 - protein, 419 aa, unidentified
  source 1..419: note = Paraburkholderia unamae
  REGION 1..419: note = tr|A0A328XMF7|A0A328XMF7_9BURK Epoxyqueuosine reductase OS=Paraburkholderia unamae OX=219649 GN=queG; PE = 3 SV=1
MPASGQAAPLDEAALAALAARIRTWGRELGFGAIGISDTDLSHAEAGLAAWLEAGCHGEMDYMAKHGMKRARPAELVAGTRRVISVRMAYLPADTLAPNATGKTHESASQGGAETSAVPGTNVARETIHADWRLREHARLADPHAAVVSIYARGRDYHKVLRARLQQLADRIEAEIGGFGYRVFTDSAPVLEVELAQKAGVGWRGKHTLLLQRDAGSLFFLGEIYVDVPLPTDADDPASAAPETPGSHCGSCTRCISACPTGAITGPYRVDARRCISYLTIELKGSIPLALRELIGNRVYGCDDCQLVCPWNKFAQAAPVADFDVRHGLDRASLVDLFGWSAAQFDERMQGSAIRRIGYECWSRNLAVAMGNALRATRDDAQHVQHAPERAAIVAALRAREHDESALVREHVLWALEAA

SEQ ID NO: 79196 - protein, 418 aa, unidentified
  source 1..418: note = Paraburkholderia xenovorans
  REGION 1..418: note = tr|Q13UQ3|Q13UQ3_PARXL Epoxyqueuosine reductase; OS = Paraburkholderia xenovorans (strain LB400) OX=266265; GN = queG PE=3 SV=1
MNRSPESPVSCPPASDDDARAERHFNETALNALALNIKTWGRELGFGAIGISDTDLSAAEAPLAAWLEAGCHGEMDYMAKHGMKRARPAELVAGTRRVITARVAYLPAGTMSGKAHESALQDGPLALEKQARQDWRAVEHARLADPCAAVVSIYARGRDYHKVMRNRLQHLAEKIEAEIGAFGYRVFTDSAPVLEVELAQKAGIGWRGKHTLLLQRDAGSLFFLGEIYVDVPLPTDAETSPERAPETPGSHCGSCTRCIGACPTGAIVAPYKVDARLCISYLTIELKGSIPLEMRPLIGNRVYGCDDCQLVCPWNKFAQAAPVADFDVRHGLDRASLVELFSWSADDFETRMQGSAIRRIGYESWLRNLAVGMGNALRASPDSLSEAARDAIVQALRARAGDASAVVREHVEWALEAA

SEQ ID NO: 79197 - protein, 324 aa, Parachlamydia acanthamoebae
  REGION 1..324: note = tr|F8KXF2|F8KXF2_PARAV Putative electron transport protein yjeS OS=Parachlamydia acanthamoebae (strain UV7); OX = 765952 GN=yjeS PE=4 SV=1
MIPEITFEEVRAEALRLGWDDVGITEAHIPEDDIEAYKTWLANNYQGDLQYMENHIRCDPQQLFPGAKTAIIFVTHYKQERVQFRNDAGVVASYARGRDYHHLHRKRLKKFILWLEQRSGQSNIAKGFSDSTPVMEKALAVQAGLGWFGKNTLLIHRRFGTFLLLSGLFTSLNIQEKSLNLRLPRCGTCRRCLDACPTQAFEAPYVLNATKCLSYHLIESKKEIPEEIQKKNPGYVFGCDICQDVCPHNVRPKPSTVPEFSPNQGMGAYLSLEDIEKIEHNPEKLFGTPLQRRGATGLRHTFETLNLQNPNENDHSEMKEDKHG

SEQ ID NO: 79198 - protein, 314 aa, Parachlamydia sp.
  REGION 1..314: note = tr|A0A2H9SWP9|A0A2H9SWP9_9BACT tRNA epoxyqueuosine(34) reductase QueG OS=Parachlamydia sp.; OX = 2052048 GN=queG PE=4 SV=1
MSPEITFEEIKAQALSLGWDDAGITDAKIPEEDIASYRSWLAENYQGDLLYMENQLRCDPQQLFPQAKTAILFVTHYKQERVQFRRDAGVVASYARGRDYHHLHRKRLKKFIQWLETRAGQVGIAKGFSDSTPVMEKALAAQAGLGWFGKNTLLIHRKFGTFILLSGLFTSLEFKDKLSSLRLPRCGSCTRCLDACPTQAFEAPYILNATKCLSYHLIESKKEIPEEVRLKNPGYVFGCDICQDVCPHNVRPKNSEIPEFSPDKGAGPYLALEDIKEIEQYPEKLFGTPLQRRGAKGLRHTMETLLLESSPESE

SEQ ID NO: 79199 - protein, 297 aa, unidentified
  source 1..297: note = Paraclostridium benzoelyticum
  REGION 1..297: note = tr|A0A0M3DLF3|A0A0M3DLF3_9FIRM Iron-sulfur cluster-binding protein OS=Paraclostridium benzoelyticum; OX = 1629550 GN=VN21_00435 PE=4 SV=1
MDKNKLKEFCKSIGINCVGIAGIGPYYDLENIIKDRTKKDFITGMEETDVEKRVNPRATMENAESIIVCAFPYFVGDVVDSNLSKYCYGMDYHIVVKEKLQQIADYIDSETEEFQYMVFVDNGPLVDRYLASISGIGYYGINNNIITDEYGSFVFIGYIINNYYFEPDKKSEKSCVKCGKCITSCPGKAILGDFEMNPKKCLSYVTQKKEDLSEDEKIALKNNKKIFGCDICQDVCPHNISISKTNIKEFKEELIYNLKEEEINNISNKEFRRRYKEKAFSWRGKKIIQRNIEILER

SEQ ID NO: 79200 - protein, 297 aa, unidentified
  source 1..297: note = Paraclostridium bifermentans
  REGION 1..297: note = tr|A0A1X2JG09|A0A1X2JG09_PARBF Epoxyqueuosine reductase OS=Paraclostridium bifermentans OX=1490; GN = B2H97_11420 PE=4 SV=1
MNKNKLKEFCKSIGINCVGIAGVGPYHDLENIIKDRTKKDFITGMEETSIEKRINPRASMENAESIIVCAFPYFVGDVVDSNLSKYCYGMDYHIVVKEKLQQIADYIDSEIEGFQYMIFADNGPLVDRYLASVSGIGYYGINNNIITDEYGSFVFIGYIINNYYFESDKKSEKSCAKCGKCITSCPGKAILGNFEMNPKKCLSYITQKKEDLSEDEKIALKNNKKIFGCDICQDVCPHNISISKTNIKEFKEQLIYNLKEEEINNISNKEFRRRYKEKAFSWRGKKIIQRNIEILER

SEQ ID NO: 79201 - protein, 297 aa, unidentified
  source 1..297: note = Paraclostridium bifermentans
  REGION 1..297: note = tr|T4VTD0|T4VTD0_PARBF Epoxyqueuosine reductase; OS = Paraclostridium bifermentans ATCC 638 OX=1233171; GN = queG PE=4 SV=1
MNKNKLKEFCKSIGINCVGIAGVGPYHDLENIIKDRTKKDFITGMEETSIEKRINPRASMESAESIIVCAFPYFVEDIVDSNLSKYCYGMDYHIVVKEKLQQIADYIDSEIEGFQYMIFADNGPLVDRYLASISGIGYYGINNNIITDEYGSFVFIGYIINNYYFESDKKSEKSCVKCGKCITSCPGKAILGDFEMNPKKCLSYITQKKEDLSEDEKIALKNNKKIFGCDICQDVCPHNISISKTNIKEFKEELIYNLKEEEINNISNKEFRRRYKEKAFSWRGKKIIQRNIEIIER

SEQ ID NO: 79202 - protein, 338 aa, Paracoccus aestuarii
  REGION 1..338: note = tr|A0A418ZYG7|A0A418ZYG7_9RHOB tRNA epoxyqueuosine(34) reductase QueG OS=Paracoccus aestuarii; OX = 453842 GN=queG PE=4 SV=1
MEAEARAVGFAAMGVMRPDGVPELAGRLADFVARGRHGQMGWMAERMGWRGDPAALWPEARSVVMLAELYTPEGDPLEVLERRDRAAVSVYAQGRDYHDLVKKRLKRLGRWLLETAPEPGHAIKVFVDTAPVMEKPLAQAAGLGWQGKHTNLLSRDLGSWFFLGAIFTTMPLPPDAPQVSHCGSCRACLDICPTGAFPAPYQLDARRCISYLTIEHKGPVEPDLRALMGNRIYGCDDCLAVCPWNKFAQAGSEMRYRGIIDAPPLAELAGLDDAGFRARFSGSPIKRIGRDRFVRNVLYAIGNSGDAGLIAVARGLQGDADPVVAEAASWAVARLGPA

SEQ ID NO: 79203 - protein, 344 aa, Paracoccus alcaliphilus
  REGION 1..344: note = tr|A0A1H8HR31|A0A1H8HR31_9RHOB Epoxyqueuosine reductase OS=Paracoccus alcaliphilus OX=34002; GN = SAMN04489859_101061 PE=4 SV=1
MKQALAAEAEAVGFSRMRVTTPDSVPEIAERLSAFLEAGRHGQMGWMAERVHWRGDPSALWPEARSVIVLAELYTPDHDPLEVLESRDRAAISVYAQGRDYHDLVKKRLKRLGRWLLEETQRRGAEGEQIKVFVDTAPVMEKPLAQAAGMGWQGKHTNLLSRELGSWFFLGSIFTTLALPVDPPEKPHCGNCRACLDICPTGAFPAPFQLDARRCISYLTIEHKGPVDPELRPLMGNRIYGCDDCLAVCPWNKFARKGSETRYHGLVGAPHLADLAVLDDAGFRARFSGSPIKRIGRDRLVRNVLYAIGNSGRADLIPVAQGLAGDADGAVADAARWAVMALRR

SEQ ID NO: 79204 - protein, 337 aa, Paracoccus alkenifer
  REGION 1..337: note = tr|A0A1H6MZB9|A0A1H6MZB9_9RHOB Epoxyqueuosine reductase OS=Paracoccus alkenifer OX=65735; GN = SAMN04488075_2413 PE=4 SV=1
MKKELAARALDEGFSAVRVTTPDAIPQAAARLAEYVAQGRHGQMGWMEERMHWRGAPDALWPEARAVVMLAETYTPPHDPREDLAQRDRGAISVYAQGKDYHDIVKSRLKRVGRWLIEQAGGEIKVFVDTAPVMEKPLAQAAGLGWQGKHTNLVSRELGSWFFLGAIFTTLPLPPDPAEPDRCGSCRACLDACPTDAFPAPFQLDARRCISYLTIEHKGPVDEELRPLLGNRIYGCDDCLAACPWNKFAAEAREMRYHGPHRAPPLAELAALDDAAFRARFSGSPIKRIGRDRMVRNVLYAIGNSGDPALRPLAAARLDDPDPAVADAAAWALGRLA

SEQ ID NO: 79205 - protein, 374 aa, Paracoccus aminophilus
  REGION 1..374: note = tr|S5Y2V4|S5Y2V4_PARAH 4Fe-4S ferredoxin, iron-sulfur cluster binding protein OS=Paracoccus aminophilus JCM 7686 OX=1367847 GN=JCM7686_3024 PE=4 SV=1
MRRSNRARPSAAFSPITCRACRQRRIMPNSTSEAEALKARLGAAALAEGFSDMGICRPDAVPALPERLDHFLKEERHGQMDWMAERSHWRANPAALWPEAKSVIMLAELYTPDHDPMEVTRLSDKGAISVYAQGKDYHDLVKKRLKRVGRWLIDQAKGAEIKVFVDTAPVMEKPLAQAAGLGWQGKHTNLLSRRLGSWFFLGSIFTTIDLPKDAAETSHCGNCRACLTACPTDAFPAPYQLDARRCISYLTIEHKGPVDLELRPLLGNRIYGCDDCLAACPWNKFAQDASELRYHGPHRAPDLAELAKLDDPSFREQFSGSPIKRIGRNRLVRNVLYAIGNSARPELRASAESLLDDEDLAVSDAARWALDRLR

SEQ ID NO: 79206 - protein, 328 aa, Paracoccus aminovorans
  REGION 1..328: note = tr|A0A1I3B0P7|A0A1I3B0P7_9RHOB Epoxyqueuosine reductase OS=Paracoccus aminovorans OX=34004; GN = SAMN04488021_11858 PE=4 SV=1
MAEGFSALGICAPDANPHLPERLAAFLAEGRHGDMAWMAERTHWRAAPDALWPEARSVIMLAELYTPEHDPLEIIHHPDRGAVSVYAQGKDYHDLVKKRLKRLGGWLVGLTGCEIKVFVDTAPVMEKPLAQAAGLGWQGKHTNLLSRELGSWFFLGAIFTTLDLPKDAPERSHCGSCRACLDACPTGAFPAPYQLDARRCISYLTIEHKGPVDPELRPMLGNRIYGCDDCLAACPWNKFAQAATELRYHGPHGGPALAELAALDDAGFRERFAGSPIKRIGRDRMVRNVLYAIGNSGLAHLRPLAEALAQDPDPAVADAARWACERLP

SEQ ID NO: 79207 - protein, 350 aa, Paracoccus bengalensis
  REGION 1..350: note = tr|A0A3D9XHD3|A0A3D9XHD3_9RHOB Epoxyqueuosine reductase OS=Paracoccus bengalensis OX=302403; GN = BDD41_2634 PE=4 SV=1
MRCSTSRPTDPAEIRSRLEQQARAEGFSALGICAPDANPQLPERLAAFLEQGRHGQMGWMAERAHWRASPGSLWPEARSVIMLAELYTPEHDPMEVIGHKDRGAVSVYAQGKDYHDLVKKRLKRLGGWLVGLTGCEIKVFVDTAPVMEKPLAQAAGLGWQGKHTNLLSRELGSWFFLGAIFTTLELPRDAAERSHCGSCRACLDACPTGAFPAPYQLDARRCISYLTIEHKGPVDPELRPSLGNRIYGCDDCLAACPWNKFAQEATELRYHGPHGAPALAELAALDDAGFRERFSGSPIKRIGRDRMVRNVLYAIGNSGLAHLRPLAESLADDPDPAVADAARWACERLP

SEQ ID NO: 79208 - protein, 352 aa, Paracoccus chinensis
  REGION 1..352: note = tr|A0A1G9C3D4|A0A1G9C3D4_9RHOB Epoxyqueuosine reductase OS=Paracoccus chinensis OX=525640; GN = SAMN04487971_10169 PE=4 SV=1
MPPAGGAGSPQDIWAKKNELVARALAEGFSAARVTTPDAIPQAAGRLAAYVAKGRHGQMGWMAERMNWRGAPDALWPEARSVIMLAEAYTPPHDPREDLARPDRGAVSVYAQGKDYHDIVKARLKRLGRWMIERWGGEIKVFVDTAPVMEKPLAQAAGLGWQGKHTNLLSRDLGNWFFLGAIFTTLALPPDAPEAEHCGSCRACLDACPTGAFPAPFQLDARRCISYLTIEHKGPVDPELRPMLGNRIYGCDDCLAACPWNKFAVQAQEMRYHGPHRAPALEELASLDDAGFRARFSGSPIKRIGRDRMVRNALYAIGNSGQARLRPVAQGLVDDPDPAVADAARWAVRRLA

SEQ ID NO: 79209 - protein, 365 aa, unidentified
  source 1..365: note = Paracoccus contaminans
  REGION 1..365: note = tr|A0A1W6CXF2|A0A1W6CXF2_9RHOB tRNA epoxyqueuosine(34) reductase QueG OS=Paracoccus contaminans OX=1945662 GN=B0A89_07615 PE=4 SV=1
MRSSTSRPQGGAAPRPPGADSPRDISVQKKDLVAQALAEGFSAVRVTTPDAVPQAAARLAAFVAAGRHGQMGWMAERMNWRGDPAALWPEARAVIMLAEAYTPPHDPREDLARPGRGAVSVYAQGRDYHDIVKARLKRVGRWLIDRAGGEIKVFVDTAPVMEKPLAQAAGLGWQGKHTNLLSRALGNWFFLGAIFTTLPLLPDPPEAEHCGSCRACLDACPTDAFPAPFQLDARRCISYLTIEHRGPVDEGLRPLMGNRIYGCDDCLAACPWNKFAVAAGEMRYHGPHRAPLLEDLAVLDDAGFRARFAGSPIKRIGRDRMVRNVLYAMGNSGMARLRPLAQGLAEDADPAVRDAARWAAGRLAG

SEQ ID NO: 79210 - protein, 347 aa, Paracoccus denitrificans
  REGION 1..347: note = tr|A0A2W4ZRL1|A0A2W4ZRL1_PARDE tRNA epoxyqueuosine(34) reductase QueG OS=Paracoccus denitrificans OX=266 GN=queG PE=4 SV=1
MRNSTSEPEIIKAEVMARALTEGFSAARVTTPGSVPEIAERLQQFVAKGRHGQMAWMAERMGWRGDPAALWPHAKSVIMLAEAYTPAHDPLDDLALRDRGAVSVYAQGKDYHDIVKARLKRLGRWLIERFGGEIKVFVDTAPVMEKPLAAAAGLGWQGKHTNLLSRELGNWFFLGSIFTTLEMPPDTAEVDHCGSCRKCLDICPTNAFPAPRQLDARRCVSYLTIEHKGPVDHEFRAALGNRIYGCDDCLAICPWNKFATAAREIRYHGPHRAPDLAMLAGMDDAGFRAHFAGSPIKRIGRDRMVRNALYAIGNSADPSLRPVAQGLTEDPDAAVADAARWAVERLT

SEQ ID NO: 79211 - protein, 347 aa, Paracoccus denitrificans
  REGION 1..347: note = tr|A1B4D7|A1B4D7_PARDP Epoxyqueuosine reductase; OS = Paracoccus denitrificans (strain Pd 1222) OX=318586; GN = queG PE=3 SV=1
MRSWISDPAEIRSRLEQQARAEGFSALGICAPDANPQLPERLAAFLEQGRHGQMGWMAERTHWRASPATLWPEARSVVMLAELYTPEHDPMAVLDHKNRGAVSVYAQGKDYHDLVKKRLKRLGGWLVGLTGCEIKVFVDTAPVMEKPLAQAAGLGWQGKHTNLLSRELGSWFFLGAIFTTLDLPKDAPEHSHCGSCRACLDACPTGAFPAPYQLDARRCISYLTIEHKGPVDPELRPMLGNRIYGCDDCLAACPWNKFAQAATELRYHGPHGAPVLAELAQLDDAGFRERFSGSPIKRIGRDRMVRNVLYAIGNSGLAHLRPLAEALRQDPDPGVADAAQWACERLP

SEQ ID NO: 79212 - protein, 348 aa, unidentified
  source 1..348: note = Paracoccus gahaiensis
  REGION 1..348: note = tr|A0A4U0RFB8|A0A4U0RFB8_9RHOB tRNA epoxyqueuosine(34) reductase QueG OS=Paracoccus gahaiensis; OX = 1706839 GN=queG PE=4 SV=1
MKDDIAAEAVAVGFARMGVTRPDGAPETAARLDAFLAEGHHGQMAWMAERVAWRGNAAALWPEARSVIMLAELYTPEGDPLAVLEQRDRAAVSVYAQGRDYHDLVKKRLKRLGRWMLEAAPEPGHQIKVFVDTAPVMEKPLAQAAGLGWQGKHTNLLSRDLGSWFFLGAIFSTMPLPADAPEGGHCGSCRACLDVCPTGAFPAPYRLDARRCISYLTIEHKGPVDPDLRALMGNRIYGCDDCLAVCPWNKFAQVGSEMRYRGIIDAPPLAELAGLDDAGFRARFSGSPIKRIGRDRFVRNVLYAIGNSGDAALVEVARGLCGDADPVVAEAAAWAVGRLEGRPDGLQG

SEQ ID NO: 79213 - protein, 369 aa, Paracoccus haeundaensis
  REGION 1..369: note = tr|A0A5C4R467|A0A5C4R467_9RHOB Epoxyqueuosine reductase OS=Paracoccus haeundaensis OX=225362 GN=queG; PE = 3 SV=1
MPSLTSAEGGGASPPSPGGDPPRGIWAKQKARIQAEARAVGFAAMGVMRPDGVPELAGRLADFVAQGRHGQMGWMAERMSWRGDPAALWPEARSVVMLAELYTPEGDPLAVLDQRDRAAVSVYAQGRDYHDLVKKRLKRLGRWMLETAPEPGHQIKVFVDTAPVMEKPLAQAAGLGWQGKHTNLLSRDLGSWFFLGAIFTTMPLPPDAPQVSHCGSCRACLDVCPTGAFPAPYQLDARRCISYLTIEHKGPVDPDLRALMGNRIYGCDDCLAVCPWNKFAQAGSEMRYRGIIDAPPLAELAGLDDAAFRARFSGSPIKRIGRDRFVRNVLYAIGNSGDAALAPVARGLTGDADPVVAEAASWAAARLAR

SEQ ID NO: 79214 - protein, 352 aa, Paracoccus halophilus
  REGION 1..352: note = tr|A0A099F5L9|A0A099F5L9_9RHOB Epoxyqueuosine reductase OS=Paracoccus halophilus OX=376733 GN=IT41_04895; PE = 4 SV=1
MRCSTSRTPLTDPAEIRARLDEQARAEGFSALGICAPDADPRLPERLAAFLDKDRHGQMGWMAERVHWRAAPAALWPEAQSVIMLAELYTPEHDPIEILKYPERGAVSVYAQGKDYHDIVKKRLKRLGGWLVGLTGCEIKVFVDTAPVMEKPLAQAAGLGWQGKHTNLLSRELGSWFFLGAVFTTLDLPKDTAEQEHCGSCRACLDACPTDAFPAPYQLDARRCISYLTIEHKGPVDPELRPLMGNRIYGCDDCLAACPWNKFARAATELRYHGPHGGPALAELAALDDAAFRARFSGSPIKRIGRDRMTRNVLYAIGNSGLAELRPIAQSLLDDPDPGVADAARWACERLP

SEQ ID NO: 79215 - protein, 369 aa, unidentified
  source 1..369: note = Paracoccus hibiscisoli
  REGION 1..369: note = tr|A0A4U0QNH2|A0A4U0QNH2_9RHOB Epoxyqueuosine reductase OS=Paracoccus hibiscisoli OX=2023261 GN=queG; PE = 3 SV=1
MPSLISAEGGGASPPSPDGDSPRDIWVKKKAETEAEARAVGFAAMGVMRPGGVPELAGRLADFVGRGRHGQMGWMAERMGWRGDPSALWPEARSVVMLAELYTPEGDPLAVLERRDRAAVSVYAQGRDYHDLVKKRLKRLGRWLLETAPEPGHQIKVFVDTAPVMEKPLAQAAGLGWQGKHTNLLSRDLGSWFFLGAIFTTMPLPPDAPQVSHCGSCRACLDVCPTGAFPAPYQLDARRCISYLTIEHKGPVEPELRALMGNRIYGCDDCLAVCPWNKFAQAGSEMRYRGIIDAPPLAELAGLDDAGFRARFSGSPIKRIGRDRFVRNVLYAIGNSGDAELAPVARGLEGDADPVVAEAASWAVARLAR

SEQ ID NO: 79216 - protein, 332 aa, Paracoccus homiensis
  REGION 1..332: note = tr|A0A1I0AF12|A0A1I0AF12_9RHOB Epoxyqueuosine reductase OS=Paracoccus homiensis OX=364199; GN = SAMN04489858_102205 PE=4 SV=1
MRVAAPDAVPELPERLRHFLDQGRHGQMGWMAERTHWRADPAALWPEARAVVMLAELYTPAGDPLEVLDRRDHAAVSVYAQGRDYHDLVKKRLKRVGRWLLEQHPGHQIKVFVDTAPVMEKPLAEAAGLGWQGKHTNLLARDLGSWFFLGAIFTTVPLPADAPEVSHCGSCRACLDICPTKAFPAPYQLDARRCISYLTIEHHGPVDPDLRPLMGNRIYGCDDCLAVCPWNKFAQAGSEMRYRGIIDAPPLAELAVLDDAGFRARFSGSPIKRIGRNRFVRNVLYAIGNSGDASLLPLARGLIGDPDETVADAADWAAAWLQDQSRKSSPSR

SEQ ID NO: 79217 - protein, 347 aa, unidentified
  source 1..347: note = Paracoccus laeviglucosivorans
  REGION 1..347: note = tr|A0A521FQP6|A0A521FQP6_9RHOB Epoxyqueuosine reductase OS=Paracoccus laeviglucosivorans OX=1197861; GN = queG PE=3 SV=1
MRFWISDPGEIRARLEEQARAEGFNALGICDPDANPHLPERLAEFLAQERHGQMEWMAERTAWRASPSALWPEARSVIMLAELYTPDHDPLAVLEQPDRGAVSVYAQGKDYHDLVKKRLKRLGGWLVNLTGCEIKVFVDTAPVMEKPLAQAAGLGWQGKHTNLLSRELGSWFFLGAIFTTLDLPKDQPARENCGSCRACLDACPTGAFPAPFQLDARRCISYLTIEHKGPVDPELRPMLGNRIYGCDDCLAACPWNKFAQDATELRYHGPHGAPALAELAALDDAAFRARFSGSPIKRIGRDRMVRNVLYAIGNSGLAHLRPVAEELRNDPDPTVADAAEWACERLP

SEQ ID NO: 79218 - protein, 347 aa, unidentified
  source 1..347: note = Paracoccus lutimaris
  REGION 1..347: note = tr|A0A368YQ66|A0A368YQ66_9RHOB Epoxyqueuosine reductase OS=Paracoccus lutimaris OX=1490030 GN=queG PE=3; SV = 1
MRSWISDPTDIRARLEEQARAEGFSALGICAPDANPQLPERLAAFLKADRHGQMGWMAERTAWRAAPDALWPEARSVIMLAELYTPEHDPVEILTHPDRGAVSVYAQGKDYHDIVKKRLKRLGGWLVGLTGCEIKVFVDTAPVMEKPLAQAAGLGWQGKHTNLLSRELGSWFFLGAIFTTLDLPKDAPEREHCGSCRSCLDACPTGAFPAPYQLDARRCISYLTIEHKGPVDPELRPLLGNRIYGCDDCLAACPWNKFAQAATELRYHGPHGGPALAEFAALDDAAFRERFSGSPIKRVGRDRMVRNVLYAIGNSGRPDLRPAAEALLHDPDPAVADAARWACGRLP

SEQ ID NO: 79219 - protein, 347 aa, unidentified
  source 1..347: note = Paracoccus mutanolyticus
  REGION 1..347: note = tr|A0A2Z4PD90|A0A2Z4PD90_9RHOB Epoxyqueuosine reductase OS=Paracoccus mutanolyticus OX=1499308 GN=queG; PE = 3 SV=1
MRCWISDPAEIRSRLTEQARAEGFSALGICAPDANPQLPERLAAFLEQGRHGQMDWMADRAHWRADPSALWPEARSVIMLAELYTPGHDPLAVLDQRDRGAVSVYAQGRDYHDLVKKRLKRLGGWLVNLTGCEIKVFVDTAPVMEKPLAQAAGLGWQGKHTNLLSRDLGSWFFLGAIFTTLELPRDAPERERCGSCRACLDACPTGAFPAPYQLDARRCVSYLTIEHRGPVDPELRPMLGNRIYGCDDCLAACPWNKFAQEASEMRYHGPHGAPALAELAQLDDAAFRARFSGSPIKRIGRDRMVRNVLYAIGNSGLAHLRPLAEALRDDPDPAVADAAGWACERLP

SEQ ID NO: 79220 - protein, 335 aa, Paracoccus pantotrophus
  REGION 1..335: note = tr|A0A495PRU5|A0A495PRU5_PARPN Epoxyqueuosine reductase OS=Paracoccus pantotrophus OX=82367; GN = BDE18_0665 PE=4 SV=1
MRLEQQARAEGFSALGICAPDANPQLPERLAAFLAEGRHGQMGWMAERAHWRASPASLWPEARSVVMLAELYTPEHDPMEAVRHKDRGTVSVYAHGKDYHDLVKKRLKRLGGWLVGLTGCEIKVFVDTAPVMEKPLAQAAGLGWQGKHTNLLSRELGSWFFLGAIFTTLELPKDAAERSHCGSCRACLDACPTGAFPAPYQLDARRCISYLTIEHKGPVDPELRPMLGNRIYGCDDCLAACPWNKFAQAATELRYHGPHGAPALAELAQLDDAGFREHFSGSPIKRIGRDRMVRNVLYAIGNSGLAHLRPLAEALADDPDPAVADAARWACERLP

SEQ ID NO: 79221 - protein, 350 aa, Paracoccus pantotrophus; identical to SEQ ID NO: 79207
  REGION 1..350: note = tr|A0A1K1Y6U4|A0A1K1Y6U4_PARPN Epoxyqueuosine reductase OS=Paracoccus pantotrophus OX=82367; GN = SAMN04244548_01431 PE=4 SV=1

SEQ ID NO: 79222 - protein, 363 aa, unidentified
  source 1..363: note = Paracoccus salipaludis
  REGION 1..363: note = tr|A0A2A2GL87|A0A2A2GL87_9RHOB tRNA epoxyqueuosine(34) reductase QueG OS=Paracoccus salipaludis OX=2032623 GN=queG PE=4 SV=1
MPSLISEERGALPPAGSAGSPQDIWAKKKELVARASAEGFSAARVTRPDAIPQAAGRLAEYVAQGRHGQMDWMAERMNWRGAPDALWPEAQSVIMLAEAYTPGHDPREDLARPDRGAVSVYAQGKDYHDIVKARLKRLGRWMLERWGGEIKVFVDTAPLMEKPLAQAAGLGWQGKHTNLLSRDLGNWFFLGAIFTTLPLPPDPPEAEHCGSCRACLDACPTGAFPAPFQLDARRCISYLTIEHKGPVDPELRPMLGNRIYGCDDCLAACPWNKFAVQAQEMRYHGPHRAPALDELARLDDAGFRARFSGSPIKRIGRDRMVRNALYAIGNSGQARLRPVAQGLVDDPDPAVADAARWAAGRLA

SEQ ID NO: 79223 - protein, 298 aa, Paracoccus saliphilus
  REGION 1..298: note = tr|A0A1N7LUR8|A0A1N7LUR8_9RHOB Epoxyqueuosine reductase OS=Paracoccus saliphilus OX=405559; GN = SAMN05421772_104202 PE=4 SV=1
MNWMAERTHWRGDPAALWPEARSVIMLAELYTPDHDPLAVLEQPDRAAISVYAQGKDYHDLVKKRLKRLGRWLLEQEQGHEIKVFVDTAPVMEKPLAEAAGLGWQGKHTNLLSRDLGSWFFLGAIFTTLELPVDEPEAEHCGSCRACLDICPTNAFPAPFQLDARRCISYLTIEHKGPVDLELRELMGNRIYGCDDCLAVCPWNKFAQAGTEMRYRGIVEAPPLEELALLDDAGFRARFSGSPIKRIGRDRFVRNVLYAIGNSEEPRLAEAARPLVNDPDEAVADAARWALLRLALQP

SEQ ID NO: 79224 - protein, 340 aa, unidentified
  source 1..340: note = Paracoccus sanguinis
  REGION 1..340: note = tr|A0A099G5F3|A0A099G5F3_9RHOB Epoxyqueuosine reductase OS=Paracoccus sanguinis OX=1545044 GN=IX56_17105; PE = 4 SV=1
MFARKNLILGRARDEGFSAVGVTTPEAIPQAAGRLAAFLDAGRHGQMVWMEERAGWRGDPAALWPAARSVVMLAESYAPGHDPLDDLGRRDRGAISVYAQGKDYHDIVKPRLKRLGRWMIERFGGEIKVFVDTAPVMEKPLAQAAGLGWQGKHTNLLSRGLGNWFFLGAIFTTLELPPDTPEGEHCGSCRACLDICPTGAFPAPFQLDARRCISYLTIEHRGPVDPELRARMGNRVFGCDDCLAVCPWNKFAVAAADLRYHGPHRAPALAELAGLDDAGFRARFAGTPVKRIGRDRLVRNALYAIGNSGMPALRPVAQGLCEDADPAVADAARWAVGRLS

SEQ ID NO: 79225 - protein, 319 aa, unidentified
  source 1..319: note = Paracoccus sanguinis
  REGION 1..319: note = tr|A0A1H2TVI3|A0A1H2TVI3_9RHOB Epoxyqueuosine reductase OS=Paracoccus sanguinis OX=1545044; GN = SAMN05444276_1011089 PE=4 SV=1
MTTPDAIPQAAGRLAAFLDAGRHGQMGWLEERALWRGDPAALWPEARSVVMLAESYAPGHDPLDDLGRRDRGAISVYAQGKDYHDIVKPRLKRLGRWMIERFGGEIKVFVDTAPVMEKPLAQAAGLGWQGKHTNLLSRDLGNWFFLGAIFTTLELPADAPEGEHCGSCRACLDICPTGAFPAPFQLDARRCISYLTIEHRGPVDPELRARMGNRVFGCDDCLAICPWNKFAVAAADLRYHGPHRAPALAELAGLDDAGFRARFAGTPVKRIGRDRLVRNALYAIGNSGIPALRPVAQGLCEDADPAVADAARWAVGRLS

SEQ ID NO: 79226 - protein, 344 aa, unidentified
  source 1..344: note = Paracoccus sediminis
  REGION 1..344: note = tr|A0A238W7Z3|A0A238W7Z3_9RHOB Epoxyqueuosine reductase OS=Paracoccus sediminis OX=1214787; GN = SAMN06265378_103426 PE=4 SV=1
MRVTTPDAVPEVARRLQQFLEAGRHGQMAWMAERTHWRGDPAALWPEARSVIVLAELYTPDHDPLAVLDQPDRAAISVYAQGRDYHDLVKKRLKRLGRWLMDQAPGEAIKVFVDTAPVMEKPLAQAAGLGWQGKHTNLLSRDLGSWFFLGSIFTTIPLPPDAPEREHCGSCRACLDACPTDAFPAPFQLDARRCISYLTIEHKGPVDPQLRPLMGNRIYGCDDCLAVCPWNKFARAGSEMRYRGAEPAPRLADLAALDDAGFRERFSGSPIKRIGRDRFVRNVLYAIGNSGRADLADVARGLTADGDPAVADAACWAIGRLERAQGVTTGNRPRQDRCGPAGAP

SEQ ID NO: 79227 - protein, 368 aa, Paracoccus seriniphilus
  REGION 1..368: note = tr|A0A239PMK2|A0A239PMK2_9RHOB Epoxyqueuosine reductase OS=Paracoccus seriniphilus OX=184748 GN=queG; PE = 3 SV=1
MPNSISDRSPEPAAPADGGRDDKGLHEFKQALDVQAREMGFAQMRVTRPDSVPRIAERLQEFLRANRHGQMGWMAERTHWRGDPAALWPEARSVIMLAELYTPDHDPLEVLKHPGLGAVSVYAQGRDYHDIVKKRLKRLGRWLLEHHPDEQIKVFVDTAPVMEKPLAQAAGLGWQGKHTNLLSRELGSWFFLGAIFTTCALPPDPPETERCGSCRACLDICPTSAFPAPFQLDARRCISYLTIEHRGPVDPDLRAMMGNRIYGCDDCLAVCPWNKFARQGQEMRYRGIIDAPPLTELAALDDAAFRARFSGSPIKRIGRDRMVRNVLYAIGNSGQPQLRPVAQGLTDDPDEAVADAARWAATRLSVPD

SEQ ID NO: 79228 - protein, 345 aa, unidentified
  source 1..345: note = Paracoccus siganidrum
  REGION 1..345: note = tr|A0A418ZR06|A0A418ZR06_9RHOB tRNA epoxyqueuosine(34) reductase QueG OS=Paracoccus siganidrum; OX = 1276757 GN=queG PE=4 SV=1
MKAALAEEARAVGFSRMRVTRPDAVPEIADRLRAFLEAGRHGQMGWMEERSHWRGDPAALWPEARSVIVLAEVYTPDHDPLEVLESRDRAAVSVYAQGRDYHDLVKKRLKRLGRWLLEEARRQGAPDAQIKVFVDTAPVMEKPLAQAAGMGWQGKHTNLLSRDLGNWFFLGSIFTTLALPPDPPEEQHCGNCRACLDICPTGAFPAPFQLDARRCISYLTIEHRGPVDPELRPLMGNRVYGCDDCLAICPWNKFAREGAEMRYRGLVGAPPLAELAMLDDAGFRARFSGSPIKRIGRDRLVRNVLYAIGNSGRPDLAAVAQGLTQDADAAVADAARWAVGRLRPR

SEQ ID NO: 79229 - protein, 337 aa, Paracoccus solventivorans
  REGION 1..337: note = tr|A0A1M7J2H1|A0A1M7J2H1_9RHOB Epoxyqueuosine reductase OS=Paracoccus solventivorans OX=53463; GN = SAMN05444389_11070 PE=4 SV=1
MKKALVARALDEGFSAVRVTTPDAIPQAAARLAEYVAQGRHGQMGWMEERMHWRGAPDALWPEARAVVMLAETYTPPHDPREDLARRDRGAVSVYAQGKDYHDIVKARLKRVGRWLIEQAGGEIKVFVDTAPVMEKPLAQAAGLGWQGKHTNLVSRELGSWFFLGAIFTTLPLPPDPPEPDRCGSCRACLDACPTNAFPAPFQLDARRCISYLTIEHKGPVDEELRPLLGNRIYGCDDCLAACPWNKFAAEAREMRYHGPHRAPPLAELAVLDDAAFRARFSGSPIKRIGRDRMVRNVLYAIGNSGDPALRPLAAARLGDPDPAVADAAAWALGRLP

SEQ ID NO: 79230 - protein, 340 aa, Paracoccus sp.
  REGION 1..340: note = tr|A0A2D8WXA8|A0A2D8WXA8_9RHOB tRNA epoxyqueuosine(34) reductase QueG OS=Paracoccus sp. OX=267; GN = queG PE=4 SV=1
MKEALAAEALAAGFAKMRVARPDAIPEAAGRLRAFLQAGRHGQMGWMAERSHWRGDPAALWPEARSVVMLADLYTPDHDPLAVLEARDRAAISVYAQGRDYHDLVKKRLKRLGRWMLTRHQDEAIKVFVDTAPVMEKPLAQAAGLGWQGKHTNLLARDLGSWFFLGAIFTTLDLPPDPPEDEHCGSCRACLDICPTGAFPAPFQLDARRCISYLTIEHKGPVDPELRPLMGNRIYGCDDCLAVCPWNKFAREGSEMRYRGIAGAPTLAELAVLDDAGFRARFAGSAIKRIGRNRFIRNVLYAIGNSADRRLAPVARNLRGDADPVVADAATWAEARLTER

SEQ ID NO: 79231 - protein, 343 aa, Paracoccus sp.
  REGION 1..343: note = tr|A0A1L9BRB0|A0A1L9BRB0_9RHOB Epoxyqueuosine reductase OS=Paracoccus sp. SM22M-07 OX=1520813 GN=queG; PE = 3 SV=1
MWAKKKAEIETEAKAIGFSRMGVTTTDAVPELAGRLAAFLEAGRHGQMDWMAERTHWRGDPQALWPEARSVIMLAELYTPDHDPLAVLDQRDRAAVSVYAQGKDYHDLVKKRLKRLGRWMLEQTPGHQIKVFVDTAPVMEKPLAQAAGLGWQGKHTNLLSRDLGSWFFLGAIFSTLPLPPDAPQGEHCGSCRACLDVCPTGAFPAPFQLDARRCISYLTIEHKGPVDPELRPLMGNRIYGCDDCLAVCPWNKFAQSGTEMRYRGIIDAPPLAELALLDDAGFRARFSGSPIKRIGRDRFVRNVLYAIGNSGDATLIPVAQGLCGDPDRAVADAAAWAVARLAD

SEQ ID NO: 79232 - protein, 339 aa, Paracoccus sphaerophysae
  REGION 1..339: note = tr|A0A099FGE4|A0A099FGE4_9RHOB Epoxyqueuosine reductase OS=Paracoccus sphaerophysae OX=690417 GN=queG; PE = 3 SV=1
MSAKKKLILDRARVEGFSAARVTTPDAIPQAAGWLAEFVAAGRHGQMSWMAERMGWRGDPAALWPAARSVVMLAESYAPPHDPRADLARPDRGAVSVYAQGKDYHDIVKARLKRLGRWMIDSFGGDIKVFVDTAPVMEKPLAQAAGLGWQGRHTNLLSRDLGNWFFLGAIFTTLPLTPDAPEAEHCGSCRACLDVCPTDAFPGPFRLDARRCISYLTIEHRGPVDEALRPLMGNRIYGCDDCLAVCPWNKFAAEAADLRYHGPHRAPPLEELAALDEAGFRARFAGSPIKRIGRDRMVRNALYAIGNSALPRLRPVAQARVDDPDPAVADAARWAVARL

SEQ ID NO: 79233 - protein, 347 aa, Paracoccus sulfuroxidans
  REGION 1..347: note = tr|A0A562NQ71|A0A562NQ71_9RHOB Epoxyqueuosine reductase OS=Paracoccus sulfuroxidans OX=384678; GN = IQ24_01862 PE=4 SV=1
MRCLISDPAEIRQRLEEQAHVEGFSALGICAPDAAPALPERLAAFLADGHQGQMEWLADRSHWRADPTALWPEARSIIMLAELYTPEHDPMQVLHQKDRGAVSVYAQGKDYHDLVKKRLKRLGRWLIDTAGGEIKVFVDTAPVMEKPLAQAAGLGWQGKHTNLLSRQLGSWFFLGAIFTTHELPRDAPEVQHCGNCTACLDACPTKAFPAAFQLDARRCISYLTIEHKGPVDPELRPLLGNRIYGCDDCLAVCPWNKFAQAATEMRYHGPHGAPALAELAMLDDAGFRALYSGSPIKRIGRDRMVRNVLYAIGNSGLAELRPVAQSLLDDPDPTVADAARWASARLK

SEQ ID NO: 79234 - protein, 350 aa, Paracoccus thiocyanatus
  REGION 1..350: note = tr|A0A3D8PHT8|A0A3D8PHT8_9RHOB tRNA epoxyqueuosine(34) reductase QueG OS=Paracoccus thiocyanatus OX=34006 GN=queG PE=4 SV=1
MRCSTSKAADPAEIRSRLEMQARAEGFSALGICAPGANPQLPERLAAFLEQGRHGQMGWMAERAHWRASPPTLWPQARSVVMLAELYTPEHDPMAVIGHKDRGAVSVYAQGKDYHDLVKKRLKRLGGWLVGLTGCEIKVFVDTAPVMEKPLAQAAGLGWQGKHTNLVSRELGSWFFLGAIFTTLDLPKDAAEPSHCGSCRACLDACPTGAFPAPYQLDARRCISYLTIEHKGPVDPELRPSLGNRIYGCDDCLAACPWNKFAQAASELRYHGPHGAPVLAELAALDDAAFRERFSGSPIKRIGRDRMVRNVLYAIGNSRLAHLRPVAQALQDDPDPAVADAARWACERLP

SEQ ID NO: 79235 - protein, 350 aa, Paracoccus thiocyanatus
  REGION 1..350: note = tr|A0A1N6S147|A0A1N6S147_9RHOB Epoxyqueuosine reductase OS=Paracoccus thiocyanatus OX=34006; GN = SAMN05421641_106162 PE=4 SV=1
MRCSTSKAADPAEIRSRLEMQARAEGFSALGICAPDANPQLPERLAAFLEQGRHGQMGWMAERAHWRASPPTLWPQARSVVMLAELYTPEHDPMAVIGHKDRGAVSVYAQGKDYHDLVKKRLKRLGGWLVGLTGCEIKVFVDTAPVMEKPLAQAAGLGWQGKHTNLVSRELGSWFFLGAIFTTLDLPKDAAEPGHCGSCRACLDACPTGAFPAPYQLDARRCISYLTIEHKGPVDQELRPSLGNRIYGCDDCLAACPWNKFAQAASELRYHGPHGAPALAELAALDDAGFRERFSGSPIKRIGRDRMVRNVLYAIGNSGLAHLRPVAQALQDDPDPAVADAARWACERLP

SEQ ID NO: 79236 - protein, 337 aa, unidentified
  source 1..337: note = Paracoccus tibetensis
  REGION 1..337: note = tr|A0A1G5EVE5|A0A1G5EVE5_9RHOB Epoxyqueuosine reductase OS=Paracoccus tibetensis OX=336292; GN = SAMN05660710_01250 PE=4 SV=1
MASEAEAVGFSGMGVTRPDAVPGLAERLAAFLEAGRHGQMAWMAERRHWRGDPAALWPEARSVVMLAELYTPESDPLAVLEQREQAAISVYAQGKDYHDLVKKRLKRLGRWLLETAPEPGHQIKVFVDTAPVMEKPLAAAAGLGWQGKHTNLLSRGLGSWFFLGAIFTTMPLPADTPEREHCGSCRACLDACPTGAFPAPFQLDARRCISYLTIEHKGPVDPELRPLMGNRIYGCDDCLAVCPWNKFAQAGSEMRYRGIVGAPPLAELAALDDAGFRARFSGSPIKRIGRDRFVRNVLYAIGNSGSAGLREVAAGLVGDPDPAVADAARWAVARLGG

SEQ ID NO: 79237 - protein, 350 aa, Paracoccus versutus
  REGION 1..350: note = tr|A0A369U1S7|A0A369U1S7_PARVE tRNA epoxyqueuosine(34) reductase QueG OS=Paracoccus versutus; OX = 34007 GN=queG PE=4 SV=1
MRCSTSRPTDPAEIRSRLEQQARAEGFSALGICAPDANPQLPERLAAFLEQGRHGQMGWMAERAHWRASPGSLWPEARSVIMLAELYTPEHDPMEVIGHKDRGAVSVYAQGKDYHDLVKKRLKRLGGWLVGLTGCEIKVFVDTAPVMEKPLAQAAGLGWQGKHTNLLSRELGSWFFLGAIFTTLELPRDAAERSHCGSCRACLDACPTGAFPAPYQLDARRCISYLTIEHKGPVDPELRPSLGNRIYGCDDCLAACPWNKFAQEATELRYHGPHGAPALAELAALDDAGFRERFSGSPIKRIGRDRMVRNVLYAIGNSGLAHLRPLVESLADDPDPAVADAARWACERLP

SEQ ID NO: 79238 - protein, 350 aa, Paracoccus versutus; identical to SEQ ID NO: 79207
  REGION 1..350: note = tr|A0A3E0CB14|A0A3E0CB14_PARVE Epoxyqueuosine reductase OS=Paracoccus versutus OX=34007 GN=ATH84_100755; PE = 4 SV=1

SEQ ID NO: 79239 - protein, 347 aa, Paracoccus yeei
  REGION 1..347: note = tr|A0A386UIN1|A0A386UIN1_9RHOB Epoxyqueuosine reductase OS=Paracoccus yeei OX=147645 GN=queG PE=3 SV=1
MRCWISDPAEIRSRLTEQAQAEGFSALGICAPDANPQLPERLAAFLEQGRHGQMDWMADRAHWRADPSALWPEARSVIMLAELYTPGHDPLAVLDQRDRGAVSVYAQGRDYHDLVKKRLKRLGGWLVNLTGCEIKVFVDTAPVMEKPLAQAAGLGWQGKHTNLLSRDLGSWFFLGAIFTTLELPRDAPERERCGSCRACLDACPTGAFPAPYQLDARRCVSYLTIEHRGPVDPELRPGLGNRIYGCDDCLAACPWNKFAQEASEMRYHGPHGAPALAELAQLDDAAFRARFSGSPIKRIGRDRMVRNVLYAIGNSGLAHLRPLAEALRDDPDPAVADAAGWACERLP

SEQ ID NO: 79240 - protein, 347 aa, Paracoccus yeei
  REGION 1..347: note = tr|A0A1V0GT57|A0A1V0GT57_9RHOB Epoxyqueuosine reductase OS=Paracoccus yeei OX=147645 GN=queG PE=3 SV=1
MRCWISDPAEIRSRLTEQAQAEGFSALGICAPDANPQLPERLAAFLEQGRHGQMDWMADRAHWRADPSALWPEARSVIMLAELYTPGHDPLAVLDQRDRGAVSVYAQGRDYHDLVKKRLKRLGGWLVNLTGCEIKVFVDTAPVMEKPLAQAAGLGWQGKHTNLLSRTLGSWFFLGAIFTTLELPRDAPEAERCGSCRACLDACPTGAFPAPYQLDARRCVSYLTIEHRGPVDPELRPGLGNRIYGCDDCLAACPWNKFAQEASELRYHGPHGAPALAELAQLDDAAFRARFSGSPIKRIGRDRMVRNVLYAIGNSGLAHLRPLAEALRDDPDPAVADAAGWACERLP

SEQ ID NO: 79241 - protein, 340 aa, unidentified
  source 1..340: note = Paracoccus zhejiangensis
  REGION 1..340: note = tr|A0A2H5F2H0|A0A2H5F2H0_9RHOB tRNA epoxyqueuosine(34) reductase QueG OS=Paracoccus zhejiangensis OX=1077935 GN=queG PE=4 SV=1
MKADLATQAGIEGFAKMGVCRPDAVPQLPARLAEFLEAGREGQMGWMAERTGWRGNPAALWPEARSVVMLAEVYSPDHDPLAVLDQPDRAAVSVYAQGKDYHDLVKKRLKRLGRWLIDAHGGEIKVFVDTAPVMEKPLAQAAGLGWQGRHTNLLARDLGSWFFLGAIFTTLDLPPDPPEVEHCGNCRACLDICPTGAFPAPFQLDARRCISYLTIEHKGPVDPDLRALMGNRIYGCDDCLAVCPWNKFAREASELRYRGVIDAPPLAELATLDDAGFRARFSGSPIKRIGRDRFVRNVLYAIGNSGLPQLRAVAQGLTGDADPTVADAARWAAGRLEFPA

SEQ ID NO: 79242 - protein, 410 aa, Paracraurococcus sp.
  REGION 1..410: note = tr|A0A4R4DNX5|A0A4R4DNX5_9PROT Epoxyqueuosine reductase OS=Paracraurococcus sp. NE82 OX=2527868 GN=queG; PE = 3 SV=1
MLQSIEAPGTRESVEAGRAAAEAIRAEALRLGFGTVGFTEALLPEAVRARLEDFLAAGMHGSMGWMADRAAQRAQPRGLWPEAVSVVTLGMNYGPAENPLAALARRDRGAISVYAQGRDYHDVVKSRLKQLGRWMVQRFKGSELKVFVDTAPVAEKPLAQRAGLGWQGKHTNLVSRSHGSWLFLGEVYTTLALPPDPPERDHCGGCHRCLDICPTAAFPAPYRLDARRCLSYLTIEHKGPIPEEFRVPMGNRIYGCDDCLAVCPWNKFAKAHSEPGFAPRAALRAPKLADLAALDDAGFRALFSGSPVKRIGRDRFVRNVMIAVGNSGDPSLRPVAQARAEDADPVVAEAARWAVGRLDEAGTIAPPPSHACGAGSATGRQPLPGVAGVRRTAPNGVEVPHHPRRLADEP

SEQ ID NO: 79243 - protein, 311 aa, unidentified
  source 1..311: note = Parafilimonas terrae
  REGION 1..311: note = tr|A0A1I5WKT4|A0A1I5WKT4_9BACT Epoxyqueuosine reductase OS=Parafilimonas terrae OX=1465490 GN=queG PE=3; SV = 1
MNKIHHTKFIKDSAEQLGFHYCGIAKAVKLDDDARRLEQWLQQGMHGNMHYMENYFDLRTDPRKLVPGAKSVITLLLNYFPSKQQEQDIPKISKYAYGKDYHEMIREKLNSLLELIRQNIGDINGRGFVDSAPVLERSWAVRSGAGWIGKNGNLITKQQGSFFFIATLITDLDLIADDAFAKDYCGSCRKCIDHCPTNAIQANKVIDGSRCISYFTIELKDAIIPAEMQGKFEHWMFGCDICQDVCPWNRFSKPTEEIAFTPIPEILNLSTKEWESMSEEAFRKTFKYSPLKRAKYKGLQRNLKFIQTTKL

SEQ ID NO: 79244 - protein, 380 aa, unidentified
  source 1..380: note = Parageobacillus caldoxylosilyticus
  REGION 1..380: note = tr|A0A150L3L9|A0A150L3L9_9BACI Epoxyqueuosine reductase OS=Parageobacillus caldoxylosilyticus OX=81408; GN = queG PE=3 SV=1
MDVMALKQEIIEYSKTIGIDKIGFASADPFVELKERLRRQQELGYQSGFEEPDIEKRTTPSLLLPEAKSIIAIALAYPSKMRNAPRGTKTERRGIFCRASWGKDYHDILRERLEKLEAFILEKVPQARVKSMVDTGELADRAVAERAGIGWSGKNCSIITPEFGSFVYLGEMITNIPFPPDEPIESRCGTCTKCIDACPTGALVQGGQLNAQRCISLLTQTKGFLADEFRDKIGNRLYGCDTCQMVCPENKGKDFHLHPEMEPDPEVAKPKLIPLLHISNREFKEKFGPVAGSWRGKKPIQRNAILALAHYKDKTAIPHLLKLLKEDRRPVIRGTAAWALGKIGDTSVITDLQKASQTEKDPEVLAEIEKGLQLLQASKE

SEQ ID NO: 79245 - protein, 380 aa, unidentified; identical to SEQ ID NO: 79244
  source 1..380: note = Parageobacillus caldoxylosilyticus
  REGION 1..380: note = tr|A0A023DJ23|A0A023DJ23_9BACI Epoxyqueuosine reductase OS=Parageobacillus caldoxylosilyticus NBRC 107762 OX=1220594 GN=queG PE=3 SV=1

SEQ ID NO: 79246 - protein, 380 aa, unidentified
  source 1..380: note = Parageobacillus genomosp.
  REGION 1..380: note = tr|A0A023CS82|A0A023CS82_9BACI Epoxyqueuosine reductase OS=Parageobacillus genomosp. 1 OX=1295642; GN = queG PE=3 SV=1
MDVTALKQEIIEYSKMIGIDKIGFASADPFVELKERLRRQQELGYQSGFEEPDIEKRTNPSLLLPEAKSIIAIALAYPSKMRNAPRGTKTERRGIFCRASWGKDYHDILRERLEKLETFILEKVPQARVKSMVDTGELADRAVAERAGIGWSGKNCSIITPEFGSYVYLGEMITNIPFPPDEPVENRCGTCTKCIDACPTGALVQGGQLNAQRCIAFLTQTKGFLADEFRNKIGNRLYGCDTCQMVCPANKGKDFHLHPEMEPDPEVAKPKLIPLLHISNREFKEKFGPVAGSWRGKKPIQRNAILALAHYKDKTAIPHLLKLLKEDSRPVIRGTAAWALGKIGDTNVIPDLQEASQTEKDPEVLAEIEKGLQLLQASKE

SEQ ID NO: 79247 - protein, 390 aa, unidentified
  source 1..390: note = Parageobacillus thermantarcticus
  REGION 1..390: note = tr|A0A1I0TXQ7|A0A1I0TXQ7_9BACI Epoxyqueuosine reductase OS=Parageobacillus thermantarcticus OX=186116; GN = queG PE=3 SV=1
MDAAALKQEIIEYSKTIGIDKIGFASADPFVELKERLRRQQELGYQSGFEEPDIEKRTNPSLLLPEAKSIIAIALAYPSKMKNAPRGTKTERRGIFCRASWGKDYHDVLRERLEKLEAFILERVPHARMKSMVDTGELADRAVAERAGIGWSGKNCSIITPEFGSYVYLGEMITNIPFPPDEPIESRCGTCTKCIDACPTGALVQGGQLNAQRCISFLTQTKGFLADEFRDKIGNRLYGCDTCQMVCPENKRKDFHIHPEMEPDPEVVKPKLIPLLHISNREFKEKFGSLAGAWRGKKPIQRNAILALAHYKDKTAVPHLLKLLKEDSRPVIRGTAAWALGKIGDTRVVSDLEEASRMEKDPEVLSEIQKGLQLLCSKNEEKGKNRSPLT

SEQ ID NO: 79248 - protein, 389 aa, unidentified
  source 1..389: note = Parageobacillus thermoglucosidasius
  REGION 1..389: note = tr|A0A1B7KUD4|A0A1B7KUD4_PARTM Epoxyqueuosine reductase OS=Parageobacillus thermoglucosidasius OX=1426; GN = queG PE=3 SV=1
MDAAALKKEIIEYSKTIGIDKIGFASADPFVELKERLRRQQELGYQSGFEEQDVEKRTNPSLLLPEAKSIIAIALAYPSKMKNAPRGTKMERRGIFCRASWGKDYHDVLRERLGKLEAFILERVPHAKVKSMVDTGELADRAVAERAGIGWSGKNCSIITPEFGSYVYLGEMITNIPFPPDEPIESRCGTCTKCIDACPTGALVQGGQLNAQRCISFLTQTKGFLADEFRDKIGNRLYGCDTCQMVCPENKGKDFHLHPEMEPDPEVVKPKLIPLLHISNREFKEKFGSLAGAWRGKKPIQRNAILALAHYKDKTAVPHLLKLLKEDSRPVIRGTAAWALGKIGDTRVVPDLEEASRTEKDREVLSEIQKGLQLLHSNEEKGKNRSPAT

SEQ ID NO: 79249 - protein, 389 aa, unidentified
  source 1..389: note = Parageobacillus thermoglucosidasius
  REGION 1..389: note = tr|A0A401XXU8|A0A401XXU8_PARTM Epoxyqueuosine reductase OS=Parageobacillus thermoglucosidasius OX=1426; GN = queG PE=3 SV=1
MDAAALKQEIIEYSKTIGIDKIGFASADPFVELKERLRRQQELGYQSGFEEQDIEKRTNPSLLLPEAKSIIAIALAYPSKMKNAPRGTKMERRGIFCRASWGKDYHDVLRERLEKLEAFILEKVPHARVKSMVDTGELADRAVAERAGIGWSGKNCSIITSEFGSYVYLGEMITNIPFPPDEPVESRCGTCTKCIDACPTGALVQGGQLNAQRCISFLTQTKGFLADEFRDKIGNRLYGCDTCQMVCPENKGKDFHLHPEMEPDPEVVKPKLIPLLHISNREFKEKFGSLAGAWRGKKPIQRNAILALAHYKDKTAVPHLLKLLKEDSRPVIRGTAAWALGKIGDMRVIPDLEEAGRTEKDHEVLLEIQKGLQLLRSKQEKGKNRSPAT

SEQ ID NO: 79250 - protein, 389 aa, unidentified; identical to SEQ ID NO: 76996
  source 1..389: note = Parageobacillus toebii
  REGION 1..389: note = tr|A0A150MJE8|A0A150MJE8_9BACI Epoxyqueuosine reductase OS=Parageobacillus toebii OX=153151 GN=queG PE=3; SV = 1

SEQ ID NO: 79251 - protein, 389 aa, unidentified; identical to SEQ ID NO: 76991
  source 1..389: note = Parageobacillus toebii
  REGION 1..389: note = tr|A0A3M0EY03|A0A3M0EY03_9BACI Epoxyqueuosine reductase OS=Parageobacillus toebii NBRC 107807 OX=1223503; GN = queG PE=3 SV=1

SEQ ID NO: 79252 - protein, 397 aa, unidentified
  source 1..397: note = Paraglaciecola agarilytica
  REGION 1..397: note = tr|K6X3Q6|K6X3Q6_9ALTE Epoxyqueuosine reductase; OS = Paraglaciecola agarilytica NO2 OX=1125747 GN=queG PE=3; SV = 1
MSFAQYDLHQLAQNIKAWGEALGFQQVGIADIDLSRHEHKLQAWLDEGYHGQMNFMAEHGMKRARPAELLPGTLRVISVRMDYLPPDAKFAQTLKNKDTAYISRYALGRDYHKLLRNRLKKLGEKIRSECTTTNFRPFVDSAPVLEHALAEKAGIGWTGKHSLTLNKEGGSWFFLGELFIDIPLPVDEPVEEQCGSCNACITICPTQAIVAPYVVDAKRCISYLTIELKGAIPEEFRRALGNRIYGCDDCQLICPWNRYAKLTKESDFHPRDMLQDKTLAELAYWDESTFLKNTEGSAIRRIGHERWQRNIAVALGNAPYSQQICEVLTKLEVSGTDLVKEHAQWALKEQEAKKQLSLEVVNISDDTDTDDSLLPKQAQRLNQRLIRSIEKGLTRDA

SEQ ID NO: 79253 - protein, 381 aa, unidentified
  source 1..381: note = Paraglaciecola arctica
  REGION 1..381: note = tr|K6Z6B9|K6Z6B9_9ALTE Epoxyqueuosine reductase; OS = Paraglaciecola arctica BSs20135 OX=493475 GN=queG PE=3; SV = 1
MSFLNTSELLSLSENIKAWGKALGFQQVGICDVNLEQHESHLQSWLEKGYAGEMHYMAEHGMKRARPAELLPGTMRVISVRMDYLPPDAKFAQTLKNKQQAYISRYALGRDYHKLLRARLKKLGDKIKAECAELNFRPFVDSAPVLEHAIAEKAGIGWTGKHSLTINKEAGSWFFLGELFVDIPLPVDKAVVENCGSCTACLTICPTQAIVEPYVVDARRCISYLTIEQKGAIPEQYRSLIGNRVYGCDDCQLICPWNRYANITDEADFHPRQKLMSQELIDLFAWNEETFLKNTEGSPIRRIGFERWQRNLAVGLGNAAYSERIVNTLQAALSQATDLVKEHIQWALQQHQNKASQNEKNDSRLTQRLVRSIEKGLVRDA

SEQ ID NO: 79254 - protein, 383 aa, unidentified
  source 1..383: note = Paraglaciecola hydrolytica
  REGION 1..383: note = tr|A0A136A508|A0A136A508_9ALTE Epoxyqueuosine reductase OS=Paraglaciecola hydrolytica OX=1799789 GN=queG; PE = 3 SV=1
MTQLDTQALVLLAENIKAWGKTLGFQQVGICDVDLSQHEGRLQNWLDQGYAGEMHYMSEHGMKRARPAELQPGTLRAISVRMDYLPPDAQFARSLKNKNQAYISRYALGRDYHKLMRARLKQLGEKIKAECGELNYRPFVDSAPVLEHALAEKAGLGWTGKHSLTLNKKAGSWFFLGELLIDLPLPVDAPATEHCGSCTACITICPTQAIVEPYVVDARRCISYLTIEQKGAIPTEFRTLIGNRIYGCDDCQLICPWNRYASITAEADFQPRKDLLAKELVDLFNWDEQTFLKLTEGSAIRRIGYERWQRNLAVGLGNAPYSSEIVDVLIKAKAQASDLVKEHIDWALEQQAIKALAIKAPEPQQRLTERLIRSVEKGLPRDA

SEQ ID NO: 79255 - protein, 397 aa, unidentified
  source 1..397: note = Paraglaciecola mesophila
  REGION 1..397: note = tr|K6YPJ6|K6YPJ6_9ALTE Epoxyqueuosine reductase; OS = Paraglaciecola mesophila KMM 241 OX=1128912 GN=queG; PE = 3 SV=1
MSFAQYDLHQLAQNIKAWGEALGFQQVGIADIDLSTHENKLQSWLDSGYNGQMNFMAEHGMKRARPAELLPGTLRVISVRMDYLPPDAKFAHTLRNKESAYISRYALGRDYHKLLRNRLKKLGEKIRTQCTTANFRPFVDSAPVLEHALAEKAGIGWTGKHSLTLNQQGGSWFFLGELFIDIPLPVDEPVEEQCGSCNACMTICPTQAIVAPYVVDAKRCISYLTIELKGAIPEAFRRALGNRIYGCDDCQLICPWNRYAKITSETDFHPRDVLQDKTLAELAMWDESTFLKNTEGSAIRRIGHERWQRNISIALGNASYSTHTYEALTVLAAQGTDLVQEHARWALNEQDLKKAQSIPVVSIEDNTPLDDSLLAPQAKRLNQRLIRSIEKGLARDA

SEQ ID NO: 79256 - protein, 396 aa, unidentified
  source 1..396: note = Paraglaciecola polaris
  REGION 1..396: note = tr|K7AAJ0|K7AAJ0_9ALTE Epoxyqueuosine reductase; OS = Paraglaciecola polaris LMG 21857 OX=1129793 GN=queG; PE = 3 SV=1
MSFAQYDLHQLAQNIKAWGEALGFQQVGIADIDLSAHEEKLQTWLDNGYHGQMNFMAEHGMKRARPDELLPGTLRVISVRMDYLPPDAKFAQTLKNKDAAYISRYALGRDYHKLLRNRLKKLGEKIRSECTTASFRPFVDSAPVLEHALAEKAGIGWTGKHSLTLNQQGGSWFFLGELFINIPLPVDEPVKEQCGSCNACITICPTQAIVGPYVVDAKRCISYLTIELKGAIPEEFRPLLGNRIYGCDDCQLICPWNRYAQLTNESDFHPREALQAKSLAELSEWDEETFLRATEGSAIRRIGHERWQRNISVALGNAPYSDSTRAALTVLAEQGTELVKEHALWGLKEQERKRAQYITIIDISAHEQDSALLAKHSQRLNQRLIRSVEKGLVRDA

SEQ ID NO: 79257 - protein, 362 aa, unidentified
  source 1..362: note = Paraglaciecola psychrophila
  REGION 1..362: note = tr|M4RVP4|M4RVP4_9ALTE Epoxyqueuosine reductase; OS = Paraglaciecola psychrophila 170 OX=1129794 GN=queG PE=3; SV = 1
MSSLNTYELLSLAKNIKAWGKVLGFQQVGICDVNLEQHESHLQSWLDKGYAGEMNYMVEHGMKRARPAELMPGTMRVISVRMDYLPPNAKFAHTLKNKKQAYISRYALGRDYHKLLRSRLKKLGEKIKTECEQLNFRPFVDSAPVLEHAIAEKAGIGWTGKHSLTINKEAGSWFFLGELFVDIALPVDQPVEENCGSCKACITICPTQAIVEPYVVDARRCISYLTIEQKGAIPEQYRALIGNRVYGCDDCQLICPWNRYANITAEADFHPRQKLMSQELIDLFAWDESTFLKNTEGSAIRRIGFERWQRNLAVGLGNAPYSLEIVSTLQSALSHTTDLVKEHIQWALKQHKNKATNEEKNR

SEQ ID NO: 79258 - protein, 381 aa, unidentified
  source 1..381: note = Paraglaciecola sp.
  REGION 1..381: note = tr|A0A2N1D9E3|A0A2N1D9E3_9ALTE Epoxyqueuosine reductase OS=Paraglaciecola sp. MB-3u-78 OX=2058332; GN = queG PE=3 SV=1
MSSLNTSELLSLAENIKAWGKVLGFQQVGICDVDLEQHESHLQSWLEKGYAGEMHYMAEHGMKRARPAELLPGTMRVISVRMDYLPPDAKFAHTLKNKQQAYISRYALGRDYHKLLRARLKKLGDKIKTECEDLNFRPFVDSAPVLEHAIAEKAGIGWTGKHSLTINKEAGSWFFLGELFVDIPLPVDKAVEDNCGNCTACITICPTQAIVEPYVVDARRCISYLTIEQKGAIPEQYRSLIGNRVYGCDDCQLICPWNRYAHITDEADFHPRQKLMSQELIDLFAWDEPTFLKNTEGSAIRRIGFERWQRNLAVGLGNAPYSTQIVSTLQGALDHATDLVKEHIQWALAQHQHRATQDEKSDNRLTQRLVRSIEKGLVRDA

SEQ ID NO: 79259 - protein, 364 aa, unidentified
  source 1..364: note = Parahaliea aestuarii
  REGION 1..364: note = tr|A0A5C8ZP45|A0A5C8ZP45_9GAMM Epoxyqueuosine reductase OS=Parahaliea aestuarii OX=1852021 GN=queG PE=3; SV = 1
MSEPSQQTPPLTASQQQSLLRLIRAWAEELGFQQVGITDVDLGEHRDYLQKWLDAGYHGSMDYMARHGDKRSRPEQLVPDTCRVISVRMDYHLGDTQPLAVLNNPRKAYISRYTLGRDYHKLIRKRLAQLARRIEAEAGGGHYRAFVDSAPVLERAIAERAGLGWIAKNTMLINDRAGSWFFLGEIYTDLPLATSEPRTSKHCGSCTACLDICPTQAFVGPYQLDARRCISYLTIEHDGPIDEELRPLMGNRIFGCDDCQLVCPWNKFAQPTGEDDFRPRHGLEAADLVDLFLWDEDTYLARTEGSALRRIGHERWLRNLAVALGNAPSSAALLAALALRRGHPSALVREHVEWAIARHEPGPD

SEQ ID NO: 79260 - protein, 367 aa, unidentified
  source 1..367: note = Parahaliea aestuarii
  REGION 1..367: note = tr|A0A5C8ZKY8|A0A5C8ZKY8_9GAMM Epoxyqueuosine reductase OS=Parahaliea aestuarii OX=1852021 GN=queG PE=3; SV = 1
MTPDKPTTDTPTLSPEAQQDLLGRIHAWAAELGFQQVGVADVDLGEHREYLQKWLDAGYHGSMDYMARHGSKRSRPEGLVPGTCRVLSLRMDYHQNDTQPLAVLDNPQQAYISRYTLGRDYHKLIRKRLAQLARRIEQEAGGGHFRAFVDSAPVLERAIAERAGLGWIAKNTMLINDKAGSWFFLGEIYTDLPLPAGPPQTSKHCGTCTACLDVCPTNAFVGPYQLDARRCISYLTIEHDGPIDPALRPLMGNRVFGCDDCQLVCPWNKFARPTAESDFRPRHNLDAPDLVELFLWDEETYLARTEGSALRRIGHERWLRNLAVALGNAPGSPAIMAALDSRREHPSALVREHVEWALARHRGTQGD

SEQ ID NO: 79261 - protein, 379 aa, Paraliobacillus ryukyuensis
  REGION 1..379: note = tr|A0A366EA86|A0A366EA86_9BACI Epoxyqueuosine reductase OS=Paraliobacillus ryukyuensis OX=200904; GN = DES48_105179 PE=4 SV=1
MAYETLKEEIIAYGKSIGIDKIGFAAANEFAEMKSRLKLQQDSGYQSGFEKGTIEERTEPTLHLSDAQSIIAIAVAYPSRMKNPPKNKKGSRRGNFCRASWGLDYHHVLNGKLEQLSTFIASKIAGFESRSMVDTGELSDRAVAERAGIGFSGKNTMIITPEFGSYVYLGEMITNIPFPPDEPVDDGCGDCTKCLDACPTGALVEPGRLNAQNCIAFVTQTKGFLPDKYREIMGNQLYGFDTCQVVCPKNKQVDTHLHPELEPEPDLVKPELLPLLSISNREFKERFGSMAGSWRGKKPIQRNAIIALAHYKETTAIPELIRLMKEDPRPVIRGTAAWAIGKIGTEDGLAAIKQAQTNEQDEQVLHEMEKGLAYYTQVT

SEQ ID NO: 79262 - protein, 382 aa, Paraliobacillus sp.
  REGION 1..382: note = tr|A0A0U1KM93|A0A0U1KM93_9BACI Epoxyqueuosine reductase OS=Paraliobacillus sp. PM-2 OX=1462524 GN=queG; PE = 4 SV=1
MAYQTLKQEIITYSKSIGIDKIGFAAANEFSAMKSRLKQQQDDGYQSGFEKGTIEERTEPVLHLADAESIIAIAVAYPSRMKKPPKSSKGSRRGNFCRASWGMDYHHVLNEKLDKLSTFIASKVPGFQCRSMVDTGELSDRAVAERAGIGFSGKNTMIITPEFGSYVYLGEMITNIPFPPDEPVDDGCGECTKCLDACPTGALVEPGRLNAQNCIAFVTQTKGFLPDKYREIMGNQLYGFDTCQVVCPKNKQVDTHLHPELEPEPDLVKPELIPLLSISNREFKERFGSMAGSWRGKKPIQRNAIIALAHYKDEAAIPELIRLMKVDPRPVIRGTAAWAIGKIGTKEGFKAIRQAQTNEEDEDVLNEMDKGLTYELKQVEKS

SEQ ID NO: 79263 - protein, 371 aa, unidentified
  source 1..371: note = Paramaledivibacter caminithermalis
  REGION 1..371: note = tr|A0A1M6MMD4|A0A1M6MMD4_9CLOT Epoxyqueuosine reductase OS=Paramaledivibacter caminithermalis DSM 15212; OX = 1121301 GN=SAMN02745912_01320 PE=4 SV=1
MITKGKIIKYSKEIGIDLIGFVKAEVFKELRDMLKKREEKNYLSGFEEKSIEKRINPYLTLENVETIIVIGIPYFIDEADIEQSKSCGNVGNISRSSWGKDYHIVLKEKMKSLTEYIAAEDPDFKYKYFTDTGPLVDRYLAYRAGIGWYGRNNCIISYDYGSWIFIGYILCNLKIKPDDSLKTRCINCNKCINSCPTGALMKNNIYNSKLCISYLTQTKEDIKYELREKMGNSLYGCDICQLVCPHNRKRLAGNKDFIPKKNSSKPDLLDLLKLSNEQFKKEFGDTALAWRGNRIMKRNALIALGNCGSQEVIDHLVEYLNNPSIMIKKYCAWAIIRLNKDKGKKILNEHLKKEKEREVIDEILKLYKYYL

SEQ ID NO: 79264 - protein, 384 aa, unidentified
  source 1..384: note = Paramesorhizobium deserti
  REGION 1..384: note = tr|A0A135I041|A0A135I041_9RHIZ Epoxyqueuosine reductase OS=Paramesorhizobium deserti OX=1494590 GN=queG; PE = 3 SV=1
MKRSNNERLKRFLAEEARAEGFDLMAVTTPDAIPQAGERLRQYITDKHHGTMEWMEETAERRASPGALWPEVRSVIMLAMNYGPEDDPLAVLNRRDRAAISVYAQNRDYHDIIKGKLKQIAGRFAARAGSDVKVFVDTAPVMEKPLAAAAGIGWQGKHTNLVSREFGSWLFLGSIFTTAEIAPDEPETDHCGSCRACLDICPTNAFPAPYRLDARRCISYLTVEHKGPIAHEFRKALGNRIYGCDDCLAVCPWNKFAEEAHEAKLRARDDLKAPKLEALLALDDAAFRTLFSGSPVKRIGRDRFLRNVLIAAGNSGDQNLLSQVEQLLDDPSPLVRGTAVWALGQLAEPRIFRKLRKALTASETDDTVLAEWRMAERQDPVGER

SEQ ID NO: 79265 - protein, 315 aa, unidentified
  source 1..315: note = Paramuribaculum intestinale
  REGION 1..315: note = tr|A0A2V1IWH0|A0A2V1IWH0_9BACT tRNA epoxyqueuosine(34) reductase QueG OS=Paramuribaculum intestinale OX=2094151 GN=queG PE=4 SV=1
MNSMSSRCDVPGHADLEGLMSQSGAYRFGIAAVEPVDGRSAAAYDQWIAAGCHDTMDYLDRYADVRRDPSLLLEGARSMIVAAFPYAAPVLPGEGKLRFAAYALGDDYHEVLRRRLEGAAEVLRQRWGGLTRVCVDTAPLRERYWAVRAGLGFIGLNCQLILPGAGSYFFIGTILSTVDMTPDAPCRLSCAGCRRCVVYCPGQALDGNPSHPSLDARRCLSCLTIEHRGPLPSGVRLGRRVYGCDTCQIACPHNRMADPVRPLPEFEPRPELLELTRDDLLSMDQQRFSTLFRHSAIKRAKLAGLQRNALSVEPD

SEQ ID NO: 79266 - protein, 373 aa, Paraperlucidibaca baekdonensis
  REGION 1..373: note = tr|A0A3E0H885|A0A3E0H885_9GAMM Epoxyqueuosine reductase OS=Paraperlucidibaca baekdonensis OX=748120; GN = queG PE=3 SV=1
MCAMTRIPLRPAANLSPPDLHALKADIADWARALGFQQMGVSGIDLGEHPAHLKRWLAQGFEAGMGWMHEPKRASPAELVPNTQRIISLRMDYLPADPRILETLADGERAYIARYALGRDYHKLIRKRVQKLADRMSEAIGPFGYRAFVDSAPVLEKAIASQAGLGWMGKHTLILNRHAGSYFFLAELFTDVALPVDAPVSSHCGSCSACMNICPTQAIIAPYVLDANKCISYLTIEHRGVIAEPLRRAIGNRIFGCDDCQLVCPWNRYARASAEPDFVPRHGLDGPALLELWHWDEATWQSRTEGMPLRRTRYEGWLRNVSIALANAPANATIVQALEQRRESLSSSEHLNAVVAEHIDWAISEQAQKLSLR

SEQ ID NO: 79267 - protein, 374 aa, unidentified
  source 1..374: note = Paraphotobacterium marinum
  REGION 1..374: note = tr|A0A220VD34|A0A220VD34_9GAMM Epoxyqueuosine reductase OS=Paraphotobacterium marinum OX=1755811 GN=queG; PE = 3 SV=1
MHKNKKYNWSKLKHQINNWSLELGFQEMGVTDLDLNNYTPHYLDWLEKKFHGEMSWIAKNIDKRTSPEKLVDDTIRILSFRMDYLPPDAGFANNLKQNNMAYISRYASGRDYHKIMRKRLQKLADKINNSFEDDFKFRAFVDSAPVLERPIAEKAGIGWQGKNSLIINKKAGSWFFLGELYVNIPLPIDSPVTNDCGKCSSCIKICPTNAIVGDKVVDATKCISYLTIEYAGVIPIELRKKMGNRIYGCDDCQLVCPWNRFASITNEKDFYFKDITKNQKLFDLLRWDESQFLKKTEGSPIRRIGYVKWIRNIIVAMGNSNLSEEEKLYIKSLRGKNKIWDEHIDWSLNNQIKSLKSNTQKLIRIIEKGLTRDA

SEQ ID NO: 79268 - protein, 338 aa, Paraprevotella clara
  REGION 1..338: note = tr|R5NBG9|R5NBG9_9BACT Putative iron-sulfur cluster-binding protein OS=Paraprevotella clara CAG:116; OX = 1263095 GN=BN471_02425 PE=4 SV=1
MSVDRTCSVSAERERFMQKRMVKTENILSATQIKAEAARLGFSACGLAPAGPVAPQHAAFFKRWLGEGRQAGMAYMEGHEAKRLDPRLLVEGCRTVVSVALNYRPSTPIPDHKLQIAWYAYGQDYHDIMRQKLNNLIEALRHSTPEGTLQGRAFCDTAPVLERYWAWRCGLGWIGRHTQLVIPRAGSAFFLGELMLNLPADAYDAPFPTDRCGTCRRCIEACPTQALEEGRGLDVRRCLSYLTIENRGGIPEEAAARMYPYFYGCDRCLRACPHLRSAPPTTEPAFTPRPELLQMEEEDWMALDVERYRMLFKGSAVKRAKYEGLIRNLKALRGNGDR

SEQ ID NO: 79269 - protein, 318 aa, Paraprevotella clara
  REGION 1..318: note = tr|G5SPD5|G5SPD5_9BACT Putative iron-sulfur cluster-binding protein OS=Paraprevotella clara YIT 11840; OX = 762968 GN=HMPREF9441_01217 PE=4 SV=1
MVKTENILSATQIKAEAARLGFSACGLAPAEPVAPLHAAFFKRWLGEGRQAGMAYMEGHEAKRLDPRLLVEGCRTVVSVALNYRPSTPIPDHKLQIAWYAYGQDYHDIMRQKLNSLLEALRHSTPEGTLQGRAFCDTAPVLERYWAWRCGLGWIGRHTQLVIPRAGSAFFLGELMLNLPADAYDAPFPTDRCGTCRRCIEACPTQALEEGRGLDARRCLSYLTIENRGGIPEEAAARMYPYFYGCDRCLRACPHLRSAPPATEPAFTPRPELRQMEEEDWMGLDVERYRMLFKGSAVKRAKYEGLIRNLKALRGNGDR

SEQ ID NO: 79270 - protein, 316 aa, Paraprevotella xylaniphila
  REGION 1..316: note = tr|F3QV99|F3QV99_9BACT Putative iron-sulfur cluster-binding protein OS=Paraprevotella xylaniphila YIT 11841 OX=762982 GN=HMPREF9442_02124 PE=4 SV=1
MTKNILSATQIKAEAARLGFSACGLAPAGPVAPQHAAFFKRWLGEGRQAGMAYMEGHEAKRLDPRLLVEGCRTVVSVALNYHPSTPIPDHKLQIAWYAYGKDYHDIMRQKLNGLLEALRHSTPEGTLQGRAFCDTAPVLERYWAWRCGLGWIGRHTQLVIPRAGSAFFLGELMLNLPADAYDTPFPTDRCGTCRRCIEACPTHALEEGCGLDARRCLSYLTIENRGGIPEEVAARMYPYFYGCDRCLRACPHLRSAISTTEPAFTPRPELLQMEEEDWVRLDVEHYRMLFKGSAVKRAKYEGLIRNLKALRGHGDK

SEQ ID NO: 79271 - protein, 379 aa, unidentified
  source 1..379: note = Pararheinheimera mesophila
  REGION 1..379: note = tr|A0A3P3QRB0|A0A3P3QRB0_9GAMM Epoxyqueuosine reductase OS=Pararheinheimera mesophila OX=1547515 GN=queG; PE = 3 SV=1
MTSTINWQQLAEQIKVWGQQLGFQQIGITDTDLTSEEPKLQQWLDAGFHGEMDYMAAHGMKRARPAELHPGTIRVISARMDYLPEHAQFAANLADPSMAYISRYALGRDYHKLIRNRLKQLGERIEKELGALGFRPFVDSAPILERPLAVKAGLGWQGKHSLVLNQEAGSWFFLGELLVDIPLPVDPVHTGDCGTCVACLTICPTQAIVAPYTVDARRCISYLTIELQGAIPEEFRPLLGNRIYGCDDCQLVCPVNRAAKTTQEQDFQRRPQWLNTSLLELWRWSEAEFLRYTEGSAIRRIGYQRWQRNIAVALGNAPFDPVIVDALEQQLAQSSELVAEHIRWALGQQQKKSLLQNNLLNRQTDRLIRVIQKGLPRDA

SEQ ID NO: 79272 - protein, 379 aa, unidentified
  source 1..379: note = Pararheinheimera tangshanensis
  REGION 1..379: note = tr|A0A5C8M0M6|A0A5C8M0M6_9GAMM Epoxyqueuosine reductase OS=Pararheinheimera tangshanensis OX=400153; GN = queG PE=3 SV=1
MTNSINWQQLAEQIKEWGQQLGFQQIGITDTDLTSEEPKLQQWLDAGYHGEMDYMAAHGMKRARPAELHPGTIRVISVRMDYLPEHAQFAANLADPSMAYISRYALGRDYHKLIRNRLKQLGERIEKELGALGFRPFVDSAPILERPLAVKAGLGWQGKHSLVLNQDAGSWFFLGELLVDIPLPVDAVHTGDCGSCVACITICPTQAIVAPYTVNARRCISYLTIELQGAIPEEFRPLLGNRIYGCDDCQLVCPVNRAADTTQEQDFQRRPQWLNTSLLDLWRWTETEFLNYTEGSAIRRIGYQRWQRNIAVALGNAPFDPAIVDALEQQLALASDLVAEHIQWALRQQQNKSLLQQNLLSRQTDRLVRVIQKGLPRDA

SEQ ID NO: 79273 - protein, 386 aa, unidentified
  source 1..386: note = Pararhizobium polonicum
  REGION 1..386: note = tr|A0A1C7P6L3|A0A1C7P6L3_9RHIZ Epoxyqueuosine reductase OS=Pararhizobium polonicum OX=1612624 GN=queG; PE = 3 SV=1
MPGDALHTEKHDKRLRTLTRFLKEEARDKGFDVCRVTLPDSIPQAPERLADFLDRGYHGTMDWMAETAARRSDPRVLWSDVRSVVLFGMNYGPDEDPRSILGKPDLGAISVYARNRDYHDVIKGKLKEVATRFAARAGVDVKVFVDTAPVMEKPLAEQAGLGWQGKHTNLVSREFGSWLFLGSLFTTAELLVDAPERDHCGSCRACLDACPTDAFPAPYKIDARRCISYLTIEHKGPIDPGIRARIGNRIYGCDDCLAACPWNKFAAAASEMKLQAREDLKAPPLSYLLTLDDTAFRTFFSGSPVKRIGRDRFVRNCLIAAGNSGDAGLIDICAELSKDTSPTVRGMAIWALSRLMAAGDFTHFAARRHGETDPEVLAEWKMAGVV

SEQ ID NO: 79274 - protein, 375 aa, unidentified
  source 1..375: note = Pararhizobium sp.
  REGION 1..375: note = tr|A0A506U617|A0A506U617_9RHIZ Epoxyqueuosine reductase OS=Pararhizobium sp. BGMRC6574 OX=2590452; GN = queG PE=3 SV=1
MDERAEERLRARLIADAGRLGFSGVRITRADAIPAAKGRLDHFLAEGRHGTMAWMADTADRRGAPLTLWPAARSVVMLAMNYAPESDPLAILDQPAHGAISVYARHRDYHDVIKGKLKEMASRLAAASGADVKVFVDTAPVMEKPLAEAAGLGWQGKHTNLVSRELGSWLFLGSIFTSAELTPDAAESDHCGSCRACLDVCPTDAFPAPYQLDARRCISYLTIEHAGPIPHEFRKAIGNRIYGCDDCLAVCPWNKFAKVAREQKLQARADLDAPPLARLLALDDGAFRQLFSGSPIKRIGRTRFMRNVLIAAGNSNDASLVEPCRALLDDAEPLVRGAAVWALGELLDHRSLSALEATVEELDPSVRSEWAAALG

SEQ ID NO: 79275 - protein, 347 aa, unidentified
  source 1..347: note = Pararhodobacter aggregans
  REGION 1..347: note = tr|A0A2T7URP8|A0A2T7URP8_9RHOB Epoxyqueuosine reductase OS=Pararhodobacter aggregans OX=404875 GN=queG; PE = 3 SV=1
MGLKAALAARARAEGFAAMGVTRPDAVPELAGRLAAFVEAGRHGQMGWMAERMPWRGDPAALWAEARSVIMLAELYTPDEDPMAAVARREAGAISVYARGRDYHDVVKARLKRLGRWLIEEARQRGETPEIKVFVDTAPVMEKPLAAAAGLGWQGKHTNLLGRDLGNWFFLGAIFTTLELEPDAPARENCGSCTACLQACPTAAFPAPFQLDARRCISYLTIEHHGPVDPELRALIGNRIYGCDDCLAACPWNKFAAAATEVKYAARDDLRAPPLAELAALDDAGFRARFSGSPIKRIGRDRFVRNVLYAIGNSGAPGLAPVAEALVADPDETVAEAARWALTRLRP

SEQ ID NO: 79276 - protein, 351 aa, unidentified
  source 1..351: note = Pararhodobacter sp.
  REGION 1..351: note = tr|A0A2T8HVF4|A0A2T8HVF4_9RHOB Epoxyqueuosine reductase OS=Pararhodobacter sp. AM505 OX=2172121 GN=queG; PE = 3 SV=1
MARAVEAFEPEAFKERLVARALEEGFSAARITRPDAIPQAAARLKDYVEAGRHGQMGWMEERMAWRGNPAALWPEARSVLMLAEAYTPAHDPMAVLAQPEKGAISVYAQNRDYHDVVKKRLKRLGRWMIEAVGGEIKVFVDTAPVMEKPLAEAAGLGWQGKHTNLLSRDLGNWFFLGAIFTTLEMPVDAPARENCGSCTACLEACPTDAFPAPFQLDARRCISYLTIEHKGPIDPELRALIGNHIYGCDDCLAACPWNKFAVAASEVKYAARPDLIAPDLAELAGLDDAGFRALFSGSPVKRIGRDRFVRNVLYAIGNSGKPHLKPVAQGLTEDPDATVAEAARWAVSRLE

SEQ ID NO: 79277 - protein, 345 aa, unidentified
  source 1..345: note = Pararhodobacter sp.
  REGION 1..345: note = tr|A0A2U2C6A8|A0A2U2C6A8_9RHOB Epoxyqueuosine reductase OS=Pararhodobacter sp. CIC4N-9 OX=2184063; GN = queG PE=3 SV=1
MGLKAALDARARDEGFAAMGVTRPDALPELAGRLETFVAAGYHGQMGWMAERMRWRGDPAALWPEARSVIMLAELYTPDEDPMAAVARHEAGAISVYARGRDYHDVVKKRLKRLGRWLIDEAARRGETAEIKVFVDTAPVMEKPLAQAAGLGWQGKHTNLLGRDLGNWFFLGAIFTTLELEPDAPERERCGSCTACLTACPTDAFPAPFKLDARRCISYLTIEHHGPVDEDLRAKLGNRIYGCDDCLAACPWNKFAAAASEVKYAAREDLRAPPLAELAALDDAGFRARFSGSPIKRIGRDRFVRNVLYAIGNSGQPALRPVAEALTDDPDATVADAARWAVSRL

SEQ ID NO: 79278 - protein, 356 aa, unidentified
  source 1..356: note = Pararhodospirillum oryzae
  REGION 1..356: note = tr|A0A512H4F5|A0A512H4F5_9PROT Epoxyqueuosine reductase OS=Pararhodospirillum oryzae OX=478448 GN=queG; PE = 3 SV=1
MVSEKQRAQLRARAHALGFEACAITAARLPEGAGEDLRAFVAQGHHGPMAWMAETLERRADPRVLWPEAVSVVTLGLSYAPPEIPDPTGGDPTRACFSVHARHRDYHAVAKGRAKTLAQWMVSRLGGAVKVFVDTAPVMEKPLAHAAGLGWQGKHTNLVSPRFGSWLVLAEVFTTVDLPPDPPMPDRCGACRRCLDACPTGALTAPHVMDARRCLACLTIETPGPIPEPLRGAMGNRVYGCDACLAVCPWNRFAPPTTEPALVARPDLIDPPLAELAALDDPGFRARFSGTGVRRLGYARFKRNVLIALGNSGAPALKDAVAPFLDDPDPVIADAARWAWGRLGAEEGNEEGEGHE

SEQ ID NO: 79279 - protein, 349 aa, unidentified
  source 1..349: note = Pararhodospirillum photometricum
  REGION 1..349: note = tr|H6SN67|H6SN67_PARPM Epoxyqueuosine reductase; OS = Pararhodospirillum photometricum DSM 122 OX=1150469; GN = queG PE=3 SV=1
MPRGRWGILSPSEAIRARALALGFSAVALTRATLAPGVREDLLAYLAEGRHGPMAWMAETAERRGDPRVLWPEAVSVVTLGLSYAPARDPRHDAPSPSHASLSVHARHRDYHDVAKGRAKLLAQWMGAKLGGAVKVFVDTAPVMEKPLARAAGLGWVGKNTVLIHPVHGTWLVLAEVFTTLALDPDPPMADRCGTCRRCLDACPTGALTAPGRMDARRCLACLTLETPGPLPEALRPALGNRIYGCDACLVVCPWNRFAPPTTEPALTARPDLCAPPLAALLALDDAGFRAFFRGSGMRRLGHARFLRNVLMAAGNSADPGLRPAVAALADHPDALVRDAAAWALARLG

SEQ ID NO: 79280 - protein, 385 aa, unidentified
  source 1..385: note = Parashewanella curva
  REGION 1..385: note = tr|A0A3L8PZF2|A0A3L8PZF2_9GAMM Epoxyqueuosine reductase OS=Parashewanella curva OX=2338552 GN=queG PE=3; SV = 1
MLNSSQLKILADNIKSWAKEIGFAHVGICDTDLADEEPKLQEWLDKGYHGEMHYMANHGMMRARPHELQPGCLRVISVRMDYLPPEAGFATNLKDPNLGYISRYAGGRDYHKMMRNRIKKLGDRIASHLQELGEAMPEYRPFVDSAPILERPLADKAGIGWTGKHSLILSRNAGSWFFLGELLINVPLPVDEPVNNECGKCVACIKSCPTNAIVEPYVVDGRRCISYLTIEHQGSIPEEFRPLIGNRIYGCDDCQLVCPVNSEAPLTEEWDFHIRDAIKLPKLVDLFQWTDQEFLTRMQGSAIRRIGHSLWLRNIAIALGNAPFSEEIIQVLKLKRDAHDVSEMVREHIDWALEQQNIKRESELDINRKTLRVIKAVERGLQRDR

SEQ ID NO: 79281 - protein, 386 aa, unidentified
  source 1..386: note = Parashewanella spongiae
  REGION 1..386: note = tr|A0A3A6TZL4|A0A3A6TZL4_9GAMM Epoxyqueuosine reductase OS=Parashewanella spongiae OX=342950 GN=queG; PE = 3 SV=1
MLSADTLRQLADKIKLWGKELGFAHIGICDTDLTSEEPKLQQWLDNGYHGDMHYMANHGMMRARPHELQPGCLRVISARMDYLSPNAGFAINLRDPNLAYISRYAGGRDYHKMMRNRLKKLGDRIADEMKSLGEELPDYRPFVDSAPVLERPLAEKAGIGWTGKHSLILNKDAGSWFFLGELMINLPLPVDIPIKEGCNTCVACIKSCPTNAIVEPYVVDGRRCISYLTIEHQGSIDKELRPLMGNRIYGCDDCQLVCPVNGAAPLTNESDFHTRDELTQPKLLDLFHWTEPEFLTRMQGSPIRRIGHQQWLRNIAIALGNAPFSNEVIESLTSKVASGELNEVALEHVHWAIEQQKSKQITQTDVVNRKTYRVIKAVEKGLPRDA

SEQ ID NO: 79282 - protein, 352 aa, unidentified
  source 1..352: note = Parasphingopyxis lamellibrachiae
  REGION 1..352: note = tr|A0A3D9FGF8|A0A3D9FGF8_9SPHN Epoxyqueuosine reductase OS=Parasphingopyxis lamellibrachiae OX=680125; GN = queG PE=3 SV=1
MTIDTLSTRLKEQALAEGFAACGIAPADAAPKTAERLREWLAAGAHGEMLWMESRAHHRERPKALWPDVQSLVMLGMSYAPKEDPLRLAGEADIGRISVYAQGKDYHDPVKKALKRVARWLIAEAAKDGTEADVKVFVDTAPVMEKPLSEAAGIGWQGKHTNLLSREHGNWLFLGAIYTTLNLNADTPATDRCGSCTACQTACPTDAFPSPYRLDARRCISYLTIEHAGPIPHEFREAMGNRIYGCDDCLAVCPWNKFADQARANKAFAPRAELAAPALADLLALDDPGFRKVFSGSPIKRIGRNRMVRNCLIAAGNSGDGALKEPVRALLGDPDEVVREAADWAVGRLRSF

SEQ ID NO: 79283 - protein, 387 aa, unidentified; identical to SEQ ID NO: 75468
  source 1..387: note = Parcubacteria group
  REGION 1..387: note = tr|A0A0G1G3V8|A0A0G1G3V8_9BACT Epoxyqueuosine reductase OS=Parcubacteria group bacterium GW2011_GWA2_43_13 OX=1618826 GN=queG PE=3 SV=1

SEQ ID NO: 79284 - protein, 436 aa, unidentified
  source 1..436: note = Parcubacteria group
  REGION 1..436: note = tr|A0A0G0IV67|A0A0G0IV67_9BACT 4Fe-4S ferredoxin-type domain-containing protein OS=Parcubacteria group bacterium GW2011_GWD1_38_16 OX=1618936; GN = US78_C0009G0003 PE=4SV=1
MNIQEKIKKIAEELGFDLVGVADVVDVVTGYEQLAISEKLYDWVKKGYHADMKWFADSVEKRKDILKVMPGAKSVICVAMNYYNNTNIRMSTNDTNNTNKENMIGKIARYAHGRDYHKIFDKKLKLFSQKLKEIFPEGEFKYYSDTGPVLERAWAQRAGLGFIGKNTNLITKYGSWVLLGEIITNADFSMDKVGIFTKSNFSNNNFIQEFPNLKPQISKQIPNFKFKNFKQFIDFWKLKNWKLFGNWLFGNWKLNKLDFNKINRVNTCDGCERCIKSCPTGALCAPYMVDARKCISYLTIEYKGEIPMELREKMGNRIFGCDACQEVCPFNIGRSSFAKATADKAESELTEKMIAGKEIDLREILSIKTDEEFLRKFAGSPVMRAKRKGLIRNACIVAGNSGDGSLLPYLEKCLKDKELIIVETARWAIGKLELGV

SEQ ID NO: 79285 - protein, 373 aa, unidentified
  source 1..373: note = Parendozoicomonas haliclonae
  REGION 1..373: note = tr|A0A1X7ARD7|A0A1X7ARD7_9GAMM Epoxyqueuosine reductase OS=Parendozoicomonas haliclonae OX=1960125; GN = queG PE=3 SV=1
MPLYLFNPVTESPNHSQSPISTALSQQELAQLAADIKLWARELGFQDAGITDINLGEHEQHLTNWLARDFHGEMDYMTSHGNMRSRPEELVPGTLRIISVRMDYLPGDTQTVRILQQPEKAYISRYSLGRDYHKLIRKRITQLGKRIEDKVGKFGYRAFVDSAPVLEKALAEKAGLGWIGKNTLLLNNKAGSWFFLGELFTDLPLPIDEPQQTSHCGSCFACAEICPTDAIVGPHQLDARRCISYLTIELKGAIPEEFRKPIGNRVFGCDDCQIICPWNKFAKNTCETDFLPRHKLDSTDLADLFLWTEEEFLDRTAGSPIRRTGFEGWLRNLAVGLGNAPTNDKVISALQARLDYPSEIVQEHVRWALEQHK

SEQ ID NO: 79286 - protein, 383 aa, Parvibaculum lavamentivorans
  REGION 1..383: note = tr|A7HPJ0|A7HPJ0_PARL1 Epoxyqueuosine reductase; OS = Parvibaculum lavamentivorans (strain DS-1 / DSM 13023 / NCIMB 13966) OX=402881 GN=queG PE=3 SV=1
MPISISDRAKDLNALRGELLARAKEAGFDDVGIARADARGDLPARLDEWLVEGRHGNMDWMAETAARRAAPATLWPEAKSVIMLAMNYGPDTDPLEILGHRDRAAISVYAQNRDYHDLVKKRLKQVARWLAKTSGAEVKVFVDTAPVMEKPLAEAAGLGWQGKHTNLVSRTLGSWFFLGSIFTTLDFEADKRHDDRCGECRRCLDACPTKAFPAPYELDARRCISYLTIEHKGHIAREFREPMGNRIYGCDDCLAVCPWNKFANRAREEAFHPRDELRAPLLSDLARLDDAAFRAFFSGSPVKRIGRDRFVRNVLIAIGNSGDPSLVPVTTALLEDASPLVRAMAVWALAQLGQGDILRARAETALQAEADEAVREEWRYSLR

SEQ ID NO: 79287 - protein, 383 aa, Parvibaculum sp.
  REGION 1..383: note = tr|A0A2D8XFL2|A0A2D8XFL2_9RHIZ Epoxyqueuosine reductase OS=Parvibaculum sp. OX=2024848 GN=queG PE=3 SV=1
MSATEQPGVAILKADIIAQAKAAGFDDVGFSPADLSEETQTDFQEWLDRGAHGDMAWMEETRERRASPTALWSEVKSVIVLAMNYGPDGDPLETLRHPDKANISVYARNRDYHDLVKKRLKRVARWLVDETGCELKVFVDTAPILEKPVAAGSSLGWQGKHTNLVSSELGSWFFIGSIFTNLELPPEAPHADQCGSCHACLDACPTNAFPGPYELDARRCISYLTIEHKGHIAPEFRGPMANRIYGCDDCLAACPWNKFARAASEHALKPREDLTSPDLSELLALDDTGFRALFAGSPVKRIGRDRFLRNVLIAAGNSGDETLLPQVTDHLGDASELVRAMAVWALGELASPKDIERARLEHGDRETDGDVRAEWARLPSLPR

SEQ ID NO: 79288 - protein, 379 aa, Parvibaculum sp.
  REGION 1..379: note = tr|A0A2D4VG54|A0A2D4VG54_9RHIZ Epoxyqueuosine reductase OS=Parvibaculum sp. OX=2024848 GN=queG PE=3 SV=1
MPISTSENADLKTRIAAKAREAGFDAVGFTRADARPDLPARLSRWLELRRQGDMGWMEETAARRSDPLTLWPEAKSVVMLAMNYGPAENPLPRLEERDRAVFSVYAQNRDYHDLVKKRLKRVARWLAEEASVEVKVFVDTAPVMEKPFAEAAGLGWQGKHTNLVSSELGSWFFLGAIFTTQALEPDTPHEDRCGSCRACQDVCPTDAFPQAYELDATRCISYLTIEHKGHIPHEFRRPMGNRIYGCDDCLAVCPWNKFAQEARETAFHPREDLVSPLLADLVTLDDAAFRARFSGSPVKRIGRDRFIRNVLIAVGNAGDPVLAIHARRLLSDPSPLVRAMAVWALGELFTGEEVAALAKEHLPSEEDEDVRAEWRSLAG

SEQ ID NO: 79289 - protein, 400 aa, unidentified
  source 1..400: note = Parvibium lacunae
  REGION 1..400: note = tr|A0A368L1L9|A0A368L1L9_9BURK Epoxyqueuosine reductase OS=Parvibium lacunae OX=1888893 GN=queG PE=3 SV=1
MPGCNVCAKAWPSFSVARESGRATIMKMDESAKKQLVQQISTWANALGFADLRIGPARIDPAAQARLASWLAAGYHGKMDYMARHEALRRDPTQLHPQTLRVISLRMNYLPASTTDNWVDQAWETLNRPGQAYVSLYARGRDYHKVLRQRLQQLANQIQQQVAVDFPDMDYRVFTDSAPVMEVELGQQAGLGWRGKHTLLLTREAGSMFFLGEIFTNLDLPMDSPTAPEAMHCGTCRRCLDVCPTQAIVAPYSLDARRCISYLTIENKGAIPVELRPLMGNRIYGCDDCQLICPWNKFAQRAPINDFDVRNGLDSASLVALFAWTEREFNERLQGSPIRRIGYGPWLRNIAVALGNALRDSASHQAAIMIEALQAKVDDPDPLVREHVAWALAQQPSGAT

SEQ ID NO: 79290 - protein, 397 aa, Parvularcula bermudensis
  REGION 1..397: note = tr|E0TI55|E0TI55_PARBH Epoxyqueuosine reductase; OS = Parvularcula bermudensis (strain ATCC BAA-594 / HTCC2503 / KCTC 12087) OX=314260 GN=queG PE=3 SV=1
MAKSNGTTTTPTSSPGAPDVDGTALRDDAASIKQAIRAEAHTLGFEACRFTAPTLPPQMGEGLTAMVEAGYHGEMDWLADRQEQRSAPRRLWPEVRSVIVLGVNYGPSDDPLARLDQRSLGNISVYAQNDDYHDLIKKRLKRLGRWIGQTYDTDLKVFVDTAPVAEKPLAAQAGLGWQGKHTNLVSRSYGSWLFLGVIYLAIELPPDSAETDHCGQCRQCLDICPTDAFPAPYQLDARRCISYLTIEHKGTIPMPLRSAMGNRIYGCDDCLAVCPWNKFAKATEEPAFLPRAALRAPQLADLSALDDAGFRALFRKSPVKRIGRDRFVRNVMIAIGNSGNAALRSALRPRLADPSPPVRAMAVWAWRQLDGDDTVLRTAMAHEQDPEVLAEIDSTTV

SEQ ID NO: 79291 - protein, 334 aa, Parvularcula sp.
  REGION 1..334: note = tr|A0A355C2I8|A0A355C2I8_9PROT tRNA epoxyqueuosine(34) reductase QueG (Fragment); OS = Parvularcula sp. OX=1979207 GN=queG PE=4 SV=1
LFEFLGGGRHGDMAWMESRAAERADPKALWPEAKSIVMLGLNYGPEDDPLALLAARTKGSISVYARGRDYHDVVKKKLKALARAIVAEMGGEVKVFVDTAPVMEKPLAARAGIGWQGKHTNLVSRAHGSWLFLGAIFTTLTIAPDAPEGDHCGICTRCLDVCPTQAFPTPYQLDARRCVSYLTIEHKGPIPNELRAAMGNRIYGCDDCLAVCPWNKFASLAREVQLHAREANAAQDLAELARLDDAAFRARFSGSPIKRTGRDRFVRNVLIAIGNSGTMALAASARALLDDASPLVRGASAWALRRLAPDEADALRAGALARESDAEVAAEWRD

SEQ ID NO: 79292 - protein, 373 aa, Parvularcula sp.
  REGION 1..373: note = tr|A0A371RHV8|A0A371RHV8_9PROT Epoxyqueuosine reductase OS=Parvularcula sp. SM1705 OX=2292771 GN=queG; PE = 3 SV=1
MDKPQTDIREKIRAEALALGFDVCRFTPAHLPERIGQHLQTAIADGHHGTMDWLATRTDERSQPQTLWEGAKTVIMLGVNYGPEDDPLARLEWRDRGNISVYAQNEDYHDIIKKRLKQLGRWLGHEFETELKVFVDTAPVAEKPLAAQAGLGWQGKHTNLVSREFGSWLFLGAIYTALELPGDEPETDHCGSCRACLDICPTDAFPAPYRLDARACISYLTIEHKEPIPEQYRAKMGNRIYGCDDCLTVCPWNKFAAEAREAKLIAREELRAPTLAELSTLDDEVFRALFRKSPIKRIGRDRFIRNVMIAMGNSGDTSLLSAIEARLSDPSPLVRGMAVWAWAQLGGAAERLHKLRENEEEPHVRAELETALK

SEQ ID NO: 79293 - protein, 381 aa, unidentified
  source 1..381: note = Parvularculaceae bacterium
  REGION 1..381: note = tr|A0A520R4K8|A0A520R4K8_9PROT Epoxyqueuosine reductase OS=Parvularculaceae bacterium OX=2510335 GN=queG; PE = 3 SV=1
MPQHIPHIEDSIKQMGHELGFDAVRIARAHLSDETGERLDQFVELERHGDMGWMAARRDERRHPRGLWADARSIIMVAMNYGPDEDPLTILNRPNEGAISVYAKGRDYHDVLKKRLKQFARRLIDTHGGALKVFVDTAPVMEKPLAQRAGIGWQGKHTNVVSTDHGSWLFLGSIFTTLDLVADIPETDHCGSCQACLDICPTKAFPAPYQLDARKCISYLTIEHKGHIPPAYRKAIGNRIYGCDDCLAVCPWNKFAHAAKEAKLKARDALNAPSLRELSELDDTSFRAFFSGSPVKRTGRDRFIRNVMIAIGNSGNGEFHDAIKPRLADPSPLVRVAAVWAAKQLFSKETFSVLSQTALLSEKDAHVRAEWTSGISGTTPG

SEQ ID NO: 79294 - protein, 362 aa, unidentified
  source 1..362: note = Paucibacter aquatile
  REGION 1..362: note = tr|A0A2N8L1F6|A0A2N8L1F6_9BURK Epoxyqueuosine reductase OS=Paucibacter aquatile OX=2070761 GN=queG PE=3; SV = 1
MRRWALELGFSQIGVADIDLHSAEAGLLAWLEAGFHGSMHYMQSHGLKRARPAELVPGTLRVLSLRMDYLPRDSGADWQAVEWQRLADPQRAQISLYARGRDYHKVLRARLQLLATRLSEAVGPFGYRVFTDSAPVLEVELASRSGIGWRGKHTLTLHRDVGSMFFLGEIYIDLPLPLSEPVTAHCGQCSACLEACPTGAIVAPYRVDARRCVSYLTIEHEGAIPIELRPLIGNRLYGCDDCQLICPWNKFAQKAQLADFDARPAMAGGDLLSYWSWSEEQFLRQTEGSAMRRIGHGRWQRNLAVVSGNALRQREWPALRAVLLAQRAQAGELLAEHLDWALAQNADVAATENAAPPATAAG

SEQ ID NO: 79295 - protein, 364 aa, Paucibacter sp.
  REGION 1..364: note = tr|A0A3N7CDE6|A0A3N7CDE6_9BURK Epoxyqueuosine reductase OS=Paucibacter sp. KBW04 OX=2153361 GN=queG PE=3; SV = 1
MTDQLRAWALELGFSQIGVADIDLSRAEPGLLAWLEAGFHGSMHYMEAHGLKRARPAELVPGTVRVLTARMDYLPRNSPGDWQAIEWAGLKSPQHAQLSIYARGRDYHKVLRNRLQKLAERLAEAVGPLGYRAFTDSAPVLEVELAARSGLGWRGKHTLTLHRQAGSMFFLGEIYLDLPLPLSEPVTAHCGQCRACVDVCPTQAIVAPYRVDARRCVSYLTIEHEGAIPLELRPLIGNRIYGCDDCQLICPWNKFAQKATLPDFDVRPGLAGARLLQLWAWDEATFLRQTEGSAIRRIGHARWQRNLAVALGNALRAEDSAEIRAALQSQRSGASDLLAEHIDWALAQGAGLRSSAAQLTKAVP

SEQ ID NO: 79296 - protein, 352 aa, Paucibacter sp.
  REGION 1..352: note = tr|A0A0U3DAP3|A0A0U3DAP3_9BURK Epoxyqueuosine reductase OS=Paucibacter sp. KCTC 42545 OX=1768242 GN=queG; PE = 3 SV=1
MQALMGQLRAWALELGFSQIGVADIDLSSAEPGLQAWLSAGFHGSMHYMQAHGLKRARPAELVPGTVRVLTARMDYLPQDSRSDWQALEWQGLRDPQRAQLSIYARGRDYHKVLRSRLQKLAERLGQSIGPFGYRVFTDSAPVLEVELASRSGIGWRGKHTLTLHREAGSMFFLGEIYLDLPLPLSEPVTAHCGQCRACLDVCPTQAIVAPYRVDARRCISYLTIEHEGAIPLELRPLMGNRIYGCDDCQLACPWNKFAAKAVVADFDARPELDGASLLQLWAWDEAQFLRRTEGSAIRRIGHARWQRNLAVAMGNALRQGEDSNLRAALQSARPQASALLAEHIDWALAQA

SEQ ID NO: 79297 - protein, 366 aa, Paucibacter toxinivorans
  REGION 1..366: note = tr|A0A4R6QUR4|A0A4R6QUR4_9BURK Epoxyqueuosine reductase OS=Paucibacter toxinivorans OX=270368 GN=queG; PE = 3 SV=1
MHHPKNDPPDLDAQALLEKLRGWARELGFSQIGVADINLADAEPGLAAWLAAGFHGSMHYMEVHGMKRARPAELVPGTLRVLSLRMDYLPAATPTDWQAIEWQGLAEPQRAQVSLYARGRDYHKVLRRRLQQLADRLQAEIGPFGHRCFTDSAPVLEVELASRGGLAWRGKHTLALHREAGSMFFLGELFVDLPLPLTEATSAHCGQCTACIDVCPTQAIVGPYRVDARRCISYLTIEQDGPIPLELRAAMGNRIYGCDDCQLVCPWNKFAQRATLPDFDARPELSAPTLLQLWQWDEPAFLRHTEGSAIRRIGHGRWRRNLAVAIGNALRAEEVPALRLALTEARAGASELLSEHIDWALAQEPV

SEQ ID NO: 79298 - protein, 373 aa, Paucimonas lemoignei
  REGION 1..373: note = tr|A0A2X4AAJ0|A0A2X4AAJ0_PAULE Epoxyqueuosine reductase OS=Paucimonas lemoignei OX=29443 GN=queG PE=3; SV = 1
MPVITVDPPNTVDLVTLAQSIKEWGRELGFQQVGIAGLDLAEHEQHLERWLEAGYHGEMDYMAAHGSKRSHPDELVPGTLRVVSLRMDYLPGDTEMTQRLTEPEKAYVSRYALGRDYHKLIRKRVQQLAERIQQAIGPFGYRAFVDSAPVLEKAIAEQAGLGWIGKNTLVLNRKAGSFFFLSELFVDLPLPLDAPHATEHCGRCTACLDICPTAAFVGPYVLDARRCISYLTIELKTAIPEELRPLIGNRVFGCDDCQIVCPWNRFARPTDQSDFQPRHNLDNAGLAELFMWDEDKFLSNTEGSPLRRAGYERWLRNLAVGLGNAPSTIPVLQALEARRDYPSELVREHVEWALKQHEQRRMPTPQDQCSSPL

SEQ ID NO: 79299 - protein, 354 aa, Paucimonas lemoignei
  REGION 1..354: note = tr|A0A4R3HYN5|A0A4R3HYN5_PAULE Epoxyqueuosine reductase OS=Paucimonas lemoignei OX=29443 GN=queG PE=3; SV = 1
MQALAEAIPAWGRELGLADVRIAAIDLTAEETGLQAWLDAGMHGEMHYMASHGMKRARPAELVPGTVRVISARIDYLPQDASPDWRANERRRHGDPGAAVVSVYARGRDYHKVLRNRLQKLAERIAEKAGPFGYRVFTDSAPVLEVALADKSGLGWRGKHTLLLNRQAGSMFFLGEIYTDLPLPVDAPMAPHCGTCHACIDACPTQAIVGPYRLDARRCISYLTIELKGSIPEDLRPLIGNRIYGCDDCQLVCPWNKFAQRAVVPDFEVRNGLDAASLIDLFAWSEEEFNRRLEGSPIRRIGHESWLRNIAVALGNAAAGQGARPGMVAALKARADHPSEMVREHVTWALARHQ

SEQ ID NO: 79300 - protein, 379 aa, unidentified
  source 1..379: note = Pectobacterium actinidiae
  REGION 1..379: note = tr|A0A1V2R020|A0A1V2R020_9GAMM Epoxyqueuosine reductase OS=Pectobacterium actinidiae OX=1507808 GN=queG; PE = 3 SV=1
MSYPYDLNELAQHIKQWGQALGFQQVGICDTDLSAEEPRLQDWLDKQYHGEMDWMARHGMLRARPHELLPGTLRVISVRMNYLPAKAAFASTLRNPELGYVSRYALGRDYHKLLRQRLKKLGDQIQEYCGELNFRPFVDSAPIMERPLAAKAGLGWVGKHSLILNREAGSWFFLGELLIDLPLPVDRPQEEQCGRCVACMTTCPTGAIVAPYTVDARRCISYLTIELEGPIPEEFRPLMGNRIYGCDDCQLICPWNRFSQLTDEADFSPRAALHTPELLALFGWNEEKFLRITEGSPIRRIGHLRWLRNIAVALGNAPYQDSIVLALQARLGESELLDEHIHWAIHQQMERRASLGIDVQSTQKKRLIRAVEKGLPRDA

SEQ ID NO: 79301 - protein, 379 aa, unidentified
  source 1..379: note = Pectobacterium aquaticum
  REGION 1..379: note = tr|A0A426IKM3|A0A426IKM3_9GAMM Epoxyqueuosine reductase OS=Pectobacterium aquaticum OX=2204145 GN=queG; PE = 3 SV=1
MSYPYDLNELAQHIKQWGQALGFQQVGICDTDLSAEEPRLQDWLDKQYHGEMDWMARHGMLRARPHELLPGTLRVISVRMNYLPAKAAFASTLKNPELGYVSRYALGRDYHKLLRQRLKKLGDQIQEYCGELNFRPFVDSAPIMERPLAAKAGLGWVGKHSLILNREAGSWFFLGELLIDLPLPVDRPQEEQCGRCVACMTTCPTGAIVAPYTVDARRCISYLTIELEGPIPEEFRPLMGNRIYGCDDCQLICPWNRFSQLTDEADFSPRAALHTPELLTLFGWNEEKFLRITEGSPIRRIGHLRWLRNIAVALGNAPYQDSIVLALQARLGESELLDEHIHWAIRQQLERRALLEIDVQSTQKKRLIRAVEKGLPRDA

SEQ ID NO: 79302 - protein, 379 aa, Pectobacterium atrosepticum
  REGION 1..379: note = tr|Q6D061|Q6D061_PECAS Epoxyqueuosine reductase; OS = Pectobacterium atrosepticum (strain SCRI 1043 / ATCC BAA-672) OX=218491 GN=queG PE=3 SV=1
MSYPYDLNELAQHIKQWGQALGFQQVGICDTDLSVEEPRLQAWLDKQYHGEMDWMARHGMLRARPHELLPGTLRVISVRMNYLPAKAAFASTLKNPELGYVSRYALGRDYHKLLRQRLKKLGDQIQEYCGELNFRPFVDSAPIMERPLAAKAGLGWVGKHSLILNREAGSWFFLGELLIDLPLPVDRPQEEQCGRCVACMTTCPTGAIVAPYTVDARRCISYLTIELEGSIPEEFRPLMGNRIYGCDDCQLICPWNRFSQLTDEADFSPRAVLHTPELLALFGWNEEKFLRITEGSPIRRIGHLRWLRNIAVALGNAPYQDRIVLALQTRLGESELLDEHIHWAIHQQLERRASLEIDVQSTQKKRLIRAVEKGLPRDA

SEQ ID NO: 79303 - protein, 379 aa, Pectobacterium betavasculorum
  REGION 1..379: note = tr|A0A093UA47|A0A093UA47_9GAMM Epoxyqueuosine reductase OS=Pectobacterium betavasculorum OX=55207; GN = queG PE=3 SV=1
MSYPYDLNELAQHIKQWGQALGFQQVGICDTDLSAEEPRLQAWLDKQYHGEMDWMARHGMLRARPHELLPGTLRVISVRMNYLPAKAAFASTLKNPELGYVSRYALGRDYHKLLRQRLKKLGDQIQEYCGELNFRPFVDSAPIMERPLAAKAGLGWVGKHSLILNREAGSWFFLGELLIDLPLPVDRPQEEQCGRCVACMTTCPTGAIVAPYTVDARRCISYLTIELEGPIPEEFRPLMGNRIYGCDDCQLICPWNRFSQLTDEADFSPRAALHTPELLVLFGWNEEKFLRITEGSPIRRIGHLRWLRNIAVALGNAPYQDSIVLALQTRLGESELLDEHIHWAIRQQLERRASLEIDVQSTQKKRLIRAVEKGLPRDA

SEQ ID NO: 79304 - protein, 379 aa, unidentified
  source 1..379: note = Pectobacterium brasiliense
  REGION 1..379: note = tr|A0A086ELF1|A0A086ELF1_9GAMM Epoxyqueuosine reductase OS=Pectobacterium brasiliense OX=180957 GN=queG; PE = 3 SV=1
MSYPYDLNELAQHIKQWGQALGFQQVGICDTDLSAEEPRLQDWLDKQYHGEMDWMARHGMLRARPHELLPGTLRVISVRMNYLPAKAAFASTLKNPELGYVSRYALGRDYHKLLRQRLKKLGDQIQEYCGELNFRPFVDSAPIMERPLAAKAGLGWVGKHSLILNREAGSWFFLGELLIDLPLPVDRPQEEQCGRCVACMTTCPTGAIVAPYTVDARRCISYLTIELEGPIPEEFRPLMGNRIYGCDDCQLICPWNRFSQLTDEADFSPRAALHTPELLALFSWNEEKFLRITEGSPIRRIGHLRWLRNIAVALGNAPYQDSVVLALQARLGESELLDEHIHWAVHQQLERRALLGIDVQSTQKKRLIRAVEKGLPRDA

SEQ ID NO: 79305 - protein, 379 aa, unidentified
  source 1..379: note = Pectobacterium brasiliense
  REGION 1..379: note = tr|A0A3S0ZX81|A0A3S0ZX81_9GAMM Epoxyqueuosine reductase OS=Pectobacterium brasiliense OX=180957 GN=queG; PE = 3 SV=1
MSYPYDLNELAQHIKQWGQELGFQQVGICDTDLSAEEPRLQDWLDKQYHGEMDWMARHGMLRARPHELLPGTLRVISVRMNYLPAKAAFASTLKNPELGYVSRYALGRDYHKLLRQRLKKLGDQIQEYCGELNFRPFVDSAPIMERPLAAKAGLGWVGKHSLILNREAGSWFFLGELLIDLPLPVDRPQEEQCGRCVACMTTCPTGAIVAPYTVDARRCISYLTIELEGPIPEEFRPLMGNRIYGCDDCQLICPWNRFSQLTDEADFSPRAALHTPELLALFGWNEEKFLRITEGSPIRRIGHLRWLRNIAVALGNAPYQDSIVLALQARLGESELLDEHIHWAVHQQLERRASLGIDVQSTQKKRLIRAVEKGLPRDA

SEQ ID NO: 79306 - protein, 379 aa, Pectobacterium carotovorum; identical to SEQ ID NO: 79305
  REGION 1..379: note = tr|A0A419AEH0|A0A419AEH0_PECCA Epoxyqueuosine reductase OS=Pectobacterium carotovorum OX=554 GN=queG; PE = 3 SV=1

SEQ ID NO: 79307 - protein, 379 aa, Pectobacterium carotovorum
  REGION 1..379: note = tr|C6DFK4|C6DFK4_PECCP Epoxyqueuosine reductase; OS = Pectobacterium carotovorum subsp. carotovorum (strain PC1) OX=561230 GN=queG PE=3 SV=1
MSYPYDLNELAQHIKQWGQELGFQQVGICDTDLSAEEPRLQDWLDKQYHGEMDWMARHGMLRARPHELLPGTLRVISVRMNYLPAKAAFASTLKNPELGYVSRYALGRDYHKLLRQRLKKLGDQIQEYCGELNFRPFVDSAPIMERPLAAKAGLGWVGKHSLILNREAGSWFFLGELLIDLPLPVDLPQEEQCGRCVACMTTCPTGAIVAPYTVDARRCISYLTIELEGPIPEEFRPLMGNRIYGCDDCQLICPWNRFSQLTDEADFSPRAALHTPELLTLFGWNEEKFLRITEGSPIRRIGHLRWLRNIAVALGNAPYQDSIVLALQTRLGESELLDEHIHWAIRQQLERRASLEIDVQSTQKKRLIRAVEKGLPRDA

SEQ ID NO: 79308 - protein, 379 aa, unidentified
  source 1..379: note = Pectobacterium odoriferum
  REGION 1..379: note = tr|A0A094S794|A0A094S794_9GAMM Epoxyqueuosine reductase OS=Pectobacterium odoriferum OX=78398 GN=queG; PE = 3 SV=1
MSYPYDLNELAQHIKQWGQALGFQQVGICDTDLSAEEPRLQDWLDKQYHGEMDWMARHGMLRARPHELLPGTLRVISVRMNYLPAKAAFASTLKTPELGYVSRYALGRDYHKLLRQRLKKLGDQIQEYCGELNFRPFVDSAPIMERPLAAKAGLGWVGKHSLILNREAGSWFFLGELLIDLPLPVDQPQEEQCGRCVACMTTCPTGAIVAPYTVDARRCISYLTIELEGPIPEEFRPLMGNRIYGCDDCQLICPWNRFSQLTDEADFSPRAALHAPELLVLFGWNEEKFLRITEGSPIRRIGHLRWLRNIAVALGNAPYQDSIVLALQARLGESELLDEHIHWAINQQLGRRASLGIDIQSTQKKRLIRAVEKGLPRDA

SEQ ID NO: 79309 - protein, 379 aa, unidentified
  source 1..379: note = Pectobacterium parmentieri
  REGION 1..379: note = tr|A0A0H3IDL2|A0A0H3IDL2_PECPM Epoxyqueuosine reductase OS=Pectobacterium parmentieri OX=1905730 GN=queG; PE = 3 SV=1
MSYPYDLNELAQHIKQWGQALGFQQVGICDTDLSAEEPRLQAWLDKQYHGEMDWMARHGMLRARPHELLPGTLRVISVRMNYLPAKAAFASTLKNPELGYVSRYALGRDYHKLLRQRLKKLGDQIQEYCGELNFRPFVDSAPIMERPLAAKAGLGWVGKHSLILNREAGSWFFLGELLIDLPLPVDRPQEEQCGRCVACMTTCPTGAIVAPYTVDARRCISYLTIELEGPIPEEFRPLMGNRIYGCDDCQLICPWNRFSQLTDEADFSPRAALHTPELLVLFGWNEEKFLRITEGSPIRRIGHLRWLRNIAVALGNAPYQDNIVLALQTRLGESELLNEHIHWAIQQQLARRALLEIDVQSTQKKRLIRAVEKGLPRDA

SEQ ID NO: 79310 - protein, 379 aa, unidentified
  source 1..379: note = Pectobacterium parmentieri
  REGION 1..379: note = tr|A0A3Q9JXP2|A0A3Q9JXP2_PECPM Epoxyqueuosine reductase OS=Pectobacterium parmentieri OX=1905730 GN=queG; PE = 3 SV=1
MSYPYDLNELAQHIKQWGQALGFQQVGICDTDLSAEEPRLQAWLDKQYHGEMDWMARHGMLRARPHELLPGTLRVISVRMNYLPAKAAFASTLKNPELGYVSRYALGRDYHKLLRQRLKKLGDQIQEYCGELNFRPFVDSAPIMERPLAAKAGLGWVGKHSLILNREAGSWFFLGELLIDLPLPVDRPQEEQCGRCVACMTTCPTGAIVAPYTVDARRCISYLTIELEGPIPEEFRPLMGNRIYGCDDCQLICPWNRFSQLTDEADFSPRAALHTPELLVLFGWNEEKFLRITEGSPIRRIGHLRWLRNIAVALGNAPYQDNIVLALQTRLGESELLDEHIHWAIQQQLARRALLEIDVQSTQKKRLIRAVEKGLPRDA

SEQ ID NO: 79311 - protein, 379 aa, unidentified
  source 1..379: note = Pectobacterium peruviense
  REGION 1..379: note = tr|A0A0J5XD85|A0A0J5XD85_9GAMM Epoxyqueuosine reductase OS=Pectobacterium peruviense OX=2066479 GN=queG; PE = 3 SV=1
MSYPYDLNELAQYIKQWGQALGFQQVGICDTDLSAEEPRLQDWLDKQYHGEMDWMARHGMLRARPHELLLGTLRVISVRMNYLPAKAAFASTLKNPELGYVSRYALGRDYHKLLRQRLKKLGDQIQEYCGELNFRPFVDSAPIMERPLAAKAGLGWVGKHSLILNREAGSWFFLGELLIDLPLPVDRPQEEQCGRCVACMTTCPTGAIVAPYTVDARRCISYLTIELEGPIPEEFRPLMGNRIYGCDDCQLICPWNRFSQLTDEADFSPRAALHTPELLVLFGWNEEKFLRITEGSPIRRIGHLRWLRNIAVALGNAPYQDSIVLALQTRLGESELLDEHIHWAIHQQLERRASLEIDVQSTQKKRLVRAVEKGLPRDA

SEQ ID NO: 79312 - protein, 379 aa, unidentified; identical to SEQ ID NO: 79301
  source 1..379: note = Pectobacterium polaris
  REGION 1..379: note = tr|A0A433P207|A0A433P207_9GAMM Epoxyqueuosine reductase OS=Pectobacterium polaris OX=2042057 GN=queG; PE = 3 SV=1

SEQ ID NO: 79313 - protein, 379 aa, unidentified
  source 1..379: note = Pectobacterium polaris
  REGION 1..379: note = tr|A0A3A4AI48|A0A3A4AI48_9GAMM Epoxyqueuosine reductase OS=Pectobacterium polaris OX=2042057 GN=queG; PE = 3 SV=1
MSYPYDLNELAQHIKQWGQALGFQQVGICDTDLSAEEPRLQDWLDKQYHGEMDWMARHGMLRARPHELLPGTLRVISVRMNYLPAKAAFASTLKNPELGYVSRYALGRDYHKLLRQRLKKLGDQIQEYCGELNFRPFVDSAPIMERPLAAKAGLGWVGKHSLILNREAGSWFFLGELLIDLPLPIDRPQEEQCGRCVACMTTCPTGAIVAPYTVDARRCISYLTIELEGPIPEEFRPLMGNRIYGCDDCQLICPWNRFSQLTDEADFSPRAALHTPELLTLFGWNEEKFLRITEGSPIRRIGHLRWLRNIAVALGNAPYQDSIVLALQARLGESELLDEHIHWAIRQQLERRALLEIDVQSTQKKRLIRAVEKGLPRDA

SEQ ID NO: 79314 - protein, 379 aa, unidentified
  source 1..379: note = Pectobacterium polonicum
  REGION 1..379: note = tr|A0A4U7KHX5|A0A4U7KHX5_9GAMM Epoxyqueuosine reductase OS=Pectobacterium polonicum OX=2485124 GN=queG; PE = 3 SV=1
MSYPYDLNELAQHIKQWGQALGFQQVGICDTDLSAEEPRLQDWLDKQYHGEMDWMARHGMLRARPHELLPGTLRVISVRMNYLPAKAAFASTLKNPELGYVSRYALGRDYHKLLRQRLKKLGDQIQEYCGELNFRPFVDSAPIMERPLAAKAGLGWVGKHSLILNREAGSWFFLGELLIDLPLPVDRPQEEQCGRCVACMTTCPTGAIVAPYTVDARRCISYLTIELEGPIPEEFRPLMGNRIYGCDDCQLICPWNRFSQLTDETDFSPRAALHTPELLALFGWNEEKFLRITEGSPIRRIGHLRWLRNIAVALGNAPYQDNIVLALQTRLGESELLDEHIHWAIRQQLARRASLEIDVQSTQKKRLIRAVEKGLPRDA

SEQ ID NO: 79315 - protein, 379 aa, unidentified
  source 1..379: note = Pectobacterium punjabense
  REGION 1..379: note = tr|A0A2T3VUT9|A0A2T3VUT9_9GAMM Epoxyqueuosine reductase OS=Pectobacterium punjabense OX=2108399 GN=queG; PE = 3 SV=1
MSYPYDLNELVQHIKQWGQALGFQQVGICDTDLSAEEPRLQAWLDKQYHGEMDWMARHGMLRARPHELLPGTLRVISVRMNYLPAKAAFASTLKNPELGYVSRYALGRDYHKLLRQRLKKLGDQIQEYCGELNFRPFVDSAPIMERPLAAKAGLGWVGKHSLILNREAGSWFFLGELLIDLPLPVDRPQEEQCGRCVACMTTCPTGAIVAPYTVDARRCISYLTIELEGPIPEEFRPLMGNRIYGCDDCQLICPWNRFSQLTDETDFSPRAALHTPELLTLFGWNEEKFLRITEGSPIRRIGHLRWLRNIAVALGNTPYQDSIVLALQTRLGESELLDEHIHWAIQQQLARRALLEIDVQSTQKKRLIRAVEKGLPRDA

SEQ ID NO: 79316 - protein, 379 aa, Pectobacterium wasabiae
  REGION 1..379: note = tr|A0A1D7YY58|A0A1D7YY58_9GAMM Epoxyqueuosine reductase OS=Pectobacterium wasabiae CFBP 3304 OX=1175631; GN = queG PE=3 SV=1
MSYPYDLNELAQHIKQWGQALGFQQVGICDTDLSAEEPRLQAWLDKQYHGEMDWMARHGMLRARPHELLPGTLRVISVRMNYLPAKAAFASTLKNPELGYVSRYALGRDYHKLLRQRLKKLGDQIQEYCGELNFRPFVDSAPIMERPLAAKAGLGWVGKHSLILNREAGSWFFLGELLIDLPLPVDRPQEEQCGRCVACMTTCPTGAIVAPYTVDARRCISYLTIELEGPIPEEFRPLMGNRIYGCDDCQLICPWNRFSQLTDEADFSPRAALHTPELLLLFGWNEEKFLRITEGSPIRRIGHLRWLRNIAVALGNAPYQDSIVLALQTRLGESELLDEHIHWAIRQQLARRASLEIDVQSTQKKRLIRAVEKGLPRDA

SEQ ID NO: 79317 - protein, 312 aa, Pedobacter africanus
  REGION 1..312: note = tr|A0A1W2DDJ8|A0A1W2DDJ8_9SPHI Epoxyqueuosine reductase OS=Pedobacter africanus OX=151894 GN=queG PE=3; SV = 1
MAANASTYSKMIKDEAFRLGFMQCGIARATFLEEEAPKLEKWLQDNHHGKMGYMENHFDKRLDPRLLVEGSKSVISLSLNYYPDKQQSDPEAPKISKYAYGMDYHQVIKDKLFQLLNYIRQEIGEVDGRAFVDSAPVLDRAWAKRAGIGWIGKNSNLINKKSGSFFFLAELIVDLELEYDHPFETDHCGTCTKCIDACPTEAILSPFVIDAKKCISYLTIELREEIDQDFKDKMDNWMFGCDVCQDVCPWNRFAVPHTEPLFKPNAQLLEMKKEDWLDITEDVFKTIFKNSAVKRTKFKGLTRNIDFIKKTS

SEQ ID NO: 79318 - protein, 327 aa, Pedobacter alluvionis
  REGION 1..327: note = tr|A0A497YCW8|A0A497YCW8_9SPHI Epoxyqueuosine reductase OS=Pedobacter alluvionis OX=475253 GN=queG PE=3; SV = 1
MINENVLIPKPYLCRPVYNNYAKYSQLIKDEALRLGFMACGIAKAEFLEEEAPRLENWLNQNRHGEMKYMENYFDKRLDPRLLVDGAKSVISLSLNYYTEEKQSDPNAPKISKYAYGQDYHTVIKEKLKELTHFIEENIGEVSGRAFVDSAPVLDRAWAKKSGIGWIGKNSNLISKTDGSFFFLAELIVDLELDYDHPYQADYCGSCTRCLDACPTDAIIAPQVVDGTKCISYLTIELKNEIPNEFKDKMSNWMFGCDICQDVCPWNRFSKAHNEEAFKPENGLLDLNAKDLTEITDDVFKKVFKGSAVKRTKFNGLKRNIDFLKPE

SEQ ID NO: 79319 - protein, 311 aa, Pedobacter alluvionis
  REGION 1..311: note = tr|A0A5F0B2Q0|A0A5F0B2Q0_9SPHI Epoxyqueuosine reductase OS=Pedobacter alluvionis OX=475253 GN=queG PE=3; SV = 1
MYNNYAKYSQLIKDEALRLGFMACGIAKAEFLEEEAPRLENWLNQNRHGEMKYMENYFDKRLDPRLLVDGAKSVISLSLNYYTEEKQSDPNAPKISKYAYGQDYHTVIKEKLKELTHFIEENIGEVSGRAFVDSAPVLDRAWAKKSGIGWIGKNSNLISKTDGSFFFLAELIVDLELDYDHPYQADYCGSCTRCLDACPTDAIIAPQVVDGTKCISYLTIELKNEIPNEFKDKMSNWMFGCDICQDVCPWNRFSKAHNEEAFKPENGLLDLNAKDLTEITDDVFKKVFKGSAVKRTKFNGLKRNIDFLKPE

SEQ ID NO: 79320 - protein, 320 aa, unidentified
  source 1..320: note = Pedobacter antarcticus
  REGION 1..320: note = tr|A0A1I1ZY58|A0A1I1ZY58_9SPHI Epoxyqueuosine reductase OS=Pedobacter antarcticus OX=34086 GN=queG PE=3; SV = 1
MRPNSVNYTQLIKDEALRLGFQQCGIAKADFLEEEAPRLEKWLKNQHHGSMSYMENHFDKRLDPRILVDDAKSVISLTLNYFPEQQQIDPDAPRISKYAYGKDYHLVIKDKLFQLLGFIQEQIGEVSGRAFVDSAPVLDRAWAKRAGIGWVGKNSNIISKKTGSFFFLAELIIDLDLVPDQPFTTDHCGSCTKCIDACPTDAILSPAIIDANKCISYLTIELRDEIPAQFNQQMGNWMFGCDICQDVCPWNRFAVPNQEPEFQPAPNLLEMKRDDWLDITEDVFSKLFKNSAVKRTKFKGLVRNLDFIKQNPVNETPTSE

SEQ ID NO: 79321 - protein, 320 aa, unidentified; identical to SEQ ID NO: 79320
  source 1..320: note = Pedobacter antarcticus
  REGION 1..320: note = tr|A0A081PD23|A0A081PD23_9SPHI Epoxyqueuosine reductase OS=Pedobacter antarcticus 4BY OX=1358423 GN=queG; PE = 3 SV=1

SEQ ID NO: 79322 - protein, 311 aa, Pedobacter bauzanensis
  REGION 1..311: note = tr|A0A4R1M317|A0A4R1M317_9SPHI Epoxyqueuosine reductase OS=Pedobacter bauzanensis OX=653929 GN=queG PE=3; SV = 1
MSVASTYSALIKKEAERLGFLSCGISKADFLEDEAPHLERWLKNNYQGELYYMENNFDKRLDPRLLVDDAKSVISLSYNYFTEEKQQDPQAPKLSKYAYGTDYHFVIKDKLKELLLFIQEHIGEVSGRAFVDSAPVLDKAWAERAGLGWIGKHSLLLSKQKGSFFFLSELIVDLELEYDSKIQTDHCGSCTKCIDACPTDALLDNKTVNASKCISYLTIELKESIPSSFSGKMDNWMFGCDICQDVCPWNRFSIQHQEPLFNPHPDLLGMTKQDWEEITEDTFKKIFKKSAVKRTKYAGLKRNITFLDQHT

SEQ ID NO: 79323 - protein, 311 aa, Pedobacter borealis
  REGION 1..311: note = tr|A0A4R8P0Y2|A0A4R8P0Y2_9SPHI Epoxyqueuosine reductase OS=Pedobacter borealis OX=475254 GN=queG PE=3; SV = 1
MYNNEAKYSQLIKEEALRLGFLSCGIAKAEFLEEEAPRLEKWLNQNHHGEMKYMENYFDKRLDPRLLVDGAKSVISLSLNYYTEEKQSDPNAPKISKYAYGQDYHTVIKEKLKELTYFIEENIGEVSGRAFVDSAPVLDRAWAKKSGIGWIGKNSNLISKTDGSFFFLAELIVDLELGYDHTYQADYCGSCTRCLDACPTDAIIAPQVVDGSKCISYLTIELKNEIPNEFKDKMSNWMFGCDICQDVCPWNRFSKAHNEDAFKPENGLLDLNHKDLMEITEDVFKKVFKGSPVKRTKFTGLKRNIDFLKPE

SEQ ID NO: 79324 - protein, 313 aa, Pedobacter caeni
  REGION 1..313: note = tr|A0A1M4X221|A0A1M4X221_9SPHI Epoxyqueuosine reductase OS=Pedobacter caeni OX=288992 GN=queG PE=3 SV=1
MLNNSAKYSKMIKAEALRLGFMQCGIAKAGFLEEEAPRLEQWLANNHHGEMGYMENHFDKRLDPRLLVDDSKSVISLTLNYFPEERQQDPDAPKISKYAYGTDYHTVIKDKLFQLLNFISEEIGEVSGRAFVDSAPVMDRAWAKRAGIGWIGKNSNLINKKSGSFFFLAELIVDLDLEYDTPFETDHCGTCTKCIDACPTDAILSPFIIDAKKCISYLTIELREEIPQSFNDKMENWMFGCDICQDVCPWNRFSVPHSEPKFQPNENLLQMKREDWLDITEDVFKTIFKNSAVKRTKFKGLTRNIDFIKTLPK

SEQ ID NO: 79325 - protein, 311 aa, unidentified
  source 1..311: note = Pedobacter chitinilyticus
  REGION 1..311: note = tr|A0A3S3PDH4|A0A3S3PDH4_9SPHI Epoxyqueuosine reductase OS=Pedobacter chitinilyticus OX=2233776 GN=queG; PE = 3 SV=1
MFNQASKYSHMIKQEAQRLGFMSCGIAKAEFLEEEAPRLENWLKNNHHGEMGYMENYFDKRLDPRLLVEGAKSIVSLTLNYYSEEKQRDEHAPKISKYAYGMDYHAVIKEKLQELMHFIRENIGEVDGRCFVDSAPVMDKAWAQKAGLGWRGKNSNLISKQAGSFFFLAELIIDLDLDYDNPFPTDHCGSCTRCIDACPTNAIVAPYKVDGSKCISYLTIELKNEIPTEFKGKMDNWMFGCDVCQDVCPWNRFATVHNEENFKPKEELLGLSKSELLDMTDEVFKKVFKNSPVKRTKFTGLKRNIDFLKQS

SEQ ID NO: 79326 - protein, 315 aa, Pedobacter cryoconitis
  REGION 1..315: note = tr|A0A127VBD7|A0A127VBD7_9SPHI Epoxyqueuosine reductase OS=Pedobacter cryoconitis OX=188932 GN=queG PE=3; SV = 1
MYNNPSKYSQLIKDEALRLGFMQCGIAKAGFLEEEAPRLEKWLKDNRHGQMSYMENHFDKRLNPTLLVDDAKSVISLTLNYFPEERQTDPDAPKISKYAYGADYHTVIKDKLFLLLSFIEENIGEVSGRAFVDSAPVLDRAWAKRAGIGWIGKNSNIISKKSGSFFFLAELIIDLDLVYDEPFATDHCGTCTKCIDACPTDAILSPFIIDATKCISYLTIELRDEIPKSFDDKMENWMFGCDICQDVCPWNRFSVPHTEPKFKPNENLLGMKREDWLDITEDVFKQIFKNSAVKRTKFKGLTRNIDFIRQIPDES

SEQ ID NO: 79327 - protein, 315 aa, Pedobacter cryoconitis
  REGION 1..315: note = tr|A0A327T585|A0A327T585_9SPHI Epoxyqueuosine reductase OS=Pedobacter cryoconitis OX=188932 GN=queG PE=3; SV = 1
MYNNPAKYSQLIKDEALRLGFMQCGIAKAGFLEEEAPRLEKWLTDNRHGQMSYMENHFDKRLNPTLLVDDAKSVISLTLNYFPEERQTDPDAPKISKYAYGADYHTVIKDKLFLLLSFIEENIGEVSGRAFVDSAPVLDRAWAKRAGIGWIGKNSNIISKKSGSFFFLAELIIDLDLVYDEPFATDHCGTCTKCIDACPTDAILSPFIIDATKCISYLTIELREEIPKSFDDKMENWMFGCDICQDVCPWNRFSVPHTEPKFKPNENLLNMKREDWLDITEDVFKQIFKNSAVKRTKFKGLTRNIDFIRQIPDES

SEQ ID NO: 79328 - protein, 311 aa, Pedobacter duraquae
  REGION 1..311: note = tr|A0A4R6IQ91|A0A4R6IQ91_9SPHI Epoxyqueuosine reductase OS=Pedobacter duraquae OX=425511 GN=queG PE=3; SV = 1
MFSTAATNSKKIKDEAIRLGFMQCGIAKAGFLEEEAPRLERWLADNRHGKMAYMENHFDKRLDPRLLVEDAKSVISLSLNYFPEVIQADPNAPKISKYAYGKDYHLVIKEKLFQLLSFIEEEIGEVAGRAFVDSAPVLDRAWAKQSGLGWIGKNSNLINKKSGSFFFLAELIIDLELEYDTPFLTDHCGTCTRCIDACPTDAILAPAIIDATKCISYLTIELKDQIPEQFSNKMDNWMFGCDICQDVCPWNKFSVPHQEPEFAASESIVHMRKEDWEDITEDVFSKIFKNSAVKRTKFKGLTRNIDFIKRT

SEQ ID NO: 79329 - protein, 314 aa, Pedobacter ginsengisoli
  REGION 1..314: note = tr|A0A2D1U4Z3|A0A2D1U4Z3_9SPHI Epoxyqueuosine reductase OS=Pedobacter ginsengisoli OX=363852 GN=queG; PE = 3 SV=1
MNSNSAKYSKMIKDEAIRLGFMQCGIAKAEFLEDEAPRLEKWLNNNYHGEMAYMENHFDKRLDPRLLVDDSKSVISLTLNYFPEEQQTDPDAPKISKYAYGTDYHLVIKDKLFQLLNFISEEIGEVSGRAFVDSAPVLDRAWAKRAGIGWIGKNSNLISKKSGSFFFLAELIVDLDLQYDNAFETDHCGTCTKCIDACPTEAILSPFIIDAKKCISYLTIELREEIPSTFNDKMDNWMFGCDICQDVCPWNRFSAPHSEPQFQPNEKLLNMKREDWLDITEDVFKSIFKNSAVKRTKFKGLTRNIDFIKKLPDN

SEQ ID NO: 79330 - protein, 311 aa, unidentified
  source 1..311: note = Pedobacter ginsenosidimutans
  REGION 1..311: note = tr|A0A0T5VGT3|A0A0T5VGT3_9SPHI Epoxyqueuosine reductase OS=Pedobacter ginsenosidimutans OX=687842; GN = queG PE=3 SV=1
MYNNSAKYSQLIKDEALRLGFMACGISKAEFLEEEAPRLEKWLNQNHHGEMKYMENYFDKRLDPRLLVEDAKSVISLSLNYYTEEKQSDPDAPKISKYAYGQDYHIVIKDKLKELTHFIEENIGEVSGRAFVDSAPVLDRAWAKKSGIGWIGKNSNLISKTDGSFFFLAELIVDLELDYDHPYQADYCGTCTRCLDACPTDAIIAPQVVDGTKCISYLTIELKNEIPNEFKDKMSNWMFGCDICQDVCPWNRFSKAHNEEAFKPENGLLDLNAKDLIEITDDVFKKVFKGSAVKRTKFTGLKRNIDFLKPE

SEQ ID NO: 79331 - protein, 311 aa, Pedobacter glucosidilyticus
  REGION 1..311: note = tr|A0A0B8YD16|A0A0B8YD16_9SPHI Epoxyqueuosine reductase OS=Pedobacter glucosidilyticus OX=1122941; GN = queG PE=3 SV=1
MKDKQQAYANMIKAEAKRLGFMFCGIAKADFLAEEAPKLEQWLKEGRHGKMSYMENHFDKRLDPRLLVDGAKSVISVALNYYSPQQQTAAEAPKISKYAYGTDYHFVIKDKLKALQQFISENIGEVAGRAFVDSAPVLDKIWAKKAGIGWIGKNSNLLNKKTGSFFFLAELIIDLELAYDLPFQTDHCGTCTKCIDACPTEAIIKPYVVDGSKCISYLTIELKEQIPNEFKGKMDNWMFGCDICQDVCPWNRFSTPHQEEQFNPHPDLLHLNKKDWEEITDDVFSKLFKKSAVKRTKLAGLQRNISFLKPY

SEQ ID NO: 79332 - protein, 318 aa, Pedobacter hartonius
  REGION 1..318: note = tr|A0A1H4H2U8|A0A1H4H2U8_9SPHI Epoxyqueuosine reductase OS=Pedobacter hartonius OX=425514 GN=queG PE=3; SV = 1
MYNNAAKYSQLIKDEAIRLGFMQCGIAKAGFLEEEAPRLENWLKNNHHGQMEYMENHFDKRLDPRLLVDDAKSVISLTLNYFPSESQSDPDAPKISKYAYGTDYHTVIKDKLFQLLNFINETIGAVSGRAFVDSAPVLDRAWAKRAGIGWVGKNSNIISKKSGSFFFLAELIIDLGLAYDEPFQTDHCGSCTRCIDACPTEAILSPFVIDARKCISYLTIELKDEIPKSFDKQMDNWMFGCDICQDVCPWNRFSVPHTEPAFQPGENLLQMKREDWLDITEDVFRQIFKHSAVKRTKFKGLTRNIDFIRQIPGDNAPI

SEQ ID NO: 79333 - protein, 312 aa, Pedobacter heparinus
  REGION 1..312: note = tr|C6XW19|C6XW19_PEDHD Epoxyqueuosine reductase; OS = Pedobacter heparinus (strain ATCC 13125 / DSM 2366 / CIP 104194 / JCM 7457 / NBRC 12017 / NCIMB 9290 / NRRL B-1473 1 / HIM 762-3) OX=485917 GN=queG PE=3 SV=1
MLNNASRYSKLIKAEALRLGFMQCGIAKADFLEEEAPKLEKWLHNNHHGQMAYMENHFDKRLDPRLLVEDSRSVISLTLNYFPAEQQQDPDAPKISKYAYGMDYHQVIKDKLYQLLNFIREEIGEVAGRAFVDSAPVLDRAWAKRAGIGWIGKNSNLINKKSGSFFFLAELIVDLELEYDQPFTADHCGTCTKCIDACPTDAILSPFIIDAKKCISYLTIELKEEIDQDFKGKMDNWMFGCDICQDVCPWNRFSAPHSEPMFKPNERLLQMKREDWQDITEDVFKTIFKNSAVKRTKYKGLTRNIDFIKKSS

SEQ ID NO: 79334 - protein, 311 aa, Pedobacter insulae
  REGION 1..311: note = tr|A0A1I2WNU3|A0A1I2WNU3_9SPHI Epoxyqueuosine reductase OS=Pedobacter insulae OX=414048 GN=queG PE=3 SV=1
MHSKTTKYSQLIKAEALRLGFMACGISKATFLEEEAPRLEQWLKNNHHGEMSYMENHFDKRLDPRLLVEDAKSVISLTLNYFTTENQLDPLAPKISKYAYGEDYHTVIKEKLKALLAFINQEIGEVGGRCFVDSAPVMDKAWAQKSGLGWRGKNSNLISKETGSFFFLAELIIDLELAYDSPFVADHCGSCTRCIDACPTEAIVAPYTVDGSKCISYLTIELKNEIPVTFKDKMENWMFGCDICQDVCPWNRFATPHHETAFNPPTELLAFKKADLIEMTDEVFKRVFKGSAVKRTKFTGLKRNIDFLNRL

SEQ ID NO: 79335 - protein, 312 aa, unidentified
  source 1..312: note = Pedobacter jejuensis
  REGION 1..312: note = tr|A0A3N0BTK8|A0A3N0BTK8_9SPHI Epoxyqueuosine reductase OS=Pedobacter jejuensis OX=1268550 GN=queG PE=3; SV = 1
MFNNSSKYSQLIKDEAIRLGFIGCGISKAEFLETEAPRLEQWLNMNHHGEMKYMENYFDKRLDPRLLVDGAKSVISLSLNYYTDDKQNDPEAPKISKYAYGQDYHSVIKEKLKALLIFIEENIGEVGGRAFVDSAPVLDRAWAQRSGIGWIGKNSNLISKQNGSFFFLAELIVDLELDYDSPFHTDHCGTCTRCLDACPTDAIISPQVVDGSKCISYLTIELKNEIPVEFKDKMDNWMFGCDICQDVCPWNRFSKAHNEDAFKADNGLLELNAKELTEITDEVFRKVFKGSAVKRTKFAGLKRNIDFLKSTE

SEQ ID NO: 79336 - protein, 311 aa, unidentified
  source 1..311: note = Pedobacter kyonggii
  REGION 1..311: note = tr|A0A4Q9HA67|A0A4Q9HA67_9SPHI Epoxyqueuosine reductase OS=Pedobacter kyonggii OX=1926871 GN=queG PE=3; SV = 1
MYNNSAKYSQLIKDEALRLGFMACGISKAEFLEEEAPRLEKWLNQNRHGEMKYMENYFDKRLDPRLLVEDAKSVISLSLNYYTEEKQSDPDAPKISKYAYGQDYHTVIKDKLKELTHFIEENIGEVSGRAFVDSAPVLDRAWAKKSGIGWIGKNSNLISKTDGSFFFLAELIVDLELDYDHPYQADYCGSCTRCLDACPTDAIIAPQVVDGTKCISYLTIELKNEIPSEFKDKMSNWMFGCDICQDVCPWNRFSKAHNESAFKPENGLLDLNAKDLTEITDDVFKKVFKGSAVKRTKFSGLKRNIDFLKPE

SEQ ID NO: 79337 - protein, 311 aa, unidentified
  source 1..311: note = Pedobacter kyungheensis
  REGION 1..311: note = tr|A0A0C1G7C9|A0A0C1G7C9_9SPHI Epoxyqueuosine reductase OS=Pedobacter kyungheensis OX=1069985 GN=queG; PE = 3 SV=1
MYNNSAKYSQLIKDEALRLGFLACGIAKAEFLEEEAPRLEKWLSQNHHGEMKYMENYFDKRLDPRLLVEGAKSVISLSLNYYTDETQSDPDAPKISKYAYGQDYHTVIKDKLKELTHFIETNIGEVSGRAFVDSAPVLDRAWAKKSGIGWIGKNSNLISKSSGSFFFLAELIIDLELDYDHPYQADYCGSCTRCLDACPTDAIIAPQVVDGSKCISYLTIELKNEIPAEFKDKMSNWMFGCDICQDVCPWNRFSKAHNEAAFKPESGLLDLSAKDLTEITDEVFKKVFKGSAVKRTKFAGLKRNIDFLKPE

SEQ ID NO: 79338 - protein, 315 aa, unidentified
  source 1..315: note = Pedobacter lusitanus
  REGION 1..315: note = tr|A0A0D0GB82|A0A0D0GB82_9SPHI Epoxyqueuosine reductase OS=Pedobacter lusitanus OX=1503925 GN=queG PE=3; SV = 1
MYNNPAKYSQLIKDEALRLGFMQCGIAKAGFLEEEAPRLEKWLKDNRHGQMSYMENHFDKRLNPQLLVDDAKSVISLTLNYFPEERQTDPDAPKISKYAYGADYHTVIKDKLFQLLNFIQENIGEVSGRAFVDSAPVLDRAWAKRAGIGWIGKNSNIISKKSGSFFFLAELIIDLDLVYDNPFTTDHCGTCTKCIDACPTDAILSPFIIDATKCISYLTIELREEIPKSFDNKMDNWMFGCDICQDVCPWNRFSVPHTEPEFKPNQNLLGMKREDWLDITEDVFKQIFKNSAVKRTKFKGLTRNIDFIRQIPDEA

SEQ ID NO: 79339 - protein, 309 aa, unidentified
  source 1..309: note = Pedobacter luteus
  REGION 1..309: note = tr|A0A1T5AQG1|A0A1T5AQG1_9SPHI Epoxyqueuosine reductase OS=Pedobacter luteus OX=572036 GN=queG PE=3 SV=1
MISKKDYTKFIKSEAQKLGFLSCGISKAGFLEKEAPLLETWLKNGSNGEMGYMENHFDKRLDPTLLVDGAKSVISLSINYYTDQLQTDPDAPKISRYAFGEDYHKVIKDKLRQLIEIIQEHIGEVNGRAFVDSAPVLDKAWANKSGLGWIGKNSNLISKKVGSFFFLAELITDLELEYDVAPTEDHCGTCTRCIDACPTNAIVEPYVVDGSRCISYLTIELKNEIPSEFKGKMDNWMFGCDICQDVCPWNKFSLLHTEPSFEANPSVLGMTAPEWREITQETFSKVFKNSAVKRTKFSGLKRNIEFLKS

SEQ ID NO: 79340 - protein, 313 aa, Pedobacter metabolipauper
  REGION 1..313: note = tr|A0A4R6T0X3|A0A4R6T0X3_9SPHI Epoxyqueuosine reductase OS=Pedobacter metabolipauper OX=425513 GN=queG; PE = 3 SV=1
MYNNPEKYSKLIKDEALRLGFMQCGIAKAEFLEDEAPRLEKWLHSGHHGEMAYMENHFDKRLDPRLLVDDARSVISLTLNYFPQEVQTDPDAPKISKYAYGSDYHLVIKDKLFQLLNFISENIGEVSGRAFVDSAPVLDRAWAKRAGIGWIGKNSNLINKKSGSFFFLAELIVDLELSYDNPFETDHCGTCTRCIDACPTDAILSPFVIDAKKCISYLTIELRDEIPKTFNDKMDNWMFGCDICQDVCPWNKFSVPHSEPGFKANENLLNMKREDWLDITEDVFRSIFKNSAVKRTKFKGLTRNIDFLKTLPD

SEQ ID NO: 79341 - protein, 312 aa, unidentified
  source 1..312: note = Pedobacter nutrimenti
  REGION 1..312: note = tr|A0A318UMY5|A0A318UMY5_9SPHI Epoxyqueuosine reductase OS=Pedobacter nutrimenti OX=1241337 GN=queG PE=3; SV = 1
MLNNSSRYSKIIKEEALRLGFMQCGISQAVFLEEEAPRLEKWLHQNHHGKMSYMENHFDKRLDPRLLVDDAKSVISLTLNYFPQDRQVDENAPKISKYAYGTDYHLVIKDKLFQLLEFIREHIGEVSGRAFVDSAPVLDRAWAKKSGIGWVGKNSNIISKKSGSFFFLAELIVDLDLEYDHPFTTDHCGTCTKCMDACPTEAILSPYIIDAKKCISYLTIELKEEIPATFRDKMDNWMFGCDICQDVCPWNRFSVPHAEPLFKPKENLLEMKKEDWLDITDEVFKTIFKNSAVKRTKFKGLTRNIEFIKKTS

SEQ ID NO: 79342 - protein, 312 aa, Pedobacter nyackensis
  REGION 1..312: note = tr|A0A1W2DTQ0|A0A1W2DTQ0_9SPHI Epoxyqueuosine reductase OS=Pedobacter nyackensis OX=475255 GN=queG PE=3; SV = 1
MLNNASRYSKMIKAEASRLGFMQCGIAKAEFLEDEAPKLEKWLKNKHHGQMAYMENHFDKRLDPRLLVDDSKSVISLTLNYFPEERQTDPAAPKISKYAYGADYHQVIKDKLFQLLNFIGEEIGEVAGRAFVDSAPVLDRAWAKRAGIGWIGKNSNLINKKNGSFFFLAELIVDLELEYDNPFQTDHCGTCTKCIDACPTEAILSPFVIDANKCISYLTIELREEIDPAFQNKMDNWMFGCDVCQDVCPWNRFSAPNVEPLFKPNEQLLQMKREDWLDITEDVFKTIFKNSAVKRTKFKGLTRNIDFIKKTL

SEQ ID NO: 79343 - protein, 311 aa, unidentified
  source 1..311: note = Pedobacter psychrophilus
  REGION 1..311: note = tr|A0A179DBJ5|A0A179DBJ5_9SPHI Epoxyqueuosine reductase OS=Pedobacter psychrophilus OX=1826909 GN=queG; PE = 3 SV=1
MLNSKNLYTEIIKAEAKRLGFSFCGISKAGFLEEEAPRLENWLNNNYNGKMDYMNNHFDKRLDPRLLVDDAKSVILLSLNYYTEEGQTDVNAPKISKYAYGKDYHFVIKDKLKSLMHFIEENIGEVKGRAFVDSAPVMDKAWAKKAGLGWIGKNTNLISRDNGSFFFIAELITDLDLNYDNPFEDDFCGTCTKCIDACPTDAIIDPYVVDGSKCISYLTIELKDQIPEEFKGKMDNWAFGCDICQDVCPWNRFSVPHQHEEFKPHPDLLKLNKKDWEEITSDVFSEVFRNSAVKRTKLEGLKRNISFLKER

SEQ ID NO: 79344 - protein, 327 aa, unidentified
  source 1..327: note = Pedobacter psychrotolerans
  REGION 1..327: note = tr|A0A4R2HBN9|A0A4R2HBN9_9SPHI Epoxyqueuosine reductase OS=Pedobacter psychrotolerans OX=1843235 GN=queG; PE = 3 SV=1
MINQNVLNPKPYLCSSVYNNATKYSQLIKNEAKRLGFLDVGISKAEFLESEAPRLEKWLHQNHHGEMKYMENYFDKRLDPRLLVDGAKSVISLSLNYYTEEKQLDPNAPKISKYAYGQDYHTVIKDKLKALTHFIEENIGEVSGRAFVDSAPVLDRAWAKKSGIGWIGKNSNLISKTEGSFFFLAELIVDLALDYDHPFQTDHCGTCTRCLDACPTDAIIAPQVVDGTKCISYLTIELKNEIPTEFKDKMSNWMFGCDICQDVCPWNRFSKAHNEEAFKPENGLLDLSAKDLTEITDDVFKKVFKGSAVKRTKYNGLKRNIDFLKPE

SEQ ID NO: 79345 - protein, 300 aa, Pedobacter rhizosphaerae
  REGION 1..300: note = tr|A0A1H9M0Y2|A0A1H9M0Y2_9SPHI Epoxyqueuosine reductase OS=Pedobacter rhizosphaerae OX=390241 GN=queG; PE = 3 SV=1
MIKEEALRLGFIACGISKATFLEEEAPRLENWLLQNHHGEMKYMENYFDKRLDPRLLVDDAKSVISLSLNYYTPDKQTDPNAPKISKYAYGQDYHTVIKEKLKELLFFIEENIGAVSGRAFVDSAPVLDRAWAKRSGIGWIGKNSNLISKTDGSFFFLAELIIDLELDYDHPFQTDHCGTCTRCLDACPTDAIIAPQIVDGSKCISYLTIELKEEIPNEFKDKMSNWMFGCDICQDVCPWNRFSKAHNEQAFMPENGLLDLSAKELTEITDEVFKKVFKGSAVKRTKFSGLKRNIDFLKE

SEQ ID NO: 79346 - protein, 309 aa, unidentified
  source 1..309: note = Pedobacter ruber
  REGION 1..309: note = tr|A0A1G9X7W2|A0A1G9X7W2_9SPHI Epoxyqueuosine reductase OS=Pedobacter ruber OX=990371 GN=queG PE=3 SV=1
MINRAQYSRFIKSEALKLGFLFCGISKAEFLEEEAPRLENWLKKGYNAEMSYMENHFDKRLDPCKLVYGAKSVISLALNYYTDQKQKDPFAPKISQYAYGDDYHAVIKEKLNQLMQLIQEGIGEVSGRSFVDSAPVLDKVWAKKAGLGWIGKHTNLINKKSGSFFFLAELIIDLDLEYDLAPTKDHCGTCTKCIDACPTDAIVGPYVVDGSRCISYLTIELKNELPTEFKGKMDNWMFGCDICQDVCPWNKFSVLNTEPLFNPHDDLLELSQRDWQEINEDTFKKVFENSAVKRTKFSGLKRNIDFLRS

SEQ ID NO: 79347 - protein, 318 aa, Pedobacter soli
  REGION 1..318: note = tr|A0A1G6SP12|A0A1G6SP12_9SPHI Epoxyqueuosine reductase OS=Pedobacter soli OX=390242 GN=queG PE=3 SV=1
MPYLCRLVYNNSAKYSQLIKDEALRLGFLACGIAKAEFLEEEAPRLEKWLSQNHHGEMKYMENYFDKRLDPRLLVEGAKSVISLSLNYYTDETQSDPDAPKISKYAYGLDYHTVIKDKLKELTHFIETNIGEVSGRAFVDSAPVLDRAWAKKSGIGWIGKNSNLISKSSGSFFFLAELIIDLELDYDNPYQADYCGSCTRCLDACPTDAIIAPQVVDGSKCISYLTIELKNEIPTAFKDKMSNWMFGCDICQDVCPWNRFSKAHNEAAFKPESGLLDLSAKDLTEITDEVFKKVFKGSAVKRTKFAGLKRNIDFLKPE

SEQ ID NO: 79348 - protein, 77 aa, Pedobacter sp.
  REGION 1..77: note = tr|A0A519VMS4|A0A519VMS4_9SPHI tRNA epoxyqueuosine(34) reductase QueG (Fragment) OS=Pedobacter sp. OX=1411316 GN=EOO85_33910 PE=4 SV=1
MFNQVSKYSQMIKREALRLGFMSCGIAKAEFLEEEAPRLEKWLKNNHHGEMSYMENHFDKRLDPRLLVEGSKSIVSL

SEQ ID NO: 79349 - protein, 314 aa, Pedobacter sp.
  REGION 1..314: note = tr|A0A3E0EIN5|A0A3E0EIN5_9SPHI Epoxyqueuosine reductase OS=Pedobacter sp. YR510 OX=2135720 GN=queG PE=3; SV = 1
MHFVYNNAVKYSQLIKDEAIRLGFLSCGISKADFLEEEAPRLEQWLNKNHHGEMKYMENYFDKRLDPRLLVDGAKSVISLSLNYYTEEKQADPNAPKISKYAYGQDYHHVIKDKLKALTHFIEENIGEVSGRAFVDSAPVLDRAWAKKSGIGWVGKNSNLISKTDGSFFFLAELIIDLELDYDHPFQTDHCGTCTRCIDACPTDAIIAPQVVDGTKCISYLTIELKNEIPNEFKDKMSNWMFGCDICQDVCPWNRFSKVHSEAAFKAENGLLDLTEKDLTEITDEVFKKVFKGSAVKRTKLAGLKRNIDFLKTE

SEQ ID NO: 79350 - protein, 313 aa, Pedobacter steynii
  REGION 1..313: note = tr|A0A1D7QP14|A0A1D7QP14_9SPHI Epoxyqueuosine reductase OS=Pedobacter steynii OX=430522 GN=queG PE=3 SV=1
MLNNSVKYSRMIKAEALRLGFMQCGIAKADFLEEEASRLEKWLKNNHHGEMGYMENHFDKRLDPRLLVDDSKSVISLTLNYFPEERQQDPDAPKISKYAYGTDYHLVIKDKLFQLLNFISEEIGEVSGRAFVDSAPVMDRAWAKRAGIGWIGKNSNLINKKSGSFFFLAELIVDLELEYDNPFETDHCGTCTKCIDACPTDAILSPFIIDAKKCISYLTIELREEIPQSFNDKMENWMFGCDICQDVCPWNRFSVPHSEPKFQPNENLLQMKREDWLDITEDVFKTIFKNSAVKRTKFKGLTRNIDFIKTAPK

SEQ ID NO: 79351 - protein, 313 aa, Pedobacter steynii
  REGION 1..313: note = tr|A0A1G9JXJ9|A0A1G9JXJ9_9SPHI Epoxyqueuosine reductase OS=Pedobacter steynii OX=430522 GN=queG PE=3 SV=1
MLNNSAKYSKMIKAEALRLGFMQCGIAKAGFLEEEAPRLTKWLENNHHGEMAYMENHFDKRLDPRLLVDDSKSVISLTLNYFPEERQADPDAPKISKYAYGTDYHLVIKDKLFQLLNFISEEIGEVSGRAFVDSAPVMDRAWAKRAGIGWIGKNSNLINKKSGSFFFLAELIIDLDLEYDSPFETDHCGTCTKCIDACPTDAILSPFIIDAKKCISYLTIELREEIPQSFNDKMENWMFGCDICQDVCPWNRFSVPHSEPKFQPNENLLQMKKEDWLDITEDVFKAIFKNSAVKRTKFKGLTRNIDFIKTVPK

SEQ ID NO: 79352 - protein, 311 aa, Pedobacter suwonensis; identical to SEQ ID NO: 79323
  REGION 1..311: note = tr|A0A1I0U685|A0A1I0U685_9SPHI Epoxyqueuosine reductase OS=Pedobacter suwonensis OX=332999 GN=queG PE=3; SV = 1

SEQ ID NO: 79353 - protein, 311 aa, Pedobacter terrae
  REGION 1..311: note = tr|A0A561GFZ5|A0A561GFZ5_9SPHI Epoxyqueuosine reductase OS=Pedobacter terrae OX=405671 GN=queG PE=3 SV=1
MYNNSAKYSQLIKDEALRLGFIACGIAKAEFLEEEAPRLENWLNQNRHGEMKYMENYFDKRLDPRLLVDGAKSVISLSLNYYTEEKQSDPNAPKISKYAYGQDYHTVIKEKLKELTHFIEENIGEVSGRAFVDSAPVLDRAWAKKSGIGWIGKNANLISKTDGSFFFLAELIVDLELDYDHPYQADYCGSCTRCLDACPTDAIIAPQVVDGTKCISYLTIELKNEIPNEFKHKMGNWMFGCDICQDVCPWNRFAKAHDEEAFKPENGLLDLNAKELMEITDDVFKKVFKGSAVKRTKFTGLKRNIDFLKPE

SEQ ID NO: 79354 - protein, 311 aa, Pedobacter terrae
  REGION 1..311: note = tr|A0A1G7P5D1|A0A1G7P5D1_9SPHI Epoxyqueuosine reductase OS=Pedobacter terrae OX=405671 GN=queG PE=3 SV=1
MYNNHVKYSQLIKEEAFRLGFLSCGIAKAEFLEEEAPRLENWLNQNRHGEMKYMENYFDKRLDPRLLVDGAKSVISLSLNYYTEEKQSDPNAPKISKYAYGQDYHTVIKEKLKELTHFIEENIGEVSGRAFVDSAPVLDRAWAKKSGIGWIGKNSNLISKTDGSFFFLAELIVDLELDYDHPYQADYCGSCTRCLDACPTDAIIAPQVVDGSKCISYLTIELKNEIPNAFKDKMSNWMFGCDICQDVCPWNRFAKTHNEDAFKPENGLLDLNAKDLMEITDDVFKKVFKGSAVKRTKFTGLKRNIDFLKSE

SEQ ID NO: 79355 - protein, 321 aa, unidentified
  source 1..321: note = Pedobacter tournemirensis
  REGION 1..321: note = tr|A0A4Q0MGD8|A0A4Q0MGD8_9SPHI Epoxyqueuosine reductase OS=Pedobacter tournemirensis OX=699437 GN=queG; PE = 3 SV=1
MFTNATKYSKLIKDEALKLGFMFCGISKATYLEEEAPRLEAWLSQGKHGKMAYMENHFDKRLDPRKLVEGAKSVISLGLNYYTDAQPIDTMAPKISKYAYGKDYHDVIKEKLKELFKIMSDNIGDIGGRAFVDSAPVLDRAWAKRSGLGWIGKNSNLINKHSGSFFFLAELIVDLELEYDMPLAKDHCGTCTRCIDACPTEAIVAPQVVDGSRCISYLTIELKEELPIEFKDKMDNWMFGCDICQDVCPWNRFSTLHNEAAFTPHPSLLDMNRTEWEEITEDIFQQLFKGSPVKRTKFSGLKRNIEFLRTFENAPSLIEGD

SEQ ID NO: 79356 - protein, 321 aa, unidentified
  source 1..321: note = Pedobacter tournemirensis
  REGION 1..321: note = tr|A0A543GYN9|A0A543GYN9_9SPHI Epoxyqueuosine reductase OS=Pedobacter tournemirensis OX=699437 GN=queG; PE = 3 SV=1
MFTNATKYSKLIKDEALKLGFMFCGISKATYLEEEAPRLEAWLSQGKHGKMAYMENHFDKRLDPRKLVEGAKSVISLGLNYYTDAQPIDTMAPKISKYAYGKDYHDVIKEKLKELFKIMSDNIGDIGGRAFVDSAPVLDRAWAKRSGLGWIGKNSNLINKHSGSFFFLAELIVDLELEYDMPLAKDHCGTCTRCIDACPTEAIVAPQVVDGSRCISYLTIELKEELPIEFKDKMDNWMFGCDICQDVCPWNRFSTLHNEAAFTPHPSLLDMNRTEWEEITEDIFQQLFKGSPVKRTKFTGLKRNIDFLRTLENVPSFTEGD

SEQ ID NO: 79357 - protein, 318 aa, Pedobacter westerhofensis
  REGION 1..318: note = tr|A0A521CY82|A0A521CY82_9SPHI Epoxyqueuosine reductase OS=Pedobacter westerhofensis OX=425512 GN=queG; PE = 3 SV=1
MYNNAAKYSKLIKDEALRLGFMQCGIAKAGFLEEEAPRLENWLKNQHHGQMAYMENHFDKRLDPRLLVEDAKSVISLTLNYFPVEQQSDPNAPKISKYAYGADYHTVIKDKMFQLLNFINEQIGAVSGRAFVDSAPVLDRAWAKRAGIGWVGKNSNIISKKSGSFFFLAELIVDLDLEYDAPFATDHCGTCTKCIDACPTDAILSPFVIDANKCISYLTIELREEIPATFGNQMENWMFGCDICQDVCPWNRFSAPHTEPAFEPNAQLLQMKREDWLDITEDVFKQIFKHSAVKRTKFKGLTRNIDFIKQLPAAEGKC

SEQ ID NO: 79358 - protein, 314 aa, unidentified
  source 1..314: note = Pedobacter xixiisoli
  REGION 1..314: note = tr|A0A285ZU41|A0A285ZU41_9SPHI Epoxyqueuosine reductase OS=Pedobacter xixiisoli OX=1476464 GN=queG PE=3; SV = 1
MQKMFNQASKYSQMIKQEALRLGFMSCGIAKADFLEEEAPRLENWLEANHHGEMAYMENYFDKRLDPRILVEGSKSIVSLTLNYFTEEKQIDINAPKISKYAYGMDYHSVIKDKLQELMAFIREEIGEVDGRCFVDSAPVMDKAWAQKAGLGWRGKNSNLISKQAGSFFFLAELIIDLELEYDNPFPTDHCGSCTRCIDACPTDAIIAPYTVDGSRCISYLTIELKNEIPAEFKGKMDNWMFGCDVCQDVCPWNRFSTVHQEENFTPKEDLLGLSKSDLIEMTDEVFKRVFKNSPVKRTKYNGLKRNIDFLQEP

SEQ ID NO: 79359 - protein, 311 aa, unidentified
  source 1..311: note = Pedobacter yonginense
  REGION 1..311: note = tr|A0A317EQF1|A0A317EQF1_9SPHI Epoxyqueuosine reductase OS=Pedobacter yonginense OX=651869 GN=queG PE=3; SV = 1
MYNNSAKYSQLIKDEAIRLGFLSCGISKAEFLEEEAPRLEKWLKNNHHGEMKYMENYFDKRLDPRLLVDDAKSVISLSLNYYTKENQTDVHAPKISKYAYGQDYHTVIKEKLKFLLSFIEENIGEVSGRAFVDSAPVLDRAWAKKSGIGWVGKNSNLISKTDGSFFFLAELIIDLELDYDYPFQTDHCGTCTRCLDACPTDAIIAPQVVDASKCISYLTIELKEEIPTEFKDKMANWMFGCDICQDVCPWNRFSKAHNEEAFNPQKGLLDLNEKDLIELTDEVFTKVFKGSAVKRTKFKGLKRNIDFLKSS

SEQ ID NO: 79360 - protein, 312 aa, unidentified
  source 1..312: note = Pedobacter yulinensis
  REGION 1..312: note = tr|A0A2T3HKK6|A0A2T3HKK6_9SPHI Epoxyqueuosine reductase OS=Pedobacter yulinensis OX=2126353 GN=queG PE=3; SV = 1
MATKSSSYAAMIKAEATRLGFFQCGIARAAFLEEEAPRLENWLKQNAHGEMAYMENHFDKRLDPRLLVPGARSVISLALNYYTDQKQEDPEAPKISKYAFGTDYHTVIKEKLFALLDFIRQNIGDVDGRAFVDSAPVMDKAWAKRAGLGWQGKNSNLISQKKGSFFFLAELIIDLELDYDEAFQNDHCGSCTRCIDACPTDAIAQPYVVDGSRCISYLTIELKNEIPAAFKGKMDNWVFGCDICQDVCPWNRFSTVHQEQAFRPADGLLNMSREQISEITEDVFRKVFKGSAVKRTKFSGLQRNIDFLRETD

SEQ ID NO: 79361 - protein, 322 aa, unidentified
  source 1..322: note = Pedosphaera parvula
  REGION 1..322: note = tr|B9XE33|B9XE33_PEDPL Uncharacterized protein; OS = Pedosphaera parvula (strain Ellin514) OX=320771; GN = Cflav_PD4587 PE=4 SV=1
MTSAAPPATAELFQRWLAAGKHGGMSWLERNAHKRIDPQQVLANAKSIITLAVSYSPCSVLNPPRSTGLIARYARFADYHDVLAGRLKALTDFLNQLAGEGTRSLWYVDTGPLLERDIAQRSGLGFVGKHTNIISRRLGNWIFLSEIITTLELAPDTPEHNRCGSCTRCLTACPTNAITAPFQLDARRCISYLTIELKGSIPVELRPLIGNRIYGCDDCLAACPWNRFAQEGSMMKPHARPDLATPDLIELLSLDDTAFKQRFAGTPMLRTKRRGILRNVCVALGNIGDDSALPVLEHAAQDTDPIIAEHAQWAMEQIRQRE

SEQ ID NO: 79362 - protein, 349 aa, unidentified
  source 1..349: note = Pedosphaera sp.
  REGION 1..349: note = tr|A0A2D8UTD4|A0A2D8UTD4_9BACT tRNA epoxyqueuosine(34) reductase QueG OS=Pedosphaera sp.; OX = 2024890 GN=queG PE=4 SV=1
MSSSLEQPIREAAWKLGFGACQFTHAGQPDRFSAYQKWIQDGMHGEMSYLDRHQEKKGDLQKVLPGMKSIISLATSYLPPESSAPHPETFTGKVARYARFEDYHHVLEAPLKALCKELETLGGKGHTHLHYVDTGPIMERDLAQRAGLGFTGKHTNLISRKLGNWFFISEILTTLKLIPDKPEPNRCGHCARCLEACPTEAITEPFKLDARRCISYWTIEYKGSIPMEMRPLIGDRVFGCDDCLEVCPWNRFAKESERMKPVYLERLHQPDLLEWLELDDEGFKQKFRGTPMIRTKRRGLLRNVCVALGNTANAQALPALEKARQDPNGLIAEHARWAIDQIKKRLNSR

SEQ ID NO: 79363 - protein, 403 aa, unidentified
  source 1..403: note = Pedosphaera sp.
  REGION 1..403: note = tr|A0A2A2RRC5|A0A2A2RRC5_9BACT Epoxyqueuosine reductase OS=Pedosphaera sp. Tous-C6FEB OX=1982324 GN=queG; PE = 3 SV=1
MRRAGEHGAALGEGNRRTCAAQFPRRRPSAAADVKAAIRQRARELGFDECRFTSAAAPEHAAHLDRWLAAGQHGEMAWIARNAHKRVDPQQVLAGARTVICLAVSYAGEEAVSIQCSVSSGGTEAPARKTEHGSLNTGVVARYARFPDYHDLLAEPLRQLTAFVDQFGGGTRSLWYVDTGPVLERDLAQRAGLGFAGKHTNLISRRLGNWFFLAEILTPLALEPDAPEKNRCGSCTRCMTACPTAAITAPFQLDARRCISYLTIELKGAIPVELRPALGNRIYGCDDCLAACPWNRFAQAGSLMRAHARNDLAQPELLALLALDETAFKRRFAGTPMLRTKRRGLLRNVCVALGNVGDAAALPALHQAAADPEPLIAEHARWAIQQIAQRSGGTAPPEGASGN

SEQ ID NO: 79364 - protein, 367 aa, unidentified
  source 1..367: note = Pelagibaca abyssi
  REGION 1..367: note = tr|A0A1P8UUH1|A0A1P8UUH1_9RHOB Epoxyqueuosine reductase OS=Pelagibaca abyssi OX=1250539 GN=queG PE=3 SV=1
MTLKARLISEAQEVGFAACRICRPGDVPQAASRLAAFLEAGYHGQMGWMAERTGWRGDPQALWPEARSVIMLAENYGPEADPLAVLEARDRAAISVYAQNRDYHDVVKKKLKRLGRWLLAEAERGGGKDLGGVLLSSAEPTAAHAAAKPPEIKVFVDTAPVMEKPLGQAAGLGWQGKHTNLVSREIGSWFFLGAIFTTLELPPDGAERDHCGSCRACLDACPTDAFPAPYKLDARRCISYLTIEHKGPVDEALRPLLGNRIYGCDDCLAVCPWNKFARTAHEVKYHARPDLQAPQLAELAGLDDAAFRALFSGSPIKRIGRDRFLRNVCYAIGNSGDAALLPAAQALCEDPDETLRDAARWAVARLS

SEQ ID NO: 79365 - protein, 394 aa, unidentified
  source 1..394: note = Pelagibacteraceae bacterium
  REGION 1..394: note = tr|A0A2D5WY17|A0A2D5WY17_9PROT tRNA epoxyqueuosine(34) reductase QueG OS=Pelagibacteraceae bacterium OX=2026775 GN=queG PE=4 SV=1
  VARIANT 199: note = Xaa can be any naturally occurring amino acid
  VARIANT 305: note = Xaa can be any naturally occurring amino acid
MSKRNNSHTEIPTKRKFTEADSSINLKSSEKKLIESAILFGFDQAKIVDIKKTKNQNIELLNFLEKNYHGEMSWMADRTEIRSDPKNIWNEAKSILVLASNYHFHENSLSLLEKKDKGIISVYARGRDYHLTIKKRLKSLSRWIVENYKCNIKYFVDTAPVMEKPLAMKAGIGWQGKHTNIVSKEYGSWLFLSSIFLDXTLESNDEMIDHCGSCQRCIDICPTDAIERPYHINASKCISYLTIEHKSHIPEIFRKKIGNRVYGCDDCLAICPWNKYAKKTTNIDFLPRDEFNEPKLKNFLKLDDXGFRKLFSTTSIKRIGRNRFLRNVLIAVGNSGEKNFIEDIIPLLNDESNLVRAMAIWSLNQLCEKEKFEKLKKQYFHLESDQDVIKEWNE

SEQ ID NO: 79366 - protein, 371 aa, unidentified
  source 1..371: note = Pelagibacteraceae bacterium
  REGION 1..371: note = tr|A0A1Z8V100|A0A1Z8V100_9PROT tRNA epoxyqueuosine(34) reductase QueG OS=Pelagibacteraceae bacterium TMED65 OX=1986644 GN=CBC25_02060 PE=4 SV=1
MKMKDLKKKINIEVLNNGFDVLGFTKVHVNKEIGKNYSEFLKNNCHGEMKWLERHYEKKINPRLIWNDVKTILVVGQNYAPNENPLKYNQERNKANISVYARNHDYHKIMQDKLLNIQSWLKNELKMQSKVFVDTSPILEKYFAEKANLGWQGKHTNLVSKKYGSWLFLGEIFLPIDIEDKYEEQGDCGTCEKCLDICPTNAFLGNNKIDARKCISYLTIEHKGPIPMTLRKKIGNKVYGCDDCLSICPWNKFSTETKEDKLNSNKSLNNLDFFLNFNKQKFEIYFSESPVKRIGWERFLRNIIIASGNSQNISLIDSLYPHLKNDYPIIRGACVWSLFQLLCRNEKNKLRRKLLLEEKNEYVIFELRMNS

SEQ ID NO: 79367 - protein, 389 aa, unidentified
  source 1..389: note = Pelagibacterales bacterium
  REGION 1..389: note = tr|A0A2F0AJV4|A0A2F0AJV4_9PROT tRNA epoxyqueuosine(34) reductase QueG OS=Pelagibacterales bacterium OX=2026776 GN=queG PE=4 SV=1
MILLLLHITKIWIFELTDTFFDKIEKYSKSLGFQDIKVTNFSDFNIYSKHLREFIKNKFYGEMNWIKEKSLIRENPTNIWEEAKSALVFGLNYGPDYSPFSELKNKKTGYISIYARRKDYHKVIKSKLKNIGRFICRNSDIKVKVFVDTAPIMEKPLAELSNMGWIGKHTNLVSKKYGSWLFLGIILTNYNFNQSKKHKINNCGTCNACNEACPTNAFTSPYKLDARKCISYLTIEHKTHIKRKYRSLIGNRIFGCDDCLAVCPWNKFAKTHSDIKLDINNNLVLQPLKSLVSLDEESFRKKFSGTPLKRLGYNRFLRNILIAIGNSGDKSLVDCAINKLEHNSSLVRAMAVWALFQLSADRFKEEKKLRYSKERDLDVREEWHEGNIK

SEQ ID NO: 79368 - protein, 377 aa, unidentified
  source 1..377: note = Pelagibacterales bacterium
  REGION 1..377: note = tr|A0A2D5FV79|A0A2D5FV79_9PROT tRNA epoxyqueuosine(34) reductase QueG OS=Pelagibacterales bacterium OX=2026776 GN=queG PE=4 SV=1
MKNLHEKIKSKALELEFDAIGFCEADLPESVTKHLHEFIDKGRHGSMKWLAETSHRRSQPRNMWQSAMTAIVLGCNYGPEYDPLKALNNKNIGNISVYAQNKDYHKWVKGRLKNLAGWLVSKTKGQVKVFVDTAPLMEKPLAEISKIGWVGKHTNLVSRDFGSWLFLGVILLDLNIIEEKNKIQKSNCGTCSQCIDICPTNAFVAPYKLDANKCISYLTIEHKTHIPREYRSLMGNRIYGCDDCLAVCPWNKYAKISNNMSFLPREDLKKPSLESLSILSDKDFRVYFSGSPIKRIGRNQFIRNVLIAMGNSSNKLLVKHIIDLLGDSSPIVRLSAIWALGQLCQESFFIEMNKRVNEEKDKEVISEWLETKKEINH

SEQ ID NO: 79369 - protein, 373 aa, Pelagibacterium halotolerans
  REGION 1..373: note = tr|G4R994|G4R994_PELHB Iron-sulfur cluster-binding protein OS=Pelagibacterium halotolerans (strain DSM 22347 / JCM 15775 / CGMCC 1.7692 / B2) OX=1082931; GN = KKY_3442PE=4 SV=1
MSAGGETIVAQLRARASFLGFSTFGIAPADARPDLPQKLQSALQSGWHGDMEWMEETRDRRESPAALWPAVKSVVMVGANYAPDENPLNRLTDKSLANVSVYAQMRDYHDVIKGRLKDLAGLLARRTGAEVKVFVDTAPVMEKPLAEAAGLGWQGKHTVLLSRDAGSWLFLGTIFTSAELPASTPEAEKCGTCTKCLDICPTDAFPAPFRLDARKCLAYYSVEHKGQIPLQFRKPMGNRVFGCDDCLAVCPWNKFASATRDAKLSARETIRDAGLSDMLALDDRRFRDFFAQTPVKRLGSARFLRNCLVAAGNSGDRHHLPAIERLFTHESPLVRGMAIWAVRQLADTAETEGLRAKTLATETDPEVRAEWSQ

SEQ ID NO: 79370 - protein, 371 aa, Pelagibacterium luteolum
  REGION 1..371: note = tr|A0A1G7SQ16|A0A1G7SQ16_9RHIZ Epoxyqueuosine reductase OS=Pelagibacterium luteolum OX=440168 GN=queG; PE = 3 SV=1
MSADGNTIVSELRARAKTLGFDSVGITSADARPDLSQKLASALDQHWHAGMEWMEETRERRQQPKALWPDVKSIIMVGANYGPAENPLDRLVDKNLANVSVYAQMRDYHEVIKGRLKDLAGFLARRTGAEVKVFVDTAPVMEKPLAEAAGLGWQGKHTVLLSRDAGSWLFLGAIFTSADLPADAPEPEKCGSCTRCLDICPTNAFPAPFRLDARKCLAYYSVEHKGQIPIEFRKPMGNRVFGCDDCLAVCPWNKFARQTRDDKLAARETIRDAQLSDMLALDDPAFRDFFAQTPVKRLGAARFLRNCLVAAGNSGDHTHIPAVSRALAHESPLVRGMAVWALRQLAEPDEAAGYRHHTIETDLEVLAEWSH

SEQ ID NO: 79371 - protein, 373 aa, Pelagibacterium sp.
  REGION 1..373: note = tr|A0A3D3SR38|A0A3D3SR38_9RHIZ Epoxyqueuosine reductase OS=Pelagibacterium sp. OX=1967288 GN=queG PE=3; SV = 1
MSSKGDSIVAELRARAADLGFAGFGIAPADARPDLPQKLQSALQSGWHADMGWMADTEERRKSPAALWPDVKSVIMVGANYGPEENPLDRLADTSLANVSVYAQMRDYHDVIKGRLKDLAGLLARRTGAEVKVFVDTAPVMEKPLAEAAGLGWQGKHTVLLSREAGSWLFLGAIFTSADLPASTPAEEKCGTCTKCLDICPTDAFPAPFRLDARKCLAYYSVEHKGQIPVEFRKPMGNRVFGCDDCLAVCPWNKFASATRDAKLSARQAIRNAGLSDMLALSDAAFRDFFAQTPVKRLGSARFLRNCLVAAGNSGDTAYLAAIKRLIAHDSPLVRGMAIWALRQLAREGEADAQRARSLATEPDPEVRAEWSH

SEQ ID NO: 79372 - protein, 371 aa, Pelagibacterium sp.
  REGION 1..371: note = tr|A0A369W437|A0A369W437_9RHIZ Epoxyqueuosine reductase OS=Pelagibacterium sp. XYN52 OX=2282655 GN=queG; PE = 3 SV=1
MTPEGDRLVAELRARATQLGFDSLGIARADARPDLAARLGFALDAGWHAGMEWMETTRDRRQRPNALWPEARSILMLGTSYAPETDPLARLADPGLANISVYAQGRDYHEVIKGRLKELAGLLARRSGAEVKVFVDTAPVMEKPLAEAAGLGWQGKHSVLLSRQAGSWLFLGAIFTTAELPPDAPETEKCGSCTRCLDICPTDAFPAPFRLDARKCLAYYSVEHKGQIPLRFRKPMGNRVFGCDDCLAVCPWNKFARRSRDDKLAARPALRDARLTDMLALDDTAFRGMFAQTPVKRLGSARFLRNCLVAAGNSGDRDHLPAIARLLRHDSPLVRGMAVWAARQLAGPREAAALRAGNDETDPEVLAEWTH

SEQ ID NO: 79373 - protein, 362 aa, unidentified
  source 1..362: note = Pelagibaculum spongiae
  REGION 1..362: note = tr|A0A2V1H4W9|A0A2V1H4W9_9GAMM Epoxyqueuosine reductase OS=Pelagibaculum spongiae OX=2080658 GN=queG; PE = 3 SV=1
MNPFTEQQLSEIQSWLKQQAAELGFAQVVVSNPDLAVESEKFQQWVDQGLHGEMDYLARNHDLRAEPAKLLPETCRVVSFAMDYLPEKQSIQLLSQPDKAYVSRYALGRDYHKLIRKRLTNLGKQLENKLSELNADFKLVYRPFVDSAPVMERQIAEQGGMGWIGKHTLLLNRKHGSWFFLAELFINLPLATEQPVKGHCGKCSACIDICPTQAITGPYQLDARRCISYLTIEHPGSIPVELRSMMGNRIYGCDDCQLVCPWNRFAKLSVEDDFQPRQKLDNAQLLELFQWDEAQFLKNTEGSPIRRAGFERWQRNLAIALGNALAKDIQQQPQIISALKEAEINSTAVVNEHIQWALQQVS

SEQ ID NO: 79374 - protein, 354 aa, Pelagicola litoralis
  REGION 1..354: note = tr|A0A4U7N1W1|A0A4U7N1W1_9RHOB Epoxyqueuosine reductase OS=Pelagicola litoralis OX=420403 GN=queG PE=3; SV = 1
MSSDLKARLVAEAQAIGFDLCRICRPHDVGHVPEGLAGFLAQDYQGQMGWLNERTHWRSNPAALWPEAQSVIMLGESYTPEHDPTAVHTMPERGAISVYAQNKDYHDIVKKRLKRLARWLIAETGDATQVKVFVDTAPVPEKPLGQAAGLGWQGKHTNLVSRDLGSWFFLGSVFTTVHLEADAAEVDHCGSCRSCLDACPTGAFPAPHQIDARRCISYLTIEHHGPVDEDLRPMLGNRIYGCDDCLAACPWNKFAVEASEMRYFARDDLKAPELAFLVTLDDAEFRKFFSGSPIKRIGRNRFIRNVLYAMGNSGNAEFMAPASSLCADPDMTVVDAAQWALKRLKAVANGQAQA

SEQ ID NO: 79375 - protein, 360 aa, unidentified
  source 1..360: note = Pelagicola litorisediminis
  REGION 1..360: note = tr|A0A1Y5RMA5|A0A1Y5RMA5_9RHOB Epoxyqueuosine reductase OS=Pelagicola litorisediminis OX=1312363 GN=queG; PE = 3 SV=1
MSPKVFMPRKNMDDLKNRLVARALEEGFDACRICRPWDVGHVPEQLAAFLDRGYHGQMGWLAERSHWRGAPEVLWPEARSVIVLGESYTPGEDPRATIGQPEVGTISVYARNRDYHDLVKKRLKRLARWLIDEAGGEVKVFVDTAPVPEKPLGQAAGLGWQGKHTNLVSRDLGSWFFIGSVFSTLEIETDLAEIDHCGSCRACLDACPTDAFPAPYQLDARRCISYLTIEHKGPVDEGLRPLMGNRIYGCDDCLAACPWNKFAVAARELRYHAREDLKAPELAALATLDDGGFREMFSGSPIKRIGRDRFVRNVLYAIGNSATPELKPMAQALCDDPDAAVADAARWAVRRLESDANGLE

SEQ ID NO: 79376 - protein, 358 aa, Pelagicola sp.
  REGION 1..358: note = tr|A0A2U2CWK8|A0A2U2CWK8_9RHOB Epoxyqueuosine reductase OS=Pelagicola sp. LXJ1103 OX=2175247 GN=queG; PE = 3 SV=1
MHEGLKARLNVQALAEGFDLMRICRPDAVPEVPERLAAFLEAGRHGQMGWLEERSAWRGDPAALWPEARSVIMLGESYTPQEDPLANLTVPELGTVSVYARNRDYHDLVKKRLKRLARWLLAECGPGGPEAAPPEVKVFVDTAPVPEKPLGQAAGLGWQGKHTNLVSRDMGNWFFIGSIFTTIDLAPDAAEIDHCGSCRACLDVCPTDAFPAPYELDARRCISYLTIEHKGPVDPALRPLLGNRIYGCDDCLAACPWNKFAQEARELRYHARPDLVAPRLDELAGLDDAAFRALFSGSPIKRIGRDRFLRNVLYAIGNSGRVDLLPSAEAHLDDPDEAVADAARWAQSRLQSAANRLE

SEQ ID NO: 79377 - protein, 351 aa, unidentified
  source 1..351: note = Pelagimonas varians
  REGION 1..351: note = tr|A0A238KLI5|A0A238KLI5_9RHOB Epoxyqueuosine reductase OS=Pelagimonas varians OX=696760 GN=queG PE=3; SV = 1
MTDSDLKTRLVAEALDVGFSAARICRPDAVPQVMDRLQAFLDAGYHGQMGWMADRVHWRGAPDVLWPQAQSVVMLAENYGPDFDPRAVLGQRDRGAISVYAQNKDYHDVAKKRLKRLGRWLIEAARRGGEEIEIKVFVDTAPVPEKALGMAAGLGWQGKHSNLVSRELGSWFFLGALFTTLKMEPDAAGRDNCGNCHACLDVCPTDAFPAPYQVDARRCISYLTIEHKGPVAEDLRNKMGNHIYGCDDCLAACPWNKFAQKAAEVKYHAREDLLAPKLADLAVLDDTGFRALFSGSPIKRIGRDRFVRNVLYAIGNSGDAALGSVAHSLLDDPDEAVADAAAWAIAQLEGR

SEQ ID NO: 79378 - protein, 378 aa, unidentified
  source 1..378: note = Pelagirhabdus alkalitolerans
  REGION 1..378: note = tr|A0A1G6NAQ3|A0A1G6NAQ3_9BACI Epoxyqueuosine reductase OS=Pelagirhabdus alkalitolerans OX=1612202; GN = SAMN05421734_11510 PE=4 SV=1
MANETLKAEIIEYAKSIGIDKIGFAAANPFAEMKSRLKMQQDDDYQSGFEKGTIEERTEPELHLDDAESIIAIAVAYPSRMKSRPTNKKGNRRGNFCRASWGHDYHIVLNEKLEKLEAYIASRVTGFRSRSMVDTGELSDRAVAERAGIGFSGKNCSIITPEFGSYVYLGEMITNIPFPSDEPVDDGCGDCTLCIEACPTGALVAPGRLNAQNCIAFVTQTKGFMPDEYREKVGNQLYGFDTCQLVCPKNKGIDTHHHPELEPDPELVKPELLPLLSISNREFKQSFGKMAGSWRGKKPIQRNAIIALAHYKETSAVDRLIELMKEDPRPVIRGTAAWAIGKIGREDGRQAILDCQQQEVDEEVLEEMAKGLAYFSHR

SEQ ID NO: 79379 - protein, 357 aa, unidentified
  source 1..357: note = Pelagivirga sediminicola
  REGION 1..357: note = tr|A0A2T7G8R5|A0A2T7G8R5_9RHOB Epoxyqueuosine reductase OS=Pelagivirga sediminicola OX=2170575 GN=queG; PE = 3 SV=1
MDALKRQLVDQAHAEGFDLARICRPWDVPQVPDRLQTFLEKERHGQMHWMAERSHWRADPAALWPEAQSVIMLGESYTPEHDPLEVLGRRSEGAISVYAQNRDYHDLVKKRLKRLARWLIAQTSPDTEVKVFVDTAPVPEKPLGAAAGLGWQGKHTNLVSRDLGSWFFIGSIFTTLTLEADAAETDHCGSCRACLDVCPTGAFPAPYQLDARRCISYLTIEHSGPVAPELRALMGNRIYGCDDCLAVCPWNKFAKEARELRYRARDDLLGPPLAELADLDDTSFRAMFSGSPIKRIGVLRFLRNVLYAIGNSGDPALLPAAERHCDAQDATVADAARWAVMRLKGVENGMDSGADPA

SEQ ID NO: 79380 - protein, 301 aa, unidentified
  source 1..301: note = Pelobium manganitolerans
  REGION 1..301: note = tr|A0A419S2X0|A0A419S2X0_9SPHI Epoxyqueuosine reductase OS=Pelobium manganitolerans OX=1842495 GN=queG; PE = 3 SV=1
MIKTEALRLGFSSCGISKATFLEQEAPKLENWLKNDFNGKMDYMNNHFDKRLDPRLLVDDAKSIISVTLNYFTPAKQADDKAPKLSKYAYGMDYHYVLKDKLKALTNFITEEIGEVNGRAFVDSAPVLDKAWAQKGGLGWRGKNTNLISKNNGSFFFLGELIVDLDLQEDAPFTTDHCGSCTRCIDACPTDAIVAPYVVDGSKCISYLTIELKEQLPGEFKGKMDNWMFGCDVCQDVCPWNRFSVPNQEPSFQPHPDLLHIKKHEWEDITTEVFQKVFKKSPVKRTKYEGLKRNIDFLKQV

SEQ ID NO: 79381 - protein, 314 aa, unidentified
  source 1..314: note = Pelodictyon luteolum
  REGION 1..314: note = tr|A0A165LYA0|A0A165LYA0_PELLU Epoxyqueuosine reductase OS=Pelodictyon luteolum OX=1100 GN=A3K90_02375; PE = 4 SV=1
MHEAPTTLARKIRQEAHRLGFSAIGFAAPPPGFLAVERYDEMLRDGRHGEMTYLETGAPARRHPESLLPGLKTVVSLAVSYRHNPPGGRAKLSRYAMVADYHTVMRKKAESLLDCIERLNGCKPNAFIAVDGAPVLEKEWAERSGMARTGKNTLAIVPSAGTFVFLGELLLDIEIREERPLLPNLCGSCTKCIDACPTGALQGPGKIDARRCISYLTIELKREFTAEESAMIGRNLFGCDTCQENCPHNQRPAINPDPAFSPRQELTGLDPERILQLTRSGFNALFAGTPVWRIGLKRLKRNARAIIANELQRS

SEQ ID NO: 79382 - protein, 314 aa, unidentified
  source 1..314: note = Pelodictyon luteolum
  REGION 1..314: note = tr|Q3B5Q9|Q3B5Q9_PELLD Iron-sulfur cluster-binding protein OS=Pelodictyon luteolum (strain DSM 273 / 2530); OX = 319225 GN=Plut_0434 PE=4 SV=1
MHEAPTTLARKIRQEALRLGFSSIGFAAPPPGFLAVERYDEMLRDGRHGEMTYLETGAPARRHPESLLPGLKTVISLAVSYRHNPPGGRAKLSRYAMIADYHTVVRKKAEALLDCIERLSDSKPNAYIAVDGAPVLEKEWAERSGMARTGKNTLAIVPSAGTFVFLGELLLDIEIREERPLLPNLCGSCTKCIDACPSGALLGPGKIDARRCISYLTIELKREFTAEESAMIGRNLFGCDTCQEHCPHNQRPAINPDPAFSPRKELIGLEPERILQLTRSGFNALFAGTPIWRIGLKRLKRNARAVLANEQRSS

SEQ ID NO: 79383 - protein, 324 aa, unidentified
  source 1..324: note = Pelodictyon phaeoclathratiforme
  REGION 1..324: note = tr|B4SDT4|B4SDT4_PELPB 4Fe-4S ferredoxin-type domain-containing protein OS=Pelodictyon phaeoclathratiforme (strain DSM 5477 / BU-1) OX=324925; GN = Ppha_2257 PE=4 SV=1
MADPSTTLARQIRKEAARLGFAAIGFSAPVRQPIAMQHVTDMVREKRHGEMGYMEKQMEERSNPSLLFTGLHTIISTAICYNYPLSHDDGLPKISKYALIDDYHRVVRNKLEALVAAIQLLVEEPLQARITVDSAPLLEKAWAEEAAIGKTGKNTLLKVPSAGSYVFLGEILVDREIISTKLSLPNYCGSCSNCLERCPTGALLEPGKIDASRCISYLTVELKRDFTAEEAAMIGDWLFGCDLCQEVCPYNRQASITANESFVLRQNLIGITTEEILNLTKSSFRELFYGTPIFRIGLRRLKRNALAVADNLKKAKEDTIPTNF

SEQ ID NO: 79384 - protein, 384 aa, unidentified
  source 1..384: note = Pelolinea submarina
  REGION 1..384: note = tr|A0A347ZSP5|A0A347ZSP5_9CHLR Epoxyqueuosine reductase OS=Pelolinea submarina OX=913107 GN=DFR64_0974; PE = 4 SV=1
MQTVSTINNKIKAEANRLGFSFLQITRPIQPPHYEAYLHWLADSHTGEMKYLSSERTRQSRQTPAGLLDNAQSILTFGVRYAPLTQSLPSEEDTQNPVGLVASYALHADYHDALKQAAHRLMDFIVRETGKNIQYRVFVDSSALLEKDTAFMAGAGWIGKNSLIITPETGSFQVLGCILTDLELISDKPFSKDLCGSCQKCQDSCPTGCITDNHNLRADECIAYLTIEYKGVIPRHLRSRMGLWVFGCDICQNVCPWNHKPQTQPFQVSPLLPQVMEPGIDLLAEIKLDEDSFRKKYAGSPILRATHTGFQRNLIIAMGNSGSQACLPALKKILRESPAWLLRLHAAWAISSLRSPDMRQILEKALSMEDDERVRDELRCCLNQ

SEQ ID NO: 79385 - protein, 361 aa, Pelomonas puraquae
  REGION 1..361: note = tr|A0A254NAB8|A0A254NAB8_9BURK Epoxyqueuosine reductase OS=Pelomonas puraquae OX=431059 GN=queG PE=3 SV=1
MRGWAHELGFSQIAVADVDLSSAEPGLLAWLEAGHHGRMHYMAAHGLKRARPAELVPGTLRVITARMDYLPRDTQPGWQAVEWAGLARPAQAQVSIYARGRDYHKVLRQRLQKLADRLVAEVGPLGYRVFTDSAPVLEVELATRSGLGWRGKHTLTLHREAGSMFFLGEIFIDLALPLTDPVTAHCGECTACLQACPTAAITAPYRVDARRCISYLTIEHDGPIPPELRAAMGNRVYGCDDCQLTCPWNKFAQPAMLADFDVRPGMAGTPIATLLDWDEAEFLRRTEGSAIRRIGFVRWRRNLAVAAGNALRQADDAGLRAALNRAAQGADALVAEHIAWALSAPAAADALSSGPPFTGVS

SEQ ID NO: 79386 - protein, 359 aa, Pelomonas saccharophila
  REGION 1..359: note = tr|A0A4R3UJJ4|A0A4R3UJJ4_PELSC Epoxyqueuosine reductase OS=Pelomonas saccharophila OX=304 GN=queG PE=3; SV = 1
MQEVPSTVDVAALLTRLRGWARELGFSQIAVADVDLSSAEPGLQAWLDAGHHGRMHYMASHGLKRARPAELVPGTLRVITARMDYLPQGTGPGWQAVEWAGLASPQQAQISIYARGRDYHKVLRQRLQKLAEQLQAEVGPRGYRVFTDSAPVLEVELAARSGLGWRGKHTLTLRRDAGSMFFLGEIFIDLALPLTDAVSAHCGECRACMDVCPTAAITAPYRVDARRCISYLTIEHDGPIPVELRPLIGNRVYGCDDCQLACPWNKFAQPAVLADFDVRPGMAGAPIAELLGWDEAEFLRRTEGSAIRRIGFERWQRNLAVAAGNALRGGAEALRQPLQRLRDTATPLVREHIDWALAH

SEQ ID NO: 79387 - protein, 354 aa, Pelomonas sp.
  REGION 1..354: note = tr|A0A5C7V2Y7|A0A5C7V2Y7_9BURK Epoxyqueuosine reductase OS=Pelomonas sp. OX=1909303 GN=queG PE=3 SV=1
MRGWARELGFSQIAVAGIDLSSAEPGLLAWLAAGHHGRMHYMAAHGLKRARPAELVPGTLSIITARMDYLSRDTAPGWQAVEWSGLARAEQAQLSLYARGRDYHKVLRQRLQKLAERLAAEVGPLGHRVFTDSAPVLEVELAARSGLGWRGKHTLALHREAGSMFFLGEIFVDLALPPTEPVSGHCGACTACVDACPTGAITAPYRVDARRCVSYLTIEHDGPIPEDLRPLLGNRIYGCDDCQLACPWNKFAQPALLADFDARPGMAGSSLVQLLDWDEAEFLRRTEGSAIRRIGFERWQRNLAVAAGNALRAGVDGGLRDALQRTGQGASALVREHVEWALCCAPLVSVTPSA

SEQ ID NO: 79388 - protein, 378 aa, Pelomonas sp.
  REGION 1..378: note = tr|A0A0Q8GPG3|A0A0Q8GPG3_9BURK Epoxyqueuosine reductase OS=Pelomonas sp. Root662 OX=1736580 GN=queG PE=3; SV = 1
MQEVPSTVDASALMESLRGWARELGFSQIGVADVDLSHAEPGLQAWLDAGHHGRMQYMAAHGMKRARPAELVPGTLRVITARMDYLPQESLPGWQAVEWTGLAEPGQAQISIYARGRDYHKVLRQRLQKLAERLFDSVGPRGYRVFTDSAPVLEVELAARSGLGWRGKHTLTLHRDAGSMFFLGEIFIDLDLPLTEAVNAHCGECRACIDVCPTAAITAPYRVDARRCISYLTIEHDGAIPEDLRPLMGNRVYGCDDCQLACPWNKFAQPAVLADFDVRPGMAGAPIALLLSWDEDEFLRRTEGSAIRRIGFSRWRRNLAVAAGNALRIRDDAGLRAALRRAGQGADALVAEHIAWALSAPPASAALSSEPPCPGATE

SEQ ID NO: 79389 - protein, 296 aa, Pelosinus fermentans
  REGION 1..296: note = tr|I8RHF3|I8RHF3_9FIRM Uncharacterized protein; OS = Pelosinus fermentans B4 OX=1149862 GN=FB4_2893 PE=4 SV=1
MKETLRKFCNSIHIECMGIAGIGPYWELERILKERIDKGQYTEFEEKDLKKRIDPKATMENVQSIIVCIFPYYVGERPEANIAKYTCGLDYHTVIRDKLEAIGNFLTKQLPEFEYKTFVDNGPLVDRYLAYLAGLGFYGINSHIITEKYGSYVAIGYILTNYPFTVDKPLQRTCLQCGKCSKACPGEIILGNFAIDPRRCKSYLTQKKGELTADEIKIIKKTNLVFGCDSCQDVCPHNSQIALSNIREFQENIVQQLSYEELMSISNKEFSRRYGDRAFSWRGRKLLVRNFEYIMH

SEQ ID NO: 79390 - protein, 372 aa, Pelosinus fermentans
  REGION 1..372: note = tr|I9DA52|I9DA52_9FIRM PBS lyase HEAT domain protein repeat-containing protein OS=Pelosinus fermentans JBW45; OX = 1192197 GN=JBW_00358 PE=4 SV=1
MSLTKKIKEFALDVGYSKVGIIPADSFPEYLADITNRSEMYSFFLKGASRAAEPRSQMPAAKSIITTVYDYSQKNFPQELTDKIGRVYQARCYGAPLDRIHGARPQLMKQFLENSGCEVGIGTMVPERIAAAKAGIVNFGRNNFAYADGIGSFIYLTSFVVDQELEYDTPTLEVGCPKGCRACMKACPTQAIYEPQKLNPLRCISYNNFFRQDGFPGGSFIPYDIREKIGTKIHGCDICQEVCPRNRKNLTAPKPDDEYLTHIAKEYILPNFLHMTDDFYQTRVQPLMHNYIKHKKYFQRNAAIALGNLADPAAVQDLTLAMADPEELVREYAAWALGKIATNKAKQVLEAARASETSLSVQQEITTALLSI

SEQ ID NO: 79391 - protein, 296 aa, Pelosinus propionicus
  REGION 1..296: note = tr|A0A1I4KFX6|A0A1I4KFX6_9FIRM Epoxyqueuosine reductase OS=Pelosinus propionicus DSM 13327 OX=1123291; GN = SAMN04490355_101746 PE=4 SV=1
MKETLRNFCNSIHIECMGIAGIGPYWELERILKERIDKGQFTEFEEKDLKKRTDPKTTMENVQSIIVCIFPYYAGEQAEANIAKYTYGLDYHSIIKDKLETIGIYLKKQMPAFEYKAFVDNGPLVDRYLAYLAGLGFYGINSHIITEKYGSYIAIGYILTNYPFKVDKPLQRTCMQCGQCSKACPGEIILGNFAIDPRRCKSYLTQKKGELTVEEIQIIKKTNLVFGCDSCQDVCPHNSKIVFSNIREFQENLVQQLRYEELISISNKEFSRRYKDRAFSWRGRKLLVRNFEYIMH

SEQ ID NO: 79392 - protein, 372 aa, Pelosinus propionicus
  REGION 1..372: note = tr|A0A1I4NXD9|A0A1I4NXD9_9FIRM Epoxyqueuosine reductase OS=Pelosinus propionicus DSM 13327 OX=1123291; GN = SAMN04490355_10545 PE=4 SV=1
MSLTKKIKEFALDIGYSKVGIIPADSFSDYLADISNRSEMYSFFLKGASRAADPRSQMPTAKSIITTVYDYSQKNFPQELTDKIARIYQARCYNAPPDRIHGARPQLLRRFLENAGCEVGIGTIVPERIAAAKAGIVNFGRNNFAYANGIGSFIYLTSFLVDQELEYDAPTLEVGCPEGCRACIKACPTQAIYEPQKLNPLRCIAYNNFFRQDEMPGGSFVPYDIREKIGTKIHGCDICQEVCPRNRKKVTAQKADDEYLTQIAKDYTLTNFLHMTDDFYQTRVQPLMHNYIKHKKYFQRNAAIALGNLADPAAIPDLALAMADTEELVREYAAWALGKIGSNPAKQVLEVSLASEVSPAVQREITAALLAM

SEQ ID NO: 79393 - protein, 302 aa, Pelosinus sp.
  REGION 1..302: note = tr|A0A075K719|A0A075K719_9FIRM Uncharacterized protein OS=Pelosinus sp. UFO1 OX=484770 GN=UFO1_0429 PE=4; SV = 1
MGWHLMKETLREFCKSIGIESMGIAPTGPYVELQQILKERISKGRFTEFEEQELQVRVNPQLTMDSVQSIIVCLFPYYPGEKKAANVAKYTYSVDYHRIIRRKLEEVGDFLGKKIPGFEYKAYVDNGPLVDRYLAYIAGLGFYGLNSHIITDAYGSYVFIGYILTNYPFETDIPLKRTCMKCGACKKACPGSSILGANGIDPRTCRSYLTQKKGELTRLEIDVIRKTNLVFGCDSCQEVCPHNAGIALSNIEEFQEDRMEELNYDELVGISNKEFMRRYGNRAFSWRGRKLLVRNFEYLKDS

SEQ ID NO: 79394 - protein, 374 aa, Pelosinus sp.
  REGION 1..374: note = tr|A0A075KIH6|A0A075KIH6_9FIRM PBS lyase HEAT domain protein repeat-containing protein OS=Pelosinus sp. UFO1; OX = 484770 GN=UFO1_3924 PE=4 SV=1
MSLTSQIKEFALDLGYSKVGIIPADDFQEYIDELTNRSEMYAFYIQSPYRPLNSAKPRSVMPTAKSIITTVYDYSQKEFPKELTDIMGRVYQARAYNAPPEHVNGARTQLMRDFLRKLGCEVGENIILPERLVAAKAGIVDFGRNNFAYAEGIGSFIYLTSFLVDQELEYDSPTVEVGCPKGCSACMKACPTQAIYEPNKLNPSRCIPFNTFFTQDGMAGSYIQPEIREKMGTKVYGCDICQEVCPRNQARIKAKLPEDRFLSKVVEDFSLANMLNMTDEFHATRIQPLMFNYVKERKYLQRNAAIALGNLGDPAFVPDLAVAMENKEELVRSYAAWALGKIGGKQAIQILKENLSKETSAAVKKEIKAALFVS

SEQ ID NO: 79395 - protein, 252 aa, Pelotomaculum propionicicum
  REGION 1..252: note = tr|A0A4Y7RYF9|A0A4Y7RYF9_9FIRM Epoxyqueuosine reductase OS=Pelotomaculum propionicicum OX=258475 GN=queG; PE = 4 SV=1
MKALIKDVLGRTVSENGRQGLYRGPLTGFARADDPLFSELKQAVGTSHLLPSDILAGAKSVAAFFIPFSKELVEVNKKHAYVAREWAEAYIETNRLISLCCERLAEALAAEGVKTNWQQPTHNFDPEKLISFWSHKHVAYICGLGAFGLHHMLITAAGCAGRVGSIVMDQPIDPTPRPETQYCLFHSGGKCLACVRNCPTGALTREGLNKQKCYERCLEVDAYYSDLGVCDVCGKCATGPCAVRELQPGQGV

SEQ ID NO: 79396 - protein, 248 aa, Pelotomaculum schinkii
  REGION 1..248: note = tr|A0A4Y7R869|A0A4Y7R869_9FIRM Epoxyqueuosine reductase OS=Pelotomaculum schinkii OX=78350 GN=queG_2; PE = 4 SV=1
MKDLIENTINRVITENQLGGQTAYRAPLLGYAQAADPLFQQLKTAVGPGHLLPDDLLPEAATVLAFFLPFTKQLVENNREHPYVARSWAIAYIETNALISLCCKEIAATLASNGVKAAWQQPTHNFDPVQLCSRWSHKHVAYICGLGEFGLHQMLITAYGCAGRFGSLVIDLPLSPSPRPAVQRCLFYLRGKCLACVKKCPSGALTTKGLDKQKCYNYLLEVDSFYSDLGVCDACGKCAACGPCAVID

SEQ ID NO: 79397 - protein, 265 aa, Pelotomaculum schinkii
  REGION 1..265: note = tr|A0A4Y7RAM7|A0A4Y7RAM7_9FIRM Epoxyqueuosine reductase OS=Pelotomaculum schinkii OX=78350 GN=queG_1; PE = 4 SV=1
MLLQTIKEKLDDYVLNSPQNIVNELETMRIYDQPLVGVAGVEDALWKKLKDTDVVGPQHLSPQEWLVGAKSVVSYFLPYTQRIRRSNCSEGFPSTEWLYGRYEGEMFNNALCSFVVDLIKKAGGRAIAPSIDKRLTVVNRRSNWSERHVAFIAGLGTFSLNRSMITSLGSAGRFGSVIVDFELEPTQRLYKEFDEYCTKCGVCIDRCPPQAISEKGKDNGICSHFLDEVRERYKPRYGCGKCQTSVPCEDKNPKEKVYESMMAVK

SEQ ID NO: 79398 - protein, 265 aa, Pelotomaculum sp.; identical to SEQ ID NO: 79397
  REGION 1..265: note = tr|A0A4Y7S3D4|A0A4Y7S3D4_9FIRM Epoxyqueuosine reductase OS=Pelotomaculum sp. FP OX=261474 GN=queG_2 PE=4; SV = 1

SEQ ID NO: 79399 - protein, 275 aa, Pelotomaculum sp.
  REGION 1..275: note = tr|A0A1V4VRA4|A0A1V4VRA4_9FIRM Epoxyqueuosine reductase OS=Pelotomaculum sp. PtaB.Bin104 OX=1811693; GN = queG_2 PE=4 SV=1
MMQHLKNLILNYAKEKGAALVGFAPVSRWSEQGEVPEEFHPTYIWPPARTVIVIGMAMPLPMVETTPSALHMELYNSSNRELDGLAYHLTNYLNGLGHASFYFPRDCYGSIKILLEKPLAAFSHVMAAKYAGLGTLGLSHNLLTPQFGPRVRLVSVFTAAELPSDGMLAKEQCIKCKACITCCPPAALNWDGKAPLADYDKIACAKWHEELTRRRCYPCGICTKVCPVGEDRKNVYQEKGIMKKYLEEEKALARDPNDPRYRSWTHVRNFGSWQK

SEQ ID NO: 79400 - protein, 304 aa, unidentified
  source 1..304: note = Peptoanaerobacter stomatis
  REGION 1..304: note = tr|V9HVT4|V9HVT4_9FIRM 4Fe-4S ferredoxin-type domain-containing protein OS=Peptoanaerobacter stomatis; OX = 796937 GN=HMPREF9630_00273 PE=4 SV=1
MSSIVKNSILNLNLPYEIEYAILNLEDEELLKSQQDFFGFLTNRKNDNLITSLESDDINSRVFAQNVLEDAKSIIVILFPYLTDEHSKNGNLSMYCMGVDYHISVRDMLCEIVKYIKNFHKDADFYIQSDTGTLNERFFAFYSGVGRLGINSMIFSDIYGSYVNIGLIVTDLLLDEKKSEKKYCDKCMACVKSCPGGAINGDFTINSYRCASYITQKKGELNEQEQRIIKKSKKIFGCDVCQNVCHFNNNVKTIPKNCDIIKTIKNEDIDELSNKKFKEKYILRAFNFRGKSVIKRNLDILKDD

SEQ ID NO: 79401 - protein, 304 aa, unidentified
  source 1..304: note = Peptoanaerobacter stomatis
  REGION 1..304: note = tr|G9WYK3|G9WYK3_9FIRM 4Fe-4S ferredoxin-type domain-containing protein OS=Peptoanaerobacter stomatis; OX = 796937 GN=HMPREF9629_01254 PE=4 SV=1
MSSIVKKSILNLNLPYEIEYAILNLEDEELLKSQQDFFCFLTNRKNDNLITSLESDDINSRVFAQNVLENAKSIIVILFPYLTDEHSKNGNLSMYCMGMDYHISVKDMLCEIVKYIKNFHKDSGFYIQSDTGTLNERFFAFYSGLGRLGINSMIFSDIYGSYVNIGLIVTDLLLNEKKYDKKYCDQCMACVKSCPGGAINGDFTINSYRCASYITQKKGELNEHEQGIIKKSKKIFGCDVCQNVCHFNNNVKTIPKNCDIIKTIKNEDIDELSNKKFKEKYISRAFNFRGKSVIKRNLDILKDD

SEQ ID NO: 79402 - protein, 320 aa, unidentified
  source 1..320: note = Peptoclostridium sp.
  REGION 1..320: note = tr|A0A416QFJ1|A0A416QFJ1_9FIRM tRNA epoxyqueuosine(34) reductase QueG OS=Peptoclostridium sp. AF21-18 OX=2292243 GN=queG PE=4 SV=1
MLIKDGFEGIEKKSRNDIVKSIFLEYGVECCGIAPVKFGNEIREILQKRADENHLSGMEESDIDKRLDATLIMEDAKSIIVAAFPYYCGENNDSNISCYCRGYDYHLVIRGIMNNICEKIQEKFSNGENCTNENSIKMEIFVDNGPLVDRYLAYISGIGFWGMNGSIITDKYGSYVFIGYIVTNLDIEKDAPLEKTCLKCGKCIKSCPGNALLEGYDMDAKKCLSYITQKKGELSDDEKNIIKENKIIFGCDMCQKVCPHNKNVEMTNIEEFKNDLIEKLDLDEINRISNKEFKRRYYNRAFSWRGKGIIKRNLEILEED

SEQ ID NO: 79403 - protein, 364 aa, unidentified; identical to SEQ ID NO: 78531
  source 1..364: note = Peptococcaceae bacterium
  REGION 1..364: note = tr|A0A357VE17|A0A357VE17_9FIRM tRNA epoxyqueuosine(34) reductase QueG OS=Peptococcaceae bacterium OX=2052179 GN=queG PE=4 SV=1

SEQ ID NO: 79404 - protein, 344 aa, unidentified
  source 1..344: note = Peptococcaceae bacterium
  REGION 1..344: note = tr|A0A3G1KM19|A0A3G1KM19_9FIRM Fe-S oxidoreductase; OS = Peptococcaceae bacterium DCMF OX=1761012 GN=DCMF_00870; PE = 4 SV=1
MSMEKLIQNKAYEFGYEKCGIVRIQDLDGYDERLLERIDKVPASKMFYQNQSRLTHLPEQYPWAKSVIVTVSHYGHYQIPGQLKGRIAKHYIFDGRVNGESKEFKKSVAMEQFLQDLGLKTASNRNFGIVGLRWAAMKAGLGIIRRNNFFYTESGSWVELEAWITDRDMELVESTNLPACPEGCTNCIKACPTGSLSSPYTMNPVSCVSFLTTFGGRDLAKDPLGKSFGSWIYGCDACQDACPMNSGKWTEKDEFPGVSETSLCLTPENMMEMEEEFYQHNIQPKFFYLSPAELWKWKVNVLNFMRNNYQENYKQYIMEACNHENEKIRDLARMIRQELSLTDY

SEQ ID NO: 79405 - protein, 302 aa, unidentified
  source 1..302: note = Peptoniphilus coxii
  REGION 1..302: note = tr|A0A134AGK3|A0A134AGK3_9FIRM Putative iron-sulfur cluster-binding protein OS=Peptoniphilus coxii OX=755172; GN = HMPREF1863_00873 PE=4 SV=1
MEIEAIKNRIGFHDVAHIPAVALHEMKAIFEQREKNGRRLPIEPDSVNERIDPRCVLPSARSIVVAFEQTPFAEKMPEAKPGYGRLAGVSRDRDYHHLLGEKLRRLEQALKEEYPELESYLQVDTGPLYERGFAELTGKGFLGRNGLFIHDTLGSYVGIGLLVTNLPGGEIKVSEKKCGDCMKCVSACPGGALSKEGIVDPRRCRSWITQKRGELTEREKHIMGDWLYGCDQCQIVCPKNQGIEHTFQVEDPVEHISLDAIRETSNRTFKESFGHLSGSWRGAKQWKKNADYIDDYFGKDRE

SEQ ID NO: 79406 - protein, 303 aa, Peptoniphilus ivorii
  REGION 1..303: note = tr|A0A448V0G2|A0A448V0G2_9FIRM Epoxyqueuosine reductase OS=Peptoniphilus ivorii OX=54006 GN=queG PE=4; SV = 1
MDLEEIKNKAGFHDLAHIPLTVLTEMEVILAARREAGERLDIEPKDDRSRYDFRAVFPAGRSVYVAFEQIPFERKLSAPRAGYGRLAGISRDVDYHLLLKHKIEVLQALLEEADPTIRCHRQIDTGPLYERGFAARTGRGFIGRNGNFIHRELGSYVTIGLLLVDRDCDGAAEIETCRCGSCMRCVRACPGGAIDPSGRLSPTRCRSWLSQKRGPLSEREREILADSLYGCDICQAVCPFNADIPARFQTKNPRTYIPLDEVEAQSNRTFRENFGHMSGAWRGARQWKKNAEYIRAYFKDRKR

SEQ ID NO: 79407 - protein, 294 aa, Peptoniphilus sp.
  REGION 1..294: note = tr|F9MTP1|F9MTP1_9FIRM Putative iron-sulfur cluster-binding protein OS=Peptoniphilus sp. oral taxon 375 str. F0436 OX=879308 GN=HMPREF9130_0810 PE=4 SV=1
MNREAILKKAGLDVLGFCSARPLEKEKAYLLDRQAHFGLCKYEGQRIEERLDPSLHYSPVKSVLVFGINTKTRPIQLKKGQGLLAGISRIPDYHTVLKEAGNKLGQLLKLEDQAKLMVDSHPLMERAFAQRAGLGYIGENTALIHPVYGTYLALGLILTEKTFPYDGEVGGTCGSCKLCIQACPGGALKGEGVLDPMACLSYKTQSLEEGSRQLGPRLYGCDVCQEVCPKNKHVPLTSLDQILKEGISKEEIQDLSNREFKKKYGHLTGAWRGKKQWMENFKSVEAYWARKSKE

SEQ ID NO: 79408 - protein, 305 aa, unidentified
  source 1..305: note = Peptostreptococcaceae bacterium
  REGION 1..305: note = tr|J4KAZ0|J4KAZ0_9FIRM PF08331 domain protein; OS = Peptostreptococcaceae bacterium AS15 OX=936556; GN = HMPREF1142_0523 PE=4 SV=1
MSIIDEAIKSLDLGYEIEYSTVSLMDENFICLQEDFLKFLEKRKKDGKISPLESSDIEKRAFPQKILQGAKTVITFLFPYMTSFHKDGNLSYYCMGLDYHIGVKNSLDRIVKYIGQYHKDAKFYIQSDIGELDEKFFAYNSGLGILGLNSLIISPLYGTYVNIGVIVTDLKFKPKIAEKKICDMCMKCQNSCPGKAINGDFTIESQKCASYITQKKGELSKDEIEILKKSGKIFGCDICQKVCHFNKNVKKISSTYDIINSIEKDDLQISNKEFKLKYGDRAFSFRGKSVLSRNIDLINIGEEIE

SEQ ID NO: 79409 - protein, 308 aa, unidentified
  source 1..308: note = Peptostreptococcaceae bacterium
  REGION 1..308: note = tr|A0A544QUP1|A0A544QUP1_9FIRM tRNA epoxyqueuosine(34) reductase QueG OS=Peptostreptococcaceae bacterium ZHW00191 OX=2518162 GN=queG PE=4 SV=1
MSLTEIKKILKRHGIDVSGVCSSDMDENLKKYLYKREKEKGLSGMEESDISKRTDVYSVMEDANSIITAAFPYYTGYNTDSNISIYCSGKDYHTVIEGILNKVCSDIRDSLNDNEKENFRFEICVDTSPLVDRYIAYMSGIGFFGLNNNIITEKYGSYVFIGYIITNLNIEKSEPMDRECIKCGKCIEMCPGKALKEDYKMDAKRCLSYITQKKGEFSEQEKELIIKEKTVFGCDVCQKVCPHNENIEYTDIKEFMEDKIYNLEKNDIDNLSNREFKRKYGDRAFSWRGKGIIKRNLDLIEENNEKGV

SEQ ID NO: 79410 - protein, 318 aa, Peredibacter sp.
  REGION 1..318: note = tr|A0A2E5CAR5|A0A2E5CAR5_9PROT tRNA epoxyqueuosine(34) reductase QueG OS=Peredibacter sp.; OX = 2024850 GN=queG PE=4 SV=1
MSLLNLSGDFLKKIQVVDWGYTEASAPITYGHYETWTKSGLAGGLQYLTDHRKDLRKDLKEVFPEFSSALVFLFEYASEKKRLQKIDPPIKIASYVTGFDGMDYHHWIREKLDIISLKLSEEISGLKTFYSIDAQPVLERDLAYRAGLGWFGKNSMLISKKHGSYFIIGTLLLNQKLPLPTKLSVEPDHCGNCTACIDHCPTDAIVANKVVDASKCISTYTIEMFKEAEAPKGYPSKSNEVFGCDICQEVCPWNNKPLKRVEAGEEVDWVKFFERNPELILNDLEDMSNRQYRKKFKGTPLERTGRVGMIKNLNKLKS

SEQ ID NO: 79411 - protein, 396 aa, Perlucidibaca sp.
  REGION 1..396: note = tr|A0A2P6AUX5|A0A2P6AUX5_9GAMM Epoxyqueuosine reductase OS=Perlucidibaca sp. HR-E OX=2094561 GN=queG; PE = 3 SV=1
MTRIPVQARSPVSAHGAADGGRPAAGPGTAVLDAAALQALAEDIRRWGRELGFQQVGISGTDLGEHPAHLEKWLEAGHHADMEWLREPKRVDPAALKPGTRRVISLRMDYLPAEPRIHQILQDGSRAYIARYALGRDYHKIIRPRLQRLADRIAAEIGPFGYRAFVDSAPVLEKALASQAGLGWMGKHTVIINRRAGSYFFLGELFTDLPLPVDVPVSNHCGSCQACIDICPTKAIVAPYVLDAGKCISYLTIEYRGVIPVELRRPIGNRIFGCDDCQLVCPWNRYAQASQEPGFTPRHAFDGPPLLNLWDWDEATWLEQTAGMPLRRMNYTSWVRNLSIALGNAPASTEALTALTKRFSALETAGQLDEVLREHLLWAMAEQRDKLARLSPPPLR

SEQ ID NO: 79412 - protein, 311 aa, unidentified
  source 1..311: note = Petrimonas mucosa
  REGION 1..311: note = tr|A0A1G4G4R3|A0A1G4G4R3_9PORP Epoxyqueuosine reductase OS=Petrimonas mucosa OX=1642646 GN=queG PE=4 SV=1
MTFSEEIKAYARSLGFDACGICRAEESGEEARYMAWLSEECHAGMSYLERNIEKRLDPRLLVDGAKSIISVALNYFPHRFRHEDAPRFAYYAYGEDYHDVVKKKLSRLLEFIQGRSPGVSGRYFSDSAPVLERFWAARAGLGFVGKNTLLIIPGKGSYFFLGELIVDLELDYDSPLSQHCGKCRRCLDACPTGAIEKPKWVNARKCISYQTIENKGEISPEIIPRMSNNLYGCDICQLVCPWNRYARPHTTPEFHPSEQFLSLDYESLQEMDEDTYRKIFSKSAVKRAKFSGLKRNLEAWKCSRESGGEIS

SEQ ID NO: 79413 - protein, 311 aa, Petrimonas sp.
  REGION 1..311: note = tr|A0A3G9DWM7|A0A3G9DWM7_9PORP Epoxyqueuosine reductase OS=Petrimonas sp. IBARAKI OX=1978337; GN = PEIBARAKI_6730 PE=4 SV=1
MTFSEEIKQHALSLGFDACGICRAEESEQEAHYRSWLSEECHAGMDYLERNIDKRMDPRLMVEGARSIISVALNYFPHRFQHEDAPQFAYYAYGEDYHDIVKGKLSRLFDFIKLRFPGVSGRYFSDSAPVLERFWAARSGLGFVGKNTLLIIPGKGSYFFLGELIVDLELDYDSPISQNCGKCRRCLDACPTGAIEKPHWVNARKCISYQTIENKGEISSEIVPRLSNNVYGCDICQVVCPWNRYARPHSTPEFNPSDEFLSLDYKRLQEMDEDTYRRIFRRSAVKRAKFAGLKRNLDAWKSSQQTEGGIS

SEQ ID NO: 79414 - protein, 341 aa, unidentified
  source 1..341: note = Petrocella atlantisensis
  REGION 1..341: note = tr|A0A3P7PRV8|A0A3P7PRV8_9FIRM tRNA epoxyqueuosine(34) reductase QueG OS=Petrocella atlantisensis OX=2173034 GN=queG PE=4 SV=1
MKAQVIKEDIIKFCDSIGVQAVGFTSALPFNELKEDYQYRQQQHLNCTFEVRDSVLDLMDPKRIMTDAKSFISILEPHQPYSQIKPTSGIGRMASGTASLDYHKILDGHLEKLQIFLQEKYDIHGVKLCDTTPLSDRAIAVRAGLGVLRRNNMFYHKTMGSYVNIASLLIDFDLEATDHDKEAIPCGTCQICKVTCPTKAIIGDGTINSNRCISYLTQKNETSEEESKMIGNMIYGCDICQLRCPVNNKVKNPFVEFIVDQEVDLVTLLNIDNATFKNTYGRTASGWRGKRTLQRNAIAAMGNSGDRGMIEILNKYEDDNRSIIKREVQRAITRLKNIEVK

SEQ ID NO: 79415 - protein, 350 aa, Phaeobacter gallaeciensis
  REGION 1..350: note = tr|A0A1B0ZSG6|A0A1B0ZSG6_9RHOB Epoxyqueuosine reductase OS=Phaeobacter gallaeciensis OX=60890 GN=queG; PE = 3 SV=1
MSAALKEKLIRQALDEGFVACRVCRPGDVPEVPARLQAFLEAGYHGQMGWMAERSHWRGDPAQLWPEARSVIMLAESYTPDEDPMAVVGQPDRGAVSVYARGKDYHDLVKKRLKRLARWLIAEAEKAGDPAEVKVFVDTAPVPEKPLGQAAGLGWQGKHTNLVSRDWGNWAFIGSVFTTLELPVDAPERDHCGSCRSCLAACPTDAFPAPYQLDARRCISYLTIEYKGPIDEELRGKMGNRIYGCDDCLAACPWNKFAVAASDMRYAAREGLSAPRLADLAALDDTAFRAMFSGSPIKRIGRDRFVRNVLYAIGNSGDPALGPVAARLTEDPDPVVADAARWAVQRIKGS

SEQ ID NO: 79416 - protein, 354 aa, Phaeobacter gallaeciensis
  REGION 1..354: note = tr|V9WPZ9|V9WPZ9_9RHOB Epoxyqueuosine reductase; OS = Phaeobacter gallaeciensis DSM 26640 OX=1423144 GN=queG; PE = 3 SV=1
MSSQMRETADIKNRLIAQALDEGFVACRICRPSDVPEVPDRLQAFLDAGYHGQMGWMEERSHWRGDPALLWPEARSVIMLAESYTPDVDPMDIVGQADRAAISVYARNKDYHDLVKKRLKRLARWLIAEAARAGDTAEVKVFVDTAPVPEKPLGQAAGLGWQGKHTNLVSRDWGNWAFIGSVFTTLDLPTDTAEPDHCGSCRSCLTACPTDAFPAPYQLDARRCISYLTIEHKGPIDEELRGKLGNRIYGCDDCLAACPWNKFAVAASDIRYEARPEFNAPKLAELAALDDPGFRALFSGSPIKRIGRDRFVRNVLYAIGNSGLPKLRPTAETLTEDPDPTVADAARWAVQRLT

SEQ ID NO: 79417 - protein, 350 aa, Phaeobacter inhibens
  REGION 1..350: note = tr|A0A135IEJ3|A0A135IEJ3_9RHOB Epoxyqueuosine reductase OS=Phaeobacter inhibens OX=221822 GN=queG PE=3; SV = 1
MIKTADIKDRLVAQALAEGFVACRICRPSDVPEVPDRLQAFLDAGYHGQMGWMEERSHWRGDPAQLWPEARSVIMLAESYTPDVDPMDIVGQADRAAISVYARNKDYHDLVKKRLKRLARWLIAEAARVEEAAEVKVFVDTAPVPEKPLGQAAGLGWQGKHTNLVSRDWGNWAFIGSVFTTLDLPADAAEPDHCGSCRSCLTACPTDAFPAPYQLDARRCISYLTIEHKGPVDEELRAKLGNRIYGCDDCLAACPWNKFAVAASDVRYEARPEFNAPKLADLAALDDPGFRALFSGSPIKRIGRDRFVRNVLYAIGNSGLPKLRPTSEALTEDPDPTVADAARWAVQRLM

SEQ ID NO: 79418 - protein, 350 aa, Phaeobacter inhibens
  REGION 1..350: note = tr|I7F1D6|I7F1D6_PHAIB Epoxyqueuosine reductase; OS = Phaeobacter inhibens (strain ATCC 700781 / DSM 17395 / CIP 105210 / JCM 21319 / NBRC 16654 / NCIMB 13546 / BS107)OX=391619 GN=queG PE=3 SV=1
MIKTADIKDRLVAQALAEGFVACRICRPSDVPEVPDRLQAFLDAGYHGQMGWMEERSHWRGDPAQLWPEARSVIMLAESYTPDVDPMDIVGQADRAAISVYARNKDYHDLVKKRLKRLARWLITEAARVEEAAEVKVFVDTAPVPEKPLGQAAGLGWQGKHTNLVSRDWGNWAFIGSVFTTLDLPADATEPDHCGSCRSCLTACPTDAFPAPYQLDARRCISYLTIEHKGPVDEELRTKLGNRIYGCDDCLAACPWNKFAVAASDIRYEARPEFNAPKLADLAALDDPGFRALFSGSPIKRIGRDRFVRNVLYAIGNSGLPQLRPTAEALTEDPDSTVADAARWAVQRLT

SEQ ID NO: 79419 - protein, 350 aa, unidentified
  source 1..350: note = Phaeobacter italicus
  REGION 1..350: note = tr|A0A0H5D6V6|A0A0H5D6V6_9RHOB Epoxyqueuosine reductase OS=Phaeobacter italicus OX=481446 GN=queG PE=3; SV = 1
MTDHSSLKDQLVAQALAEGFVSCRICRPWDVPEVPDRLQAFLDAGYHGQMAWMEERSHWRGDPAQLWPEARSVIMLAESYTPDVDPMEIVGQSDRGAISVYAQNKDYHDLVKKRLKRLARWLIAEAQKQGHEAEVKVFVDTAPVPEKPLGQAAGLGWQGKHTNLVSRDWGNWAFIGSVFTTLDLPADPAERDHCGSCRSCIAACPTDAFPAPYQLDARRCISYLTIEHKGPIDEDLRSKLGNRIYGCDDCLAACPWNKFAVAASDIRYEARPEFTAPKLAELATLDDAAFRALFSGSPIKRIGRDRFVRNVLYAIGNSAQPELRAVAQSLTTDPDPTVADAARWAAAQLA

SEQ ID NO: 79420 - protein, 350 aa, unidentified
  source 1..350: note = Phaeobacter piscinae
  REGION 1..350: note = tr|A0A291G4S0|A0A291G4S0_9RHOB Epoxyqueuosine reductase OS=Phaeobacter piscinae OX=1580596 GN=queG PE=3; SV = 1
MKETAEIKERLVAQALAEGFVACRICRPSDVPEVPDRLQAFLDAGYHGQMGWMEERSHWRGDPAQLWPEARSVIMLAESYTPDVDPMDIVGQADRAAISVYARNKDYHDLVKKRLKRLARWLIAEAEKVNEATEVKVFVDTAPVPEKPLGQAAGLGWQGKHTNLVSRDWGNWAFIGSVFTTLDLPTDTAEPDHCGSCRSCLTACPTDAFPAPYQLDARRCISYLTIEHKGPIDEELRGKLGNRIYGCDDCLAACPWNKFAVAASDIRYEARPEFNAPKLAELAALDDPGFRALFSGSPIKRIGRDRFVRNVLYAIGNSGLPKLRPTAETLTEDPDPTVADAARWAVQRLT

SEQ ID NO: 79421 - protein, 354 aa, unidentified
  source 1..354: note = Phaeobacter piscinae
  REGION 1..354: note = tr|A0A291FT99|A0A291FT99_9RHOB Epoxyqueuosine reductase OS=Phaeobacter piscinae OX=1580596 GN=queG PE=3; SV = 1
MSSQMIETADIKDRLIAQALAEGFVACRICRPSDVPEVPDRLQAFLDAGYHGQMGWMEERSHWRGDPAQLWPEARSVIMLAESYTPDVDPMDIVGQVDRAAISVYARNKDYHDLVKKRLKRLARWLIAEAARTGDPAEVKVFVDTAPVPEKPLGQAAGLGWQGKHTNLVSRDWGNWAFIGSVFTTLDLPADTAEPDHCGSCRSCLTACPTDAFPAPYQLDARRCISYLTIEHKGPIDEELRGKLGNRIYGCDDCLAACPWNKFAVAASDIRYEARPEFNAPKLAELAALDDPGFRALFSGSPIKRIGRDRFVRNVLYAIGNSGLPKLRPTAETLTEDPDPTVADAARWAVQRLT

SEQ ID NO: 79422 - protein, 350 aa, unidentified
  source 1..350: note = Phaeobacter porticola
  REGION 1..350: note = tr|A0A1L3I993|A0A1L3I993_9RHOB Epoxyqueuosine reductase OS=Phaeobacter porticola OX=1844006; GN = PhaeoP97_03332 PE=4 SV=1
MTEISSIKDRLVAQALAEGFVACRICRPWDVPEVPGRLKAFLEAGYHGQMGWMEERSHWRGDPAQLWPEAKSVIMLAESYTPDVDPMEVIGQADRAAISVYARNKDYHDLVKKRLKRLARWLIAEAAGDGETAGVKVFVDTAPVPEKPLGQAAGLGWQGKHTNLVSRDWGNWAFIGSVFTTLDLPVDEAERDHCGSCRSCVAACPTDAFPAPYQLDARRCISYLTIEHRGPIDEALRAKLGNRIYGCDDCLAACPWNKFAVAASDIRYEARPEFNAPRLSELAALDDPGFRALFSGSPIKRIGRDRFVRNVLYAIGNSGLPHLLPAARNLIEDPDPTVADAARWAVQRLI

SEQ ID NO: 79423 - protein, 350 aa, Phaeobacter sp.
  REGION 1..350: note = tr|A0A0P6RCT5|A0A0P6RCT5_9RHOB Epoxyqueuosine reductase OS=Phaeobacter sp. 11ANDIMAR09 OX=1225647; GN = AN476_12260 PE=4 SV=1
MKSGSELKARLVAQALVEGFVSCRICRPWDVPQVAERLQQFLDQGYHGQMGWMAERSHWRGDPSVLWPEARSVIMLAESYTPEEDPMAVVGCADRGAVSVYARNKDYHDLVKKRLKRLARWLIEEARAEDETAEVKVFVDTAPVPEKPLGQAAGLGWQGKHTNLVSRDWGNWAFLGSVFTTLDLPVDGAEPDRCGSCSSCLTACPTEAFTAPYQMDARRCISYLTIEHKGPIDEELRGKLGNRIYGCDDCLSACPWNKFAVAASDLRYAARAELQAPKLAELALLDDAGFRAFFAGSPIKRVGRDRFVRNVLYAIGNSGRPELRGVAQGLAEDPDPTVADAAQWAVQRLS

SEQ ID NO: 79424 - protein, 346 aa, Phaeobacter sp.
  REGION 1..346: note = tr|A0A0P1IEB9|A0A0P1IEB9_9RHOB Epoxyqueuosine reductase OS=Phaeobacter sp. CECT 7735 OX=1715693 GN=queG; PE = 3 SV=1
MSAQLKENLLLQAKEIGFDLCRICRPDSVGHVPDGLGGFLEQGYHGQMGWLAERTHWRGNPAALWPEARSVIMLGQSYTPQHDPTTVHALSDKGAISVYAQNKDYHDLVKKRLKRLARWLIAETDPETQVKVFVDTAPVPEKPLGQAAGLGWQGKHTNLVSRDLGSWFFIGSVFTTVELDPDTAEIDHCGRCRACLDACPTDAFPAPNQIDARRCISYLTIEHHGPVDEDLRPLLGNRIYGCDDCLAACPWNKFAVEAREIKYHAREDLKAPDLETLVQLQDAEFRTLFSGSPIKRIGRNRFVRNVLYAIGNSGLPRLRPLAQDLCEDPDPTVSDAARWAVQQLSD

SEQ ID NO: 79425 - protein, 315 aa, unidentified
  source 1..315: note = Phaeodactylibacter luteus
  REGION 1..315: note = tr|A0A5C6RU35|A0A5C6RU35_9BACT Epoxyqueuosine reductase OS=Phaeodactylibacter luteus OX=1564516 GN=queG; PE = 3 SV=1
MDHRTRYTRIIREEAGRLGFAFIGFAKAMHMDEEARRLESWLNKGLHGEMGYMANHFEKRVDPTKLVPGAKTVISLMYNYFPEQGQTDPEAPKLSRYAYGKDYHFVLKDKLKALFTFIQEKVGAVEGRVFVDSAPVLERDWARRSGLGWVGRNTLLIHPKAGSYFFLAEAIVDLELVYDEPIKDYCGTCTRCVEACPTDAISPGGYVVDGSRCISYLTIELRASIPEEFSGKMENWMFGCDICQEVCPWNRFSTPHKEPDFEPHPDLLSMREEEWQELTEEVFRELFRKSAVKRTKYSGLKRNLDFLREGKKQSE

SEQ ID NO: 79426 - protein, 318 aa, unidentified
  source 1..318: note = Phaeodactylibacter xiamenensis
  REGION 1..318: note = tr|A0A098S8K2|A0A098S8K2_9BACT Epoxyqueuosine reductase OS=Phaeodactylibacter xiamenensis OX=1524460; GN = queG PE=3 SV=1
MSNKTLHTQMIREEAQRLGFAFVGFAKATRLDEEARRLEAWLNKGMHGEMGYLENHFEKRVDPRKLVPGAKTVVTLMYNHYTDRRPKDPDAPKISKYAYGKDYHFVLKHKLKDLMKYIQAEIGAVNGRVFVDSAPVLERDWAKRTGIGWVGKNTLLIHPKAGSYFFLAELIIDLDLVYDHPIKDYCGTCTRCIDACPTDAISPGGYVVDGSKCISYFTIELKGAIPEAYRDHFENWMFGCDICQEVCPWNRFSKPHQEPEFEPHPDLLDLSARDWEELTEEVFRELFRKSAVKRTKYEGLKRNINFLKPLSEKADHEA

SEQ ID NO: 79427 - protein, 345 aa, Phaeospirillum fulvum
  REGION 1..345: note = tr|A0A1H6IQI3|A0A1H6IQI3_PHAFV Epoxyqueuosine reductase OS=Phaeospirillum fulvum OX=1082; GN = SAMN04244559_02580 PE=4 SV=1
MKAGIRAQALRLGFCDVGFAPVAGLAVWSEGLTGFLAEGRHGEMDWLADTAERRVRPQALWPQARTAIVLATSHAPPDDPQAATRLPDRGAICAYARGRDYHDVIKKRLKALGRWLAEGYGAEVRACVDTAPVMEKPLAQQAGLGWQGRHTLLVSRRFGGWVFLSELLTDLDLPPDPPESDHCGTCRACVEACPTGALDGTGRIDPRLCLSYHTIEAKAPMPESLRSRMGNRIYGCDACQAACPWVRRSIPASPDFLPRIEAMLPRLGDLAQLDEADFRALFAGTPVKRVGRDRFVVTVLIAIGNSGRRELRPLVERLRLDPAAEVRAMAVWAASALGGEGAGEL

SEQ ID NO: 79428 - protein, 294 aa, Phaeospirillum fulvum
  REGION 1..294: note = tr|S9TUJ5|S9TUJ5_PHAFV 4Fe-4S ferredoxin-type domain-containing protein (Fragment) OS=Phaeospirillum fulvum MGU-K5 OX=1316936 GN=K678_07647 PE=4 SV=1
MVKAEIRAQALRLGFCDVGFAPVDGEPRWAEDLFGFLAEGRQGEMNWLADTADRRVRPRALWPQARTAIVLATSHAPPDDPQTATRLPDRGAICAYARSRDYHDVIKKRLKVLARWLTERFGAEVRACVDTAPVMEKPLAQQAGLGWQGRHTLLVSKRNGGWMFLSELLTDLDLPPDLPESNHCGSCRACVEACPTGALDGEGRIDPRLCLSYHTIEAKAPMPEALRPRMGNRIYGCDACQAACPWVRFSAPSDPDFLPRIETMVPRLGDLAQLDEAGFRTLFVGTPVKRVGRD

SEQ ID NO: 79429 - protein, 346 aa, Phaeospirillum molischianum
  REGION 1..346: note = tr|H8FQI9|H8FQI9_PHAMO 4Fe-4S ferredoxin-type domain-containing protein OS=Phaeospirillum molischianum DSM 120 OX=1150626 GN=PHAMO_210138 PE=4 SV=1
MIKAEIRARALSLGFCDVGFAPTDGLAYWSEDLSGFLAERRHGEMIWLADTAALRASSRALWPEARTAIVLATSHAPPDDPQAATRLPDRGTICAYARSRDYHDVIKKRLKALGRWLVERHGAEVRSCVDTAPVMEKPLAQQAGLGWQGRHTLLVSRRNGGWMFLSELLTDLDLPPDQPETNHCGTCRACVQACPTGALDGDGRIDPRRCLSYHTIEAKSPMPEALRPLLGNRIYGCDACQAACPWTRFSAPSDPDFLPRIETMLPRLGDLAALDEAEFRTLFAGTPVKRVGRDRFVATVLIAIANGGRTELLPLVERLALDPAAEVREMAVWAGSVLGSERAGEL

SEQ ID NO: 79430 - protein, 408 aa, unidentified
  source 1..408: note = Phenylobacterium deserti
  REGION 1..408: note = tr|A0A328AVW8|A0A328AVW8_9CAUL Epoxyqueuosine reductase OS=Phenylobacterium deserti OX=1914756 GN=queG; PE = 3 SV=1
MTISTSSSPEDLIRAEAQALGFDLCRFTDLDDAWPAAARLEQFVSEGRHGEMGWMAETLERRRHPRAMWADARSAIVLGVNYGPDRDPRELLADSTRAAISVYAQGDDYHDLIKKRLKALARFLQAKFGGELKVFVDTAPLLEKPLAERAGLGWQGKHTNLVSREFGSWLFLGSILTTLELAPDEAPAVHCGRCTACLDVCPTNAFPTPFQIDARRCISYLTIELKGAIPHEFRPALGNRIYGCDDCLAACPWNKFAQVSREQKLHARETLRGPGLAELSRLDDAAFRELFAKSPVKRIGRDRFLRNVLYAIGNSGEPALAVEARRLLGDPSPLVRGAAVWALGRLLSAEAFEALRAARRPVEADKDVQSEWNQTPLIPAKAGIQAELLVDAPRLPEPAPHGSPPSRG

SEQ ID NO: 79431 - protein, 383 aa, unidentified
  source 1..383: note = Phenylobacterium hankyongense
  REGION 1..383: note = tr|A0A328B1B9|A0A328B1B9_9CAUL Epoxyqueuosine reductase OS=Phenylobacterium hankyongense OX=1813876; GN = queG PE=3 SV=1
MTISTSERPEDLIRAEAKALGFDLCRFTDLDAAWPAAGRLAEFIDAGRHGEMGWMAETAERRAHPRAMWTEARSAVVLGMNYGPDADPLAILEQPTRAAISVYAQGDDYHELIKGRLKQLGGWLQARFGGQLKVFVDTAPLLEKPLAERAGLGWQGRHTNLVSREFGSWLFLGSILTTLDLTPDPVEAVHCGSCTACLEVCPTQAFPAPFQLDARRCISYLTIELKGPIPPEFRAALGNRIYGCDDCLAVCPWNKFAQQSAEQKLHAREALRAPSLAELSRLDDPAFRALFSKSPIKRIGRDRFLRNVLYAIGNSAEPALAAEARRLLDDPAPLVRGAAVWALSRLLDAEPFEALRAERAPSETDEQVRAEWSDVPVGEGHPA

SEQ ID NO: 79432 - protein, 378 aa, unidentified
  source 1..378: note = Phenylobacterium kunshanense
  REGION 1..378: note = tr|A0A328BDE5|A0A328BDE5_9CAUL Epoxyqueuosine reductase OS=Phenylobacterium kunshanense OX=1445034; GN = queG PE=3 SV=1
MTTSTSDREELIREDLIRAEAQSLGFDLCRFTDIDEAWPAAGRLEQFVAAGRHGEMGWMAETLTRRRHPRAMWEGARSAIMLGVNYGPEHDPLEALADPARAAISVYAQGDDYHELIKARLKALARWLQGRFGGELKVFVDTAPLMEKPLAERAGLGWQGKHTNLVSRAFGSWLFLGAILTTLELEPDPAEAGGCGSCHACLDVCPTNAFPAPYQLDARRCISYLTIELKGPIPREFRPMLGNRIYGCDDCLAVCPWNKFASAAREQKLAARAELQAPALADLARLDDAAFRELFRKTPVKRIGRDRFVRNVLYAIGNSGRADLAAEAERLLDDPAPLVRGAAIWALSRLLEQQAFAALSDARRDSETDRYVLSEWAG

SEQ ID NO: 79433 - protein, 377 aa, Phenylobacterium sp.
  REGION 1..377: note = tr|A0A2D7ZPQ0|A0A2D7ZPQ0_9CAUL Epoxyqueuosine reductase OS=Phenylobacterium sp. OX=1871053 GN=queG PE=3; SV = 1
MTISISETPEALIRRQALALGFDDCRLARADQPWSAGERLAEFVAEGRHGEMAWLETTLERRSHPQAMWDGARSAVMLGVNYGPDHDPRDVLEHPDRGAISVYAQGSDYHEVIKKRLKQLASWMAQTFGSEVKVFVDTAPLLEKPLAEASGLGWQGKHTNLVSRQFGSWLFIGSVLTSLELEPDPPGEDACGSCRACQDVCPTDAFPAPYQLDARRCISYLTIELSGPIPAEFRSALGNRIYGCDDCLAVCPWNKFAQGAREQQLQAREVLKAPRLEDLAALDDAAFRALFTKSAVKRLGRDRFVRNVLYALGNSGDPGMVPAVRARLSDEAPVVRGAAVWALARLLPADAFAAERALALSSEVDEAVRAEWGPGVP

SEQ ID NO: 79434 - protein, 373 aa, Phenylobacterium sp.
  REGION 1..373: note = tr|A0A1E4GZS4|A0A1E4GZS4_9CAUL Epoxyqueuosine reductase OS=Phenylobacterium sp. SCN 70-31 OX=1660129; GN = queG PE=3 SV=1
MTTSTSEREELIRAEAAALGFDLCRFTDIDEAWPAAARLLEFVDAGRHGEMGWMAETAERRRHPRAMWADARSAIVLGVNYGPDDDPMAVLAQPARGAISVYARGDDYHEVIKARLKALGRWLQARFGGELKVFVDTAPLLEKPLAERAGVGWQGRHTNLVSREFGSWLFLGSILTTLELTPDAPESMTCGTCRACLDVCPTDAFPAPFQLDARRCISYLTIELKGPIPREFRPALGNRIYGCDDCLAVCPWNKFAQQGREQKLAAREALNAPALADLARLDDPAFRDLFRKNPVKRIGRDRFVRNVLYAIGNSGVANLTTEAERLLDDPSPLVRGAAVWALSQCLAPEAFATLRAVRTPAEADTSVLEEWGG

SEQ ID NO: 79435 - protein, 372 aa, unidentified
  source 1..372: note = Phenylobacterium zucineum
  REGION 1..372: note = tr|A0A227JLL8|A0A227JLL8_9CAUL Epoxyqueuosine reductase OS=Phenylobacterium zucineum OX=284016 GN=queG; PE = 3 SV=1
MTISISDPRSAIRLKAEDLGFDVCGFAAVDSSWTAGDHLATFVAAGRHGDMDWLATTLSRRIHPGALWPDTRSAIMLGVNYGPDLDPLEVLRDRARAAISVYAQGDDYHDLIKGRLKQLGGWMAGRFGQDLKVFVDTAPLMEKPLAQAAGLGWQGKHTNLVSREFGSWLFLGAILTTADLVPDETSSDRCGQCRACLDICPTGAFPAPYQLDARRCISYLTIELKGPIPREFRRALGNRIYGCDDCLAVCPWNKFAKASSEIRLQARPALAQARLEDLVGLTEPDFRALFAKSPIKRIGRDRFIRNVLYALGNTQDDRHVASITALLEDPAPLVRGAAVWALKQILDDASFKTLRAARPEQDADLNVRAEWN

SEQ ID NO: 79436 - protein, 375 aa, unidentified
  source 1..375: note = Phenylobacterium zucineum
  REGION 1..375: note = tr|B4RBA4|B4RBA4_PHEZH Epoxyqueuosine reductase; OS = Phenylobacterium zucineum (strain HLK1) OX=450851; GN = queG PE=3 SV=1
MTISTSEPPEDLIRAEALALGFDLCRFTDLDDAWPAAARLAQYVEAGRHGEMAWMAETLERRSHPRAMWAGARSAVVLGINYGPRHDPLEVLGGPDRGAISVYAQNEDYHDLVKKRLKALGRWMQDRFGGELKVFVDTAPLMEKPLAERAGAGWQGRHTNLVSREYGSWLFLGSILTTLDLAPDAAEPMHCGSCTACLEACPTNAFPAPFQLDARRCISYLTIELKGPIPRELRPMLGNRIYGCDDCLAVCPWNKFAQAAREQKLAARPELTAPALADLARLDDAAFRALFTKSPVKRIGRDRFVRNVLYAIGNSGDPALAEPAATLLEDPSPLVRGAAVWALSRLLASADFVSLRNARLPAEADPGVREEWLAA

SEQ ID NO: 79437 - protein, 177 aa, unidentified
  source 1..177: note = Phormidesmis priestleyi
  REGION 1..177: note = tr|A0A2W4YXA4|A0A2W4YXA4_9CYAN Epoxyqueuosine reductase (Fragment) OS=Phormidesmis priestleyi OX=268141; GN = DCF15_14760 PE=4 SV=1
IAKNGNVITRQYGSWVFLGEIITNLPLAADAPHTAHCGTCTRCLEACPTAAIRAPGVVDANRCIAYHTIENRAEVLPEAIAQNLQNWVAGCDICQDVCPWNQRFAQATDIADFAPYPENVSPTLANLATITEAEWNDRFPASALRRIKPPMLRRNAEAAIAAHEIAPQQPSAECYGH

SEQ ID NO: 79438 - protein, 318 aa, unidentified
  source 1..318: note = Phormidesmis priestleyi
  REGION 1..318: note = tr|A0A2T1D4V2|A0A2T1D4V2_9CYAN Epoxyqueuosine reductase OS=Phormidesmis priestleyi ULC007 OX=1920490; GN = queG PE=3 SV=1
MTDRASNLTDRIKQKALEVGFHKVGIAIVPVNSDDEKAAVTSLQSWLTQNHQADMAWMANPKRQDLRLVMPEARSLICVALNYYTAHDRPEGNDYAKISRYGWGRDYHRILHKKLKALSTWLEAQGDDIRARYYADTGPVQDKFWAQQAGIGWIAKNSNVITRDYGSWVFLGEVLTNLELIGDRPHTSHCGTCTRCLDACPTGAITQPFVVDANLCIAYHTIENRAETLPETITPHLGGWVAGCDICQDVCPWNQRFAQESDVADFQPYPGNVDPTLTELAELSDEEYDRRFPASALRRIKPAMMRRNARSNLRIDVE

SEQ ID NO: 79439 - protein, 322 aa, Phormidium ambiguum
  REGION 1..322: note = tr|A0A1U7ISJ5|A0A1U7ISJ5_9CYAN Epoxyqueuosine reductase OS=Phormidium ambiguum IAM M-71 OX=454136; GN = queG PE=3 SV=1
MVNTIIDSTQVKQKASELGFHQVGIASVDTEDESEAQKLQQWLALGYQADMQWMSNPKRENIRLIMPEVQSVICVALNYYISDQRPEGTEYAKISRYAWGRDYHKVMHKKLKALTNWLQEQGEGILARYYADTGPIQDKVWAQRAGIGWIAKNTNVITKKYGSWVFLAEVLTNLNLVPDTPHTHHCGTCTRCITACPTNAIRPLDNSSDSQTFVVDANCCIAYHTIENRSQDLPSAIAPHLNNWVAGCDICQDVCPWNQRFAKPTDVLEFQPYPGNVNPTLEELAEISDREWEKKFPASALRRIKPEMWRRNARTNLKYLHP

SEQ ID NO: 79440 - protein, 335 aa, Phormidium sp.
  REGION 1..335: note = tr|A0A0P8DMG3|A0A0P8DMG3_9CYAN Epoxyqueuosine reductase OS=Phormidium sp. OSCR OX=1666905 GN=queG PE=3; SV = 1
MSQFANAPNRGQILEQAFDLGFHRVGIAAVPAEADEGETEAVHHLQTWLNQGYQADMDWMANPKRQDIRQVLPGVRSVIAVALNYYTDHQPSEGEDAEGEDGEDRVKISRYAWGRDYHRVLHRKLKQLSRWLESSGEGIRAKYYADTGPVQDKVWAERAGLGWIAKNGNLITRDYGSWVFLGEVLTTLPLESDRPHTDHCGTCTRCLDACPTEAIVRPTVVDANRCLAYHTIENRRDRLPDDIANNLNGWVAGCDICQEVCPWNQRFAKTTDVAEFEPYPQNLNPSGSELANLSEEDWDQRFRASALRRIKPAMWRRNSQAANKTEKTPSKTDEV

SEQ ID NO: 79441 - protein, 333 aa, Phormidium sp.
  REGION 1..333: note = tr|A0A522XDV5|A0A522XDV5_9CYAN Epoxyqueuosine reductase OS=Phormidium sp. SL48-SHIP OX=2518363 GN=queG; PE = 3 SV=1
MSQFVNAPNRHDILEQAFNLGFHRAGIAVVPPQADAGETEAVHHLQTWLNQGYQADMAWMANPKRQDIRQVLPGVRSVIAVALNYYTEHHPSEGDEGDESDDTVKISRYAWGRDYHRVLHRRLKQLSRWLEASGEGIQAKYYADTGPVQDKVWAERAGLGWIAKNGNLITRDYGSWVFLGEVLTNLPLEADRPHTDHCGTCTRCLDACPTEAIVRPTVVDANRCLAYHTIENRRDRLPDDIANTLNGWVAGCDICQDVCPWNQRFAQTTDVAEFEPYPQNLNPSGSELANLSEDDWDQRFRASALRRIKPAMWRRNSQAANKTQKTPSTTDEV

SEQ ID NO: 79442 - protein, 326 aa, unidentified
  source 1..326: note = Phormidium tenue
  REGION 1..326: note = tr|A0A1U7J2W7|A0A1U7J2W7_9CYAN Epoxyqueuosine reductase OS=Phormidium tenue NIES-30 OX=549789 GN=queG; PE = 3 SV=1
MAQAAGLPDRQVVIDQALALGFHRVGIAAVEPEPSPAETAAVGHLQTWLNQGHQADMDWMANPRRQDIRQVLPGARSLICVALNYYTPHRHSDDPSHGKISRYAWGRDYHRVLHKRLKALSDWLTTAGEGTVQVRYYADTGPVQDKAWAQQAGLGWIAKNGNLITRQYGSWVFLGELITTLSLAPDAPQTSHCGTCTRCLEACPTGAITQPYVVDANRCIAYHTIENRDAALPEAIAPHLQNWVAGCDICQDVCPWNQRFAQPTTVDDFQPRPGNLTPNLDDLANLSEADWDSRFQASALRRIKPAMWRRNARAAQKWSGDHSANP

SEQ ID NO: 79443 - protein, 333 aa, unidentified
  source 1..333: note = Phormidium willei
  REGION 1..333: note = tr|A0A168S0E2|A0A168S0E2_9CYAN Epoxyqueuosine reductase OS=Phormidium willei BDU 130791 OX=399101; GN = queG PE=3 SV=1
MSQFVNTPNRDNILEYAFDLGFHRAGIAAVPPQADAAETEAVHHLQTWLDQGYQADMAWMANPKRQDIRQVLPGVRSVIAVALNYYTDYQPSQGDEGDEGEDRVKISRYAWGRDYHRVLHRKLKQLSRWLQASGEGIEAKYYADTGPVQDKVWAERAGLGWIAKNGNLITRDYGSWVFLGEVLTNLPLEADRPHTDHCGTCTRCLDACPTEAIVRPTVVDANRCLAYHTIENRRDRLPEDIADNLNGWVAGCDICQDVCPWNQRFAQTTDVAEFEPYPQNLNPSGSELANLSEEDWDQRFRASALRRIKPAMWRRNSQAANKTQKTPSTTDEV

SEQ ID NO: 79444 - protein, 377 aa, Photobacterium angustum
  REGION 1..377: note = tr|A0A2S7VSR7|A0A2S7VSR7_PHOAN Epoxyqueuosine reductase OS=Photobacterium angustum OX=661 GN=queG PE=3; SV = 1
MTIDYHQLAEQIKTWGQELGFQQVGITDIDLSQHEAELQRWLDAGYHGDMDWMARHGMMRARPAELLPGTIRVISVRMNYLPPHAEFAQTLKQPQKAFISRYSLGRDYHKLIRNRLKQLGQRIEQVVGQFGCRPFVDSAPILERPLAQKAGLGWTGKHSLILNEQAGSWFFLGELLVDIPLPIDKPSSDQCGKCVACITSCPTGAIVEEGIVDARRCISYLTIEFDGVIPEQYRSAIGNRIYGCDDCQLVCPINRHGQLTEEHDYHCRDSLYQQDLLTLYAWDETTFLKNTEGSAIRRIGHIQWLRNITIALGNASYQIEIVEALQQRQGISELLDTHIDWALSQQQQRKDQLALEILPTKTKRLVRIIEKGLPRDA

SEQ ID NO: 79445 - protein, 377 aa, Photobacterium angustum
  REGION 1..377: note = tr|Q1ZKC1|Q1ZKC1_PHOAS Epoxyqueuosine reductase; OS = Photobacterium angustum (strain S14 / CCUG 15956); OX = 314292 GN=queG PE=3 SV=1
MTIDYHQLAEQIKTWGQELGFQQVGITDIDLSQHEAELQRWLDAGYHGDMDWMARHGMMRARPAELLPGTIRVISVRMNYLPPHAEFAQTLKQPQKAFISRYSLGRDYHKLIRNRLKQLGQRIEQVVGQFGCRPFVDSAPILERPLAQKAGLGWTGKHSLILNEQAGSWFFLGELLVDIPLPIDKPSTDQCGKCVACITSCPTGAIVEEGIVDARRCISYLTIEFDGVIPEQYRSAIGNRIYGCDDCQLVCPINRHGQLTEEHDYHCRDSLYQQDLLTLYAWDEATFLKNTEGSAIRRIGHIQWLRNITIALGNAPYQIEIVEALQQRQGISELLDTHIDWALLQQQQRKDQLALEILPTKTKRLVRIIEKGLPRDA

SEQ ID NO: 79446 - protein, 377 aa, Photobacterium aphoticum
  REGION 1..377: note = tr|A0A0J1GJ67|A0A0J1GJ67_9GAMM Epoxyqueuosine reductase OS=Photobacterium aphoticum OX=754436 GN=queG; PE = 3 SV=1
MTIDYHALRDKIKQWGLELGFQQVGISDVDLHEHEAQLQRWLDAGYHGEMDWMARHGMMRARPAELHPGTVRVISVRMDYLPPEAGFAQSLSQPDTAYISRYSLGRDYHKLIRNRLKRLGQRIEQEVGPFGYRPFVDSAPILERPLAEKAGLGWTGKHSLILNPHAGSWFFLGELLIDLPLPVDTPIENQCGKCVACKTSCPTGAIVEDGVIDARRCISYLTIEFDGVIPEALREPIGNRIYGCDDCQLVCPYNRYAEITQESDYHCRDSLAQQSLVALFQWDEAQFLKATEGSAIRRIGHVQWLRNLSIAMGNAPYDAAIVEALTQRLGEHALLDIHIDWALAQQTARRQADTITVLPARTQRLIRIVEKGLPRDA

SEQ ID NO: 79447 - protein, 214 aa, Photobacterium aphoticum
  REGION 1..214: note = tr|A0A090R2L4|A0A090R2L4_9GAMM Epoxyqueuosine (OQ) reductase QueG OS=Photobacterium aphoticum OX=754436; GN = JCM19237_3711 PE=4 SV=1
MPVDTPIENQCGKCVACKTSCPTGAIVEDGVIDARRCISYLTIEFDGIIPEALREPIGNRIYGCDDCQLVCPYNRYAEITQESDYHCRDSLAQQSLVALFQWDEAQFLKATEGSAIRRIGHVQWLRNLSIAMGNAPYDAAIVEALTQRLGEHALLDIHIDWALAQQTARRQADAITVLPARTQRLIRIVEKGCHETPEPAQRCRPLCCNVIVEE

SEQ ID NO: 79448 - protein, 377 aa, unidentified
  source 1..377: note = Photobacterium aquae
  REGION 1..377: note = tr|A0A0J1GIY9|A0A0J1GIY9_9GAMM Epoxyqueuosine reductase OS=Photobacterium aquae OX=1195763 GN=queG PE=3; SV = 1
MTIDYHALSDNIKQWGKELGFQQVGICDVDLREHEEELQRWLNAGYHGQMDWMARHGMMRARPDELVPGTIRVISVRMNYLPPEAGFAQSLSQPNSAYISRYSLGRDYHKLVRNRLKQLGQRIEQAVGSFGYRPFVDSAPILERPLAEKAGLGWTGKHSLIINQDAGSWFFLGELLVDLPLPVDRPVEKQCGKCVACITSCPTGAIIEDGVIDARRCISYLTIEFDGVIPEEFREAIGNRIYGCDDCQLVCPFNRFASVTDEPDYYCRDSLYQQPLATLYQWDEDTFLKHTEGSAIRRIGHQQWLRNLTIAMGNAPYSSDIVNALNARQGDSSLLDIHIEWALDKQHRQRQNLVTEALPTKTQRLIRIIEKGLPRDA

SEQ ID NO: 79449 - protein, 377 aa, Photobacterium aquimaris
  REGION 1..377: note = tr|A0A2T3IFT4|A0A2T3IFT4_9GAMM Epoxyqueuosine reductase OS=Photobacterium aquimaris OX=512643 GN=queG; PE = 3 SV=1
MTIDYQQLALQIKTWGQELGFQAVGISDIDLSQHETQLQRWLDADYHGDMDWMARHGMMRARPQELLPGTVRVISVRMNYLPPQAGFAQTLKQPTKAYISRYSLGRDYHKLIRNRLKQLGQRIEAVVGEFGCRPFVDSAPVLERPLAEKAGLGWTGKHSLILNDQSGSWFFLGELLIDLPLPVDAPVVNQCGKCVACMTSCPTDAIIEAGVIDARRCISYLTIEFDGIIPEQYRTAIGNRIYGCDDCQLVCPFNRHGEITSETDYHCRDTLFQQDLVTLYTWNEATFLRNTEGSAIRRIGHTQWLRNITIALGNAPYQTDIIDALSARQGEHPLVDVHIEWALEQQHQKRQQIVIDVLPNATKRLVRIIEKGLPRDA

SEQ ID NO: 79450 - protein, 377 aa, Photobacterium aquimaris
  REGION 1..377: note = tr|A0A2T3HUN6|A0A2T3HUN6_9GAMM Epoxyqueuosine reductase OS=Photobacterium aquimaris OX=512643 GN=queG; PE = 3 SV=1
MTIDYQQLALQIKTWGQELGFQAVGISDIDLSQHETQLQRWLDAGYHGDMDWMARHGMMRARPQELLPGTVRVISVRMNYLPPQAGFAQTLKQPTTAYISRYSLGRDYHKLIRNRLKQLGQRIEAVVGEFGCRPFVDSAPVLERPLAEKAGLGWTGKHSLILNDQSGSWFFLGELLIDLPLPVDTPVVNQCGKCVACMTSCPTGAIIEAGVVDARRCISYLTIEFDGIIPEQYRAAIGNRIYGCDDCQLVCPFNRHGEITSETDYHCRETLFQQDLVTLYAWNEATFLRNTEGSAIRRIGHTQWLRNITIALGNAPYQADIIEALSARQGEHPLVDVHIEWALEQQNQKRQQMVIDVLPNATKRLVRIIEKGLPRDA

SEQ ID NO: 79451 - protein, 377 aa, unidentified
  source 1..377: note = Photobacterium carnosum
  REGION 1..377: note = tr|A0A2N4UN66|A0A2N4UN66_9GAMM Epoxyqueuosine reductase OS=Photobacterium carnosum OX=2023717 GN=queG; PE = 3 SV=1
MSIDYQQLALQIKTWGQELGFQAVGICDIDLTQHEAQLQRWLDAGYHGDMDWMARHGMMRARPQELLPGTIRVISVRMNYLPPQAGFAQTLKQPTKAYISRYSLGRDYHKLIRNRLKQLGQRIKSVVGEFGCRPFVDSAPVLERPLAEKSGLGWTGKHSLILNEQSGSWFFLGELLIDLPLPVDTPTTNQCGKCVACMTSCPTGAIIEAGVVDARRCISYLTIEFDGIIPEQYRAAIGNRIYGCDDCQLVCPFSRNGEITTETDYHCRDVLFQQDLVTLYQWNEATFLSNTEGSAIRRIGHTQWLRNITIALGNAPYQADIINALITRQGEHPLVDVHIKWALEQQQQKRQQMVIDVLPNATKRLVRIIEKGLPRDA

SEQ ID NO: 79452 - protein, 377 aa, unidentified
  source 1..377: note = Photobacterium damsela
  REGION 1..377: note = tr|A0A1Q9H0D5|A0A1Q9H0D5_PHODP Epoxyqueuosine reductase OS=Photobacterium damsela subsp. piscicida; OX = 38294 GN=queG PE=3 SV=1
MTIDLNQLSLDIKQWGKELGFQQVGICDVDLSQHEAQLQRWLDAGYHGDMDWMARHGMMRARPDELHPGTVRVISVRMNYLPPEAGFAQTLKAPEKGYISRYALGRDYHKLVRNRLKQLGQKIEAVVGPFGYRPFVDSAPILERPLAQKAGLGWTGKHSLILNQDAGSWFFLGELLIDLPLPVDEAIENQCGKCVACMTSCPTGAIVDEGVIDARRCISYLTIEYSGVIPEEFRPLIGNRIYGCDDCQLVCPHSRHGEITEETDYHCRPTLAQQDLLTLFSWDEKTFLKNTEGSAIRRIGHIQWLRNISIAMGNAPYQEAILIALEKCLGLDESLDIHLNWAIEQQKKRRDENSITVISNKAQRLVRIIEKGLPRDA

SEQ ID NO: 79453 - protein, 377 aa, Photobacterium damselae
  REGION 1..377: note = tr|A0A2T3QEG6|A0A2T3QEG6_9GAMM Epoxyqueuosine reductase OS=Photobacterium damselae OX=38293 GN=queG PE=3; SV = 1
MTIDLNQLSLDIKQWGKELGFQQVGICDVDLSQHEAQLQRWLDAGYHGDMDWMARHGMMRARPDELHPGTVRVISVRMNYLPPEAGFAQTLKAPEKGYISRYALGRDYHKLVRNRLKQLGQKIEAVVGPFGYRPFVDSAPILERPLAQKAGLGWTGKHSLILNQDAGSWFFLGELLIDLPLPVDEALENQCGKCVACMTSCPTGAIVEEGVIDARRCISYLTIEYSGVIPEEFRPLMGNRIYGCDDCQLVCPHSRHGEITEETDYHCRPTLAQQDLLTLFSWDEKTFLKNTEGSAIRRIGHIQWLRNISIAMGNAPYQEAILIALEECLGLDETLDIHLNWAIGQQKKRRDENSITVISNKAQRLVRIIEKGLPRDA

SEQ ID NO: 79454 - protein, 400 aa, Photobacterium damselae
  REGION 1..400: note = tr|D0Z0H5|D0Z0H5_PHODD Epoxyqueuosine reductase; OS = Photobacterium damselae subsp. damselae CIP 102761; OX = 675817 GN=queG PE=3 SV=1
MSYPDSIYFVINFAPFSVTCDSVMTIDLNQLSLDIKQWGKELGFQQVGICDVDLSQHEAQLQRWLDAGYHGDMDWMARHGMMRARPDELHPGTVRVISVRMNYLPPEAGFAQTLKAPEKGYISRYALGRDYHKLVRNRLKQLGQKIEAVVGPFGYRPFVDSAPILERPLAQKAGLGWTGKHSLILNQDAGSWFFLGELLIDLPLPVDEALENQCGKCVACMTSCPTGAIVEEGVIDARRCISYLTIEYSGVIPEEFRPLMGNRIYGCDDCQLVCPHSRHGEITEETDYHCRPTLAQQDLLTLFSWDEKTFLKNTEGSAIRRIGHIQWLRNISIAMGNAPYQEAILIALEECLGLDETLDIHLNWAIGQQKKRRDENSITVISNKAQRLVRIIEKGLPRDA

SEQ ID NO: 79455 - protein, 377 aa, Photobacterium frigidiphilum
  REGION 1..377: note = tr|A0A2T3J892|A0A2T3J892_9GAMM Epoxyqueuosine reductase OS=Photobacterium frigidiphilum OX=264736; GN = queG PE=3 SV=1
MSIDYTALTQQIKQWGKELGFQEVGICDVDLQKHEAQLQRWLDAGYHGEMDWMARHGMMRARPAELLPNTVRVISVRMNYLPPEAGFAQTLKQPLKAYISRYSLGRDYHKLIRNRLKQLGQRIEKEVGQFGYRPFVDSAPILERPLAEKAGLGWTGKHSLILNSDSGSWFFLGELLIDLPLPVDTPQENQCGKCVACITSCPTGAIVEEGIVDARRCISYLTIEFDGVIPEELREKIGNRIYGCDDCQLVCPFSRNGEITQETDYHCRDNLYQQDLTTLFLWDEATFLKNTEGSAIRRIGHIQWLRNIAIAMGNAPYNEDILEALNSRLALNEILDIHIQWAIKKQHNKYAKNAIDVLPSNTKRLVRIVEKGLPRDA

SEQ ID NO: 79456 - protein, 377 aa, Photobacterium gaetbulicola
  REGION 1..377: note = tr|A0A0B9H1N7|A0A0B9H1N7_9GAMM Epoxyqueuosine reductase OS=Photobacterium gaetbulicola OX=1295392; GN = queG PE=3 SV=1
MTIDYRDLTQKIKQWGQELGFQQVGISDVDLSQHEAQLQRWLDAGYHGDMDWMARHGMMRARPAELHPGTVRVISARMDYLPPEANFAHSLSHPETAYISRYALGRDYHKLIRNRLKRLGQLIEQEVGPFGYRPFVDSAPILERPLAEKAGLGWTGKHSLLLNQQAGSWFFLGELLIDLPLPVDKPKENKCGKCIACMTSCPTQAIVEEGVVDARRCISYLTIEFDGVIPEEFREAIGNRVYGCDDCQLVCPFNRFSDITQEADFHCRNSLKLQPLTTLYAWTEEAFLKHTEGSAIRRIGHLQWLRNLTIAMGNAPYSPAIIEALESREGQSALLDSHIQWAREKQLEKRGQDTINVQPARTKRLTRIVEKGLPRDA

SEQ ID NO: 79457 - protein, 377 aa, Photobacterium gaetbulicola
  REGION 1..377: note = tr|A0A0C5WI79|A0A0C5WI79_9GAMM Epoxyqueuosine reductase OS=Photobacterium gaetbulicola Gung47 OX=658445; GN = queG PE=3 SV=1
MTIDYRDLTQKIKQWGQELGFQQVGISDVDLSQHEAQLQRWLNAGYHGDMDWMARHGMMRARPAELHPGTVRVISARMDYLPPEANFAHSLRHPETAYISRYALGRDYHKLIRNRLKRLGQLIEQEVGPFGYRPFVDSAPILERPLAEKAGLGWTGKHSLLLNQQAGSWFFLGELLIDLPLPVDKPTENKCGKCIACMTSCPTQAIVEEGVVDARRCISYLTIEFDGVIPEEFREAIGNRVYGCDDCQLVCPFNRFSDITQEADFHCRNSLKLQPLTTLYAWTEEAFLKHTEGSAIRRIGHLQWLRNLTIAMGNAPYSPAIIEALESREGQSALLDSHIQWAREKQLEKRDPDAINVQPARTKRLTRIVEKGLPRDA

SEQ ID NO: 79458 - protein, 377 aa, unidentified
  source 1..377: note = Photobacterium galatheae
  REGION 1..377: note = tr|A0A066RSB7|A0A066RSB7_9GAMM Epoxyqueuosine reductase OS=Photobacterium galatheae OX=1654360 GN=queG; PE = 3 SV=1
MTLDFQQLASDIKQWGKALGFQHVGICDVDLSKHEAQLQRWLDAGYHGEMDWMARHGMMRARPAELLPGTVRVISVRMNYLPPEAGFAQTLKQPHQAYISRYALGRDYHKLVRNRLKQLGQKIEQAVGSFGYRPFVDSAPILERPLAEKAGLGWTGKHSLILSEDAGSWFFLGELLIDLPLPVDGPVENQCGKCVACMTSCPTQAIVAEGVIDARRCISYLTIELDGVIPEEFREAMGNRIYGCDDCQLVCPYNRAADVTSEQDYHCRPQLYQQDLLTLFQWDEATFQKQTEGSAIRRIGHIKWLRNLSVAIGNAPYDPSLLDALIERKGLDSMLDEHLDWAITRQQEKRAAASVDILPNKTKRLIRIVEKGLPRDA

SEQ ID NO: 79459 - protein, 386 aa, Photobacterium ganghwense
  REGION 1..386: note = tr|A0A0J1GYY7|A0A0J1GYY7_9GAMM Epoxyqueuosine reductase OS=Photobacterium ganghwense OX=320778 GN=queG; PE = 3 SV=1
MTIDYRDLANHIKQWGQELGFQQVGICDVDLSRHEAQLQRWLDAGYHGEMDWMARHGMMRARPAELLPGTVRVISVRMNYLPPEAGFAQSLGQPDTAYVSRYSLGRDYHKLIRNRLKQLGQKIEAAVGQFGYRPFVDSAPILERPLAEKAGLGWTGKHSLILNEHAGSWFFLGELLIDLPLPVDTPVENQCGKCVACMTSCPTGAIVEEGVIDARRCISYLTIEFDGVIPEEFREPIGNRIYGCDDCQLVCPFNRYADVTEEQDYHCRESLYQQPLATLFQWDENQFLKNTEGSAIRRIGHVQWLRNIAIAMGNAPYSTELVQALEQRLGEHELLDVHIQWALGKQHERVNQANQLPHLTAQRIEVLPAKTRRLIRIVEKGLPRDA

SEQ ID NO: 79460 - protein, 377 aa, Photobacterium halotolerans
  REGION 1..377: note = tr|A0A0F5V6W9|A0A0F5V6W9_9GAMM Epoxyqueuosine reductase OS=Photobacterium halotolerans OX=265726 GN=queG; PE = 3 SV=1
MMLDYQQLANDIKQWGKDLGFQHVGICDVDLSKHEAQLQRWLDAGYHGEMDWMARHGMMRARPAELLPGTVRVISVRMNYLPPEAGFAQTLKQPEKAYISRYALGRDYHKLVRNRLKQLGQRIEQVAGAFGYRPFVDSAPILERPLAEKAGLGWTGKHSLILSEDAGSWFFLGELLIDLPLPTDEPVDHQCGKCVACITSCPTQAIVAEGVVDARRCISYLTIELDGPIPEEFREAMGNRIYGCDDCQLVCPYNRQSAITDEPDYHCRPQLYQQDLLTLFHWDEATFLKNTEGSPIRRIGHLKWLRNLSVAIGNAPYAPELLNALIERKGLDSMLDEHLDWSIRRQIARRDEARVDVVTNKTQRLIRIVEKGLPRDA

SEQ ID NO: 79461 - protein, 377 aa, Photobacterium iliopiscarium
  REGION 1..377: note = tr|A0A2T3MCM5|A0A2T3MCM5_9GAMM Epoxyqueuosine reductase OS=Photobacterium iliopiscarium OX=56192 GN=queG; PE = 3 SV=1
MTIDYQQLALQIKTWGQELGFQAVGISDIDLSQHEVQLQRWLDADYHGDMDWMARHGMMRARPQELLPGTIRVISVRMNYLPPQAGFAQTLKQPTKAYISRYSLGRDYHKLIRNRLKQLGQRIETVVGEFGCRPFVDSAPVLERPLAEKAGLGWTGKHSLILNDQSGSWFFLGELLIDLPLPVDEPMNNQCGKCIACMTSCPTGAIIEAGVVDARRCISYLTIEFDGIIPEQYRAAIGNRIYGCDDCQLVCPFNRHGEITTEIDYHCRDTLFQQDLVTLYQWNEATFLKNTEGSAIRRIGHVQWLRNITIALGNAPYQTDIVAALATRQGEHPLVDIHIEWALEQQHQKRQQMVLDVLPNATKRLVRIIEKGLPRDA

SEQ ID NO: 79462 - protein, 377 aa, Photobacterium indicum
  REGION 1..377: note = tr|A0A2T3L198|A0A2T3L198_9GAMM Epoxyqueuosine reductase OS=Photobacterium indicum OX=81447 GN=queG PE=3; SV = 1
MSIDYTALTQQIKLWGKELGFQDVGICDVDLQKHEAQLQRWLDAGYHGEMDWMARHGMMRARPAELLPNTVRVISVRMNYLPPEAGFAQTLKQPLKAYISRYSLGRDYHKLIRNRLKQLGQRIEKEVGQFGYRPFVDSAPILERPLAEKAGLGWTGKHSLILNSDSGSWFFLGELLIDLPLPVDTPQENQCGKCVACITSCPTGAIVEEGIVDARRCISYLTIEFDGVIPEELREKIGNRIYGCDDCQLVCPFSRNGEITQETDYHCRDNLYQQDLTTLFLWDEATFLKNTEGSAIRRIGHIQWLRNIAIAMGNAPYNVDILEVLNSRLALNEILDIHIQWAIKKQHNKYAKNAIDVLPSNTKRLVRIVEKGLPRDA

SEQ ID NO: 79463 - protein, 382 aa, Photobacterium jeanii
  REGION 1..382: note = tr|A0A178KQY5|A0A178KQY5_9GAMM Epoxyqueuosine reductase OS=Photobacterium jeanii OX=858640 GN=queG PE=3; SV = 1
MSPDYTDLAQKIKQWGQALGFQHVGICNVDLSDHEAQLQRWLDMGYHGEMDWMARHGMMRARPDELLPGTVRVISVRMNYLPPDAGFADTLANPNKAYISRYSLGRDYHKLIRNRLKRLGQQIEQEVGQFGYRPFVDSAPILERPLAEKAGLGWTGKHSLILSQSAGSWFFLGELLIDLPLPVDTPETNQCGKCVACMTSCPTGAIVEEGVIDARRCVSYLTIEFDGVIPEEFREKIGNRIYGCDDCQLVCPFNRFSDLTEEADYHCRDTLYQQDLLTLYQWDEASFLKNTEGSAIRRIGHIQWLRNITIALGNAPYAPEIINALSERQGLSELLDIHIEWALEQQQLKREALAVDVLPSKTKRLVRIVEKGLPRDAHSPPQ

SEQ ID NO: 79464 - protein, 377 aa, Photobacterium kishitanii
  REGION 1..377: note = tr|A0A2T3QRX4|A0A2T3QRX4_9GAMM Epoxyqueuosine reductase OS=Photobacterium kishitanii OX=318456 GN=queG; PE = 3 SV=1
MTIDYQQLALQIKIWGQELGFQAVGISDVDLSEHETQLQRWLDAGYHGDMDWMARHGMMRARPQELLPGTVRVISVRMNYLPPQAGFAQTLKQPTKGYISRYSLGRDYHKLIRNRLKQLGQRIETVVGQFGCRPFVDSAPVLERPLAEKAGLGWTGKHSLILNDQSGSWFFLGELLIDLPLPVDAPVTNQCGKCVACMTSCPTGAIIESGVVDARRCISYLTIEFDGIIPEQYRAAIGNRIYGCDDCQLVCPFNRHGEITAETDYHCRESLFQQDLLTLYHWNEATFLKNTEGSAIRRIGHIQWLRNITIALGNAPYQADIVAALTNRQGEHPLVDVHIEWALEQQQQKYQQMIIDVLPSSTKRLVRIIEKGLPRDA

SEQ ID NO: 79465 - protein, 377 aa, Photobacterium kishitanii
  REGION 1..377: note = tr|A0A2T3KCC4|A0A2T3KCC4_9GAMM Epoxyqueuosine reductase OS=Photobacterium kishitanii OX=318456 GN=queG; PE = 3 SV=1
MTIDYQQLALQIKIWGQELGFQAVGISDVDLSEHETQLQRWLDAGYHGDMDWMARHGMMRARPQELLPGTVRVISVRMNYLPPQAGFAQTLKQPTKGYISRYSLGRDYHKLIRNRLKQLGQRIETVVGQFGCRPFVDSAPVLERPLAEKAGLGWTGKHSLILNDQSGSWFFLGELLIDLPLPVDAPVTNQCGKCVACMTSCPTGAIIESGVVDARRCISYLTIEFDGIIPEQYRAAIGNRIYGCDDCQLVCPFNRHGEITAETDYHCRESLFQQDLLTLYHWNEATFLKNTEGSAIRRIGHIQWLRNITIALGNAPYQADIVAALTNRQGEHPLVDVHIEWALEQQQQKYQQMVIDVLPSSTKRLVRIIEKGLPRDA

SEQ ID NO: 79466 - protein, 377 aa, Photobacterium leiognathi
  REGION 1..377: note = tr|A0A2T3M6B8|A0A2T3M6B8_PHOLE Epoxyqueuosine reductase OS=Photobacterium leiognathi OX=553611 GN=queG; PE = 3 SV=1
MTIDYQQLADQIKTWGQELGFQQVGISDIDLSQHEVELQRWIDAGYHGEMDWMARHGMMRARPAELLPGTIRVISVRMNYLPPDAGFAQTLKQPHKAYISRYSLGRDYHKLIRNRLKQLGQRIEQMVGQFGCRPFVDSAPILERPLAQKAGLGWTGKHSLILNEQAGSWFFLGELLVDIPLPVDIPTEEQCGKCVACITSCPTGAIVEEGVIDSRRCISYLTIEFDGVIPEQYRTAMGNRIYGCDDCQLVCPVNRHGQLTNEVDYHCRDSLYQQDLLTLYAWDEKTFLKNTEGSAIRRIGHIQWLRNITIALGNAPYQSEIIEALSTRQGLSDLLDIHIEWALEQQELKKVESEREILPTKTKRLVRIIEKGLPRDA

SEQ ID NO: 79467 - protein, 377 aa, Photobacterium leiognathi
  REGION 1..377: note = tr|A0A2T3KQA0|A0A2T3KQA0_PHOLD Epoxyqueuosine reductase OS=Photobacterium leiognathi subsp. mandapamensis OX=48408 GN=queG PE=3 SV=1
MTIDYQQLADQIKTWGQELGFQQVGISDIDLSQHEAELQRWIDAGYHGEMDWMARHGMMRARPAELLPGTIRVISVRMNYLPPDAGFAQTLKQPHKAYISRYSLGRDYHKLIRNRLKQLGQRIEQVVGQFGCRPFVDSAPILERPLAQKAGLGWTGKHSLILNEQAGSWFFLGELLVDIPLPVDTPTKEQCGKCVACITSCPTGAIVEEGIIDSRRCISYLTIEFDGVIPKQYRTAMGNRIYGCDDCQLVCPVNRHGQLTNEVDYHCRDSLYQQDLLTLYAWDEKTFLKNTEGSAIRRIGHIQWLRNITIALGNAPYQSEIIEALSTRQGLSDLLDIHIEWALEQQELKKVQSELEILPTKTKRLVRIIEKGLPRDA

SEQ ID NO: 79468 - protein, 377 aa, Photobacterium lipolyticum
  REGION 1..377: note = tr|A0A2T3MS73|A0A2T3MS73_9GAMM Epoxyqueuosine reductase OS=Photobacterium lipolyticum OX=266810 GN=queG; PE = 3 SV=1
MSIDYTALTQKIKQWGKELGFQQVGICDIDLKQHEAQLQRWLEAEYHGDMDWMARHGMMRARPAELQPGTVRVISVRMNYLPPDAGFAQTLKQPLKAYISRYALGRDYHKLIRNRLKRLGQLIEAEVGQFGHRPFVDSAPILERPLAEKAGLGWTGKHSLNLNDNSGSWFFLGELLIDLPLPVDTPVENQCGKCVACITSCPTGAIVKEGVIDARRCISYLTIEFSGVIPEDFREKIGNRIYGCDDCQLVCPFNRFSELTEETDYHCRDTLYQQDLLTLFQWDEKSFLKYTEGSAIRRIGHIQWLRNLAIAIGNAPYDADLLDALSKRSGFNELLDIHIRWAMTKQQEKRAELVIDVLPSKTKRLIRIVERGLPRDA

SEQ ID NO: 79469 - protein, 377 aa, Photobacterium lutimaris
  REGION 1..377: note = tr|A0A2T3ISG8|A0A2T3ISG8_9GAMM Epoxyqueuosine reductase OS=Photobacterium lutimaris OX=388278 GN=queG; PE = 3 SV=1
MTIDYRNLTQKIKQWGQELGFQQIGISDVDLSQHEAQLQRWLDAGYHGDMDWMARHGMMRARPAELHPGTVRVISARMDYLPPEAGFAHSLNQPDTAYISRYALGRDYHKLIRNRLKRLGQLIAQEVGAFGYRPFVDSAPILERPLAEKAGLGWTGKHSLLLNQQAGSWFFLGELLVDLPLPVDSPEENQCGKCVACMTSCPTQAIVAEGVVDARRCISYLTIEYDGVIPEEFREAIGNRVYGCDDCQLVCPFNRFSEVTKEADYHCRDSLRQQPLTTLYAWTEDAFLKNTEGSAIRRIGHNQWLRNLTIAMGNAPYSPEIIEALESREGENALLDVHIQWAKDKQLERCQQDTISVLPASTKRLIRIVEKGLPRDA

SEQ ID NO: 79470 - protein, 377 aa, unidentified
  source 1..377: note = Photobacterium marinum
  REGION 1..377: note = tr|L8J3H4|L8J3H4_9GAMM Epoxyqueuosine reductase; OS = Photobacterium marinum OX=1056511 GN=queG PE=3 SV=1
MSIDYSELAHKIKQWGKELGFQQLGISDTDLQQHEAQLQRWLDAGYHGDMDWMARHGMMRARPAELLPGTIRVISVRMNYLPPEAGFAQSLNNPNTAYISRYSLGRDYHKLIRNRLKRLGQLIEQETGQFGYRPFVDSAPILERPLAQKAGLGWTGKNSLILNKEAGSWFFLGELLVDLPLPVDTPADNQCGKCVACITSCPTGAIIEEGVIDARRCISYLTIEYDGIIPEEFREPIGNRIYGCDDCQLVCPFNRFSNITDEADYHCRDSLNQPPLHELFQWTEKEFLKKTEGSAIRRIGHIQWLRNLTIAMGNAPYQDDILTALQARLGENELLDVHLQWAICKQEEKRKANVIDVLPAKTKRLVRIVEKGLPRDA

SEQ ID NO: 79471 - protein, 377 aa, Photobacterium phosphoreum
  REGION 1..377: note = tr|A0A2T3JED2|A0A2T3JED2_PHOPO Epoxyqueuosine reductase OS=Photobacterium phosphoreum OX=659 GN=queG; PE = 3 SV=1
MTIDYQQLALQIKIWGQELGFQAVGISDIDLSQHETQLQRWLDAGYHGDMDWMARHGMMRARPNELLPGTLRVISVRMNYLPPQAGFAQTLKQPTKAYISRYSLGRDYHKLIRNRLKQLGQRIETVVGEFGCRPFVDSAPVLERPLAEKAGLGWTGKHSLILNDQSGSWFFLGELLIDLPLPIDEPVSNQCGKCVACMTSCPTGAIIEAGVVDARRCISYLTIEFDGIIPEQYRAAIGNRIYGCDDCQLVCPFNRHGEITAETDYHCRDTLFQQDLVTLYQWNEATFLKNTEGSAIRRIGHMQWLRNITIALGNAPYQVDIVTALTMRQGEYPLVDIHIEWALEQQHQKHQQLVIDVLPSSTKRLVRIIEKGLPRDA

SEQ ID NO: 79472 - protein, 377 aa, Photobacterium phosphoreum
  REGION 1..377: note = tr|A0A0B7JEX2|A0A0B7JEX2_PHOPO Epoxyqueuosine reductase OS=Photobacterium phosphoreum ANT-2200; OX = 1454202 GN=yjeS PE=3 SV=1
MTIDYQQLALQIKIWGQELGFQAVGISDVDLSEHETQLQRWLDAGYHGDMDWMARHGMMRARPQELLPGTVRVISVRMNYLPPQAGFAQTLKQPTKGYISRYSLGRDYHKLIRNRLKQLGQRIETVVGQFGCRPFVDSAPVLERPLAEKAGLGWTGKHSLILNDQSGSWFFLGELLINLPLPVDAPVTNQCGKCVACMTSCPTGAIIESGVVDARRCISYLTIEFDGIIPEQYRAAIGNRIYGCDDCQLVCPFNRHGEITAETDYHCRESLFQQDLLTLYHWNEATFLKNTEGSAIRRIGHIQWLRNITIALGNAPYQADIVAALTNRQGEHPLVDVHIEWALEQQQQKYQQMVIDVLPSSTKRLVRIIEKGLPRDA

SEQ ID NO: 79473 - protein, 377 aa, unidentified
  source 1..377: note = Photobacterium piscicola
  REGION 1..377: note = tr|A0A1T5I445|A0A1T5I445_9GAMM Epoxyqueuosine reductase OS=Photobacterium piscicola OX=1378299 GN=queG; PE = 3 SV=1
MSIDYQQLALQIKIWGQELGFQAVGICDIDLTQHEAQLQRWLDAGYHGDMEWMARHGMMRARPQELLPGTVRVISVRMNYLPPQAGFAQTLKQPTKAYISRYSLGRDYHKLIRNRLKQLGQRIESVVGEFGCRPFVDSAPVLERPLAEKSGLGWTGKHSLILNDHSGSWFFLGELLIDLPLPVDTPTTNQCGKCVACMTSCPTGAIIEAGVVDARRCISYLTIEFDGIIPEQYRAAMGNRIYGCDDCQLVCPFSRNGEITTETDYHCRDVLFQQDLVTLYQWNEATFLKNTEGSAIRRIGHTQWLRNITIALGNAPYQTNIIDALNARQGEHPLVDVHIEWALEQQHQKRQQMVIDVLPNATKRLVRIIEKGLPRDA

SEQ ID NO: 79474 - protein, 349 aa, Photobacterium profundum
  REGION 1..349: note = tr|Q6LM24|Q6LM24_PHOPR Epoxyqueuosine reductase; OS = Photobacterium profundum (strain SS9) OX=298386 GN=YJES; PE = 3 SV=1
MDLQKHEAQLQRWLDAGYHGEMDWMARHGMMRARPAELLPNTVRVVSVRMNYLPPEAGFAQTLKQPLKAYISRYSLGRDYHKLIRNRLKQLGQRIEKEVGQFGYRPFVDSAPILERPLAEKAGLGWTGKHSLILNSDSGSWFFLGELLIDLPLPVDTPQENQCGKCVACITSCPTGAIIEEGVVDARRCISYLTIEFDGVIPEELREKMGNRIYGCDDCQLVCPFSRNGEITQETDYHCRDNLYQQDLTTLFLWDEATFLKNTEGSAIRRIGHIQWLRNIAIAMGNAPYNEDILEALNSRLALNEILDIHIQWAIKKQHNKYAKNAIDVLPSNTKRLVRIVEKGLPRDA

SEQ ID NO: 79475 - protein, 377 aa, Photobacterium profundum
  REGION 1..377: note = tr|Q1YXJ2|Q1YXJ2_9GAMM Epoxyqueuosine reductase; OS = Photobacterium profundum 3TCK OX=314280 GN=queG PE=3; SV = 1
MSIDYTALTQQIKLWGKELGFQDVGICDVDLQKHEAQLQRWLDAGYHGEMDWMARHGMMRARPAELLPHTVRVISVRMNYLPPEAGFAQTLKQPLKAYISRYSLGRDYHKLIRNRLKQLGQRIEKEVGQFGYRPFVDSAPILERPLAEKAGLGWTGKHSLILNSDSGSWFFLGELLIDLPLPVDTPQENQCGKCVACITSCPTGAIVEEGIVDARRCISYLTIEFDGVIPEELREKIGNRIYGCDDCQLVCPFSRNGEITQETDYHCRDNLYQQDLTTLFLWDEATFLKNTEGSAIRRIGHIQWLRNIAIAMGNAPYNEDILETLNCRLALNEILDIHIQWAIKKQHDKYAKNAIDVLPSNTKRLVRIVEKGLPRDA

SEQ ID NO: 79476 - protein, 377 aa, unidentified
  source 1..377: note = Photobacterium proteolyticum
  REGION 1..377: note = tr|A0A1Q9G7U3|A0A1Q9G7U3_9GAMM Epoxyqueuosine reductase OS=Photobacterium proteolyticum OX=1903952; GN = queG PE=3 SV=1
MNIDYSELTQKIKQWGKELGFQQVGISDIDLHQHEAQLQRWIDAGYHGDMDWMARHGMMRARPAELHPGTVRVISVRMNYLPPEAGFAQSLKQPDTAYISRYSLGRDYHKLIRNRLKRLGQLIEKEVGEFGYRPFVDSAPILERPLAEKAGLGWTGKHSLILSSEAGSWFFLGELLIDLPLPVDTPIDNQCGKCVACMTSCPTGAIVEEGVVDARRCISYLTIEFDGIIPEELREPIGNRIYGCDDCQLVCPFNRFSDLTEEVDYHCRDSLYQQPLHVLYQWTEKQFLKNTEGSAIRRIGHIQWLRNLTIAMGNAPYSADIFEALEQRLGENELLDIHIHWAMEIQTKRHQEHAIEILPGKTKRLIRIVEKGLPRDA

SEQ ID NO: 79477 - protein, 377 aa, Photobacterium rosenbergii
  REGION 1..377: note = tr|A0A2T3N5I2|A0A2T3N5I2_9GAMM Epoxyqueuosine reductase OS=Photobacterium rosenbergii OX=294936 GN=queG; PE = 3 SV=1
MTIDYRDLTKKIKQWGLELGFQQVGISDVDLSEHEAQLQRWLEAGYHGDMDWMARHGMMRARPAELHPGTVRVISARMDYLPPEAGFAYSLSHPETAYVSRYALGRDYHKLIRNRLKRLGQLIEQEVGPFGYRPFVDSAPILERPLAEKAGLGWTGKHSLLLNQQAGSWFFLGELLIDLPLPIDKPEENQCGKCIACMTSCPTKAIVEEGVVDARRCISYLTIEFDGVIPEEFREAIGNRVYGCDDCQLVCPFNRSSEVTKEADYHCRDSLKLQPLTTLYAWTEATFLKNTEGSAIRRIGHIQWLRNLTIAMGNAPYSPDIIEALESREGESALLDEHICWAKDKQHEKRQQDAVSVLPASTKRLVRIVEKGLPRDA

SEQ ID NO: 79478 - protein, 377 aa, unidentified
  source 1..377: note = Photobacterium sanctipauli
  REGION 1..377: note = tr|A0A2T3NA07|A0A2T3NA07_9GAMM Epoxyqueuosine reductase OS=Photobacterium sanctipauli OX=1342794 GN=queG; PE = 3 SV=1
MTIDYRELTVKIKQWGRELGFQHVGICDVDLRQHEAQLQRWLDAGYHGEMDWMARHGMMRAHPDELHPGTVRVISARMDYLPPEASFAQSLNKPESAYISRYSLGRDYHKLIRNRLKRLGQLIEQETGPFGYRPFVDSAPILERPLAEKAGLGWTGKHSLLLSKEAGSWFFLGELLIDLPLPVDEPEENQCGKCVACMTSCPTGAIVEEGIVDARRCISYLTIEFDGVIPEEFREAIGNRIYGCDDCQLVCPFNRFSSVTEEADYHCRDSLYQQSLTTLYQWTEAQFLKNTEGSAIRRIGHTQWLRNLTVAMGNAPYDSDIVKTLEQRRGESKLLDTHIDWALKKQHERCQSIEINVLPAKTQRLIRIVEKGLPRDA

SEQ ID NO: 79479 - protein, 377 aa, unidentified
  source 1..377: note = Photobacterium sanguinicancri
  REGION 1..377: note = tr|A0A135ZIU0|A0A135ZIU0_9GAMM Epoxyqueuosine reductase OS=Photobacterium sanguinicancri OX=875932; GN = queG PE=3 SV=1
MSIDYNALALQIKLWGKELGFQHVGICDVDLSQHEAQLQRWLDAGYHGDMDWMARHGMMRARPHELLPGTVRVISVRMNYLPPNAEFAQTLKNPDKAYISRYSLGRDYHKLIRNRLKKLGQNIEQVVGQFGHRPFVDSAPILERPLAEKSGLGWTGKHSLILSQEAGSWFFLGELLIDLPLPVDTAETNQCGKCVACITSCPTGAIVEEGVVDARRCISYLTIEFDGVIPEEFREKIGNRIYGCDDCQLVCPFNRFSDITEEADYHCRDNLYQQDLLVLFDWNEAAFLKNTEGSAIRRIGHTQWLRNITIALGNAPYQPAIINALTEKLGLNEMLDVHLEWALAQQQQKRAEANLEILPTKTKRLVRIIEKGLPRDA

SEQ ID NO: 79480 - protein, 377 aa, Photobacterium sp.
  REGION 1..377: note = tr|A0A444JJ08|A0A444JJ08_9GAMM Epoxyqueuosine reductase OS=Photobacterium sp. BEI 247 OX=2485123 GN=queG; PE = 3 SV=1
MSIDYSELTQKIKQWGKELGFQQVGISDIDLHQHEAQLQRWIDAGYHGEMDWMARHGMMRARPAELHPGTVRVISVRMNYLPPEAGFAQSLKKPDTAYISRYSLGRDYHKLIRNRLKRLGQLIEKEVGEFGYRPFVDSAPILERPLAEKAGLGWTGKHSLILSPEAGSWFFLGELLIDLPLPVDIPVENQCGKCVACMTSCPTGAIVEEGIVDARRCISYLTIEFDGVIPEELREPIGNRIYGCDDCQLVCPFNRFSDITEEVDYHCRDSLYQQPLHVLYQWSEQQFLKNTEGSAIRRIGHIQWLRNLTIAMGNAPYHPDIYDALEQRLGDNELLDIHIQWAIGKQQEKRQESAIEVMPGKTKRLIRIVEKGLPRDA

SEQ ID NO: 79481 - protein, 377 aa, Photobacterium sp.
  REGION 1..377: note = tr|Q2BYL6|Q2BYL6_9GAMM Epoxyqueuosine reductase; OS = Photobacterium sp. SKA34 OX=121723 GN=queG PE=3 SV=1
MTIDYHQLAEQIKTWGQELGFQQVGITDIDLSQHEAELQRWLDAGYHGDMDWMARHGMMRARPAELLPGTIRVISVRMNYLPPHAEFAQTLKQPQKAFISRYSLGRDYHKLIRNRLKQLGQRIEQVVGQFGCRPFVDSAPILERPLAQKAGLGWTGKHSLILNEQAGSWFFLGELLVDIPLPIDKPSSDQCGKCVACITSCPTGAIVKEGIVDARRCISYLTIEFDGVIPEQYRSAIGNRIYGCDDCQLVCPINRHGQLTEEHDYHCRDSLYQQDLLTLYTWDEATFLKNTEGSAIRRIGHIQWLRNITIALGNAPYQIEIVGVLKQRQGICELLDTHIDWALSQQQQRKAQLALEILPTKTKRLVRIIEKGLPRDA

SEQ ID NO: 79482 - protein, 377 aa, Photobacterium swingsii
  REGION 1..377: note = tr|A0A2T3NSC7|A0A2T3NSC7_9GAMM Epoxyqueuosine reductase OS=Photobacterium swingsii OX=680026 GN=queG; PE = 3 SV=1
MSIDYHALAQQIKLWGQELGFQHVGICDVDLSQHEAQLQRWLDAGYHGEMDWMARHGMMRARPHELLPGTVRVISVRMNYLPPNAEFAQTLKNPAKAYISRYSLGRDYHKLIRNRLKKLGQNIEQVVGQFGHRPFVDSAPILERPLAEKSGLGWTGKHSLILSQEAGSWFFLGELLIDLPLPVDTPESNQCGKCVACMTSCPTGAIIEEGVVDARRCISYLTIEFDGIIPEEFREKIGNRIYGCDDCQLVCPFNRFSDITEEEDYHCRNSLYQQDTLALFAWDEATFLKNTEGSAIRRIGHIQWLRNLTIALGNAPYQPEIIDALNDKLALNEILDVHIYWALEQQQQKRAAISIDVLPTKTKRLVRIIEKGLPRDA

SEQ ID NO: 79483 - protein, 377 aa, unidentified
  source 1..377: note = Photobacterium toruni
  REGION 1..377: note = tr|A0A1T4TIJ2|A0A1T4TIJ2_9GAMM Epoxyqueuosine reductase OS=Photobacterium toruni OX=1935446 GN=queG PE=3; SV = 1
MSIDYQQLALQIKTWGQELGFQAVGICDIDLTQHEAQLQRWLDAGYHGDMDWMARHGMMRARPHELLPGTIRVISVRMNYLPPQAGFAQTLKQPTKAYISRYSLGRDYHKLIRNRLKQLGQRIENVVGEFGCRPFVDSAPVLERPLAEKSGLGWTGKHSLILNDQSGSWFFLGELLIDLPLPVDTPQTNQCGKCVACMTSCPTDAIIEAGVVDARRCISYLTIEFDGIIPEQYRAAMGNRIYGCDDCQLVCPFSRHGEITTETDYHCRDVLFQQDLVTLYLWNEATFLKNTEGSAIRRIGHTQWLRNITIALGNAPYQADIVAALMTRQGEDPLVDVHIEWALEQQQQKRQQIVIDVLPNSTKRLVRIIEKGLPRDA

SEQ ID NO: 79484 - protein, 385 aa, Photorhabdus asymbiotica
  REGION 1..385: note = tr|B6VLM8|B6VLM8_PHOAA Epoxyqueuosine reductase; OS = Photorhabdus asymbiotica subsp. asymbiotica (strain ATCC 43949 / 3105-77) OX=553480 GN=yjeS PE=3 SV=1
MATPLDLNLLTANIKQWGLSLGFQQVGICDTDLSVEEPKFQEWLDKQYHGEMAWMERHGMMRTRPNELLPGTLRVISVRMNYLPAKASFASTLNDSELGYVSRYALGRDYHKLLRQRLKKLGEQIQDYCYDFEYQGTLNFRPFVDSAPIMERPLAAKSGLGWVGKHSLILNKEAGSWFFLGELLINLPLPIDTPQEEHCGRCVACMTTCPTGAIVAPYVIDARRCISYLTIELEGVIPEEFRPLMGNRIYGCDDCQIICPWNRFSQLTDEGDFSPRATLHTPKLLDLFNWSEEKFLRITEGSAIRRIGHLRWLRNIIVALGNAPYQDDIVLSLQQKLGLNTMIDEHIHWAIEQQMTRRDANIVNLQTSQQKRLIRAVIKGLPRDA

SEQ ID NO: 79485 - protein, 399 aa, unidentified
  source 1..399: note = Photorhabdus australis
  REGION 1..399: note = tr|A0A1C0TXW2|A0A1C0TXW2_9GAMM Epoxyqueuosine reductase OS=Photorhabdus australis OX=286156 GN=queG PE=3; SV = 1
MLHCGSLQHELISTMATPLDLHLLTTNIKQWGLSLGFQQVGICDTDLSVEEPKFQEWLDKQYHGEMAWMERHGMMRTRPNELLPGTLRVISVRMNYLPAKASFASTLNDPELGYVSRYALGRDYHKLLRQRLKKLGEQIQDYCHDFEYQGTLNFRPFVDSAPIMERPLAAKAGLGWVGKHSLILNKESGSWFFLGELLINLPLPVDTPQEECCGRCVACMTTCPTGAIVRPYVIDARRCISYLTIELEGVIPEELRPLMGNRIYGCDDCQIICPWNRFSQLTDENDFSPRATLHTPKLLDLFNWSEEKFLRITEGSAIRRIGHLRWLRNIIVALGNAPYQDDIVLSLQRKLGLNTMLDEHIHWAIEQQMTRRDANIVNVQTSQQKRLIRTVIKGLPRDA

SEQ ID NO: 79486 - protein, 385 aa, unidentified
  source 1..385: note = Photorhabdus heterorhabditis
  REGION 1..385: note = tr|A0A0M9CZG4|A0A0M9CZG4_9GAMM Epoxyqueuosine reductase OS=Photorhabdus heterorhabditis OX=880156; GN = queG PE=3 SV=1
MATPLDLNLLTTNIKQWGLSLGFQQVGICDTNLSVEEPKLQEWLDKQYHGEMAWMERHGMMRTRPHELLPGTLRVISVRMNYLPARASFASTLNDPELGYVSRYALGRDYHKLLRQRLKKLGEQIQDYCHNFEYQGILNFRPFVDSAPIMERPLAAKAGLGWVGKHSLILNKEAGSWFFLGELLINLPLPVDAPQEEHCGRCVACMTTCPTGAITAPYIIDARRCISYLSIELEGVIPEELRPLMGNRIYGCDDCQIICPWNRFSQLTDEDDFSPRAALHAPKLLDLFNWSEEKFLRITEGSAIRRIGHLRWLRNIIVALGNAPYQDDIVLSLQQKLGLNTMLDEHIHWAIEQQMTRRKANIINVQTSQQKRLIKAIIKGLPRDA

SEQ ID NO: 79487 - protein, 399 aa, unidentified
  source 1..399: note = Photorhabdus khanii
  REGION 1..399: note = tr|W3VA77|W3VA77_9GAMM Epoxyqueuosine reductase; OS = Photorhabdus khanii NC19 OX=1004151 GN=queG PE=3 SV=1
MLYCGSLQHKLISAMATPLDLHLLTTNIKQWGLSLGFQQVGICDTDLSVEEPKFQEWLDKQHHGEMAWMKRHGMMRTRPDELLPGTLRVISVRMNYLPAKASFASTLNDSKLGYISRYALGRDYHKLLRQRLKKLGEQIQNYCHDFEYQEILNFRPFVDSAPIMERPLAAKAGLGWVGKHSLILNREAGSWFFLGELLINLPLPVDTPQQEQCGRCVSCMTTCPTGAIIAPYTIDARRCISYLTIELEGIIPEEFRPLMGNRIYGCDDCQIICPWNRFSQLTDEGDFSPRATLHTPELLDLFNWSEEKFLRITEGSAIRRIGHLRWLRNIAVALGNAPYRDNIVLSLQQKLGLNTMLDEHIHWAIDQQMTRRETNTVNVQTSQQKRLIRAITKGLPRDA

SEQ ID NO: 79488 - protein, 385 aa, unidentified
  source 1..385: note = Photorhabdus laumondii
  REGION 1..385: note = tr|A0A329VLZ5|A0A329VLZ5_9GAMM Epoxyqueuosine reductase OS=Photorhabdus laumondii subsp. clarkei; OX = 2029685 GN=queG PE=3 SV=1
MTTPLNLNLLAANIKQWGHSLGFQQVGICDTDLSVEEPKLQEWLDKQYHGEMAWMKRHGMMRARPNELLPGTLRVISVRMNYLPAKASFASTLNDAELGYISRYALGRDYHKLLRQRLKKLGEQIQNYCHDFEYQGVLNFRPFVDSAPVMERPLAAKAGLGWVGKHSLILNREAGSWFFLGELLINLPLPIDPPQEEQCGRCVACMTTCPTGAIIAPYTIDARRCISYLTIELEGIIPEEFRPLMGNRIYGCDDCQIICPWNRFSQLTDEDDFSPRVTLHTPKLLDLFNWSEEKFLRITEGSAIRRIGYLRWLRNIIVALGNAPYQYDIILALQQRLGLNTMLDEHIHWAIEQQIIRRKTNTVSVQTAQQKRLIRAITKGLPRDA

SEQ ID NO: 79489 - protein, 393 aa, unidentified
  source 1..393: note = Photorhabdus laumondii
  REGION 1..393: note = tr|Q7MYT6|Q7MYT6_PHOLL Epoxyqueuosine reductase; OS = Photorhabdus laumondii subsp. laumondii (strain DSM 15139 / CIP 105565 / TT01) OX=243265 GN=queG PE=3 SV=1
MQYKPISTMTTPLNLNLLAAKIKQWGHSLGFQQVGICDTDLSVEEPKLQEWLDKQYHGEMAWMKRHGMMRARPNELLPGTLRVISVRMNYLPAKASFASTLNDAELGYISRYALGRDYHKLLRQRLKKLGEQIQNYCHDFEYQGVLNFRPFVDSAPVMERPLAAKAGLGWVGKHSLILNREAGSWFFLGELLINLPLPIDPPQEEQCGRCVACMTTCPTGAIIAPYTIDARRCISYLTIELDGIIPEEFRPLMGNRIYGCDDCQIICPWNRFSQLTDEDDFSPRVTLHTPKLLDLFNWSEEKFLRITEGSAIRRIGYLRWLRNIIVALGNAPYQYDIILALQQRLGLNTMLDEHIHWAIEQQIIRRKTNTVSVQTAQQKRLIRAITKGLPRDA

SEQ ID NO: 79490 - protein, 385 aa, Photorhabdus luminescens
  REGION 1..385: note = tr|A0A2S8R5J4|A0A2S8R5J4_PHOLU Epoxyqueuosine reductase OS=Photorhabdus luminescens OX=29488 GN=queG; PE = 3 SV=1
MTTPLDLNLLAANIKQWGLSLGFQQIGICDTDLSVEETKLQEWLDKQYHGEMAWMKRHGMMRARPNELLPGTLRVISVRMNYLPAKASFASTLNDAELGYISRYALGRDYHKLLRQRLKKLGEQIQNYCHDFEYQGVLNFRPFVDSAPIMERPLAAKAGLGWVGKHSLILNREAGSWFFLGELLINLPLPIDLPQKEQCGRCIACMTTCPTGAIIAPYTIDARRCISYLTIELEGIIPEEFRPLMGNRIYGCDDCQIICPWNRFSQLTDEDDFSPRAILHTPKLLDLFNWSEEKFLRITEGSAIRRIGYLRWLRNITVALGNAPYQYDIVLALQQKLGLNTMLDEHIHWAIKQQIIRRKTNTINVQTPQQKRLIRAITKGLPRDA

SEQ ID NO: 79491 - protein, 385 aa, Photorhabdus luminescens
  REGION 1..385: note = tr|A0A5C4RJR0|A0A5C4RJR0_PHOLU Epoxyqueuosine reductase OS=Photorhabdus luminescens subsp. sonorensis; OX = 1173677 GN=queG PE=3 SV=1
MTTPLDLNLLAANIKQWGLSLGFQQVGICDTDLSVEEPKLQEWLDKQYHGEMAWMKRHGMMRARPDELLPGTLRVISVRMNYLPAKASFASTLNDAELGYISRYALGRDYHKLLRQRLKKLGEQIQNYCHDFEYQGVLNFRPFVDSAPIMERPLAAKAGLGWVGKHSLILNREAGSWFFLGELLINLPLPIDLPQEEQCGRCVACMTTCPTGAIIAPYTIDARRCISYLTIELEGIIPEEFRPLMGNRIYGCDDCQTICPWNRFSQLTDEDDFSPRATLHTPKLLDLFNWNEEKFLRITEGSAIRRIGYLRWLRNITVALGNAPYQYDIILALQQKLGLSTMLDEHIHWAIEQQIIRRKTNTINVQTSQQKRLIRAITKGLPRDA

SEQ ID NO: 79492 - protein, 399 aa, unidentified
  source 1..399: note = Photorhabdus namnaonensis
  REGION 1..399: note = tr|A0A1B8YBP1|A0A1B8YBP1_9GAMM Epoxyqueuosine reductase OS=Photorhabdus namnaonensis OX=1851568 GN=queG; PE = 3 SV=1
MLHCDALQYKLISTMTTPLDLNLLAANIKQWGLSLGFQQVGICDTDLSVEETKLQEWLDKQYHGEMAWMKRHGMMRARPDELLPGTLRVISVRMNYLPAKASFASTLNDTELGYISRYALGRDYHKLLRQRLKKLGEQIQNYCHDFEYQGVLNFRPFVDSAPIMERPLAAKAGLGWVGKHSLILNREAGSWFFLGELLINLPLPIDPPQEEQCGRCVACMTTCPTGAIIAPYTIDARRCISYLTIELEGIIPEEFRPLMGNRIYGCDDCQIICPWNRFSQLTDEDDFSPRAILHTPKLLDLFNWSEEKFLRITEGSAIRRIGYLRWLRNITVALGNAPYQYDIVLALQQKLGLNTMLDEHIHWAIEQQIIRRKTNTINVQTPQQKRLIRAITKGLPRDA

SEQ ID NO: 79493 - protein, 385 aa, Photorhabdus sp.
  REGION 1..385: note = tr|A0A329X4Y7|A0A329X4Y7_9GAMM Epoxyqueuosine reductase OS=Photorhabdus sp. HUG-39 OX=2029680 GN=queG; PE = 3 SV=1
MTTPLDLNLLVSNIKQWGHSLGFQQVGICDTDLSVEEPKLQEWLDKQYHGEMAWMKRHGMMRARPDELFPGTLRVISVRMNYLPAKASFASTLNDAELGYISRYALGRDYHKLLRQRLKKLGEQIQNYCHDFEYQGVLNFRPFVDSAPIMERPLAAKAGLGWVGKHSLILNREAGSWFFLGELLINLPLPIDPPQEEQCGRCVACMTTCPTGAIIAPYTIDARRCISYLTIELEGIIPEEFRPLMGNRIYGCDDCQIICPWNRFSQLTDEDDFSPRVTLHTPKLLDLFNWSEEKFLRITEGSAIRRIGYLRWLRNIIVALGNAPYQYDIILALQQRLGLNTMLDEHIHWAIEQQIIRRKTNIVSVQTPQQKRLIRAITKGLPRDA

SEQ ID NO: 79494 - protein, 385 aa, Photorhabdus sp.
  REGION 1..385: note = tr|A0A4R4J6G4|A0A4R4J6G4_9GAMM Epoxyqueuosine reductase OS=Photorhabdus sp. MEX47-22 OX=2100167 GN=queG; PE = 3 SV=1
MTTPLDLNLLAANIKQWGLSLGFQQIGICDTDLSVEEPKLQEWLDKQYHGEMAWMKRHDMMRARPDELLPGTLRVISVRMNYLPAKASFASTLNDAELGYISRYALGRDYHKLLRQRLKKLGEQIQNYCHDFEYRGALNFRPFVDSAPIMERPLAAKAGLGWVGKHSLILNREAGSWFFLGELLINLPLPIDLPQEEQCGRCVACMTTCPTGAIIAPYTIDARRCISYLTIELEGIIPEEFRPLMGNRIYGCDDCQTICPWNRFSQLTDEDDFSPRATLHTPKLLDLFNWNEEKFLRITEGSAIRRIGYLRWLRNITVALGNAPYQYNIILALQQKLGLNTMLDEHIHWAIEQQIIRRKTNTINVQTSQQKRLIRAITKGLPRDA

SEQ ID NO: 79495 - protein, 399 aa, Photorhabdus temperata
  REGION 1..399: note = tr|A0A4R7Q424|A0A4R7Q424_PHOTE Epoxyqueuosine reductase OS=Photorhabdus temperata OX=574560 GN=queG PE=3; SV = 1
MLYCGSLQHKLISAMATSLDLNLLVTSIKQWGLSLGFQQVGICDIDLSAEEPKLQEWLDKQYHGEMAWMKRHGMMRARPNELLPGTLRVISVRMNYLPAKASFASTLSDSALGYISRYALGRDYHKLLRQRLKKLGEQIQDYCHDFEYQGILNFRPFVDSAPIMERPLAAKAGLGWVGKHSLILNREAGSWFFLGELLINLPLPVDTRQEEQCGRCVACMTTCPTGAIIAPYTIDARRCISYLTIELEGVIPEEFRPLMGNRIYGCDDCQIICPWNRFSQLTDEGDFSPRAALHTPELLDLFNWSEEKFLRITEGSAIRRIGHLRWLRNIAVALGNAPYQDNIVLSLQQKLGLNTMLDEHIHWAIDQQMTRRATNTVNVQTSQQKRLIRAITKGLPRDA

SEQ ID NO: 79496 - protein, 399 aa, Photorhabdus temperata
  REGION 1..399: note = tr|A0A081RVC7|A0A081RVC7_PHOTE Epoxyqueuosine reductase OS=Photorhabdus temperata subsp. temperata Meg1; OX = 1393735 GN=queG PE=3 SV=1
MLYCGSLQHKLISTMANSLDLNLLVTNIKQWGHSLGFQQVGICDIDLSAEEPKLQEWLDKQYHGEMAWMKRHGMMRARPNELLPGTLRVISVRMNYLPAKASFASTLSDSALGYISRYALGRDYHKLLRQRLKKLGEQIQDYCHDFEYQGILNFRPFVDSAPIMERPLAAKAGLGWVGKHSLILNREAGSWFFLGELLINLPLPVDTLQEEQCGRCVACITTCPTGAIIAPYTIDARRCISYLTIELEGVIPEEFRPLMGNRIYGCDDCQIICPWNRFSQLTDEGDFSPRATLHTPELLDLFNWSEEKFLRITEGSAIRRIGHLRWLRNIAVALGNAPYQDNIVLSLQQKLGLNTMLNEHIHWAIDQQMTRRATNTVNVQTSQQKRLIRAITKGLPRDA

SEQ ID NO: 79497 - protein, 385 aa, unidentified
  source 1..385: note = Photorhabdus thracensis
  REGION 1..385: note = tr|A0A0F7LV71|A0A0F7LV71_9GAMM Epoxyqueuosine reductase OS=Photorhabdus thracensis OX=230089 GN=queG; PE = 3 SV=1
MATSLDLNLLVTSIKQWGLSLGFQQVGICDIDLSAEEPKLQEWLDKQYHGEMAWMKRHGMMRTRPNELLPGTLRIISVRMNYLPAKASFASTLSDSTLGYISRYALGRDYHKLLRQRLKKLGEQIQDYCHDFEYQGILNFRPFVDSAPIMERPLAAKAGLGWVGKHSLILNREAGSWFFLGELLINLPLPVDTLQEEQCGRCVACMTTCPTGAIIAPYTIDARRCISYLTIELEGVIPEEFRPLMGNRIYGCDDCQIICPWNRFSQLTDEGDFSPRATLHTPELLDLFNWSEEKFLRITEGSAIRRIGHLRWLRNIAVALGNAPYQDNIVLSLQQKLGLNTMLDEHIHWAIDQQMTRRATNTVNVQTSQQKRLIRAITKGLPRDA

SEQ ID NO: 79498 - protein, 370 aa, unidentified
  source 1..370: note = Phreatobacter cathodiphilus
  REGION 1..370: note = tr|A0A2S0NI68|A0A2S0NI68_9PROT Epoxyqueuosine reductase OS=Phreatobacter cathodiphilus OX=1868589; GN = queG PE=3 SV=1
MSDPAALRAAITAQARAEGFDAVGFTRPDAIAEAGPRLAEAVEAGRHGSMAWMAETLERRSHPNAMWPEGRSLVMLGVNYGPDENPLDGLTDRDRGLVSVYARGNDYHEVIKARLKALARWLVEETGCELKVFVDTAPLMEKPLAAAAGLGWQGKHTNLVSRDFGSWLFLGAVMTTLDIPPDTPERDHCGSCTACLSACPTDAFPRPYALDARRCISYLTIEHQGPIPREFRAAMGNRIYGCDDCLAVCPWNKFAETGRNMKLAAREHLKRPSLAELAQLDDAAFRALFTKSPVKRIGRDRFVRNVLIAIGNSGDPALAPVAADRLADPAAVVRGAAIWALRRLDPARVPARPPAGESDPDVLAEWRQSP

SEQ ID NO: 79499 - protein, 324 aa, unidentified
  source 1..324: note = Phreatobacter oligotrophus
  REGION 1..324: note = tr|A0A2T4Z035|A0A2T4Z035_9PROT Epoxyqueuosine reductase OS=Phreatobacter oligotrophus OX=1122261; GN = C8P69_107104 PE=4 SV=1
MAWMAETAARRGDPRVLWPEGRSLVMLGVNYGPDENPLDGLSDRTAGLISVYARGDDYHEVIKARLKAVGRWLAEETGCELKVFVDTAPLMEKPLAAAAGLGWQGKHTNLVSRGFGSWLFLGAIMTTLDMAADAPERDHCGSCSACLDICPTAAFPRPYALDARRCLSYLTIENKGPIPREFRKAMGNRIYGCDDCLAACPWNKFAQEGQNMKLAAREHLKRPALADLARLDDAAFRALFTRSPVKRIGRDRFLRNVLVAIGNSGDRALADVAIDLLVDPSPLVRGAAVWALGELAPERLAGGPRPDETDPDVLAEWNAALSTP

SEQ ID NO: 79500 - protein, 368 aa, unidentified
  source 1..368: note = Phreatobacter sp.
  REGION 1..368: note = tr|A0A4D7QN06|A0A4D7QN06_9PROT Epoxyqueuosine reductase OS=Phreatobacter sp. NMCR1094 OX=2570229 GN=queG; PE = 3 SV=1
MSDGQALRDAIRDAARAEGFDLVAFTTPDAIPHAGPRLKAAVDAGHHGSMAWMEETLERRSSPQVLWPEGRSIIMLAMNYGPETNPLEGLADREAGLISVYAQGDDYHDVIKAKLKAVGRWLVDETGCAIKVFVDTAPLMEKPLAAAAGLGWQGRHTNMVSRSFGSWLFLGSIMTTLEIAPDQPERDHCGSCRACLDICPTAAFPAPYQLDARRCISYLTIENKGPIPQEFRKAIGNRIYGCDDCLAVCPWNKFAEAGRQAKLAARAALKRPRLADLVILDDAAFRALFSKSPVKRVGRDRFIRNVLIAIGNSSDVSLAEPAATLLDDPSPLVRGAAIWALRQIAPERLPAGPATSETDPDVLKEWTT

SEQ ID NO: 79501 - protein, 391 aa, unidentified
  source 1..391: note = Phreatobacter stygius
  REGION 1..391: note = tr|A0A4D7BHS9|A0A4D7BHS9_9PROT Epoxyqueuosine reductase OS=Phreatobacter stygius OX=1940610 GN=queG PE=3; SV = 1
MPAAAGGSGGRHARERDLRRSRLLNDPPALRQAITDQARLQGFTAIGFTRPDAIPEAAPRLAEAIAEGFHGAMAWMEETVERRADPGVLWPAARSVIMLGLNYGPDENPLDGLADRSSGLLSVYARGDDYHDLVKSRLKALGRWLGDETGCELKVFVDTAPLMEKPLAAAAGLGWQGKHTNLVSRDFGSWLFLGSVMTTLEIDVDEPEHDRCGSCRACLDVCPTSAFPAPYRLDARRCISYLTIENKGPIPREFRKAMGNRIYGCDDCLAVCPWNKFAKQGHELKLAARDGLRRPALADLARLDDPGFRALFSKSPVKRIGRDRFIRNVLIAIGNSGDVELAAEAESLMADASALVRGAAVWALRELAPARLAALDRGAETDPDVLLEWAS

SEQ ID NO: 79502 - protein, 348 aa, Phycisphaera mikurensis
  REGION 1..348: note = tr|I0ID47|I0ID47_PHYMF Uncharacterized protein; OS = Phycisphaera mikurensis (strain NBRC 102666 / KCTC 22515 / FYK2301M01) OX=1142394 GN=PSMK_10260 PE=4 SV=1
MIETLDALAAKIGFGLWGVADAAPAPAEEAARSRAWFAAGRAGEMGWLADSAEARLGVEAVLPGARSVVIVADSYGNTQPAGGSADRPEVAARNGSVRGRIARYAWGRDYHRVLKKKLHRLGDGLAAAFPDAAFRACVDTAPLDERRYAEAAGLGWRGKNSLLIHPRHGSFVLLGALLTTLELPTSAARGFPGPLAEPTDRCANCTRCIDACPTGAIDAGGHAIDPRRCISYLTIERRSVDPPGAAPDTHGWLAGCDVCQDVCPFNAIGTRHPLPVPLDFAPRPHAAGLDPAEVAGWTRADRLAATAGTALIRIKLPMWKRNAEAAEASRAASSKAEDAADLRQSPKR

SEQ ID NO: 79503 - protein, 356 aa, Phycisphaera sp.
  REGION 1..356: note = tr|A0A2G1ZUJ2|A0A2G1ZUJ2_9BACT tRNA epoxyqueuosine(34) reductase QueG OS=Phycisphaera sp.; OX = 2030824 GN=queG PE=4 SV=1
  VARIANT 104: note = Xaa can be any naturally occurring amino acid
MDGETDPAEWILQRCKAEGFALPGVCDASPPTRGQEFGDWLALGKHGEMSYLADNADAWLDPNKVLDGAQSAVMVADLYAVRDGSADEASPGFGRVARYARGRXYHKEMKARLHKVCDACKERWPGEAFRAFVDTVPINEREFAARAGLGWVAKHTLIIHPRLGSWMLLGGFLTTMKLDAPSGQVVHEDHCGTCTRCIDACPTDAITPYSVDGSKCISYLTIEHRPGIDESLAGKMQDWVGGCDICQEVCPHNSQRPNADEQESNPAYSPKRTGFDLLGVLNWDAKVRQESLRDNALKRIKLDQFRRNAAIAAGNAMRERDLPELRDRLAEIASDEGEPDLVRQAARWAMACHRGP

SEQ ID NO: 79504 - protein, 372 aa, Phycisphaera sp.
  REGION 1..372: note = tr|A0A3R7SET3|A0A3R7SET3_9BACT tRNA epoxyqueuosine(34) reductase QueG OS=Phycisphaera sp. TMED9 OX=1986611 GN=queG PE=4 SV=1
MSIEGSVAASDPEALTRFVLTRCDELEFALAGVCDAFPTSHEEHVRAWIAAGHHGTMGYLERRIEERISPEIYVPGATSIIMVADRYHDGRRDRIDPASPPRGRIARYARGRDYHKVMKRRLVRLARELGELLPDHHFRPCVDTAPLLEREHAMRAGLGLVGKNTLLIEPGVGSWMLLGGVVSTARLVPTSPKTGRTDPCGTCSRCIDACPTDAITPFAVDATRCLAYSTIEHRGEIEPALETATGDWLFGCDICQEVCPHASRKKRREASSIHPDYVERHADFDLLEVLGWTDESRRTIIEGSAAKRAAIGMWKRNALICAGNVLSEHPEAPGHAALLGRIREISVDAEEDTAVRGTAVRVLSRLSSSNGS

SEQ ID NO: 79505 - protein, 350 aa, unidentified
  source 1..350: note = Phycisphaeraceae bacterium
  REGION 1..350: note = tr|A0A2D5Z9A4|A0A2D5Z9A4_9BACT tRNA epoxyqueuosine(34) reductase QueG OS=Phycisphaeraceae bacterium OX=2026777 GN=queG PE=4 SV=1
MGEQGVIESLAADLGFALVGVAPAAPTAYRDYVRRWLDRGNQGEMSYLERHAEQRLDPRVLVPGARSVVCVADRHQGGKADGPTETGGRIARYAWGDDYHRIIKRRLHRLADRMRSRWPDDQHRAAVDTAPILEREHALRAGMGWIGKHTLLIHPTLGSYLLLGEIVTTRDLAPAGAAMADHCGTCTRCIDACPTGCIEEEGYRMDASRCISYLTIEHRGPIDADLQAQMGDWVAGCDVCQEVCPYNQEDRVSLIPSNPSYDARFPAPAVPLLELLDWDADQRRAAFKGSALKRIKLDPLRRNALIAAGNHLARTDDPALRAKILAIAEDMAEPSMIRETARQVLGRLGE

SEQ ID NO: 79506 - protein, 419 aa, unidentified
  source 1..419: note = Phycisphaeraceae bacterium
  REGION 1..419: note = tr|A0A1Z9QA61|A0A1Z9QA61_9BACT tRNA epoxyqueuosine(34) reductase QueG OS=Phycisphaeraceae bacterium TMED231 OX=1986831 GN=CBD91_05335 PE=4 SV=1
  VARIANT 241: note = Xaa can be any naturally occurring amino acid
  VARIANT 243: note = Xaa can be any naturally occurring amino acid
  VARIANT 259: note = Xaa can be any naturally occurring amino acid
  VARIANT 286: note = Xaa can be any naturally occurring amino acid
  VARIANT 328..329: note = Xaa can be any naturally occurring amino acid
  VARIANT 331: note = Xaa can be any naturally occurring amino acid
  VARIANT 389: note = Xaa can be any naturally occurring amino acid
  VARIANT 394..395: note = Xaa can be any naturally occurring amino acid
  VARIANT 407: note = Xaa can be any naturally occurring amino acid
  VARIANT 410..411: note = Xaa can be any naturally occurring amino acid
  VARIANT 413..414: note = Xaa can be any naturally occurring amino acid
  VARIANT 418..419: note = Xaa can be any naturally occurring amino acid
MVRHRLARDDGGRDSQRVRRRGCDHGIGRAGGGRASRTPRTLGGPSVTTDAGRAGEDAVHLTEKVLESCRSLDFTLSGVCDASPTSHAEAVRAWISAGRHGSMEWMEGRLEERLDPGVYLPGAASMIVVADRYHDGRRDRVDPDGPARGRIARYARGRDYHKVLKGRLVKLARTLSAAHPEADFRPCVDTAPILEREHAMRAGLGLVGKNTLLIEPGHGSWLLLGAVVSTLRLEPTPSRHXGXDPCGTCTRCIDACPTXAITPFSVDASRCIAYTTIEHRGDIPPXLAASTGDWLFGCDVCQEVCPHSVRKQRRLPLPIHPDYAPRRXXLXLLDVLGWDEDARNTTLQGTAARRATLWMWKRNALVCAGNALVRSPGRPGADELRERIXSIAEXXQENAAVRETAAXVLXXLXXSDGXX

SEQ ID NO: 79507 - protein, 370 aa, unidentified
  source 1..370: note = Phycisphaerae bacterium
  REGION 1..370: note = tr|A0A2E5DYJ8|A0A2E5DYJ8_9BACT tRNA epoxyqueuosine(34) reductase QueG OS=Phycisphaerae bacterium OX=2026778 GN=queG PE=4 SV=1
MSSSPQRQPSRPILDCCREAGFPVHGIADATESPTAPALREWLDSGKHGEMKWMTENVPVRIDPRVLVSGARSVIVVADRYGGEPDDSSSSGRGRIARYARGRDYHRYMKKRLHQVADRLSQLHPGETFRACVDTAPVLEREVAAAAGLGASGKHTLLIQPGVGSWMLLGEIVTTLAIEPTTNSLDRPQDPCGTCTRCIDACPTDAITPWSVDARRCISYLTIEHRTSVDPSFHEGMGEWLFGCDICQEACPHNQPTQLTRNQVRDDQYKGRPRPGDESGASLDVLEVLGWTEDDRREAFISSSMKRAKLDMIRRNAVIVAGNLIRRGPAAELLSQLRQLAADAEEAPLVRDTAIEVLRQLDEASDATEG

SEQ ID NO: 79508 - protein, 302 aa, unidentified
  source 1..302: note = Phycisphaerae bacterium
  REGION 1..302: note = tr|A0A1U9NKZ2|A0A1U9NKZ2_9BACT Epoxyqueuosine reductase OS=Phycisphaerae bacterium ST-NAGAB-D1; OX = 1936003 GN=queG PE=4 SV=1
MAFELGFDLVGFTTAEPVSEKHSARLRDWLASGHAGDMHYMGRNFDKRTNPRALLPNARSVICVGLNYRTTKNGKPGAFANYALYEDYHKFVKDRLYMLAVEIKERVSPDRFKFKVCVDTVPLAERAIAERAGLGFIGKNRMLINPRLGGQILLGELVSTLDLPADNPIKNKCDGCNHCVEACPTGALHIDGTLDASRCISYLSMEHKGDIDEQLAGKMDGQLFGCDRCMLACPFEKIAPIRHNSDIRYFPERCNITAEQVLHWDEKDFLKVLSDSPCDRAGLAGIKRNARIAMANRKHDEH

SEQ ID NO: 79509 - protein, 312 aa, unidentified
  source 1..312: note = Phycisphaerales bacterium
  REGION 1..312: note = tr|A0A3C0YP76|A0A3C0YP76_9BACT tRNA epoxyqueuosine(34) reductase QueG OS=Phycisphaerales bacterium OX=2052180 GN=queG PE=4 SV=1
MSVEENIKQKALSLGFDLVGITSAQDIDSTQKDQFNNWLQNGCNGQMEFLARNIDNRFKPSTVLPDAKSVICAAINYKIKPITEKNYLQIASYALYPDYHTFIKDKLSALADFLKSIDKDVKYKICVDSSAIAEKAIAMRAGIGFIGKNRLITNQKFGSFLLLGEIVTSFKLEPDAPIEKQDCGKCKKCIEACPTGALCENGFDARKCISYLTIEHKSEIAKELQSKIGKRLFGCEECLKACPYNEKSPICEKKQIGFEAKNVKLTAEEVLGWTEKEFNAFAQNSVIHRTGLERIKRNALICRELREPQQLP

SEQ ID NO: 79510 - protein, 383 aa, unidentified
  source 1..383: note = Phycisphaerales bacterium
  REGION 1..383: note = tr|A0A3C0EIT7|A0A3C0EIT7_9BACT tRNA epoxyqueuosine(34) reductase QueG OS=Phycisphaerales bacterium OX=2052180 GN=queG PE=4 SV=1
MPDSPQSPTQPADPQDFIKGLGEQFGFAMTGITPASISDHVDFLDQWLADGKQGEMDYLANHRDIRIDPDKLLPGAQSVICVADRYPHETDLPTDPPAGRIARYAWGDDYHKVLKKRLMHLADALRKHYPDEQFRVAVDTAPILEREHAKRAGLGWIGKHTLLIHPHLGSWFALGVIITTLDLPTSDDQTMPDHCGTCTRCIDACPTQCIEPYQLDASRCISYLTLEHRSLIAPDLHEQMGDWIAGCDICQEVCPHNPRKPRKPRNPRKPRPAKVESAYPEHHVRYTPRPPAPSLNLLDILNWTAADRQQAFIGSALKRMKLEMVKRNALIAAGNHLTNHDNPTLRQKLNEMATDQNESDLVRQTAKQVTQRLDAQQQQQQQQ

SEQ ID NO: 79511 - protein, 382 aa, unidentified
  source 1..382: note = Phyllobacteriaceae bacterium
  REGION 1..382: note = tr|A0A2E1XX15|A0A2E1XX15_9RHIZ Epoxyqueuosine reductase OS=Phyllobacteriaceae bacterium OX=1871068; GN = queG PE=3 SV=1
MPDAPRDAAGRLTAFIRREALAAGFDAVAVTSPDSIPQAAGRLGEFLAAGRHGTMAWMAETAERRGTPGALWPEVRSVVMLAMNYGPEHDPLAVLSQGDRAAISVYAQNRDYHDIIKGRLKTIAGKLTARAGSDVKVFVDTAPVMEKPLAEAAGLGWQGKHTNLVSRAFGSWLFLGSIFTTAELEHDAPERDHCGSCRACLDICPTDAFPAPYQLDARRCISYLTIEHKGAIPHALRPAMGNRIYGCDDCLAVCPWNKFAQSAREAKLKARDDLTAPRLADLLALDDTAFRAMFSGSPVKRIGRDRFLRNVLIAAGNSGEPALAGAVVPLLDDAAPQVRAMAVWALARLGGRDRLRAMAERLAGDMDEDVRAEWALAMEGED

SEQ ID NO: 79512 - protein, 388 aa, unidentified; identical to SEQ ID NO: 78925
  source 1..388: note = Phyllobacteriaceae bacterium
  REGION 1..388: note = tr|A0A3A8ABM3|A0A3A8ABM3_9RHIZ Epoxyqueuosine reductase OS=Phyllobacteriaceae bacterium StC1 OX=2184161; GN = queG PE=3 SV=1

SEQ ID NO: 79513 - protein, 387 aa, Phyllobacterium bourgognense
  REGION 1..387: note = tr|A0A368YWD4|A0A368YWD4_9RHIZ Epoxyqueuosine reductase OS=Phyllobacterium bourgognense OX=314236; GN = queG PE=3 SV=1
MILHSETYKPSQAQRLKQFILEESRAAGFDLVAITRPDAIPFAEERLRQYLALGRHASMDWMQETEERRASPQNLWPEVRSIIVLAMNYGPDGNPMAILQHKDKAAISVYAQNRDYHDIIKGKLKGVASRFASRAADEDLKVFVDTAPVMEKPLAEAAGLGWQGKHTNLVSRSHGSWLFLGTIFTTAELPPDEREADHCGSCHACLDVCPTNAFPAPYQLDAGRCISYLTIEHKEPIPLEFRKAMGNRIYGCDDCLAVCPWNKFAETARETKLQAREDLKSPSLASLLMLDDAAFRTMFSGSPIKRIGRDRFIRNVLIASGNSGDPGLIETVKTHLADPSPLVRGAAVWALSELMDEDGFAALRMHGAAKENDASVLTEWHKAAKNQ

SEQ ID NO: 79514 - protein, 391 aa, Phyllobacterium brassicacearum
  REGION 1..391: note = tr|A0A2P7BJP8|A0A2P7BJP8_9RHIZ Epoxyqueuosine reductase OS=Phyllobacterium brassicacearum OX=314235; GN = queG PE=3 SV=1
MLGAGAHNASRSPSNAQRLKQFILEESRAAGFDLVAITRPDAIPLAEERLRQYLALGRHASMEWMQQTKERRANPEVLWPEVRSIIVLAMNYGPDSDPLDILAQKDKAAISVYAQNRDYHDIIKGKLKGVASRFASRAAGENLKVFVDTAPVMEKPLAEAAGLGWQGKHTNLVSRSHGSWLFLGTIFTTAELPADERESDHCGSCHACLDICPTSAFPAPYQLDARRCISYLTIEHKGPIALEFRKAMGNRIYGCDDCLAVCPWNKFAGTAREAKLQARDDLRSPSLASLLTLDDATFRTLFTGSPVKRIGRDRFIRNVLIACGNSGEPALVAAIETHLADPSPLVRGAAVWALGELMGRDDFAALKLRHIAQESDADVLTEWRIAVKNQQ

SEQ ID NO: 79515 - protein, 380 aa, unidentified
  source 1..380: note = Phyllobacterium endophyticum
  REGION 1..380: note = tr|A0A2P7AZG6|A0A2P7AZG6_9RHIZ Epoxyqueuosine reductase OS=Phyllobacterium endophyticum OX=1149773; GN = queG PE=3 SV=1
MNLDQQQRLKQFILAESRAAGFDVVAVTRPDAIPLAEERLRRYLALGRHASMEWMLETEQRRANPENLWPDVRSIIVLAMNYGPEGDPLTILKQKDRAAISVYAQNRDYHDIIKGKLKGIAGRFVSRAAGEDVKVFVDTAPVMEKPLAEAAGLGWQGKHTNLVSRNHGSWLFLGTIFTTAELPADERESDHCGSCQACLDICPTNAFPAPYQLDARRCISYLTIEHKGPIPPEFRQSMGNRIYGCDDCLAVCPWNKFAKAAHETKLRARDDLKSPSLASLLTLDDAAFRALFAGSPVKRIGRTRFLRNVLIASGNSGESGLIGPIEYHLADPSPLVRGAAVWALGQLMERTRFATLAIHHAVKENDADVLTEWHNAAKYR

SEQ ID NO: 79516 - protein, 392 aa, Phyllobacterium leguminum
  REGION 1..392: note = tr|A0A318T1K3|A0A318T1K3_9RHIZ Epoxyqueuosine reductase OS=Phyllobacterium leguminum OX=314237 GN=queG; PE = 3 SV=1
MPAGQRGALSRRRIRFKMGHTRSEKLKRFLIEEAKSVGFDAVAFTTPDAIPEAGARLREYLAQGNHGTMEWMEETAERRGDPRALWPEVRSIIMLAMNYGPERDPRAVLTRKDRAAISVYAQNRDYHDIIKGKLKHIASRFAARAGSDVKVFVDTAPVMEKPLAEAAGIGWQGKHTNLVSREFGSWLFLGSIFTTAEIAPDEAEADHCGSCRACLDICPTQAFPAPYRLDARRCISYLTIENKGPIPHEFRKAIGNRIYGCDDCLAVCPWNKFAQLASEMKLKARDDLKAPRLADLLALDDAAFRAFFSGSPVKRIGRDRFLRNVLIAAGNSEDGDLLAPVEQLLADPSPLVRGAAVWALGQLAGPEHVAGWRKRLGTQEKDVTVQAEWEAN

SEQ ID NO: 79517 - protein, 392 aa, Phyllobacterium myrsinacearum
  REGION 1..392: note = tr|A0A2S9JIX8|A0A2S9JIX8_9RHIZ Epoxyqueuosine reductase OS=Phyllobacterium myrsinacearum OX=28101; GN = queG PE=3 SV=1
MLPADAKAATRSGPKAQPHRLKEFIMEEARAAGFDLVAITRPDAIPLAEERLRHYLEKGRHASMAWMAETAERRANPQTLWPDVRSIIVLAMNYGPDSNPLEILARKDKAAISVYAQNRDYHDIIKGKLKGVASRFASRAAGENVKVFVDTAPVMEKPLAEAAGLGWQGKHTNLVSRSHGSWLFLGTIFTTAELEPDGREADHCGSCRACLDICPTNAFPAPYQLDARRCISYLTIEHKEPIAPEFRKAMGNRIYGCDDCLAVCPWNKFAATAREARLQARDDLKAPDLATFLALDDAAFRTLFSGSPVKRIGRDRFLRNVLIASGNSGQPDLVALVERHLDDPAPIVRGAAVWALGELVDAAHFATLQIRYAAQENDPGVLTEWRNAGKKQ

SEQ ID NO: 79518 - protein, 384 aa, unidentified
  source 1..384: note = Phyllobacterium salinisoli
  REGION 1..384: note = tr|A0A368K855|A0A368K855_9RHIZ Epoxyqueuosine reductase OS=Phyllobacterium salinisoli OX=1899321 GN=queG; PE = 3 SV=1
MATSISEAQAARLKRFLAEEAKAEGFDIMAVTTPDAIPQAGARLRQYLASGHHGTMQWLEETLERRADPRVLWPEVRSVIMLAMNYGPESDPLPVLARRDRAAISVYAQNRDYHDIIKGKLKQIASRFAARAGSDVKVFVDTAPVMEKPLAEAAGIGWQGKHTNLVSRSHGSWLFLGSIFTTAEIAPDRPETDHCGSCRACLDICPTSAFPAPYQLDARRCISYLTIEHKGPIAPEFRKAMGNRIYGCDDCLAVCPWNKFAEAAHETKLKARDDLKAPRLETLLALDDTAFRALFSGSPVKRIGRDRFLRNVLIAAGNSGDAGLLPHVERLLGDPSPVVRGAAIWALSQLSEPRIFGEWRKKLTASERDVTVIDEWRMADCIIS

SEQ ID NO: 79519 - protein, 392 aa, unidentified
  source 1..392: note = Phyllobacterium sophorae
  REGION 1..392: note = tr|A0A2P7BL56|A0A2P7BL56_9RHIZ Epoxyqueuosine reductase OS=Phyllobacterium sophorae OX=1520277 GN=queG; PE = 3 SV=1
MRMTGQSKTQSIKQSQQQRLKQFILEESRAAGFDLVAITRPDAIPLAEARLRKYLALGRHASMQWMQETEQRRANPQALWPQVRSIIVLAMNYGPDSDPLDILAQKDKAAISVYAQNRDYHDIIKGKLKGVASRFAARAAGEDLKVFVDTAPVMEKPLAEAAGLGWQGKHTNLVSRSHGSWLFLGTIFTTAEMPADSPEVDHCGSCRACLDICPTSAFPAPYQLDARRCISYLTIEHKEPIAHEFRKAMGNRIYGCDDCLAVCPWNKFAETAREAKLQARDDLRSPSLASLLILDDAAFRALFSGSPIKRIGRDRFMRNVLIACGNSGEPGLVEAVEPHLSDPSPLVRGAAVWALSELMDQDRFSVLQMRRAAQESDADVLTEWRIAVKNHS

SEQ ID NO: 79520 - protein, 388 aa, Phyllobacterium sp.
  REGION 1..388: note = tr|A0A2S9IRY6|A0A2S9IRY6_9RHIZ Epoxyqueuosine reductase OS=Phyllobacterium sp. 1N-3 OX=2100534 GN=queG; PE = 3 SV=1
MAISISDTGAAKLKRFLAEEAKAEGFDIMAVTTPDAIPQAGARLRQYLAQGHHGTMVWLEETAERRADPRALWPEVRSVIMLAMNYGPQSDPLPVLSAKDRAAISVYAQNRDYHDVIKGKLKQIAGRLAARAGSDVKVFVDTAPVMEKPLAEAAGIGWQGKHTNLVSRSHGSWLFLGSIFTTAEIMPDMPETDHCGSCRACLDICPTDAFPAPYRLDARRCISYLTIEHKGPIAPEFRKAMGNRIYGCDDCLAVCPWNKFAEEAHETKLKARDDLKAPPLETLLALDDAAFRAFFSGSPVKRIGRDRFLRNVLIAAGNSDDAGLLARVEQLLCDPSPLVRGAATWALSQLSEPKYFRKLRKKLTASERDDTVLAEWWLAYQQETGEER

SEQ ID NO: 79521 - protein, 380 aa, Phyllobacterium sp.
  REGION 1..380: note = tr|A0A1H0RZS0|A0A1H0RZS0_9RHIZ Epoxyqueuosine reductase OS=Phyllobacterium sp. YR620 OX=1881066 GN=queG; PE = 3 SV=1
MRAGQPDKLKQFIIDEARAHGFDLVAVTRPDAIPQAEERLRQYLALGRHATMDWMEETALRRARPDALWPEVRSVIVLAMNYGPDSNPLELLKERDKAAISVYAQNRDYHDIIKGKLKGIASRFVARAAGADVKVFVDTAPVMEKPLAEAAGIGWQGKHTNLVSRSHGSWLFLGTIFTTAELPADEPDSDHCGSCRACLDACPTQAFPAPYQLDARRCISYLTIEHKGPIAPEFRKAMGNRIYGCDDCLAVCPWNKFAESAREAKLKAREDLKSPGLGSLLGLDDAAFRELFTGSPIKRIGRDRFIRNVLIASGNSGRSELIERVEAHLADPSPLVRGAAVWALGELSEPGPLSALRMRHAAHENDLDVLTEWRNAVKNQ

SEQ ID NO: 79522 - protein, 392 aa, unidentified
  source 1..392: note = Phyllobacterium zundukense
  REGION 1..392: note = tr|A0A2N9VTB4|A0A2N9VTB4_9RHIZ Epoxyqueuosine reductase OS=Phyllobacterium zundukense OX=1867719 GN=queG; PE = 3 SV=1
MQMIGQSKTQSIEQSQQQRLKQFILEESRAAGFELVAITRPDAIPLAEERLRQYLALGRHASMDWMQETEERRASPQALWPQVRSIIVLAMNYGPDSDPLAVLSQRDKAAISVYAQNRDYHDIIKGKLKGVASRFASRAAGEDLKVFVDTAPVMEKPLAEAAGLGWQGKHTNLVSRSHGSWLFLGTIFTTAELPADSPEADHCGSCRACLDVCPTNAFPAPYQLDARRCISYLTIEHKEPIAFEFRKAMGNRIYGCDDCLAVCPWNKFAETARETKLQARDDLRSPSLASLLTLDDAAFRTLFSGSPIKRIGRDRFLRNVLIACGNSGETALIDAVQNHLSDPSPLVRGAAIWALSELMDQDRFAALHMRYAAQENHADVLTEWRNAVKNQS

SEQ ID NO: 79523 - protein, 379 aa, unidentified; identical to SEQ ID NO: 77102
  source 1..379: note = Phytobacter diazotrophicus
  REGION 1..379: note = tr|A0A4R4AXT7|A0A4R4AXT7_9GAMM Epoxyqueuosine reductase OS=Phytobacter diazotrophicus OX=395631 GN=queG; PE = 3 SV=1

SEQ ID NO: 79524 - protein, 379 aa, unidentified
  source 1..379: note = Phytobacter ursingii
  REGION 1..379: note = tr|A0A0G3QDP3|A0A0G3QDP3_9GAMM Epoxyqueuosine reductase OS=Phytobacter ursingii OX=1972431 GN=queG PE=3; SV = 1
MSEPLDLNQLAHSIKQWGTELGFQQVGIADTDLSASEPKLQAWLDKQYHGEMEWMARHGMMRARPHELLPGTLRVISVRMNYLPANAAFASTLKNPTLGYVSRYALGRDYHKLLRNRLKQLGEKIQQHCASLNFRPFVDSAPILERPLAEKAGLGWVGKHSLILNRHAGSFFFLGELLIDLPLPVDQPIEENCGRCVACLTICPTGAIVEPYTVDARRCISYLTIELEGAIPEEFRPLIGNRIYGCDDCQLICPWNRFSQLTDEADFSPRKALHAPELIELFAWSESWFLKVTEGSAIRRIGHLRWLRNIAVALGNAPWDEANIRALEQRRGEHPLLDEHIEWAIAQQVEKRNACVVEVQTPKKQRLVRVIEKGLMRDA

SEQ ID NO: 79525 - protein, 379 aa, unidentified
  source 1..379: note = Phytobacter ursingii
  REGION 1..379: note = tr|A0A508UF94|A0A508UF94_9GAMM Epoxyqueuosine reductase OS=Phytobacter ursingii OX=1972431 GN=queG PE=3; SV = 1
MSEPLDLNQLAHSIKQWGTELGFQQVGIADTDLSASEPKLQAWLDKQYHGEMEWMARHGMMRTRPHELLPGTLRVISVRMNYLPANAAFASTLKNPTLGYVSRYALGRDYHKLLRNRLKQLGEKIQQHCASLNFRPFVDSAPILERPLAEKAGLGWVGKHSLILNRHAGSFFFLGELLIDLPLPVDQPVEENCGRCVACLTICPTGAIVEPYTVDARRCISYLTIELEGAIPEEFRPLIGNRIYGCDDCQLICPWNRFSQLTDEADFSPRKALHAPELIELFAWSESWFLKVTEGSAIRRIGHLRWLRNIAVALGNAPWDEANIRALEQRRGEHPLLDEHIEWAIAQQVEKRNACVVEVQTPKKQRLVRVIEKGLMRDA

SEQ ID NO: 79526 - protein, 397 aa, unidentified
  source 1..397: note = Pigmentiphaga aceris
  REGION 1..397: note = tr|A0A5C0B001|A0A5C0B001_9BURK Epoxyqueuosine reductase OS=Pigmentiphaga aceris OX=1940612 GN=queG PE=3; SV = 1
MSVQVVSLPIPVSAAASRSGADAYASSSVESCVPTPSLSPAQTTQLVADIRRWGEELGFGAVGFADLDLHDAGERMKQWLAQGMHGDMEYLERNMALRQDPSQMVPHARSAIMVRMQYAPASGPEITRHQQEGLASGERAVVANYALGRDYHKVLRQRLQKLADRVVASIGPFGYRVFTDSAPIMEVELARKAGLGWRGKHTLLLSREGSWFFLGEILTDLVLPPDPPAEPHCGGCRRCIVACPTQAIVAPYVLDARRCVSYLTIELAGSIPEPLRPLIGTRIYGCDDCQTACPWNKFAQAGDEPDFAPRQQLDASRMVDLFAWTQTEFETRTAGSAIRRIGHERWLRNLAVGLGNAKSSAEVRKALLSRAGHDSELVREHVAWALAQHETKVQPAV

SEQ ID NO: 79527 - protein, 379 aa, Pigmentiphaga kullae
  REGION 1..379: note = tr|A0A4Q7N8N5|A0A4Q7N8N5_9BURK Epoxyqueuosine reductase OS=Pigmentiphaga kullae OX=151784 GN=queG PE=3; SV = 1
MGMGYHDSMSASPPFAPVSTQDGPDLAALAETIRGWGRELGFSAVGFADLDLDEAGQRLAAWVAEGMHGEMDYMERHLPLRQDPAQLVSGARSAIMVRMDYAPLDGPALAARQRQALEAGDRAVVAAYALGRDYHKVLRQRLQRLADRIAEHAGPFGYRVFTDSAPVMEVELARKAGLGWRGKHTLLLSRDGSWFFLGEILTDLPLPADSLETPHCGQCRRCIDACPTGAIVAPYVVDARRCISYLTIELKGSIPEALRPAIGTRVYGCDDCQTACPWNKYARASAEGDFAPRHGLDAASLLDLFAWSERDFDERTQGSAIRRIGYERWLRNLAVALGNAPPSDEARAALRARADHPAELVREHVRWALERQSRGKREV

SEQ ID NO: 79528 - protein, 379 aa, Pigmentiphaga sp.
  REGION 1..379: note = tr|A0A3G8GNT4|A0A3G8GNT4_9BURK Epoxyqueuosine reductase OS=Pigmentiphaga sp. H8 OX=2488560 GN=queG PE=3; SV = 1
MGMGYHDSMSASPPFTPVSTQDGPDLAALAETIRGWGRELGFSAVGFADLDLDEAGQRLAAWVAEGMHGEMDYMERHLPLRQDPAQLVSGARSAIMVRMDYAPLDGPALAARQRQALEAGDRAVVAAYALGRDYHKVLRQRLQRLADRIAQHAGPFGYRVFTDSAPVMEVELARKAGLGWRGKHTLLLSRDGSWFFLGEILTDLPLPADHLETPHCGQCRRCIDACPTGAIVAPYVVDARRCISYLTIELKGSIPEALRPAIGTRVYGCDDCQTACPWNKYARACAEGDFAPRHGLDTASLLDLFAWTERDFDQRTQGSAIRRIGYERWLRNLAVALGNAPASDEARAALRERADHPSELVREHVRWALACQGRGKREV

SEQ ID NO: 79529 - protein, 369 aa, Pigmentiphaga sp.
  REGION 1..369: note = tr|A0A208XK76|A0A208XK76_9BURK Epoxyqueuosine reductase OS=Pigmentiphaga sp. NML080357 OX=2008675; GN = queG PE=3 SV=1
MSALPPNAPVSSSSGLDLAGLVESVRQWGRELGFSAVGVADLDLAEAGERLAAWVGEGMHGEMDYMERHLPLRRDPAQLVPNARSAIMVRMDYAPLDGPALAARQRSALADGATAVVASYALGRDYHKVLRQRLQRLADRIAGHIGPFGYRVFTDSAPIMEVELARKAGIGWRGKHTLLLSRDGSWFFLGEILTDLPLPADRLETPRCGQCRRCIDACPTGAIVAPYLLDARRCISYLTIELKGSIPEALRPAIGTHVYGCDDCQTACPWNKYARASDIPDFAPRHGLEAASLLELFAWTEADFDERTQGSAIRRIGYERWLRNVAVALGNAPPSEAVRAALRERVDHPSELVREHVRWALERQRAADD

SEQ ID NO: 79530 - protein, 377 aa, Pirellula sp.
  REGION 1..377: note = tr|A0A142Y341|A0A142Y341_9PLAN Epoxyqueuosine reductase OS=Pirellula sp. SH-Sr6A OX=1632865 GN=queG PE=4; SV = 1
MKPMRDELEALAASAGFPLFGIANARESESFSNLRSWIEQGYHGTMHYLDDRLDAYRHPRSVLENCRSIVMLGMPYASHPDTRRRKHPAPTTPPTDLLGATNCSELRELPTGLDARIGNYAMGEVDYHDFIRSRLNTIVKKMEASAPGSKWRGVVDTAPLLERDYARLAGLGWIGKNTLLLHREWGSYFFLAALLTDLELPTDEPMQTNHCGSCRACLDVCPTHAFVEPHVLDASRCISYLTIEHRGPIEPTLRESMGNWIFGCDLCQIVCPWNRKRIDDHLPEFHPIHQESRNSLRHWLSLDEESFRQLYRTTPFWRTKLRGMQRNALIAAGNGNRSDLIDLIERHAQSEDPVVSDAAQWARNRITDPMPPPARNG

SEQ ID NO: 79531 - protein, 388 aa, Pirellula staleyi
  REGION 1..388: note = tr|D2R4T2|D2R4T2_PIRSD 4Fe-4S ferredoxin-type domain-containing protein OS=Pirellula staleyi (strain ATCC 27377 / DSM 6068 / ICPB 4128) OX=530564 GN=Psta_2479; PE = 4 S V=1
MSDERDQLTSQLKAEAQRLGFALVGVAPAISPAGFTHLREWIARGYAGEMQYLEKRLEAYAHPRHVLDGVQSVVMLAMHYRTAEPREVVPGTGRISRYAWGDGDYHDIIRERLDNLADWLQEKRASAAVRGVVDTAPLLERELASVAGLGWTGKHTLLINRQAGSYFFLAALLTSEELTTDQPHERDFCGSCTACLEACPTQAFPQAGVLDASRCISYLTIELKGQIPRELRSGLQNWIFGCDVCQDVCPWNRFSPVATEIVFQPREGENPADLLALIALDDAAFRTQFRGTPLWRTKRRGIVRNACVVLGNQRETRAVPQLIQLLRDPEAIIRGAAAWAVGEMASQLESDLARQALAEQLTREEDPEVREELEWALSRFSPSARSEA

SEQ ID NO: 79532 - protein, 379 aa, Piscibacillus halophilus
  REGION 1..379: note = tr|A0A1H9LIH1|A0A1H9LIH1_9BACI Epoxyqueuosine reductase OS=Piscibacillus halophilus OX=571933 GN=queG; PE = 3 SV=1
MEINQLKQELIEYSKEIGVQKIGFTSTDTFETLKQRLMVQQSLSFHSGFEKGTIEERTTPTKLMPKAQSIISIALAYPSRMKDAPKSRKGDRRGIFARASWGKDYHDVLREKLNLIGEFLQKKLDGVACKAMVDTGELSDRAVAKRAGVGFVGKNCSLITEEYGSWVYLGELITNVPFEPDEPIEEGCGDCNICVDACPTGALVQGGQLNAQRCVAYQTITKSFLPDEFREKLGNRLYGCDTCQIVCPKNKGKDFHLHPEMEPDPELAKPKLIPLLKMSNREFKEKFGYMSGSWRGKKPIQRNAIVALAHYKDETALDTLEELMHKDPRPVIRGTAAWAIGKIGRQDAYEMIEKAMEKESDEDVLFEMEKGLEFLTQKI

SEQ ID NO: 79533 - protein, 389 aa, Pisciglobus halotolerans
  REGION 1..389: note = tr|A0A1I3CE13|A0A1I3CE13_9LACT Epoxyqueuosine reductase OS=Pisciglobus halotolerans OX=745365; GN = SAMN04489868_1179 PE=4 SV=1
MSTGAALKERIIAESKKIGIDKIGFTTAEPFEGLEERLHAQQEKGHHSGFEHKVIEERVYPELIFDEPKSIIAIALAYPTKIANKPPREKGVRRGEFARASWGTDYHDILREKMDRLIEYIREEAAEEVTFKPMVDTGELVDVAVAQRAGLGFIGRNGLLITEEFGSYVYLGEIITNLSFPADEPVPFGCGDCTRCIDACPTGALLGDGRMNAQLCLSYQTQTKGMMDEKFRRKIGHVIYGCDICQIVCPYNKGKDFHFHKEMEPDPEAVMPKLKPLLTISNREFKEKFGHMAGSWRGKKPLQRNAIIALGNSRDKSALPDLLQCVEKDIRPVIRGTAAWSISKIVTSRDEMVVEFLEEALEKETDKEASQEMTKAIETIRNKNEKRRR

SEQ ID NO: 79534 - protein, 355 aa, unidentified
  source 1..355: note = Piscirickettsiaceae bacterium
  REGION 1..355: note = tr|A0A2A4WL85|A0A2A4WL85_9GAMM Epoxyqueuosine reductase OS=Piscirickettsiaceae bacterium OX=2030828; GN = queG PE=3 SV=1
  VARIANT 162: note = Xaa can be any naturally occurring amino acid
MNANSTDFHQLAEDIKAYGKSLGFQQVGITDTELSEAEQQLSEWLDAGYHGDMSYMHKHGSKRTRPNELIPGTIRVISCRMDYLPETMQQTNKLMSNPAQAYISRYALGRDYHKVIRKKLQKLASHIEQSVGDFGYRAFVDSAPVMEKALAEKAGLGWIGKXSNLLNKQAGSWFFLGELYTDLPLPIDSPSTKHCGECTDCIDICPTQAIIAPYTVDARRCISYLTIELQGSIPEDLRPLMGNHIYGCDDCQQACPWNRFSQLTDENDFLARQQLDTATLIDLFNWHEEEFLTKTEGSAIRRIGYISWIRNIAIALGNAPFSPNITTTLAHKKAHPSPIIQEHVQWAMMQHEKKA

SEQ ID NO: 79535 - protein, 412 aa, unidentified
  source 1..412: note = Piscirickettsiaceae bacterium
  REGION 1..412: note = tr|A0A2M7M9M7|A0A2M7M9M7_9GAMM Epoxyqueuosine reductase OS=Piscirickettsiaceae bacterium CG_4_10_14_3_um_filter_44_349 OX=1974075 GN=queG PE=3 SV=1
MLVDNHALYQLTEQIKQWGQSLGFADIGISNTDLSHYEPFFEDWLSHQYHGSMDYMAKHGRKRSRPDELEPGTLSLISVRMNYFDGEAYSAISQLQSSNKAYISRYALHKDYHKLMRKRLAQLAQKIETAIATLNPQSDESFRYRAFCDSAPVLERPIAEKAGLGFIGKNSLLIHPRAGSWFFLGELYINLKLPADPPFTQQGCGPCTACMDECPTQAIVDNAVVDARRCISYLTIEYDGVIEESLRPLIGNRIYGCDDCQLVCPWNRFTEPTQEQAFKAKAPLDEVDLLTLLHWDEAQFLTEMAGSPIRRIGYVKWLRNLCIAIGNDVYRAENINALNALQIDSDMVNTHRLWALNVQKQKQKTSSKTTRPGRFSTPNRPAVVAKYYLPKSGSASPINAVPIHQIRSKIEP

SEQ ID NO: 79536 - protein, 366 aa, unidentified
  source 1..366: note = Pistricoccus aurantiacus
  REGION 1..366: note = tr|A0A5B8T0J9|A0A5B8T0J9_9GAMM Epoxyqueuosine reductase OS=Pistricoccus aurantiacus OX=1883414 GN=queG; PE = 3 SV=1
MTSSPSLNSDTLCDLAERLKIWGRELGFQQLGITDTDLATHERYLERWLAAGHQGEMGFMAKHGTKRTRPEELVPGTLRVISVRMDYLPAEVETTKVLSQPDKAYVSRYALGRDYHKLMRKRLDQLAKRLEKEVGHFGYRAFVDSAPVMERALAQKAGLGWFGKNAMLLNPQAGSLFFLGELYTDLPLPVDAPFATEHCGRCSACRSACPTGAIVDDKIVDSRRCISYLTIELHGAIPEQYREAMGNRIYGCDDCQLVCPFTRFTRVSEEEDFAPRHDLDQAELLRLFAWSEEEFLHKTAGSAIRRIGYERWLRNLAVGLGNAPWSAALEAALKARLAYPSDLVREHVRWALARQSEKRGALIHVA

SEQ ID NO: 79537 - protein, 347 aa, unidentified
  source 1..347: note = Planctomicrobium piriforme
  REGION 1..347: note = tr|A0A1I3CY77|A0A1I3CY77_9PLAN Epoxyqueuosine reductase OS=Planctomicrobium piriforme OX=1576369; GN = SAMN05421753_10312 PE=4 SV=1
MNPTHDLSALLKERGRELGFSLIGITPAARPETLDQFRDWLQQGFHGEMGYMARREEAYADPSGVMVGVKSVIVAAMNYGPGRATPPGSGRIAAYAQGAADYHDVLRERLKELAAVLHEARPGTKTRIAVDTAPLLERDLARRAGLGWFGKNTLLINKWEGSYFFLGGILTDCELPADAPHETSHCGTCTRCLEACPTQAFVGPHVLDARRCISYLTIELRGEPIPIELRPGMEDWMFGCDVCQQVCPWNRKATPSDEPAFLPAEITNLTSTQFLNLTEEEFSERFAATPLSRPGYINMARNAAIVLGNLQRRDALPELNKALWSPHEVVRDAAIWAIGQIEAASSE

SEQ ID NO: 79538 - protein, 336 aa, Planctomyces sp.
  REGION 1..336: note = tr|A0A2E8EYT1|A0A2E8EYT1_9PLAN 4Fe-4S ferredoxin-type domain-containing protein OS=Planctomyces sp. OX=37635 GN=CMJ45_04745 PE=4 SV=1
MSLDEEPMKMDINDARRPKRRRTAGPVTETPETVLRNQQYTTEARRFQWIQREILAPKREGQVNETRVDVTDTAALTQQVKEFAKELGADIVGVAEYDPRFTFTDSDVLGHTRVIAFGFAMQYDVISDLGADSQTEVHRVYYRMYDISVTLAQYIGSMGYSARAHPNGGELAHVPYAYLAGLGELGKHGSLISPVLGSSFRLGLVSTDLPLDIDGPQDYGIDDTCARCTVCTRFCPGEAIHEEKQMVNGVERWHVDTGACEPYFLQLWGCKICLMVCPYNGRGLFKESYKGPGRDVARTKNSDGLLGLFASRTAEASQNPLLMAIHKKNVEEGGET

SEQ ID NO: 79539 - protein, 371 aa, Planctomyces sp.
  REGION 1..371: note = tr|A0A142YE11|A0A142YE11_9PLAN Epoxyqueuosine reductase OS=Planctomyces sp. SH-PL62 OX=1636152 GN=queG; PE = 3 SV=1
MHPRDLSRRLKEQAIALGFDRAGIAPAVRPPDYDRFRDWLDSGFDAGMTYLRKHADARAHPDSVLEGVRSVLMVSLVYGEGPSGPPRPTSGKIARYARGDDYHHVVRARLEALIEWLRAEAPGVSARAVVDTAPLLERDFARLAGLGWIGKNTLLIDRKLGSFTFLGALLVDVDLEPDAPHETSHCGTCTRCLDACPTDAFDGPHRLDARKCISYWTIEHVGPIPEPAGSNLDGWVFGCDVCQDVCPWNRKAPPGLIPELAPRPEWDAPDLLEWLGRSKGDWKRALRGSAMQRTRRNGLLRNAAMAMGVEGRLDAVPALAGRLADRGEDSAVRAAAAWALGRLATPEARAALDAHRHDDDPAVREAVAGAG

SEQ ID NO: 79540 - protein, 370 aa, unidentified
  source 1..370: note = Planctomycetaceae bacterium
  REGION 1..370: note = tr|A0A2E7ETE3|A0A2E7ETE3_9PLAN tRNA epoxyqueuosine(34) reductase QueG OS=Planctomycetaceae bacterium OX=2026779 GN=queG PE=4 SV=1
MSLTTDLKTEAQRHGFDLVGACPAVTPTGIHRFYEWISSGYSGEMSYISGRAKAYEHPANVLAGVRSLLMLSMNYRTSDVSPTPDTTGRVSRYAWGGLDYHDVIHARLKKLVQFLKNRAPAAEARGVVDTAPLLEREYAQMAGLGWTGKNTLLINPRRGSWFFLAAILTTEELEYDDPFDMDHCGNCTACLDACPTDAFPQPYVLEATRCISYLTIELRESIPTDLRRSINNWVYGCDICQEVCPWNRRAPQSSLEEFEPRLDLSPLNLLSLFSLTDDEFRLLFRKTPLWRSKRRGLLRNAAIVLGNQRTEAAIDALTKGLNDAESIVRSACVWALGEIGTPKAIARLQRLQAEADEEVRREIEQALAAQ

SEQ ID NO: 79541 - protein, 393 aa, unidentified
  source 1..393: note = Planctomycetaceae bacterium
  REGION 1..393: note = tr|A0A1Z9EZJ4|A0A1Z9EZJ4_9PLAN tRNA epoxyqueuosine(34) reductase QueG OS=Planctomycetaceae bacterium TMED138 OX=1986834 GN=CBC98_00260 PE=4 SV=1
  VARIANT 3..4: note = Xaa can be any naturally occurring amino acid
  VARIANT 8: note = Xaa can be any naturally occurring amino acid
  VARIANT 15: note = Xaa can be any naturally occurring amino acid
  VARIANT 390: note = Xaa can be any naturally occurring amino acid
MPXXISNXDKGVVDXLQQEAHRLGFSRLGITSAEPPPRQDRFAQWLDQGFAGVMENWLRRHLPLRSSPESLLPGTQSVIMLATDYDAKTVASRESPNHGQIARYAVGRDYHDVLRSRLNHLGGWLEHAIPGCKTRGVVDSAPLAEREFAARAGLGWFGKNTMLIDQGAGSYFFLSGLLATVALPTHQPIEVDHCGTCTACLDICPTDALPEPRVLDATRCISALTIEDRGPVEGGLRSHFGNWIFGCDLCQEVCPWNRHAPGTEDPELQAIENEEMPSLIELLRLDQAAFRKKFHDSPILRAKRVGLLRSAAIALGNHPSASGDVPAGLASLCGVLQDKEPVIRGAAAWALGQWHYRMPEIAPTIVDALKARLAEEYDETVRQEIFSVLXHKE

SEQ ID NO: 79542 - protein, 351 aa, unidentified
  source 1..351: note = Planctomycetales bacterium
  REGION 1..351: note = tr|A0A354GQK2|A0A354GQK2_9BACT Epoxyqueuosine reductase OS=Planctomycetales bacterium OX=2053591 GN=queG; PE = 3 SV=1
MEESLESRLKQQAQALGFDLVGIAPAGPADGFDRLRDWLDHGFAGDMDYMHRHAEARRHPESVLPEVRSVVMLGMNYNPGNGPEESVSGKGRVARYARGADYHDVLRERLNHLLAWLQGERAACHGRGVVDTAPLLERDFARRAGLGWFGKNTMLLNKRLGSYFFLAALLVDVELQPDSPFEAHHCGTCTACLDACPTAAFVEPGVLDARRCISYLTIELKGAVPLDLRTGIGDWTFGCDICQEVCPWNRKAPAAANAAMQARPELESLDLIELLGLTDDEFRSRFRDTALMRTKRRGLLRNAALVLGNTGDERALPALRRAQEDTEPLIQEAARWAAAEIERRRDRIVLG

SEQ ID NO: 79543 - protein, 353 aa, unidentified
  source 1..353: note = Planctomycetales bacterium
  REGION 1..353: note = tr|A0A1U7GQW9|A0A1U7GQW9_9BACT Epoxyqueuosine reductase OS=Planctomycetales bacterium 71-10 OX=1895807; GN = queG PE=3 SV=1
MDDLARRLKGRALALGFDRVGIAPAQAPPGYPHFLAWLDAGRGAGMGYLADHAGARAHPGAILEGVRSVVMASLVYGGRSGQPAVGKVARYARGADYHTALRGRLELLAEWLRDEAPGVSARAVVDTAPLMERDFARLAGLGWIGKNTMLIDRKLGSFTVLGALLVDADLEPDAPHASSHCGTCTRCLDACPTGAFDGPYRLDARRCISYWTIEHQGPIPDAAAGELHGWAFGCDVCQDVCPWNRKAPAARIPEFAPRPEWEAPDLVEWLTRSKWRWKRLLTNSALRRAGRSGLVRNAALTLGVAGRVDAVPALAARLADPKEDPTIRHAAAWALGRIDAPEARAALDAHARG

SEQ ID NO: 79544 - protein, 372 aa, unidentified
  source 1..372: note = Planctomycetes bacterium
  REGION 1..372: note = tr|A0A2D6A734|A0A2D6A734_9BACT tRNA epoxyqueuosine(34) reductase QueG OS=Planctomycetes bacterium OX=2026780 GN=queG PE=4 SV=1
MSPPFPRPGLVEEMAREAGFDLVAFGPAGPGEHGAKLEEWIAAGRHGEMDYLERNLPRLLEPERLLPGARGAVALGYDYGRDGVALESGGRVARYAAGRDYHRALGSRMRRLTTALEREGVRGDSLRSGIDAVPILERALAAQAGIGFLAKSSGIIHAERGPWLLLAEVLTTEAFAPSAPATGSCGTCTACLDTCPTGAIVAPFEVDARRCLSYTTIELRGPIPHDYRAAQGDWLFGCDICIEACPFHSRTGPPHDDPDARLHPALETWQLVGLLALTPEQWNRDWTGTAMRRAGRAGLQRNAAIVLGNLGQEDAAPVLVKALEDSDAGVRTAAAWALCRLGRGRNEAMRALARETDLDVAADMRRSLAEFG

SEQ ID NO: 79545 - protein, 395 aa, unidentified
  source 1..395: note = Planctomycetes bacterium
  REGION 1..395: note = tr|A0A5C6FVX5|A0A5C6FVX5_9BACT Epoxyqueuosine reductase OS=Planctomycetes bacterium V7 OX=2528031; GN = queG PE=4 SV=1
MQSDPVPDDLKAEIRAVAGQLGFHLCGFAPAVSSQGHSDLLRWIDEGYAAEMDYFSQRVDAYKHPSGVLPGVRSIIALAYPYPSGSERIDATGKHIPSDGQTPSGRGKVARYAWTGDDYHDWIHPKLKTLCRTLQSCAPESRSRGVVDTAPLMEREVAQLAGLGWRGKNTLLLRPLVGSYFFLACVLTTVELQPDPPFDRFHCGTCTACLDACPTDAFPQPGVMDASRCISYLTIEHRGSIPQPLRPQIGDWVFGCDVCQEVCPWNRQSSRGDTKAGGESMASPEPTMTDLDLHDLFTLDDEQFRKRYRKTALWRTRRRGILRNAAIVLGNQGNTESLGPLTTGLSDHEPLVRSASAWALGRIGGKARSVLMQRLATEDDPEVIAEIQSAIDQLA

SEQ ID NO: 79546 - protein, 365 aa, unidentified
  source 1..365: note = Planctomycetia bacterium
  REGION 1..365: note = tr|A0A4P5WJA8|A0A4P5WJA8_9BACT Epoxyqueuosine reductase OS=Planctomycetia bacterium OX=2052181; GN = LBMAG46_02320 PE=4 SV=1
MACEQGFAGLGIAPAVTPTGFHGLLQWLQQGHHGEMAWMASRAELRRHPESLLPGCRSVLMAAMNYHDGSAGPAAGGARISRYAWGSEDYHGVLKRQLAPVVAHLRAALPSCRARVVVDSAPLLERDFGRLAGLGWFGRNTMLISRGFGSWFFLAGILTDAELVCDESEERSYCGSCTRCLDECPTDAFPESGVLDARRCISYLTIELRDRGIPRELRAGVGGWLFGCDVCQEVCPWNRFAPGECLSEFRDRRGAWPLMVDPAGLLRMGEVEFLQVFRGTPLERTGCEVLRRNAAIVLGNLPELGGEGELVSALEDESGLVRAAAGWALCRRGGEPGIAAVRARLLREGDAEVACDLRLSLEECG

SEQ ID NO: 79547 - protein, 320 aa, unidentified
  source 1..320: note = Planctomycetia bacterium
  REGION 1..320: note = tr|A0A1Z8SMN2|A0A1Z8SMN2_9BACT tRNA epoxyqueuosine(34) reductase QueG OS=Planctomycetia bacterium TMED53 OX=1986839 GN=CBC13_04745 PE=4 SV=1
MENPMIPIPESGENSELEELRREALKLGFSALGIARAGISPHAERFRDWIQAGMHAGMSWLEKNTERRLDPTHSLEGAKSVVMLSLQYQDEIEAPPSAPKIARYARGRDYHKVMVPMLKALCDHISQSGRWKTWYCVDASPILERDWGEASGLGWIGKNGLLINREMGSWFFLGGIVTDRVLEATPATLDHCGSCTRCLDACPTNAIVKPRTVDARKCISYWTIEHKGDLPAESELHGWLFGCDICQEVCPWNTRPARIHPKIHDDLTPRPIPQSAEEILEFSEVDYLRYFAGTPVTRTGFSGLQRNARALIRESQGKDS

SEQ ID NO: 79548 - protein, 404 aa, unidentified
  source 1..404: note = Planctopirus ephydatiae
  REGION 1..404: note = tr|A0A518GTY8|A0A518GTY8_9PLAN Epoxyqueuosine reductase OS=Planctopirus ephydatiae OX=2528019 GN=queG; PE = 4 SV=1
MIAARLKQTLLDAGFALVGIAPAVSPLGLDRLQDWLKAGYAGEMSYIERRQHAYAHPENVLPKVASIVMAAWNYQPQGSQAGLHDSRQRGRIAAYAQLPEDYHHWLKEKLHPAVSFLREHFPNDRTRTAIDTAPLLEREYASLAGLGWFGKNTMLIDRQQGSYLLLAGILTQTELPPDAPHQTHHCGSCTRCLEICPTEAFPQPGVLDARKCISYLTIEQKGLPVEPLRKGIGPWLLGCDLCQDVCPWNTKRQKVWSRAQIANEQQLTTVTDNETREASLVEAENNPALFLTISEEAFQQRFGKTPLERPGRAGMARNAAIVLGNIGTFNDWPEIEHGLADSSDVVRSACAWAAVELALREPLLKSIAETALRNRLPLEDNSTEAVATYRELRAALDRLTSPPA

SEQ ID NO: 79549 - protein, 413 aa, unidentified
  source 1..413: note = Planctopirus hydrillae
  REGION 1..413: note = tr|A0A1C3EL00|A0A1C3EL00_9PLAN tRNA epoxyqueuosine(34) reductase QueG OS=Planctopirus hydrillae OX=1841610 GN=A6X21_17885 PE=4 SV=1
MLIIPADKAMIADGLKQTLLDAGFALVGIAPAVSPLGLDRLHEWLQAGYAGEMSYIERRQHAYAHPENVLPRVASIVMAAWNYQPQGSPDTLDESRQRGRIAAYAQLPEDYHHWLKEKLQPGILFLRKHFPNDRTRTAIDTAPLLEREYASLAGLGWFGKNTMLIDRQQGSYLLLASILTQTELPPDAPHQTQHCGNCTRCLEICPTDAFPQPGVLDATKCISYLTIELKGLPAEPLRKGIGPWLLGCDLCQDVCPWNTKRQKVWSRAQSANDQQRTKLTDNETSEAALVEAESNPALFLTISEEAFQQRFGKTPLERPGRAGMARNAAIVLGNIGSFNDWPAIEHGLADSSAVVRSACAWAAVELALREPLLKSIAETALRNRLPLEDNSIETSATYRELQAALDRLTIPPA

SEQ ID NO: 79550 - protein, 404 aa, unidentified
  source 1..404: note = Planctopirus limnophila
  REGION 1..404: note = tr|D5STR4|D5STR4_PLAL2 4Fe-4S ferredoxin-type domain-containing protein OS=Planctopirus limnophila (strain ATCC 43296 / DSM 3776 / IFAM 1008 / 290) OX=521674; GN = Plim _3280 PE=4 SV=1
MIAARLKQTLLDAGFALVGIAPAVSPLGLGRLQDWIQAGYAGEMSYIERRQHAYAHPENVLPQVASIVMAAWNYQPQGSPAGFHESRQRGRIAAYAQLPEDYHQWLKEKLQPAISILREHFPNDRTRTAIDTAPLLEREYASLAGLGWFGKNTMLIDRQQGSYLLLAGILTQTDLPPDAPHQTHHCGSCTRCLDICPTEAFPQPGVLDARKCISYLTIEQKGLPAEPLRKGIGPWLLGCDLCQDVCPWNTKRQKVWSRAQSTNEQQLTTVTDNETSEAALVEAENDPSLFLTISEEEFQQRFGKTPLERPGRSGMARNAAIVMGNIGTCDDWPAIEHGLADSSAVVRSACAWAAVELALREPLLKSIAETALRNRLPLEDNSLETSATYRELQAALDRLTIPPA

SEQ ID NO: 79551 - protein, 388 aa, Planifilum fimeticola
  REGION 1..388: note = tr|A0A2T0LAK0|A0A2T0LAK0_9BACL Epoxyqueuosine reductase OS=Planifilum fimeticola OX=201975 GN=queG PE=3; SV = 1
MRPEEIKARLIEEAKRLNIDKIGFASADPFLELKERLIEHRRKGYESGFEEPDLEKRTHPDKTLPEAKSIIAVALAYPSRLPNPPKSKPGAYRGIFCRASWGKDYHHVLRERLEALKECLLAMVPTASAEILVDTGPLSDRAVAERAGIGWVGKNTALITEEFGSWVYLGEMITDVYLPPDTPVTEGCGDCTACLDACPTGALVQPGQLNAQACLAYLTQTKQMVPEPYREKIGNRLYGCDTCQVVCPKNRKVNFTHQREFRPDPEKVKPLLKPILGLSNRQFRREFGEMAGSWRGKGPIQRNAIIALAHFRDRSAVPLLSRLLREDPRPAIRGTSAWALGKIGGQEALDALCSADREETEADVRREIEQALARLRREEGSPGSSPKR

SEQ ID NO: 79552 - protein, 388 aa, Planifilum fulgidum
  REGION 1..388: note = tr|A0A1I2SCB5|A0A1I2SCB5_9BACL Epoxyqueuosine reductase OS=Planifilum fulgidum OX=201973 GN=queG PE=3; SV = 1
MRPEEIKARLIEEAKRLNIDKIGFASADPFLELKERLIEHRRKGYESGFEEPDLEKRTRPDKILPEAKSLIAIALAYPSRLSNPPKSKPGAYRGIFCRASWGKDYHHVLRERLEALKKCLLDMVPTASAEVLVDTGPLSDRAVAERAGIGWVGKNTALITEEFGSWVYLGEMITDVYLPPDTPVTEGCGDCTACLDACPTGALVQPGQLNAQACLAYLTQTKQMVPEPYREKIGNRLYGCDTCQVVCPKNRKVNFTHQREFRPDPEKVKPLLKPILGMSNRQFRREFGEMAGSWRGRGPIQRNAIIALAHFRDRSAVPLLSRLLREDPRPVIRGTSAWALGKIGGEDALTALCEAEREETDADVRREIGQALARLRREEVSSGSPPKR

SEQ ID NO: 79553 - protein, 312 aa, unidentified
  source 1..312: note = Planktotalea frisia
  REGION 1..312: note = tr|A0A1L9NWH6|A0A1L9NWH6_9RHOB Epoxyqueuosine reductase OS=Planktotalea frisia OX=696762 GN=queG PE=4; SV = 1
MPERLQTFVDAGRHGQMGWMAERMSWRGNPNALWPEAQSVIMLGESYTPEHDPLEILQHADRGAISVYAQNKDYHDLVKKRLKRLARWLIAESGGEVKVFVDTAPVPEKPLGAAAGLGWQGKHTNLVSRQMGNWFFLGSVFTTLELPVDEAEVDHCGSCTSCLDICPTAAFPAPYQLDARRCISYLTIEHKGPVDEELRALMGNRIYGCDDCLAICPWNKFAVEARELRYAARDELRAPRLAVFARLDDAEFRTMFSGSPIKRIGRDRFVRNVLYAIGNSSVAELRFVAQELVDDPDEAVADAARWASARLA

SEQ ID NO: 79554 - protein, 313 aa, unidentified
  source 1..313: note = Planktothricoides sp.
  REGION 1..313: note = tr|A0A0M1JUC6|A0A0M1JUC6_9CYAN Epoxyqueuosine reductase OS=Planktothricoides sp. SR001 OX=1705388; GN = queG PE=3 SV=1
MNYPITSNQIKQKAQEFGFHKVGISLVDEADSSAVSHLQSWLNYGYQADMQWMANPKRQDIRQVMPDVESVISVALNYYTPYQHSDEPKIAKISRYGWGRDYHRVLDKKLKAFSLWLEAQAPGIKARYYADTGPISDKFWAQQAGLGWIAKNGNLITREYGSWVFLGEVLTNLKLTGDRAHTQHCGTCNRCLEACPTQAIVKPFVVDANRCIAYHTIENRAEDLPDEIKSNLQGWVAGCDICQDVCPWNQRFAQPTDVKEFEPYPENLAPTLAELAELSEDEWNRRFPASALRRIKPEMWRRNARANLGNCEG

SEQ ID NO: 79555 - protein, 310 aa, Planktothrix agardhii
  REGION 1..310: note = tr|A0A1J1JK23|A0A1J1JK23_PLAAG Epoxyqueuosine reductase OS=Planktothrix agardhii OX=1160 GN=yjeS PE=3; SV = 1
MMNSPINTNLVKQKALDLGFHQVGIAAITETEQNRQHLQSWLDQGYAADMAWMNSPKRQNIRELMPEVASVICVALNYYTPDQAPDNPELGKISRYARGRDYHKVLHKKLKTFSEWLQQQATGIQARYYADTGPIQDKVWAEKAGIGWISKNSNLITTKYGSWVFLGEILTNLILTPDIPHTQHCGTCTRCLEACPTGAITQPFVVDANRCIAYHTIENRAETLPENISKNLNGWVAGCDICQEVCPWNQSFAQETDVPEFQPYPENIAPKLTELAELSETEWDQRFRASALRRIKPQMWRRNARANLDY

SEQ ID NO: 79556 - protein, 318 aa, Planktothrix agardhii
  REGION 1..318: note = tr|A0A073CDK0|A0A073CDK0_PLAAG Epoxyqueuosine reductase OS=Planktothrix agardhii NIVA-CYA 126/8; OX = 388467 GN=queG PE=3 SV=1
MSLWFLLVFMNSLINTNLVKQKALDLGFHQVGIAAITETEQNRQHLQSWLDQGYAADMAWMNSPKRQNIRELMPEVASVICVALNYYTPDQVPDNPELGKISRYARGRDYHRVLHKKLKTFSEWLQQQATGIQARYYADTGPIQDKVWAEKAGIGWISKNSNLITRKYGSWVFLGEILTNLILTPDPPHNQHCGTCTRCLEACPTGAITQPFVVDANRCIAYHTIENRAETLPENISKNLNGWVAGCDICQEVCPWNQSFAQETDVPEFQPYPENIAPKLTELAELSETEWDQRFRASALRRIKPQMWRRNARANLDY

SEQ ID NO: 79557 - protein, 309 aa, unidentified
  source 1..309: note = Planktothrix rubescens
  REGION 1..309: note = tr|A0A1J1L7H2|A0A1J1L7H2_PLARU Epoxyqueuosine reductase OS=Planktothrix rubescens OX=59512 GN=queG PE=3; SV = 1
MNSLINTNLVKQKALDLGFHQVGIAAITETEQNRQHLQSWLDQGYAADMAWMNSPKRQNIRELMPEVASVICVALNYYTPDQVPDNPELGKISRYARGRDYHKVLHKKLKTFSEWLQQQATGIQARYYADTGPIQDKVWAEKAGIGWISKNSNLITTKYGSWVFLGEILTNLILTPDIPHTQHCGTCTRCLEACPTGAITQPFVVDANRCIAYHTIENRAETLPENISKNLNGWVAGCDICQEVCPWNQRFAQETDVPEFQPYPENIAPKLTELAELSETEWDQRFRASALRRIKPQMWRRNARANLDY

SEQ ID NO: 79558 - protein, 309 aa, Planktothrix sp.
  REGION 1..309: note = tr|A0A1T4ZIW9|A0A1T4ZIW9_9CYAN Epoxyqueuosine reductase OS=Planktothrix sp. PCC 11201 OX=1729650 GN=queG; PE = 3 SV=1
MNSAINTNLVKQKALDLGFHQVGIAAITETEENRQHLQSWLDQGYAADMAWMNSPKRQNIRQLMPEVASAICVALNYYTPDQQPENPELGKISRYARGRDYHRVLHKKLKTFSEWLQQQAPGIQARYYADTGPIQDKVWAEKAGIGWISKNSNLITTKYGSWVFLGEILTNLTLTPDPPHTQHCGTCTRCLEACPTGAITQPFVVDANRCIAYHTIENRAETLPENISKNLNGWVAGCDICQEVCPWNQRFSQETDVIEFQPYPENIAPKLTELAELSETEWDQRFRASALRRIKPQMWRRNARANLEY

SEQ ID NO: 79559 - protein, 309 aa, Planktothrix sp.
  REGION 1..309: note = tr|A0A3C1RMM8|A0A3C1RMM8_9CYAN Epoxyqueuosine reductase OS=Planktothrix sp. UBA8407 OX=2055758 GN=queG; PE = 3 SV=1
MNLPINTNLVKQKALDLGFHQVGIAAITETEENRQHLQSWLDQGYAADMAWMNNPKRQNIRQLMPEVASVICVALNYYTPAQAPDNPALGKISRYARGRDYHKVLHKKLKTFSEWLQQQATGIQARYYADTGPIQDKVWAQKAGIGWISKNSNLITTKYGSWVFLGEILTNLILTPDPPHTQHCGTCTRCLEACPTGAITQPFVVDANRCIAYHTIENRAETLPENISKNLNGWVAGCDICQEVCPWNQRFAQETDIPEFQPDPENIAPKLTELAELSETAWDHRFRASALRRIKPQMWRRNARANLAY

SEQ ID NO: 79560 - protein, 305 aa, unidentified
  source 1..305: note = Planktothrix tepida
  REGION 1..305: note = tr|A0A1J1LRZ4|A0A1J1LRZ4_9CYAN Epoxyqueuosine reductase OS=Planktothrix tepida PCC 9214 OX=671072; GN = queG PE=3 SV=1
MDSEQIKQKALILGFHKVGIAAISDMQDNNQRLQNWLNQGYAADMAWMNNPKRQDIRQLMPEVQSVICVALNYYTPQQYPEGQEFAKISRYARGRDYHRVLHKKLKIFCDWLQQQEAGIQARYYADTGPIQDKVWAQQAGIGWIAKNSNVITRDYGSWVFLGEILTNLTLTPDTPHTQHCGTCTRCLEACPTQAITQPFVVDANRCIAYHTIENRAETLPENISKQLNGWVAGCDICQEVCPWNQRFAQETNVIEFQPYPENLAPKLSELAELSEEEWDQRFRASALRRIKPQMWRRNARANLEF

SEQ ID NO: 79561 - protein, 381 aa, Planococcus antarcticus
  REGION 1..381: note = tr|A0A1C7DJA2|A0A1C7DJA2_9BACL tRNA epoxyqueuosine(34) reductase QueG OS=Planococcus antarcticus DSM 14505 OX=1185653 GN=BBH88_16010 PE=4 SV=1
MNLDQFQKELVAYASDIGIDKIGFASAEPFYSLKHQLIRQQQLNYQSGFEESDVEKRTRPELLLNEAVSIIAIAIAYPSRMADAPQGVKGARRGMFSRSSWGKDYHAALRERLTLLEAFIAPHYPEARMRSMVDTGELSDRAVAERAGIGWSAKNTNIITPEFGSYVYLGEMITNIPFRFDEPMEDQCGDCRLCIDTCPTGAIVEGGQLNAQRCISFLTQTKGFLPDEFRGKIGNRIYGCDTCQTVCPKNKRKANQIHAEFEPDPEIAKPLLEPLLTISNREFKDKFGYVSGSWRGKKPIQRNAILALAHFKEKSAVPALIKLLESDERPVIRGTAAWAIGKIGTDEGLEAIKQAQQKEKDLEVQEEIQKGLAFFAERLKG

SEQ ID NO: 79562 - protein, 381 aa, Planococcus citreus
  REGION 1..381: note = tr|A0A497YEL2|A0A497YEL2_9BACL Epoxyqueuosine reductase OS=Planococcus citreus OX=1373 GN=DFR62_3501; PE = 4 SV=1
MNLDQFQQQLVAYAAEIGIDKIGFASAEPFFSLKHRLIRQQQLNFQSGFEESDVEKRTRPELLMEEPVSIIAIAIAYPSKMEGAKPGVKGARRGIFSRSSWGKDYHAALRDRLALLESFIAAHYPEARMKSMVDTGELSDRAVAERAGIGWSAKNTNIITPEFGSYVYLGEMITNIPFEYDEPMEDQCGDCRLCIDTCPTGAIVEGGQLNAQRCISFLTQTKGFLPDEFRSKIGNRIYGCDTCQTVCPKNKRKANRIHPEFDPDPEIAKPLLEPLLTISNREFKEKFGHVSGSWRGKKPIQRNAILALAHFKEQSAVPALIELMNTDPRPVIRGTSAWAIGRIGTDEGRLALEHAQQQEKDEEVLAEIAKGLAFFSAETKG

SEQ ID NO: 79563 - protein, 381 aa, Planococcus donghaensis
  REGION 1..381: note = tr|A0A1C7EJ90|A0A1C7EJ90_9BACL tRNA epoxyqueuosine(34) reductase QueG OS=Planococcus donghaensis OX=414778 GN=BCM40_11425 PE=4 SV=1
MNLDQFQKELVAYASDIGIDKIGFASAEPFYSLKHQLIRQQQLNYQSGFEESDVEKRTRPELLLNEAVSIISIAIAYPSRMTDAPQGVKGARRGIFSRSSWGKDYHAALRERLTLLEAFITSRFPEARMRSMVDTGELSDRAVAERAGIGWSAKNTNIITPEFGSYVYLGEMITNIPFRFDEPIEDQCGDCRLCIDSCPTGAIVEGGQLNAQRCISFLTQTKGFLPDEFRGKIGNRLYGCDTCQTVCPKNKRKANQIHAEFEPDPEIAKPLLLPLLTISNREFKDKFGYVSGSWRGKKPIQRNAILALAHFKETAAVPVLIGLLKSDERPVIRGTAAWAIGKIGTAAGLAALQQAEASEKEEEVQEEIQKGLAFFAERSKG

SEQ ID NO: 79564 - protein, 381 aa, Planococcus donghaensis
  REGION 1..381: note = tr|E7RH32|E7RH32_9BACL 4Fe-4S ferredoxin-type domain-containing protein OS=Planococcus donghaensis MPA1U2 OX=933115 GN=GPDM_08900 PE=4 SV=1
MNLDQFQKELVAYASDIGIDKIGFASAEPFYSLKHQLIRQQQLNYQSGFEESDVEKRTRPELLLNEAVSIISIAIAYPSRMTDAPQGVKGARRGIFSRSSWGKDYHAALRERLTLLEAFIASRFPEARMRSMVDTGELSDRAVAERAGIGWSAKNTNIITPEFGSYVYLGEMITNIPFRFDEPIEDQCGDCRLCIDSCPTGAIVEGGQLNAQRCISFLTQTKGFLPDEFRGKIGNRLYGCDTCQTVCPKNKRKANQIHAEFEPDPEIAKPLLLPLLTISNKEFKDKFGYVSGSWRGKKPIQRNAILALAHFKETAAVPVLIELLESDERPVIRGTAAWAIGKIGTAEGLIALQQAEKSEKEEEVQEEIQKGLAFFAERSKG

SEQ ID NO: 79565 - protein, 381 aa, unidentified
  source 1..381: note = Planococcus halocryophilus
  REGION 1..381: note = tr|A0A1C7DLZ9|A0A1C7DLZ9_9BACL tRNA epoxyqueuosine(34) reductase QueG OS=Planococcus halocryophilus OX=1215089 GN=BBI08_00610 PE=4 SV=1
MNLDQFQKELVAYASDIGIDKIGFASAEPFYSLKHQLIRQQQLNYQSGFEESDVEKRTRPELLLNEAVSIISIAIAYPSRMTDAPQGVKGERRGIFSRSSWGKDYHAALRERLALLEAFIASRYPEARMRSMVDTGELSDRAVAERAGIGWSAKNTNIITPEFGSYVYLGEMITNIPFRFDEPMEDQCGDCRLCIDSCPTGAIVEGGQLNAQRCISFLTQTKGFLPEEFRGKIGNRLYGCDTCQTVCPKNKRKANQIHAEFEPDPEIAKPLLLPLLTISNREFKDKFGYVSGSWRGKKPIQRNAILALAHFKETAAVPVLIQLLESDERPVIRGTAAWAIGKIGTAEGLVALQQAEKSEKEEEVQEEIQKGLAFFAERSKG

SEQ ID NO: 79566 - protein, 381 aa, unidentified
  source 1..381: note = Planococcus halotolerans
  REGION 1..381: note = tr|A0A365KNG7|A0A365KNG7_9BACL tRNA epoxyqueuosine(34) reductase QueG OS=Planococcus halotolerans OX=2233542 GN=queG PE=4 SV=1
MNLEQFQKELVAYASEIGIDKIGFASAEPFFNLKHQLIRQQQLQYQSGFEEPDVEKRTHPELLLEEAVTIIAIAIAYPSKMNDAPQGTKGARRGIFSRSSWGKDYHAALRERLTLLEAFIAAHYPDARMRSMVDTGELSDRAVAERAGIGWSAKNTNIITPEFGSYVYLGEMITNIPFTLNEPMEDQCGDCRLCIDTCPTGAIVEGGQLNAQRCISFLTQTKGFMPDEFRSKIGNRLYGCDTCQTVCPKNKRKANQIHAEFEPDPEIAKPLLEPLLKISNREFKEKFGYVSGSWRGKKPIQRNAILALAHFKEVSAVPALIDLLESDERPVIRGTAAWAIGKIGTAEGLHALKKAEEQEKDSEVLEEIQKGLAFFAEESKG

SEQ ID NO: 79567 - protein, 381 aa, Planococcus kocurii
  REGION 1..381: note = tr|A0A0U2J977|A0A0U2J977_9BACL Epoxyqueuosine reductase OS=Planococcus kocurii OX=1374 GN=AUO94_12045; PE = 4 SV=1
MNLDQFQKELVAYASDIGIDKIGFASAEPFYSLKHQLIRQQQLNYQSGFEESDVEKRTRPELLLNEAVSIVAIAIAYPSKMEDAPQGVKGARRGMFSRSSWGKDYHAALRERLTLLEAFIASRYPEARMRSMVDTGELSDRAVAERAGIGWSAKNTNIITPEFGSYVYLGEMITNIPFRFDEPMEDQCGDCRLCIDTCPTGAIVEGGQLNAQRCISFLTQTKGFLPDEFRSKIGNRLYGCDTCQTVCPKNKRKANQIHAEFEPDPEIAKPLLLPLLTISNREFKDKFGYVSGSWRGKKPIQRNAILALAHFKETAAIPVLIQLLDSDERPVIRGTAAWAIGKIGTDEGLEALKRVQQLEKDGEVQEEIQKGLAFFAERLKG

SEQ ID NO: 79568 - protein, 381 aa, Planococcus maitriensis
  REGION 1..381: note = tr|A0A365K3M1|A0A365K3M1_9BACL tRNA epoxyqueuosine(34) reductase QueG OS=Planococcus maitriensis OX=221799 GN=queG PE=4 SV=1
MNLDQFQQQLVAYASEIGIDKIGFASAEPFFNLKHRLIRQQQLNFQSGFEESDVEKRTRPELLMEEPVSIIAIAIAYPSKMGGAKQGVKGARRGIFSRSSWGQDYHSALRERLALLESFIAAHYPDARMKSMVDTGELSDRAVAERAGIGWSAKNTNIITPEFGSYVYLGEMITNIPFEYDEPMEDQCGDCRLCIDTCPTGAIVEGGQLNAQRCISFLTQTKGFLPDEFRSKIGNRIYGCDTCQTVCPKNKRKANRIHPEFDPDPEIAKPLLEPLLTISNREFKEKFGHVSGSWRGKKPIQRNAILALAHFKEQSAVPTLIELMNTDPRPVIRGTAAWAIGRIGTDEGRQALEHAQQQEKDEEVLAEIAKGLAFFSAETKG

SEQ ID NO: 79569 - protein, 381 aa, Planococcus maritimus
  REGION 1..381: note = tr|A0A150W3D7|A0A150W3D7_PLAMR Epoxyqueuosine reductase OS=Planococcus maritimus OX=192421; GN = AY633_13240 PE=4 SV=1
MNLDQFQQQLVAYASEIGIDKIGFASAEPFFNLKHRLIRQQQLNFQSGFEESDVEKRTRPELLMEEPVSIIAIAIAYPSKMEGATPGVKGARRGIFSRSSWGKDYHAALRDRLALLESFIAAHYPEARMKSMVDTGELSDRAVAERAGIGWSAKNTNIITPEFGSYVYLGEMITNIPFAYDEPLEDQCGDCRLCIDTCPTGAIVEGGQLNAQRCISFLTQTKGFLPDEFRSKIGNRIYGCDTCQTVCPKNKRKANRIHPEFDPDPDIAKPLLEPLLTISNREFKEKFGHVSGSWRGKKPIQRNAILALAHFKEQSAVPTLIDLMKADPRPVIRGTAAWALGRIGIDEGRQALERARQQETDEEVLAEIEKGLAFFSAETKG

SEQ ID NO: 79570 - protein, 381 aa, Planococcus maritimus
  REGION 1..381: note = tr|A0A1C7DYX8|A0A1C7DYX8_PLAMR tRNA epoxyqueuosine(34) reductase QueG OS=Planococcus maritimus; OX = 192421 GN=BBI11_06005 PE=4 SV=1
MNLDQFQQQLVAYAAEIGIDKIGFASAEPFFNLKHRLIRQQQLNFQSGFEESDVEKRTRPELLMEEPVSIIAIAIAYPSKMEGATPGVKGARRGIFSRSSWGKDYHAALRDRLALLESFIAAHYPEARMKSMVDTGELSDRAVAERAGIGWSAKNTNIITPEFGSYVYLGEMITNIPFAYDEPMEDQCGDCRLCIDTCPTGAIVEGGQLNAQRCISFLTQTKGFLPDEFRSKIGNRIYGCDTCQTVCPKNKRKANRIHPEFDPDPDIAKPLLEPLLTISNREFKEKFGHVSGSWRGKKPIQRNAILALAHFKEQSAVPTLIDLMKADPRPVIRGTAAWALGRIGVDEGRQALEHARQQEIDEEVLAEIEKGLTFFSAETKG

SEQ ID NO: 79571 - protein, 381 aa, unidentified
  source 1..381: note = Planococcus massiliensis
  REGION 1..381: note = tr|A0A098EMK7|A0A098EMK7_9BACL Epoxyqueuosine reductase OS=Planococcus massiliensis OX=1499687 GN=queG; PE = 4 SV=1
MNLDQFQEELVAYASEIGIDKIGFASAEPFYNLKHRLIRQQQLKFQSGFEEPDIEKRVRPDLLLDEAVSIIAIAIAYPSKMKDAPQGVKGARRGIFSRSSWGKDYHAALRERLVLLEAFIAAHYPEARMRSMVDTGELSDRAVAERAGIGWSAKNTSIITPEFGSYVYLGEMITNIPFRFDEPMEDQCGDCRLCIDVCPTGAIVEGGQLNATRCISFLTQTKGFLPDEFRGVIGNRLYGCDTCQTVCPKNKRKANQLHAEFEPDPEIAKPLLEPLLTISNKEFKAKFGYVSGSWRGKKPIQRNAILALAHFKEESAVPALIELLKSDERPVIRGTAAWAIGKIGTESGLEALKQAQLDEQDSEVAEEIQKGLAFYAEELKG

SEQ ID NO: 79572 - protein, 381 aa, Planococcus plakortidis
  REGION 1..381: note = tr|A0A1C7E4G4|A0A1C7E4G4_9BACL tRNA epoxyqueuosine(34) reductase QueG OS=Planococcus plakortidis OX=1038856 GN=BBI15_00825 PE=4 SV=1
MNLDQFQQQLVAYAAEIGIDKIGFASAEPFFNLKHRLIRQQQLNFQSGFEESDVEKRTRPELLMEEPVSIIAIAIAYPSKMDGAKQGVKGARRGIFSRSSWGKDYHAALRDRLALLESFIAAHYPDARMKSMVDTGELSDRAVAERAGIGWSAKNTNIITPEFGSYVYLGEMITNIPFEYDEPMEDQCGDCRLCIDTCPTGAIVEGGQLNAQRCISFLTQTKGFLPDEFRSKIGNRIYGCDTCQTVCPKNKRKVNRIHPEFDPDPEIAKPLLEPLLTISNREFKEKFGHVSGSWRGKKPIQRNAILALAHFKEQSAVPTLIELMNTDPRPVIRGTAAWAIGRIGTDGGRQALEHALQQEKDEEVLDEIAKGLAFFSAETKG

SEQ ID NO: 79573 - protein, 381 aa, Planococcus rifietoensis
  REGION 1..381: note = tr|A0A0U2YSS3|A0A0U2YSS3_9BACL Epoxyqueuosine reductase OS=Planococcus rifietoensis OX=200991; GN = AUC31_04915 PE=4 SV=1
MNLDQFQQQLVAYAAEIGIDKIGFASAEPFFSLKHRLIRQQQLNFQSGFEESDVEKRTRPELLMEEPVSIIAIAIAYPSKMEGATPGVKGARRGIFSRSSWGKDYHAALRDRLALLEAFIAAHYPEARTKSMVDTGELSDRAVAERAGIGWSAKNTNIITPEFGSYVYLGEMITNIPFEYDEPMEDQCGDCRLCIDTCPTGAIVEGGQLNAQRCISFLTQTKGFLPDEFRSKIGNRIYGCDTCQTVCPKNKRKANRIHPEFDPDPEIAKPLLEPLLTISNREFKEKFGHVSGSWRGKKPIQRNAILALAHFKEQSAVPTLIELMNTDPRPVIRGTAAWAIGRIGTDEGRQALELARQQEKDEEVLAEIEKGLAFFSAETKG

SEQ ID NO: 79574 - protein, 381 aa, unidentified
  source 1..381: note = Planococcus salinus
  REGION 1..381: note = tr|A0A3M8P8B2|A0A3M8P8B2_9BACL tRNA epoxyqueuosine(34) reductase QueG OS=Planococcus salinus; OX = 1848460 GN=queG PE=4 SV=1
MNLDQFQKELVAYASEIGIDKIGFASAEPFYNLKHQLIRQQQLNYQSGFEEPDVEKRTRPELLLNEAVSIIAIAIAYPSKMKDAPQGVRGARRGIFSRSSWGRDYHAALKERLTLLEAFIAAHYPEARMRSMVDTGELSDRAVAERAGIGWSAKNTNIITPEFGSYVYLGEMITNIPFQPDEPMEDQCGDCRLCIDTCPTGAIVEGGQLNAQRCISFLTQTKGFLPDEFRDKIGNRLYGCDTCQTVCPKNKRKANRIHPEFEPDPEIAKPLLEPLLKISNREFKGKFGYVSGSWRGKKPIQRNAILALAHFKEADAVPALIDLLQSDERPVIRGTAAWALGKIGTIEGLESLREVEKTEKDEEVQEEIQKGLAFFAEGLKG

SEQ ID NO: 79575 - protein, 381 aa, Planococcus sp.; identical to SEQ ID NO: 79567
  REGION 1..381: note = tr|A0A5B0CT11|A0A5B0CT11_9BACL tRNA epoxyqueuosine(34) reductase QueG OS=Planococcus sp. ANT_H30 OX=2597347 GN=queG PE=4 SV=1

SEQ ID NO: 79576 - protein, 381 aa, Planococcus sp.
  REGION 1..381: note = tr|A0A1Q2KWJ7|A0A1Q2KWJ7_9BACL tRNA epoxyqueuosine(34) reductase QueG OS=Planococcus sp. Y42; OX = 2213202 GN=B0X71_05050 PE=4 SV=1
MNLDEFQDKLVAYAHEIGIDKIGFTNAAPFFSLKHRLIRQQELNYQSGFEEPDIEKRTQPKLLLDEAVSIISIAIAYPSKMENAPTGKKGARRGIFARASWGIDYHTALRERLRLLEAFIAAHYPDARMRSMVDTGELSDRAVAERAGIGWSAKNCAVITPEFGSYVYLGEMITNLPFREDEPMEDQCGDCRLCLDVCPTGALIEGGQLNAQRCIAFLTQTKGSLPDEFRAKIGNRLYGCDTCQTVCPKNKGKANRIHEEFEPDPEIAKPLLEPLLNLSNREFKDRFGHVSGAWRGKKPIQRNAILALAHFKEQSAVPALIGVMERDPRPVIRGTAAWALGKIGTAEGLEALKQAEQRETDAEALEEIRKGLAFFAEELKG

SEQ ID NO: 79577 - protein, 381 aa, unidentified
  source 1..381: note = Planococcus versutus
  REGION 1..381: note = tr|A0A1B1RYI6|A0A1B1RYI6_9BACL tRNA epoxyqueuosine(34) reductase QueG OS=Planococcus versutus; OX = 1302659 GN=I858_002895 PE=4 SV=1
MNLEQFQKDIVAYASDIGIDKIGFASAEPFYSLKHQLIRQQQLNYQSGFEESDVEKRTRPELLLNEAVSIIAIAIAYPSKMVDAPQGVKGARRGIFSRSSWGKDYHAALRERLTLLEAFIASRYPEARMRSMVDTGELSDRAVAERAGIGWSAKNTNIITPEFGSYVYLGEMITNIPFRFDEPMEDQCRDCRLCIDSCPTGAIVEGGQLNAQRCISFLTQTKGFLPDEFRSKIGNRLYGCDTCQTVCPKNKRKANQIHAEFDPDPEIAKPLLEPLLAISNREFKDKFGYVSGSWRGKKPIQRNAILALAHFKEQSAVPVLIQLLQSDERPVIRGTAAWAIGKIGTDEGLKALKQVQQLEKDGEVQEEIQKGLAFFAERLKG

SEQ ID NO: 79578 - protein, 381 aa, Planomicrobium glaciei
  REGION 1..381: note = tr|A0A1G8DN36|A0A1G8DN36_9BACL Epoxyqueuosine reductase OS=Planomicrobium glaciei OX=459472; GN = SAMN04487975_10625 PE=4 SV=1
MNLDQFQKDLVAYASEIGIDKIGFASAEPFYNLRHRLIRQQQLNYQSGFEEPDIDKRTRPALLLDEAVSIIAIAIAYPSKMKDAPQGVKGARRGIFSRSSWGKDYHAALRERLTLLEAFIAAHYPDARMRSMVDTGELSDRAVAERAGIGWSAKNTSIITPEFGSYVYLGEMITNIPFRFDEAMEDQCGDCRLCIDVCPTGAIVEGGQLNAQRCISFLTQTKGFLPDEFRTVIGNRLYGCDTCQTVCPKNKRKANGIHPEFEPDPEIAKPLLEPLLTISNREFKSKFGYVSGSWRGKKPIQRNAILALAHFKEESAVPALIELLIKDDRPVIRGTAAWALGKIGTEEGLQALKQAQHTEQDEDTLAEIQKGLAFFAEELKG

SEQ ID NO: 79579 - protein, 381 aa, unidentified
  source 1..381: note = Planomicrobium soli
  REGION 1..381: note = tr|A0A2P8G9D6|A0A2P8G9D6_9BACL Epoxyqueuosine reductase OS=Planomicrobium soli OX=1176648 GN=B0H99_11314; PE = 4 SV=1
MNLEGFQQELVAYASEIGIDKIGFASAEPFYNLRHRLIRQQQLKYQSGFEEPDIDKRTRPDLLLDEAVSIIAIAIAYPSKMKDAPQGVRGARRGIFSRSSWGKDYHAALRERLTLLEAFIAAHYPEARMRSMVDTGELSDRAVAERAGIGWSAKNTNIITPEFGSYVYLGEMITNIPFRFDEPMEDQCGDCRLCIDSCPTGAIVEGGQLNAQRCVSFLTQTKGFLPDEFRTVIGNRLYGCDTCQTVCPKNKRKANQIHPEFDPDPEIAKPLLEPLLTISNKEFKAKFGYVSGSWRGKKPIQRNAILALAHFKEASAVPALIELLIRDERPVIRGTAAWAIGKIGTDEGLLALKQAEQREQDEEVLEEIQKGLAFFAEELKG

SEQ ID NO: 79580 - protein, 381 aa, Planomicrobium sp.
  REGION 1..381: note = tr|A0A5C5TA65|A0A5C5TA65_9BACL tRNA epoxyqueuosine(34) reductase QueG OS=Planomicrobium sp. CPCC 101079 OX=2599618 GN=queG PE=4 SV=1
MNLEGFQQELVAYASEIGIDKIGFASAEPFYNLRHRLLRQQQLKYQSGFEEPDIDKRTRPDLLLDEAVSIIAIAIAYPSKMKDAPQGVKGARRGIFSRSSWGKDYHAALKERLTLLEAFIAAHYPDARMRSMVDTGELSDRAVAERAGIGWSAKNTNIITPEFGSYVYLGEMITNIPFRFDEPMEDQCGDCRLCIDSCPTGAIVEGGQLNAQRCISFLTQTKGFLPDEFRTVIGNRLYGCDTCQTVCPKNKRKANQIHAEFEPDPEIAKPLLEPLLSISNKEFKAKFGYVSGSWRGKKPIQRNAILALAHFKEEGAVPALIDLLINDDRPVIRGTAAWAIGKIGTAEGLIALKQAGQKEQDEEVLEEIHKGLAFFAEKLKG

SEQ ID NO: 79581 - protein, 381 aa, Planomicrobium sp.
  REGION 1..381: note = tr|A0A3L7J926|A0A3L7J926_9BACL tRNA epoxyqueuosine(34) reductase QueG OS=Planomicrobium sp. Y74 OX=2478977 GN=queG PE=4 SV=1
MNLEQFQKELVAYASEIGIDKIGFASAEPFFNLKHQLIRQQQLQYQSGFEEQDVEKRTHPELLLEEAVTIIAIAIAYPSKMNDAPQGTKGARRGIFSRSSWGKDYHAALRERLTLLEAFIAAHYPDARMRSMVDTGELSDRAVAERAGIGWSAKNTNIITPEFGSYVYLGEMITNIPFTLNEPMEDQCGDCRLCIDTCPTGAIVEGGQLNAQRCISFLTQTKGFLPDEFRSKIGNRLYGCDTCQTVCPKNKRKANQIHAEFEPDPEIAKPLLEPLLKISNREFKEKFGYVSGSWRGKKPIQRNAILALAHFKEVSAVPALIDLLESDERPVIRGTAAWAIGRIGTAEGLHALKKAEEQEKDSEVLGEIQKGLAFFAEESKG

SEQ ID NO: 79582 - protein, 360 aa, Plasticicumulans acidivorans
  REGION 1..360: note = tr|A0A317MWT6|A0A317MWT6_9GAMM Epoxyqueuosine reductase OS=Plasticicumulans acidivorans OX=886464; GN = queG PE=3 SV=1
MPANTLDPAAAAALLARIRDWGRELGFRQIGVAGIELAEAEARLFDWLAQGYHGEMNYMARHGALRARPAELVPGTLRVLSARLDYWPGAARGAWSVLADGQLAYLSRYALGRDYHKVVRRRLQQLAERIAAAIGPFGYRVFTDSAPVMEKPLAAQAGLGWVGKHSNLLARDGSWFFLGEMLIDLPLPVAAPPAAHCGRCRACIDVCPTQAIVAPYVVDARRCISYLTIELHGPIPLEFRRAIGNRVVGCDDCQLVCPWNRFAQPSTEADFLPRHGLDAATLVELFAWDEATYLARSEGMALRRLGYARWKRNLAVALGNAPGTPAVLAALAARRDDADAVVREHVAWALAEQAQRCGRL

SEQ ID NO: 79583 - protein, 362 aa, unidentified
  source 1..362: note = Plasticicumulans lactativorans
  REGION 1..362: note = tr|A0A4R2L6Q5|A0A4R2L6Q5_9GAMM Epoxyqueuosine reductase OS=Plasticicumulans lactativorans OX=1133106; GN = queG PE=3 SV=1
MPTPTPPPALPDAAALAARIKAWGRELGFQRVGIADVDLREAETRLLDWLAAGHHGQMDYMARHGTRRARPAELVPGTLRVISARMDYWPAAAAPAWDVLGDGSRAYVARYALGRDYHKVLRRRLAELARRIEAAIGPFGHRAFTDSGPVLEKPLAAKAGLGWVGKHSNLLARDAGSWFFLGEILVDVALPVDAPVSAHCGSCTACIEVCPTQAIVAPHVVDARRCIAYLTIEHHGPIPEALRPALGNRIFGCDDCQLVCPWNRYATPTPEADFIPRHGLDAASLVELFGWDEATWLARTEGMALRRVGHERWLRNLAVALGNAPRSPQVLAALHARAGHPSTLVREHVAWALARLADGTTT

SEQ ID NO: 79584 - protein, 180 aa, Plautia stali
  REGION 1..180: note = tr|U3TV72|U3TV72_9ENTR Putative iron-sulfur cluster binding protein OS=Plautia stali symbiont OX=891974; GN = E05_29690 PE=4 SV=1
MTICPTGAIVEPYVVDARRCISYLTIELEGAIPEALRPLIGNRIYGCDDCQLICQWNRYGQLTDEEDFSPRAVLHAPQLVELFGWDEARFLRVTEGSAIRHIGHLRWLRNVAVAQGNAPWAPANLTALEQRRGEHPLLDEHIDWAIAQQRQKRAAQAVEVQSAQQQRLVRAVEKGLPRDA

SEQ ID NO: 79585 - protein, 225 aa, Plautia stali
  REGION 1..225: note = tr|U3U0I9|U3U0I9_9ENTR Iron-sulfur cluster binding protein OS=Plautia stali symbiont OX=891974 GN=E05_29700; PE = 4 SV=1
MACAGQTECGKLRAFASIAWSLMSYPLDLQQLAQQIKQWGRELGFQQVGICDTDLSAEEPKLQQWLEKQYHGEMDWMARHGMMRARPHELLPGTLPGTLRVISVHMNYLPAKAAFASTLKNPQLGYVSRYALGRDYHKLLRNRLKKLGEKIQAHCGELNFCPFVDSAPILERPIAVKAGLGWTGKHSLVLNREAGSWFFLGELLIDLPLPWMSRSKSSAAAASPA

SEQ ID NO: 79586 - protein, 381 aa, unidentified
  source 1..381: note = Pleionea mediterranea
  REGION 1..381: note = tr|A0A316FMG6|A0A316FMG6_9GAMM Epoxyqueuosine reductase OS=Pleionea mediterranea OX=523701 GN=queG PE=3; SV = 1
MTSLSSPKQLKAYIKQQATSLGFQQCGVAQADIPSHVEKYKEWLKQGYHGDMGYMADREALRSDPTSLVPGTLSVISVRLNYVPTPAKFAETLEDSSKAIVSRYALGRDYHKLMRKKLAKLAKQLEQLSENLSYRVFVDSAPVLERAYGEEAGLGWIGKNTMLINESEGSFFFLGEILTNLPLEADEKPENLCGKCTSCISICPTQAIVAPYTVDARKCISYLTIEHFGSIPESLRPLMGNRIYGCDDCQLVCPWNRYAKATDIDDFSPRHGLDNIELLELFLWSEETFLKNFEGSPIRRIGFERWQRNISIALGNAEYSPRILEALNQCLNTTDSDLIKEHVTWAIKQQQNKKQTIAISEPDNNQKKLIRTTRKIVKHLE

SEQ ID NO: 79587 - protein, 338 aa, unidentified
  source 1..338: note = Pleomorphomonas carboxyditropha
  REGION 1..338: note = tr|A0A2G9WT31|A0A2G9WT31_9RHIZ Epoxyqueuosine reductase OS=Pleomorphomonas carboxyditropha OX=2023338; GN = queG PE=3 SV=1
MNWRARARDLGFSAIGVAPVDRLGEAARRLRTFVDLGRHGSMAWMEETLERRADPRVLWPEARSAVVLAMNYGPDSDPLANLARPAVGNISVYARHRDYHDVLKGRLKEVAGLIARDTGADVKVFVDTAPLMEKPLAALAGVGWQGKHTNLVSRDFGSWLLLGVILSAADLPPDEPANDRCGACRRCLDACPTGALPAPYQIDARLCISYLTIEHAGPIPEDLRPLIGNRIYGCDDCLAVCPWNKFASEAAEMKLRPRPELTAPSLTALAALDDAAFRALFSGSPVKRIGRNRFVRNVAIAIGNSGDPALAPALTPLLDDPDPVVAEAARWAIDRLPP

SEQ ID NO: 79588 - protein, 352 aa, unidentified
  source 1..352: note = Pleomorphomonas diazotrophica
  REGION 1..352: note = tr|A0A1I4SQC4|A0A1I4SQC4_9RHIZ Epoxyqueuosine reductase OS=Pleomorphomonas diazotrophica OX=1166257; GN = queG PE=3 SV=1
MSWQARAHDLGFSAIGIAPVDRLGEAARRLRAFVDLGRHGSMAWMEETLDRRADPRVLWPEARSAVVLALNYGPDRDPLENLAKPDIGNISVYARHRDYHEVIKGRLKEVASLLARETGADVKVFVDTAPLMEKPLAALAGVGWQGKHTNLVSRDFGSWLFLGVILSAADLPPDESAADRCGACRRCLDACPTGAFPAPYQIDARRCISYLTIEHAGPIPEALRPLMGNRIYGCDDCLAVCPWNKFASAAAEMKLQARPDLTAPSLAALAALDDAAFRVLFAGSPVKRIGRNRFVRNVAIAIGNSDDPTLAPALAPLLGDPDPVVADAARWAADRLVPPERESFGVSISPHP

SEQ ID NO: 79589 - protein, 346 aa, Pleomorphomonas sp.
  REGION 1..346: note = tr|A0A4R8FJ78|A0A4R8FJ78_9RHIZ Epoxyqueuosine reductase OS=Pleomorphomonas sp. CF100 OX=2135722 GN=queG; PE = 3 SV=1
MSWRGRARDLGFSAVGIAPVDGLGEAAFRLRAFVELGRHGSMAWMEETLDRRADPRVLWPEARSAVVVAMNYGPDGDPLDNLSKRSVGNISVYARHRDYHDVLKGRLKEVAGLVARETGADVKVFVDTAPLMEKPLAALAGVGWQGKHTNVVSRDFGSWLFLGVILSAADLPASEPAGDHCGACRRCLDACPTGAFPAPYQIDARRCVSYLTIEHAGPIPEEMRPMIGNRIYGCDDCLAVCPWNKFASQAAEMKLRPRPELMEPSLAALAALDDASFRTLFSGSPVKRIGRNRFVRNVAIAIGNSGDQALVLALMPLIDDPDPVVAEAAEWALGCLAPQGNPRKCS

SEQ ID NO: 79590 - protein, 339 aa, Pleomorphomonas sp.; identical to SEQ ID NO: 78888
  REGION 1..339: note = tr|A0A2Z6I4K9|A0A2Z6I4K9_9RHIZ Epoxyqueuosine reductase OS=Pleomorphomonas sp. SM30 OX=1885025 GN=queG; PE = 3 SV=1

SEQ ID NO: 79591 - protein, 363 aa, Plesiocystis pacifica
  REGION 1..363: note = tr|A6GE52|A6GE52_9DELT 4Fe-4S ferredoxin, iron-sulfur cluster binding protein OS=Plesiocystis pacifica SIR-1 OX=391625 GN=PPSIR1_33541 PE=4 SV=1
MSARLLDEDLAILRDSARALGFAALGAVRLDHPGFEPARAALEAYLDAGWAGEMAFMERTRDLRGDPGQMLDLDARRGTALVGLVPYAGEPGPVARYAQWADYHTEVHRRLEGLGRALVERVGPCETLVCVDTKPVLERSAAVLAGLGFIGKSGCLIAPGLGSYVLIGVLLTDADWAGTDLGARWAEPAGDALPWDACGSCRACLDACPTDAFAAPGSLDPRRCVAYLTIEHRAPIPEDLAKDMGQRVAGCDVCQEVCPYNRSTTRGSRLPPGAELPRPLGRPREPDLPRLATIGSNQYRQFVKGTALNRIPKRSMQRNALIALGNGEGPLDPREREAIEAVLDGDNEALRTLAERALRRRGS

SEQ ID NO: 79592 - protein, 398 aa, Plesiomonas shigelloides
  REGION 1..398: note = tr|A0A2P1VS41|A0A2P1VS41_PLESH Epoxyqueuosine reductase OS=Plesiomonas shigelloides OX=703 GN=queG PE=3; SV = 1
MTSSSATPAAPDLVQLAQSIKQWGKSLGFQQVGICLPDLREHEPRLQAWLDNHYHGEMGWMASHGMMRARPSELHPGTLRVISVRMNYLPPDARFAKVLRDPLSGYISRYALGRDYHKLLRQRLKQLGEKIQAEVGALGFRPFVDSAPILERPLAANAGLGWVGKHSLLLNREAGSWFFLGELLVDLPLPVDAPVEQECGRCVACMTTCPTGAIVAPYVVDARRCISYLTIESDSAIPLELRRALGNRIYGCDDCQLICPWSRVAPLTEEADFSPRAPLHTPQLLTLWQWDEATFLRLTEGSPIRRIGHRRWLRNLAVALGNAPYQADIVLALQSRLGADELVDEHILWALDEQWQKRSALTISVQPATEQNINTSSVQTTQQRRLVRAIEKGLPRDA

SEQ ID NO: 79593 - protein, 398 aa, Plesiomonas shigelloides
  REGION 1..398: note = tr|R8AM24|R8AM24_PLESH Epoxyqueuosine reductase; OS = Plesiomonas shigelloides 302-73 OX=1315976 GN=queG PE=3; SV = 1
MTSSSATPAAPDLVQLAQSIKQWGKSLGFQQVGICLPDLREHEPRLQAWLDNHYHGEMGWMASHGMMRARPSELHPGTLRVISVRMNYLPPDARFAKVLRDPLSGYISRYALGRDYHKLLRQRLKQLGEKIQAEVGALGFRPFVDSAPILERPLAANAGLGWVGKHSLLLNREAGSWFFLGELLVDLPLPVDTPVEQECGRCVACMTTCPTGAIVAPYVVDARRCISYLTIESDSAIPLELRRALGNRIYGCDDCQLICPWSRVAPLTEEADFSPRAHLHTPQLLTLWQWDEATFLRLTEGSPIRRIGHRRWLRNLAVALGNAPYQADIVLALQSRLGADELVDEHIQWALDEQWQKRSALAISVQPATEQNINASSVQTPQQRRLVRAIEKGLPRDA

SEQ ID NO: 79594 - protein, 184 aa, Pleurocapsa sp.
  REGION 1..184: note = tr|A0A2T1CC58|A0A2T1CC58_9CYAN tRNA epoxyqueuosine(34) reductase QueG (Fragment); OS = Pleurocapsa sp. CCALA 161 OX=2107688 GN=queG PE=4 SV=1
AVDTAPVQDKVWAQRAGLGWIAKNGNVITRKYGSWVFLGEVLTNLSLSADHVHTSHCGSCTRCLEACPTGAITQPYVVDANRCIAYHTIENRDPELPPNIAAHLSGWVAGCDICQDVCPWNQRFAQETDVDDFRPYPGNLQPQLSKLAQLDRIEWDRQFPASALRRIKPDMWRRNARANLNEDK

SEQ ID NO: 79595 - protein, 309 aa, Pleurocapsa sp.
  REGION 1..309: note = tr|K9TB05|K9TB05_9CYAN Epoxyqueuosine reductase; OS = Pleurocapsa sp. PCC 7327 OX=118163 GN=queG PE=3 SV=1
MTLDSLQIKEKALSLGFHQVGIAAIANDPDDSAVARLQAWLALGYHADMAWMANSKRFDIRACMSEVQSVICVALNYYTPHQRPEGKEYGKISRYGWGRDYHKVMHKKLKAFSQWLEAQAEGIQTRYYADTGPVQDKVWAQRAGIGWIAKNGNVITREYGSWVFLGEILTNIALKPDTPHAEHCGTCTRCLEACPTGAIAKPFVVDANRCIAYHTIENRAEELPASIASHLSNWIAGCDICQDVCPWNQRFAKETNIADFQPYPWNIGPKLRELAEMSDEEWERRFPASALRRIKPAMLRRNARANLNK

SEQ ID NO: 79596 - protein, 379 aa, unidentified
  source 1..379: note = Pluralibacter gergoviae
  REGION 1..379: note = tr|A0A251ZKP2|A0A251ZKP2_PLUGE Epoxyqueuosine reductase OS=Pluralibacter gergoviae OX=61647 GN=queG PE=3; SV = 1
MSQLLDLNQLAQQIKQWGAGLGFQQVGITDTDLSASEPKLQAWLDKQYHGEMTWMARHGMMRARPHELQPGTLRVISVRMNYLPANAAFARTLKNPDLGYVSRYALGRDYHKLLRNRLKKLGEKIQAHCSPLNFRPFVDSAPILERPIAEKAGLGWTGKHSLILSRDAGSFFFLGELLIDLPLPVDKPQAENCGRCVACMTICPTGAIVEPYTVDARRCISYLTIELEGAIPEAFRPLIGNRIYGCDDCQLICPWNRYSQLTDEEDFSPRQALHAPALTELFAWSEAHFLKVTEGSAIRRIGHLRWLRNIAVALGNAPWREENLAALTSRRGEHPLLDEHIEWAIAQQIDKRNACAVEVQLPQKQRLVRVIEKGLPRDA

SEQ ID NO: 79597 - protein, 379 aa, unidentified
  source 1..379: note = Pluralibacter gergoviae
  REGION 1..379: note = tr|A0A0J5L8T1|A0A0J5L8T1_PLUGE Epoxyqueuosine reductase OS=Pluralibacter gergoviae OX=61647 GN=queG PE=3; SV = 1
MSQLLDLNQLAQQIKQWGAGLGFQQVGITDTDLSASEPKLQAWLDKQYHGEMAWMARHGMMRARPHELQPGTLRVISVRMNYLPANAAFARTLKNPDLGYVSRYALGRDYHKLLRNRLKKLGEKIQEHCSPLNFRPFVDSAPILERPIAEKAGLGWTGKHSLILSRDAGSFFFLGELLIDLPLPVDKPQAESCGRCVACMTICPTGAIVEPYTVDARRCISYLTIELEGAIPEAFRPLIGNRIYGCDDCQLICPWNRYSQLTDEEDFSPRQALHAPALTELFAWSEAHFLKVTEGSAIRRIGHLRWLRNIAVALGNAPWREENLAALTGRRGEHPLLDEHIEWAIAQQIDKRNACAVEVQLPQKQRLVRVIEKGLPRDA

SEQ ID NO: 79598 - protein, 358 aa, unidentified
  source 1..358: note = Pokkaliibacter plantistimulans
  REGION 1..358: note = tr|A0A318C1P0|A0A318C1P0_9GAMM Epoxyqueuosine reductase OS=Pokkaliibacter plantistimulans OX=1635171; GN = queG PE=3 SV=1
MTTLSTQQLVDLTEKIRLWARDLGFQDMGISSLDLGDHPEHMRQWVEKGLHGEMSYLENNQELRRNPALLHEGTLSIISVRMDYLPPETQALKILNSPAKAYVSRYALGRDYHKVIRKRLTQLAKQIEQDVSALGYRAFVDSAPVMEKPIAEQAGLGWMGKNSLIMNRKAGSWFFLGELFTNLPLISTAQPVKEHCGRCSACMDLCPTNAFIGPKQLDARRCISYLTIEYRGSIPTELRPLMGNRIYGCDDCQLVCPWNRFASSTPEQDFHPRHSLDSADLLTLFEWDEATFLTNTEGSPIRRTGYEGWQRNIAIALGNAPFSTSILGALQSRLTSCSTLVGEHIEWAISQQLCKAEA

SEQ ID NO: 79599 - protein, 306 aa, Polaribacter gangjinensis
  REGION 1..306: note = tr|A0A2S7WE17|A0A2S7WE17_9FLAO Epoxyqueuosine reductase OS=Polaribacter gangjinensis OX=574710 GN=queG; PE = 3 SV=1
MKAKYSQFIKQEAKRLGFLACGIAKAEFLEAEAPRLENWLQKGFQGEMKYMENHFDKRLDPRLLVDDAKSVISLSYNYYPEKQQTNDSYKIAKYAYGEDYHFVIKEKLRELLASIQQEIGEVSGRCFVDSAPILERAWAEKAGLGWNGKHSLLIQKQQGSFFFLAELIVDLELEYDQPTNTNHCGSCTKCIDACPTEAILPNNTIDGSKCISYFTIELKDNIPTDFKNKMDDWMFGCDICQDVCPWNRFSTPHQEPLFHPKEEILQFTKRDWEEITEETFQKVFQKSAVKRTKFSGLQRNIQFLKD

SEQ ID NO: 79600 - protein, 307 aa, unidentified
  source 1..307: note = Polaribacter porphyrae
  REGION 1..307: note = tr|A0A2S7WPE5|A0A2S7WPE5_9FLAO Epoxyqueuosine reductase OS=Polaribacter porphyrae OX=1137780 GN=queG; PE = 3 SV=1
MPKAKYSQFIKQEAKRLGFLDCGIAKADFLEDEAPKLEKWLKNGFQGKMQYLENHFDKRLDPRLLVDDAKSVISLSYNYYPEKEQNKNSYHISKYAYGEDYHHVIKQKLRELLQAINDKIGEISGRCFVDSAPVLERAWAEKAGLGWNGKHSLLIQKQKGSFFFLAELIIDLELEYDHQTTTNHCGTCTKCIDACPTEAILPNNTVDGSKCISYLTIELKENIPNQFKDKMENWIFGCDICQDVCPWNRFSKPHNEPLFAPKEELLKMNKKDWEEITEDIFKKVFKKSAVKRTKFAGLQRNIRFLKD

SEQ ID NO: 79601 - protein, 313 aa, Polaribacter sp.; identical to SEQ ID NO: 76769
  REGION 1..313: note = tr|A0A0R2T1F7|A0A0R2T1F7_9FLAO Epoxyqueuosine reductase OS=Polaribacter sp. BACL8 MAG-120531-bin13; OX = 1655554 GN=queG PE=3 SV=1

SEQ ID NO: 79602 - protein, 332 aa, Polaromonas naphthalenivorans
  REGION 1..332: note = tr|A1VLG0|A1VLG0_POLNA Putative iron-sulfur cluster binding protein OS=Polaromonas naphthalenivorans (strain CJ2) OX=365044 GN=Pnap_1172 PE=4 SV=1
MDLSSAEPGLSAWLAAGFHGGMHYMEAHGLKRARPAELVPGTVSVITARMDYLPAATPTQPGQWQAMEFSRLQRPGEGIVSSYARGRDYHKVMRARLQKLAERIGEHVGPFGHRAFTDSAPVLEAELASRSGQGWRGKHTLVLNREAGSMFFLGEIYVDIALPPSAPVTAHCGSCRACIDICPTQAIIAPYQLDARRCISYLTIEHAGPIPLELRRLMGNRIYGCDDCQLACPWNKFAQRSSLPDFDERQGLSGQQLATLFGWTEEAFLRFTEGSPIRRIGHERWLRNIAVAMGNALRAGVADEAGLRASLRGRAGHPSEVVREHVAWALGQ

SEQ ID NO: 79603 - protein, 371 aa, Polaromonas sp.
  REGION 1..371: note = tr|A0A389MHH8|A0A389MHH8_9BURK Epoxyqueuosine reductase OS=Polaromonas sp. OX=1869339 GN=queG PE=3 SV=1
MAISNHLNGHLLVSQIQTWARELGFSQIGIAGVDLSSAEAGLSAWLAAGFHGDMHYMAAHGLKRARPAELIPGTVSVITARMNYLPRATSTLPGEWQGMELSRLVRPGEGIVSVYARGRDYHKVMRSRLQKLSERIGEHVAQLGHRAFTDSAPVLEAELAARSGQGWRGKHTLVLNREAGSMFFLGEIYVDIALPPSAAVTAHCGSCNSCISICPTQAIIAPQTLDARRCISYLTIEHAGPIPLELRPLIGNRIYGCDDCQLICPWNKFAQRSALPDFDERQGLSGQQLLTLFAWTEAEFLRFTEGGPIRRIGHARWLRNIAVAMGNALRSADDAALRASLQACASHPDEVVREHVLWALAQSADVLQGAA

SEQ ID NO: 79604 - protein, 312 aa, Polaromonas sp.
  REGION 1..312: note = tr|A0A1I7FM68|A0A1I7FM68_9BURK Epoxyqueuosine reductase OS=Polaromonas sp. YR568 OX=1855301; GN = SAMN05216350_101581 PE=4 SV=1
MHYMAAHGLKRARPAELIPGTVSVITARMDYLPASTAAVPGEWQALEFSRLERPAEGIVSVYARGRDYHKILRSRLQKLSERISGHVGQLGHRAFTDSAPVLEAELAARSGQGWRGKHTLLLNREAGSMFFLGEIYVDIALPHSEPVTPHCGTCQACIDVCPTRAIIAPHKLDARRCISYLTIEHAGAIPLELRPLMGNRIYGCDDCQLICPWNKFAQRSALPDFDERRGLTGQQLVTLFGWTEEGFLRFTEGSPIRRIGHERWLRNIAVAMGNALRVLDAAQAQPLREALLARASGCGELVTEHVEWALAQ

SEQ ID NO: 79605 - protein, 388 aa, unidentified
  source 1..388: note = [Polyangium] brachysporum
  REGION 1..388: note = tr|A0A0G3BPS4|A0A0G3BPS4_9BURK Epoxyqueuosine reductase OS=[Polyangium] brachysporum OX=413882 GN=queG; PE = 3 SV=1
MHQSELVVDHAALLADIRQWARELGFSQIGVSGVDLSSAEPGLMAWLGEGFHGSMAYMAAHGLKRARPAELVPGTVSVVTARMDYLPRSTEPGWQAVEFERLAQPEAATVSLYARGRDYHKVMRQRLQKLADRMADRLGPFGHRVFTDSAPVLEAELAGRSGQGWRGKHTLVLNRDAGSMFFLGEIYLDLPLPASEPTSGHCGSCQACLDVCPTRAIVAPHRLDARRCISYLTIEHDGPIPVELRALMGNRIYGCDDCQLICPWNKYAQRAELPDFDVRPVLAEPTLLALWAWTEAEFLRHTEGSAIRRIGHERWRRNLAVAMGNALRAAPSADLERALREALPHATPLVAEHIVWALGDQASAVATASQTGIEAMPSSVDNVTRPAT

SEQ ID NO: 79606 - protein, 385 aa, Polyangium fumosum
  REGION 1..385: note = tr|A0A4U1JAE2|A0A4U1JAE2_9DELT tRNA epoxyqueuosine(34) reductase QueG OS=Polyangium fumosum; OX = 889272 GN=queG PE=4 SV=1
MSASDVDQRVRERAFELGFDVVGVARADEPLDVEHDRYRAFIEAGMHGTMRYLEEHVEERRRLDTEAILPGARSVVCVGRRYARSAEAEAYDPEVARGIARYARGQDYHLFLRKKLRRLAEFIRGLGPGIDARPLCDIEPLMERAWAARAGLGFVGKNGLLIVPGQGSFVMLGEVVTTLVLTPGVPMHERCGACTRCLDACPTGAFPKPFVLDARKCISYLTIEQYEAPPEELRAAIGEHLFGCDVCQEVCPYNRTAPPSEARTQQFHPLPRWSEMRLSDLASLEEEAFPETTQGTPLRRARRGGLARNAAIVAANRLARDPAGPSAEDDVRTLEQAAAHDDAAAREVGVWGLLRIGKPVLREPGSSGPDEDIVDPDAPPFAPRR

SEQ ID NO: 79607 - protein, 411 aa, Polyangium sp.
  REGION 1..411: note = tr|A0A4U1HW11|A0A4U1HW11_9DELT tRNA epoxyqueuosine(34) reductase QueG OS=Polyangium sp. SDU3-1; OX = 2567896 GN=queG PE=4 SV=1
MRDHARPAVRLSAIRQPGANAWGGGALVDDRPDVDRQVRQRAIELGFDVVAVARADEPLGVEHERYRAFIEAGMHGAMGYLAQHAEARRRLNGPEILEGARSVVCVGRRYARTSAEEAGDPPLARTVARYARGQDYHVHLRKKLQKLAAFIRGLGPGIEARALCDIEPVMERVWAMRSGLGFVGKHGLVITPGQGSYLLLGEVVTTLSLVPDVPMHERCGSCTRCLDACPTSAFVKPFVLDPRKCIAYLTIEQHEPPAEELREGIGEHLFGCDVCQEVCPYNRTAPPPAERTKQFHPLPRWEGMDLPDLVALDEESFPEATTGTPLRRARREGLARNAVIVAANRLARAPAGPHAEADRAVLERASTHDDPSVREMAAWGRARVEAGSEAHEEAENGGEDRGEGGSVAPSS

SEQ ID NO: 79608 - protein, 354 aa, unidentified
  source 1..354: note = Polycyclovorans sp.
  REGION 1..354: note = tr|A0A2E2J6C1|A0A2E2J6C1_9GAMM Epoxyqueuosine reductase OS=Polycyclovorans sp. OX=2024852 GN=queG PE=3; SV = 1
MALDDIRRHARTLGFADVGVAHLDLGEDLAHLDAYLEAGFHGEMDYLARNIALRASPAALQPGTLSVLSLRMPYLSDTVERAMDTLRDPERAYVSRYALGRDYHKRMRKQLAALAEWMAEALAPHGYRVFCDSAPSLEKALARNAGLGWIGKNTLLLNRDAGSFFFLGEIYTDLVLPPADTDPVPAECGRCQACLKICPTNAFVGPYRLDARRCISYLTIEQRGSIPEPLRRAIGNRIFGCDDCQLVCPWNRYAQRSQAPDFAPRHGLDRPALLDLWAWTQADWHARTEGMALRRAGWSGWRRNLAVALGNAPFSEQVLSALEQGREGADALVAEHIDWAMDEQRQKGQSRAAT

SEQ ID NO: 79609 - protein, 349 aa, unidentified
  source 1..349: note = Polymorphobacter sp.
  REGION 1..349: note = tr|A0A4Y9EN95|A0A4Y9EN95_9SPHN Epoxyqueuosine reductase OS=Polymorphobacter sp. DJ1R-1 OX=2511025; GN = queG PE=3 SV=1
MTDLPAKLAAEAARIGFAAIGIAPATAAPQAGERLRAWLADGRHGDMLWMADTVDRRASPQGLWPEVRSVIMLGTSYAPALDPLRHAGHPDTGVISVYALGSDYHDSIKKRLKALAGWLVTAAGGNVKVFVDTAPVMEKPLAAAAGLGWQGKHTNLVSRDYGSWLLLGAIYTTLDLNADTPARDRCGSCTACQTACPTNAFPAPYQLDARRCISYLTIEHKGPIPAEFRTAIGNRIYGCDDCLAVCPWNKFAQAAHDLTYRPRAELVAPALADLLALDDAGFRAIFAGSPVKRIGRNRMVRNAAIAAGNSGDQSLMPALQTLAADADVVVAEAAGWALEKLSAVPFRVP

SEQ ID NO: 79610 - protein, 373 aa, unidentified
  source 1..373: note = Polymorphum gilvum
  REGION 1..373: note = tr|F2J6U4|F2J6U4_POLGS Epoxyqueuosine reductase; OS = Polymorphum gilvum (strain LMG 25793 / CGMCC 1.9160 / SL003B-26A1) OX=991905 GN=queG PE=3 SV=1
MAALRARAAALGFDALGVAPSDAIPQAPARLRRFLADGHHATMAWMAETEARRADPRVLWPQVRSVIMLAMTYGPDTDPLAHLADPSSAGISVYARNRDYHDIVKGRLKELASLLVARAGGDVKVFVDTAPVMEKPLAEAAGLGWQGRHTNLVSRRLGSWFFLGSIFTTLDLPADGPEADHCGSCRACLDACPTDAFPAPYRLDARRCISYLTIEHDGPIPVEFRKAMANRIYGCDDCLAACPWNKFAQAAREAKLVARSDLVAPRLADLIELDDAAFRQKFAGSPIKRIGRDRFVRNVLVAAGNSGDVGLIPAIRRRLSADSSQVRGAAVWALAQLAPKALFEQEKSTHLAAEDDPAVRAEWLAGAAQPHCQ

SEQ ID NO: 79611 - protein, 364 aa, unidentified
  source 1..364: note = Polynucleobacter aenigmaticus
  REGION 1..364: note = tr|A0A254Q3R9|A0A254Q3R9_9BURK Epoxyqueuosine reductase OS=Polynucleobacter aenigmaticus OX=1743164; GN = queG PE=3 SV=1
MTSSKTPNSFDQANLREWLGEQSKKLGFDGLRITDTHLGVATERLNTWLAEGRHGQMEYMARHAQLRSDPGLLVPGTVRVICVTMNYLSPAIDFDVEWQRLAEPTQAVVSMYARGRDYHKVLRNRLQEFAQIIEKHIGSFGYRVFTDSAPLMEVELARKAGLGWRGKHTLLLNRESGSTFFLGEILVDVPLPVDQEEESHCGTCQSCIEICPTQAITAPYELDARRCISYLTIENPDAIPVEFRKAMGNRVYGCDDCQLICPWNKFAQRTALPDFAERHGLGKASLLQLWSWTEDQFEKRHEGSAIRRIGYSRWRRNLAVALGNAITDEQVATADKVLIREALSSALPMADVLVAEHIEWALSS

SEQ ID NO: 79612 - protein, 364 aa, unidentified
  source 1..364: note = Polynucleobacter asymbioticus
  REGION 1..364: note = tr|A0A1J0D4E2|A0A1J0D4E2_9BURK Epoxyqueuosine reductase OS=Polynucleobacter asymbioticus OX=576611; GN = queG PE=3 SV=1
MPLSANLTSLDEAKLRNWLGEQSHELGFDALRITDTHLGPASDRLQTWLSEGRHGHMEYMQRHADLRSDPQLLVPGTLRVICVSMNYLPPETSFEREWERMADPSQAVVSLYARGRDYHKVLRNRLQEFAKRIEEKIGAFGYRVFTDSAPLMEVELARKAGLGWRGKHTLLLNRESGSTFFLGEILVDIPLPIDTEVEEHCGTCTSCIDICPTQAITAPYQLDARRCISYLTIENPEAIPLEFRRAMGNRVYGCDDCQLICPWNKFAKRTQMPDFVQRHGLGQATLLQLWSWTEAEFEQRHEGSAIRRIGYLRWRRNLAVAMGNALSNPTVPASQKDDIRLALQHGLEGADPLLVEHIDWALSA

SEQ ID NO: 79613 - protein, 364 aa, unidentified
  source 1..364: note = Polynucleobacter asymbioticus
  REGION 1..364: note = tr|A4SWF1|A4SWF1_POLAQ Epoxyqueuosine reductase; OS = Polynucleobacter asymbioticus (strain DSM 18221 / CIP 109841 / QLW-P1DMWA-1) OX=312153 GN=queG PE=3 SV=1
MPLSANLTSLDEAKLRNWLGGQSHELGFDALRITDTHLGPASDRLQTWLSEGRHGHMEYMQRHADLRSDPQLLVPGTLRVICVSMNYLPPETSFEREWERMADPSQAVVSLYARGRDYHKVLRNRLQEFAKRIEEKIGAFGYRVFTDSAPLMEVELARKAGLGWRGKHTLLLNRESGSTFFLGEILVDIPLPIDTEVEEHCGTCTSCIDICPTQAITAPYQLDARRCISYLTIENPEAIPIEFRRAMGNRVYGCDDCQLICPWNKFAKRSQMPDFVQRHGLGQATLLQLWSWTEAEFEQRHEGSAIRRIGYLRWRRNLAVAMGNALSNSTVPASQKDDIRLALQHSLEGADPLLVEHINWALST

SEQ ID NO: 79614 - protein, 366 aa, unidentified
  source 1..366: note = Polynucleobacter campilacus
  REGION 1..366: note = tr|A0A254Q876|A0A254Q876_9BURK Epoxyqueuosine reductase OS=Polynucleobacter campilacus OX=1743163; GN = queG PE=3 SV=1
MSLSTNPSTLDQPKLRAWLGEQAESFGFDDLRITDTHLGIASERLQEWLAEGRHGHMEYMQRHADLRSDPQLLVPGTVRVICVSMNYLPPESDFDAEWQRLEDPSQAVVSMYARGRDYHKVLRNRLQDFAKAIEEKIGAFGYRVFTDSAPLMEVELARKAGLGWRGKHTLLLNRESGSTFFLGEILVDVPLPLDEEQDEHCGTCQSCIDICPTKAITAPYQLDARRCISYLTIENPEAIPVEFRIAMGNRIYGCDDCQLICPWNKFAKRSQLPDFAQRHGLGQASLLHLWSWTEAEFEQRHEGSAIRRIGYSRWRRNLAVAMGNALASPKVTATDKDLIQKALSESLSSADALVAEHIEWALKAYN

SEQ ID NO: 79615 - protein, 393 aa, Polynucleobacter cosmopolitanus
  REGION 1..393: note = tr|A0A229FW98|A0A229FW98_9BURK Epoxyqueuosine reductase OS=Polynucleobacter cosmopolitanus OX=351345; GN = queG PE=3 SV=1
MSIFCHWDLQSHHGAKIVTQTQTTKDHFIQDISWLRREAIDLGFGDIRVSDTDLSVAGPRLKEWLDAGRHGDMNYMRERAHLRLNPQELQPGTVRVLTVRMDYLPDTSEMRQAVDWRNKEIARWDEPSQAVVAMYARGRDYHKVLRQRLQSLADVIEKKIGPFGYRVFVDSGPVMEVEMANKSGLGWRGKHTLLLNREAGSMFFLGEILVDVPFPVDEPITSHCGECSACINICPTQAITAPYQLDARRCISYLTIEHQGSIPEELRPLMGNRVYGCDDCQLVCPWNKFAQLSSVPDFLPRHGLEHADLLNLWSWSEEDFLSKHEGSPIRRIGYEAWRRNLAVGMGNALRSETLDDGVREKIIGGLKQVLPNASDMLKEHIEWALMQTSKVSK

SEQ ID NO: 79616 - protein, 364 aa, unidentified
  source 1..364: note = Polynucleobacter duraquae
  REGION 1..364: note = tr|A0A0E3ZKW4|A0A0E3ZKW4_9BURK Epoxyqueuosine reductase OS=Polynucleobacter duraquae OX=1835254 GN=queG; PE = 3 SV=1
MTSSQIPNSVDQANLREWLGEQSRKLGFDDLCITDTHLGVATERLNDWLAQGRHGQMEYMAKHAQLRSDPTLLVPGTVRVICVTMNYLSPAIDFHHEWDRLKDSAQAVVSMYARGRDYHKVMRNRLQEFAQLIEERIGAFGYRVFTDSAPLMEVELARKAGLGWRGKHTLLLNRESGSTFFLGEILIDVPLPVDQEQESHCGTCQSCIDICPTQAITAPYQLDARRCISYLTIENPDAIPTEFRKAMGNRVYGCDDCQLICPWNKFAQRTALPDFAERHGLGKASLLQLWSWTEDEFEKRHEGSAIRRIGYSRWRRNLAVAMGNALAANDLPESDKDLLRQALQGALPLADALVAEHINWALSC

SEQ ID NO: 79617 - protein, 365 aa, unidentified
  source 1..365: note = Polynucleobacter hirudinilacicola
  REGION 1..365: note = tr|A0A210RZQ8|A0A210RZQ8_9BURK Epoxyqueuosine reductase OS=Polynucleobacter hirudinilacicola OX=1743166; GN = queG PE=3 SV=1
MSLSTNSKSLDQPKLRAWLGERAESLGFDGLRITDTHLGPASQRLQEWLAEGRHGNMEYMQRHADLRSNPQLLVPGTVRVICVSMNYLPPESDFDSEWQQLDNPSQAVVSMYARGRDYHKVLRNRLQDFAKAIEEKIGTFGYRVFTDSAPLMEVELARKAGLGWRGKHTLLLNRESGSTFFLGEILVDVPLLIDQEQEEHCGTCQSCIDICPTQAITAPYQLDARRCISYLTIENPEAIPVEFRSAMGNRVYGCDDCQLICPWNKFAKRSQLPDFAQRHGLGQASLLHLWSWTEAEFEQRHEGSAIRRIGYSRWRRNLAVAMGNALSSPKTDAADKILIHKALSEALSSADSLVAEHIEWAIRAS

SEQ ID NO: 79618 - protein, 368 aa, unidentified
  source 1..368: note = Polynucleobacter meluiroseus
  REGION 1..368: note = tr|A0A240E1R8|A0A240E1R8_9BURK Epoxyqueuosine reductase OS=Polynucleobacter meluiroseus OX=1938814; GN = queG PE=3 SV=1
MTTDPFPKSSEVQLDKLRNWLQDQAHGFGFDDLRITDTHLGEATEHLQQWLAEGRHGQMDYMERHAALRSDPGLLVPGTVRVICVTMNYLPPTFSLEGEWQRIADPSAAVVSMYARGRDYHKVLRQRLQDFAKAVEAHLGSFGYRVFTDSAPLMEVELARKAGLGWRGKHTLLLNRESGSTFFLGEILVDVPLPMDQAQEPHCGSCTACIDVCPTQAITAPYQMDARRCISYLTIENHAAIPVEFRKAMGNRVYGCDDCQLICPWNKFAKRTALPDFAERHGLGKASLLHLWSWTEGEFEKRHEGSAIRRIGYSRWRRNLAVAMGNALTAADLPETEKEPIRIALQTALPQADALVAEHIEWALNTER

SEQ ID NO: 79619 - protein, 375 aa, unidentified
  source 1..375: note = Polynucleobacter paneuropaeus
  REGION 1..375: note = tr|A0A2Z4JKS0|A0A2Z4JKS0_9BURK Epoxyqueuosine reductase OS=Polynucleobacter paneuropaeus OX=2527775; GN = queG PE=3 SV=1
MSSPSSSPSTLDSAQLGSLRQWLDGEARAIGFDDVRVTDTHLGEATNKLREWLAAGRHGHMEYMQRHAALRSDPQLLLPGTTRVICVRMNYVPPEVDFEQEWQRLAQPDQAVVSIYARGRDYHKILRQRLQDFAKSIEAKIGSFGYRVFTDSAPLMEVELARKAGLGWRGKHTLLLNREAGSTFFLGEILVDIPLPLDTEIEEHCGSCSACIDICPTQAITAPYALDARRCISYLTIENPDLIPIEFRKAMGNRVYGCDDCQLICPWNKFAQRSTLPDFAARNGLGSASLLELWSWTEVQFERNHEGSAIRRIGYAKWRRNLAVALGNALGSDTPEEEKKGIREALIAALDIAADTPPLVVEHIEWALAQSNHSV

SEQ ID NO: 79620 - protein, 375 aa, unidentified
  source 1..375: note = Polynucleobacter paneuropaeus
  REGION 1..375: note = tr|A0A2Z4JTY7|A0A2Z4JTY7_9BURK Epoxyqueuosine reductase OS=Polynucleobacter paneuropaeus OX=2527775; GN = queG PE=3 SV=1
MSSPSSSPSTLDSAQLGSLRQWLDGEARAIGFDDVRVTDTHLGEATNKLREWLAAGRHGHMEYMQRHAALRSDPQLLLPGTTRVICVRMNYVPPEVDFEQEWQRLAQPDQAVVSIYARGRDYHKILRQRLQDFAKSIEARIGSFGYRVFTDSAPLMEVELARKAGLGWRGKHTLLLNREAGSTFFLGEILVDIPLPLDTEIEDHCGSCSACIDICPTQAITAPYALDARRCISYLTIENPDLIPIEFRKAMGNRVYGCDDCQLICPWNKFAQRSTLPDFAVRNGLGSASLLELWSWTEVQFERNHEGSAIRRIGYAKWRRNLAVALGNALGSDTPEEEKKGIREALIAALDIAADTPPLVVEHIEWALAQSNHSV

SEQ ID NO: 79621 - protein, 374 aa, Polynucleobacter sp.
  REGION 1..374: note = tr|A0A5C7U8Q3|A0A5C7U8Q3_9BURK Epoxyqueuosine reductase OS=Polynucleobacter sp. OX=2029855 GN=queG PE=3; SV = 1
MSQFHPSNSIDWINQIDWLRDEARALDFGDIRVSDTDLSQAGPKLREWLAAGCHGDMNYMSQHAHLREDPQQLHPGTIRVLTVRMDYLPNTPEMRSALDWRQNEMQKWEGGDQAIVAMYARGRDYHKVLRHRLQTLAEKIQNKIGSYGYRVFVDSGPVMEVELAHKSGLGWRGKHTLLLNREAGSMFFLGEIYVDIPFPVDPPITSHCGECTACMDVCPTKAITAPYQLDSRRCISYLTIEHRGSIPVELRPLMANRIYGCDDCQLICPWNKFAQLSAVPDFLPRHGLDQSSLLDLWSWGEKDFLSRHEGSPIRRIGYKAWRRNLAVGMGNALRSTSVLEQDKDAIEQALQKVLPFESDMVKEHILWALEQKSI

SEQ ID NO: 79622 - protein, 373 aa, Polynucleobacter sp.
  REGION 1..373: note = tr|A0A1W1ZMA8|A0A1W1ZMA8_9BURK Epoxyqueuosine reductase OS=Polynucleobacter sp. VK13 OX=1938817 GN=queG; PE = 3 SV=1
MTSENENYTEILHWLRTQAKELGFSDVRISDLDLSQELPFFQDWLKKGRHGQMHYMSRHANLRANPEELLPGVVRSICFRMDYLPREQIQNPTAENFRKKELEQLQDPSHATISVYARGRDYHKVLRKNLLTIAKLLEEKLAHLNYRVLVDSAPVLEVALATKSGIGWRGKHTLSLNRQAGSMYFLGEIFVDIPLPIDQPISNHCGTCQDCIDLCPTKAILAPFQIDANRCISYLTIEHPGAIPLELRTLMGNHVYGCDDCQLVCHWNKFAKKSNLSDFDVRNQLDRSTLEDLFGWEKADFEKKMQGSAIYRIGYERWMRNIAVALGNYLRSDAIDSIQKLNIAELLSKRIGQISELVDEHITWALNFEKSIK

SEQ ID NO: 79623 - protein, 365 aa, unidentified
  source 1..365: note = Polynucleobacter sphagniphilus
  REGION 1..365: note = tr|A0A1R0HAT4|A0A1R0HAT4_9BURK Epoxyqueuosine reductase OS=Polynucleobacter sphagniphilus OX=1743169; GN = queG PE=3 SV=1
MDSSVNSSSIDAHALRDWLREKAGVFGFDGLRITDTHLGVAKERLQEWLAQGRHGAMEYMSRQAQLRANPELLLPGTVRVICLSMSYLSPSVHFEGEWERLNDPSQAVVSMYARGRDYHKVLRQRMQDFAQVIEEKIGCLGYRVFTDSAPLMEVELARKAGLGWRGKHTLLLNRESGSSFFLGEILVDVPLPLDDEQVEHCGTCTSCMDICPTQAITAPYQLDARRCISYLTIENPAAIPIEFRRAMGNRVYGCDDCQLICPWNKFSKRTELPDFAERHGLGSATLLQLWSWTKEEFEKRHEGSAIRRIGYARWLRNLAVAIGNALASKEVAFSEKEKMRHELRVRLPNVDALVAEHIEWALEQL

SEQ ID NO: 79624 - protein, 375 aa, unidentified
  source 1..375: note = Polynucleobacter victoriensis
  REGION 1..375: note = tr|A0A212T6N0|A0A212T6N0_9BURK Epoxyqueuosine reductase OS=Polynucleobacter victoriensis OX=2049319; GN = queG PE=3 SV=1
MTQEKITTAISVDWIQDISWIRDAARSLGFGDIRVSDTDLSQASERLKEWLKAGRHGDMNYMSERAHLRANPAELQPGTIRVITARMDYLPDNTEIRQSVDWRDMEMAKVENPTQAVVAMYARGRDYHKVLRQRLQTLAEEIQKKVGSLGYRVFVDSGPVMEVELAQKSGLGWRGKHTLLLNREAGSMFFLGEILVDVPFPVDEPITSHCGECSACINICPTGAITAPYQLDARRCISYLTIEHKGSIPLELRSLMGNRIYGCDDCQLACPWNKFAQMTALPDFLPRHGLDQASLLDLWSWSEEDFLSRHEGSPIRRIGYQAWLRNLAVGIGNALQATSLSKSQKEQIRVALINKRVSVSPMVQEHIDWALNAGL

SEQ ID NO: 79625 - protein, 366 aa, unidentified
  source 1..366: note = Polynucleobacter wuianus
  REGION 1..366: note = tr|A0A191UFX4|A0A191UFX4_9BURK Epoxyqueuosine reductase OS=Polynucleobacter wuianus OX=1743168 GN=queG; PE = 3 SV=1
MPLSSNLSTLDESELQTWLGEKAVKLGFNGLRITNTHLGSASERLQEWLAEGRHGHMEYMQRHANLRSDPGLLVPGTVRVICVTMNYLPVDCDFDREWKRLEDPAQAIVSMYARGRDYHKVLRNRLQDFAKAIEEKIGTFGYRVFTDSAPLMEVELARKAGLGWRGKHTLLLNRESGSTFFLGEILVDVPLPIDQESEEHCGTCTSCIDVCPTQAITAPYQLDARRCISYLTIENPESIPMEFRRAMGNRVYGCDDCQLICPWNKFAKRTQLPDFAQRHGLGQASLLHLWSWTEAEFEQRHEGSAIRRIGYSRWRRNLAVAMGNALRGPRIADHEKEEIRKALSMGMATADSLVTEHIQWALNPSS

SEQ ID NO: 79626 - protein, 359 aa, Pontibaca methylaminivorans
  REGION 1..359: note = tr|A0A1R3WZ50|A0A1R3WZ50_9RHOB Epoxyqueuosine reductase OS=Pontibaca methylaminivorans OX=515897 GN=queG; PE = 3 SV=1
MAAGRKKKAPLDGATLKTRLVEQARAEGFVSCRICRPGDIPQVPGRLRAYLDAGWHGQMEWMERRSDWRGNPESLWPEARSVIMLAESYTPEHDPTAVLSLPDRGAISVYAQNRDYHDLVKKRLKRLARWLIAESGEGTELKVFVDTAPVAEKPLGQAAGLGWQGKHTVLISRDWGNWAFLGAIFTTLDLPPDTPGREHCGTCRACLDACPTDAFPAPWKLDARRCISYLTIEYKGPVAEDLRPLLGNRIYGCDDCLAACPWNKFAVTASDMRYAARADLVAPKLADLAVLDDAGFRAMFSGSPIKRIGRDRFVRNVLYAIGNSGDPGLLGVARSLVDDPDPMVADAARWAVGRLEALE

SEQ ID NO: 79627 - protein, 375 aa, Pontibacillus chungwhensis
  REGION 1..375: note = tr|A0A0A2UQ41|A0A0A2UQ41_9BACI Epoxyqueuosine reductase OS=Pontibacillus chungwhensis BH030062; OX = 1385513 GN=queG PE=3 SV=1
MDIHELKEDVKAYAKEIGIDKIGFTTPDVFTELKERLRTQQDLGYQSGFEKGSIEERTEPNRLVPEAKSIISIALAYPSKLKDAPRSTKDDRRGLFCRASWGQDYHDVLRDRLNKLGEYLQGRVSDFYGRSMVDTGELSDRAVAERAGIGFTGKNTNLITEEYGSYVYLGEMLTNIAFPPDEPVEDSCGDCNICVDACPTGALIEGGQLNAQKCIAFLTQTKGFLPDEYRGVIGNRLYGCDTCQTVCPKNKKKHNLIHAEFQPDPEKVKPSLKPLLSVSNREFKETYGQMSGSWRGKKPIQRNAILALAHYKDETAVDELIRLMTQDPRPVIRGTAAWALGKIGNPSAYTAIHEAKAKETDDEVVGEMDKGLALL

SEQ ID NO: 79628 - protein, 379 aa, Pontibacillus halophilus
  REGION 1..379: note = tr|A0A0A5GHT6|A0A0A5GHT6_9BACI Epoxyqueuosine reductase OS=Pontibacillus halophilus JSM 076056 = DSM 19796 OX=1385510 GN=queG PE=3 SV=1
MDLAQFKEDVIQYSKQIGIDKIGFASPDVFTEMKERLRTQQELGYQSGFEKGSIEERTEPKLHVPESKSIISIALAYPSKLKDAPRSTREERRGLFCRASWGEDYHDVLNERLYRLASYLKERYPDLQFRSMVDTGELPDRAVAERAGIGFTGKNTNLITSEFGSYVYLGEMITNIPFAPDEPVEDSCGDCNICVDACPTGALIQGGQLNAQKCIAFLTQTKDFLPDEYRGVIGNRLYGCDTCQTVCPKNKKKDFHNHPEMEPDPEKVKPKLKPLLSISNREFKETYGKMSGSWRGKKPIQRNAILALAHFKDVTAVDELVRLMKEDPRPVIRGTAAWALGKIGDWQGKEAIESAQMKETDEQVLDEMRKGLEFFTENV

SEQ ID NO: 79629 - protein, 380 aa, Pontibacillus litoralis
  REGION 1..380: note = tr|A0A0A5G879|A0A0A5G879_9BACI Iron-sulfur cluster-binding protein OS=Pontibacillus litoralis JSM 072002 OX=1385512 GN=N784_15495 PE=4 SV=1
MDIQQLKEDVMQYSKTIGIDKIGFTSPDVFTQLKERLRVQQALGYQSGFEKGTIEERTEPKLHVPEAKSIISIALAYPSKLKGAPRSKKGERRGIFCRASWGEDYHNVLNDRLNKLASYLQERYPELRWRSMVDTGELSDRAVAERAGIGFVGKHTNLITEEFGSYVYLGEMITNIPFPSDELVEDSCGDCTICVDACPTGALVQGNQLNAQKCIAFLTQTKGFLPDQYRSVIGNRLYGCDTCQTVCPKNKKKDFHLHQEMEPEPEKVKPLLTPLLSISNRQFKETYGQMSGSWRGKKPIQRNAILALAHFKEESAVDELTRLMFEDPRPVIRGTAAWALGKIGVASSEEVIRKARATERDEDVRAEMEKGLALLNESSH

SEQ ID NO: 79630 - protein, 383 aa, Pontibacillus marinus
  REGION 1..383: note = tr|A0A0A5FU35|A0A0A5FU35_9BACI Epoxyqueuosine reductase OS=Pontibacillus marinus BH030004 = DSM 16465; OX = 1385511 GN=queG PE=3 SV=1
MDIHELKADMIEYSQSIGIDKIGIASPDVFTELKERLRAQQENGYQSGFEKGTVDERTQPQNLVPEAKSIISIALAYPSKLQDAPQSVKGDRRGLFCRASWGQDYHDVLRDRLNKLAEYLEEKYPGFVFRSMVDTGELSDRAVAERAGIGFTGKNTNLITEEFGSYVYLGEMITNIPFSPDDPVEDSCGDCNICVDACPTGALIQGGQLNAQKCIAFLTQTKGFLPDEYRGVIGNRLYGCDTCQTVCPKNKRKRNLIHEEFQPDPEKVKPKLKPLLSISNREFKETYGEMAGSWRGKKPIQRNAILALAHFKDDSANDDLVRLMKEDPRPVIRGTAAWALGKIGNPDAYDSIMLAKQKENDAEVIAEMEKGIKLLEKEPKQLS

SEQ ID NO: 79631 - protein, 380 aa, Pontibacillus yanchengensis
  REGION 1..380: note = tr|A0A0A2T6X4|A0A0A2T6X4_9BACI Epoxyqueuosine reductase OS=Pontibacillus yanchengensis Y32 OX=1385514; GN = queG PE=3 SV=1
MDIHAFKEDMIAYSKEIGIDKIGIASPDVFTELKERLRTQQELGYQSGFEKGSLEERTEPKRHVTEAKSIISIALAYPSKLKNAPRSTKEERRGIFCRASWGQDYHDVLNDRLEKLAAYLKEKYPGFTWRSMVDTGELSDRAVAERAGIGFTGKNTNLITPEYGSYVYLGEMITNIPFTPDDPVDDSCGDCNICVDACPTGALVQGNQLNAQKCIAFLTQTKGFLPDEYRGVIGNRIYGCDTCQTVCPKNKKKDFHLHPEMEPDPEVVKPKLKPLLSISNREFKETFGHISGSWRGKKPLQRNAILALAHYKDETAVEELVRVMKQDPRPVIRGTAAWALGKIGVPSSYDEILLARDKEEDEDVLEEMEKGLRYFHPLNK

SEQ ID NO: 79632 - protein, 313 aa, Pontibacter actiniarum
  REGION 1..313: note = tr|A0A1X9YX15|A0A1X9YX15_9BACT Epoxyqueuosine reductase OS=Pontibacter actiniarum OX=323450 GN=queG PE=3; SV = 1
MSKEKYTYLIKQKAKELGFMYCGVSKAEFLEEEAPRLERWLNQNMHGQMRYMENHFDKRLDPRLLVDGAKSVVSLLLNYYPAKDDQQQEEDTYKVSKYAYGTDYHFVIKDKLKTLLSYINEEIGEVGGRCFVDSAPVMDKAWAKKSGLGWVGKSSNLITPQVGSFYFIAELIIDLDLEYDGPIKDYCGSCTRCLDACPTGAITEPYVVDGSKCISYFTIELKDQLPSEMNGKFGNWVFGCDICQDVCPWNRFSKPHSEPAFAPHPELKTLKTSDWQELTHEVFSQLFKKSAVKRTGYNGLVRNIRFVQEDSDK

SEQ ID NO: 79633 - protein, 314 aa, Pontibacter akesuensis
  REGION 1..314: note = tr|A0A1I7JF93|A0A1I7JF93_9BACT Epoxyqueuosine reductase OS=Pontibacter akesuensis OX=388950 GN=queG PE=3; SV = 1
MSKEKYTYLIKQKAQELGFMYCGISKADFLEEEAPRLERWLNQNMHGQMHYMENHFDKRLDPRLLVDGAKSVVSLLLNYYPEKENQQQEEDTYKISKYAYGTDYHFVIKDKLKTLLAYINEEIGEVGGRCFVDSAPVLDKAWAKKSGLGWVGKNSNLITPQVGSFYFIAELIINLELEYDGPIKDYCGSCTRCLDACPTGAITEPYVVDGSKCISYFTIELKDQLPQEMNGKFGNWVFGCDICQDVCPWNRFSKPHQEPAFAPHPDLKHLKTSDWQELTHEVFSQLFRKSAVKRTGYNGLLRNILFVQDSPEKD

SEQ ID NO: 79634 - protein, 314 aa, unidentified
  source 1..314: note = Pontibacter chinhatensis
  REGION 1..314: note = tr|A0A1I2VJ16|A0A1I2VJ16_9BACT Epoxyqueuosine reductase OS=Pontibacter chinhatensis OX=1436961 GN=queG; PE = 3 SV=1
MSKEKYTYLIKQKASELGFMYCGISKADFLEEEAPRLERWLNQHMHGQMHYMENHFDKRLDPRLLVEGAKSVVSLLLNYYPSQEDQQPEEDTYKISKYAYGTDYHFVIKDKLKTLLSYINEEIGEVGGRCFVDSAPVLDKAWAKKSGLGWVGKNSNLITPQVGSFYFIAELIIDLELEYDGPIKDYCGSCTRCLDACPTNAIVEPYVVDGSKCISYFTIELKDQLPQEMNGKFGNWVFGCDICQDVCPWNRFSKPHSEPAFAPHPQLKELKASDWQELTHEVFSQLFKKSAVKRTGYNGLVRNIRFVHGNPEEE

SEQ ID NO: 79635 - protein, 310 aa, unidentified
  source 1..310: note = Pontibacter diazotrophicus
  REGION 1..310: note = tr|A0A3D8LCR3|A0A3D8LCR3_9BACT Epoxyqueuosine reductase OS=Pontibacter diazotrophicus OX=1400979 GN=queG; PE = 3 SV=1
MNKEKYTHLIKQKAKELGFMYCGVSKAEFLEEEAPRLERWLNQNMHGQMHYMESHFDKRLDPRLLVEGAKSVVSLLLNYFPEETQPEEDTYKISKYAYGTDYHFVIKDKLKELLHYINEEIGEVGGRCFVDSAPVLDKAWAKKSGLGWVGKNSNLITPQVGSFYFIAELIIDLELEPDGPIKDYCGSCTRCLDACPTGAITEPYVVDGSKCISYFTIELKDQLPQEMHGKFGNWVFGCDICQDVCPWNRFSKPHSEPAFAPHPHLKEMKVNDWQELTQEVFSQLFKKSAVKRTGYSGLLRNIHFVEQQPD

SEQ ID NO: 79636 - protein, 313 aa, unidentified
  source 1..313: note = Pontibacter indicus
  REGION 1..313: note = tr|A0A1R3XIF1|A0A1R3XIF1_9BACT Epoxyqueuosine reductase OS=Pontibacter indicus OX=1317125 GN=queG PE=3; SV = 1
MNKAQHTYLIKQKAQELGFMYCGVSKADFLEEEAPRLENWLKQNMHGQMHYMENHFDKRLDPRLLVEGAKSVVSLLLNYYPEKENQQTGEDTYKVSKYAYGTDYHFVIKDKLKTLLQYINEEIGEVGGRCFVDSAPVLDKAWAKKSGLGWVGKNSNLIAPQVGSFFFIAELIIDLELEHDGPIKDYCGSCTRCLDACPTDAIVAPYVVDGSKCISYFTIELKDQLPQEMHGKFGNWIFGCDICQDVCPWNRFSKPHQEPAFEAHPQLKEMKKSDWEEITQEVFSQLFKKSAVKRTGYNGLLRNIRFVEQSPGS

SEQ ID NO: 79637 - protein, 314 aa, Pontibacter korlensis
  REGION 1..314: note = tr|A0A0E3UZ13|A0A0E3UZ13_9BACT Epoxyqueuosine reductase OS=Pontibacter korlensis OX=400092 GN=queG PE=3; SV = 1
MSKEKYTYLIKKKAKELGFMFCGISKAEFLEEEAPRLERWLNQNMHGQMRYMENHFDKRLDPRLLVDGAKSVVSLLLNYYPDKENQQQEEDTYKISKYAYGTDYHFVIKDKLKTLLNYINEEIGEVGGRCFVDSAPVMDKAWAKKGGLGWVGKNSNLITPQVGSFYFIAELIIDLELEYDGPIKDYCGSCTRCLDACPTGAITEPYVVDGSKCISYFTIELKDQLPQEMNGKFGNWVFGCDICQDVCPWNRFSKPHNEPAFSAHPQLKELKTRDWQELTHEVFSQLFKKSAVKRTGYNGLMRNISFVQDNPEEE

SEQ ID NO: 79638 - protein, 315 aa, unidentified
  source 1..315: note = Pontibacter lucknowensis
  REGION 1..315: note = tr|A0A1N6TNZ8|A0A1N6TNZ8_9BACT Epoxyqueuosine reductase OS=Pontibacter lucknowensis OX=1077936 GN=queG; PE = 3 SV=1
MNKAQYTYLIKQKAQELGFMYCGVSKADFLEEEAPRLENWLKQNMHGQMHYMENHFDKRLDPRLLVEGAKSVVSLLLNYYPEQEKQQTGEDTYKVSKYAYGTDYHFVIKDKLKTLLSFINDEIGEVGGRCFVDSAPVLDKAWAKKSGLGWVGKNSNLITPQVGSFYFIAELIIDLELEYDGPIKDYCGSCTRCLDACPTDAIVAPYVVDGSKCISYFTIELKDQLPQEMNGKFGNWIFGCDICQDVCPWNRFSKPHQEPAFEPHPQLKEMKKSDWEEITQEVFAQLFKKSAVKRTGYNGLLRNIRFVEQGPGSQT

SEQ ID NO: 79639 - protein, 314 aa, unidentified
  source 1..314: note = Pontibacter mucosus
  REGION 1..314: note = tr|A0A2T5YK21|A0A2T5YK21_9BACT Epoxyqueuosine reductase OS=Pontibacter mucosus OX=1649266 GN=queG PE=3; SV = 1
MSKEKYTYLIKQKASELGFMYCGISKADFLEEEAPRLERWLNQHMHGQMHYMENHFDKRLDPRLLVEGAKSVVSLLLNYYPSQEDQQPEEDTYKISKYAYGTDYHFVIKDKLKTLLNYINEEIGEVGGRCFVDSAPVLDKAWAKKSGLGWVGKNSNLITPQVGSFYFIAELIIDLELEYDGPIKDYCGSCTRCLDACPTNAIVEPYVVDGSKCISYFTIELKDQLPQEMNGKFGNWVFGCDICQDVCPWNRFSKPHHEPAFAPHPQLKELKERDWQELTHEVFSQLFKKSAVKRTGYNGLVRNIRFVHGNPEEE

SEQ ID NO: 79640 - protein, 315 aa, unidentified
  source 1..315: note = Pontibacter ramchanderi
  REGION 1..315: note = tr|A0A2N3UBB0|A0A2N3UBB0_9BACT Epoxyqueuosine reductase OS=Pontibacter ramchanderi OX=1179743 GN=queG; PE = 3 SV=1
MNKAHYTYLIKQKAQELGFMYCGISKADFLEEEAPRLENWLKQNMHGQMHYMENHFDKRLDPRLLVEGAKSVVSLLLNYYPEKEAQQPEAGTYKVSKYAYGTDYHFVIKDKLKTLLNYINGEVGEVGGRCFVDSAPVLDKAWAKKGGLGWVGKNSNLITPQVGSFYFIAELIIDLDLEYDGPIKDYCGSCTRCLDACPTDAIVAPYVVDGSKCISYFTIELKDQLPQEMNGRFGNWIFGCDICQDVCPWNRFSKPHQEPAFAPHPQLKEMKKNDWEEITQEVFAQLFKKSAVKRTGYNGLLRNIRFVEQSPDTQT

SEQ ID NO: 79641 - protein, 313 aa, Pontibacter sp.
  REGION 1..313: note = tr|A0A364RHN6|A0A364RHN6_9BACT Epoxyqueuosine reductase OS=Pontibacter sp. 2b14 OX=2080288 GN=queG PE=3; SV = 1
MLNKAQYTHFIKQKAQELGFMYCGISKADFLEEEAPRLESWLNQHMHGQMHYMENHFDKRLDPRLLVDGAKSVVSLLLNYYPEEKQPETDTLKISKYAYGTDYHFVIKDKLKTLLDLINEEIGEVGGRCFVDSAPVLDKAWAKKSGLGWIGKNSNLITPQVGSFYFIAELIIDLELEYDGPIKDYCGSCTRCLDACPTDAIVAPYVVDGSKCISYFTIELKDQLPQEMNGKFGNWVFGCDICQDVCPWNRFSKPHQEPAFNAHPELKNMKTNDWQELTQEVFSQLFKKSAVKRTGYKGLLRNIQFLQQPPEND

SEQ ID NO: 79642 - protein, 312 aa, Pontibacter sp.
  REGION 1..312: note = tr|A0A4P8RRN5|A0A4P8RRN5_9BACT Epoxyqueuosine reductase OS=Pontibacter sp. SGAir0037 OX=2571030 GN=queG; PE = 3 SV=1
MTKAQHTQLIKKRAQELGFMYCGISKAEFLEEEAPRLERWLNQQMHGKMQYMENHFDKRLDPRLLVDGAKSVVSLLLNYFPEEKQPEENTYKISKYAYGTDYHFVIKDKLKELLASIHEEIGEVGGRCFVDSAPVLDKAWAKKSGLGWIGKNSNLITPQVGSFYFIAELIIDLELEYDGPIKDYCGSCTRCLDACPTGAIVEPYVVDGSKCISYFTIELKDQLPNEMNGKFGNWVFGCDICQDVCPWNRFSKPHQEPAFAPHPHLLNMKTSDWQELTHEVFTQLFKKSAVKRTGYNGLVRNICFMEDTGELH

SEQ ID NO: 79643 - protein, 326 aa, unidentified
  source 1..326: note = Pontibacter ummariensis
  REGION 1..326: note = tr|A0A239B414|A0A239B414_9BACT Epoxyqueuosine reductase OS=Pontibacter ummariensis OX=1610492 GN=queG; PE = 3 SV=1
MFIRVALADFILFVLSKEKYTHLVKQKAKELGFMYCGVSQAEFLEEEAPRLERWLNQHMHGQMHYMENHFDKRLDPRLLVDGAKSVVSLLLNYYPEEKQEEDDTYRISKYAYGTDYHFVIKDKLKTLLAYINEVIGEVGGRCFVDSAPVLDKAWAKKSGLGWVGKNSNLITPQVGSFYFIAELIIDLELEPDGPLKDYCGSCTRCLDACPTGAIVEPYVVDGSKCISYFTIELKDQLPQEMQGKFGNWVFGCDVCQDVCPWNRFSKPHKEPAFAPHPQLKEMKTADWQELTHEVFSQLFKKSAVKRTGYNGLMRNIRFVQENPEKD

SEQ ID NO: 79644 - protein, 315 aa, unidentified
  source 1..315: note = Pontibacter virosus
  REGION 1..315: note = tr|A0A2U1B571|A0A2U1B571_9BACT Epoxyqueuosine reductase OS=Pontibacter virosus OX=1765052 GN=queG PE=3; SV = 1
MNKSDYTYLIKQKAQELGFMYCGISKAEFLEEEAPRLENWLKQNMHGQMHYMENHFDKRLDPRLLVEGAKSVVSLLLNYYPEKENQQAGEDTYKVSKYAYGTDYHFVIKDKLKTLLNYINEEIGEVGGRCFVDSAPVLDKAWASKSGLGWVGKHTLLITPQAGSFHFVAELIIDLELEYDGPIKDYCGSCTRCLDACPTDAIVAPYVVDGSKCISYFTIELKDQLPQEMNGKFGNWIFGCDICQDVCPWNRFSKPHQEPTFEPQPQLKEMKKSDWEEITQEVFAQLFKKSAVKRTGYNGLLRNIRFVEQSPDPQT

SEQ ID NO: 79645 - protein, 372 aa, Ponticaulis sp.
  REGION 1..372: note = tr|A0A2D7Y0L5|A0A2D7Y0L5_9RHOB Epoxyqueuosine reductase OS=Ponticaulis sp. OX=2020902 GN=queG PE=3 SV=1
MTIWTSDTLKTKAREIGFDVCRVTTVVDAWAASDRLKQFVSAGYHGQMGWMEETLERRSHPQAMWPDARSAVVLGVNYGPDHDPLQVLDQADKAVISVYAKGKDYHDLLKKRLKRLAREFAAAHDCQVKVFVDTAPLMEKPLAAKSGLGWQGKHTNLVSREFGSWLFLGVMLTELELVSDAPETDHCGSCRACLDVCPTDAFPAPYKLDARRCISYLTIEHDGAIPVEFRTAMGNRIYGCDDCLAVCPWNKFAETTSELKFAASEVTDAPDLGTLSRLSDEAFREAYSGSPIKRIKRHRFIRNVLIAMGNSGEERFVPDIVRLLDDKAPIVRGMAAWALRQLDPNRFETEKNQRVLNETDAEVRAEWQGNAD

SEQ ID NO: 79646 - protein, 371 aa, Ponticaulis sp.
  REGION 1..371: note = tr|A0A2D6GSH0|A0A2D6GSH0_9RHOB Epoxyqueuosine reductase OS=Ponticaulis sp. OX=2020902 GN=queG PE=3 SV=1
MPTWTSEDVKAHALSIGFDVCRITSVEEGWAAGARLKAFVDAGYHGEMGWMAETLERRSHPQAMWPHARSAIVVGVNYGPDHDPLAVLDSKDRAAISVYAKGKDYHDVLKKRLKQLARDFVAANECEVKVFVDTAPLMEKPLAQQAGLGWQGKHTNLVSREFGSWLFLGVMLTEADLAPDEAASDHCGQCRACLDICPTKAFVGPYQIDARKCISYLTIEHGAPIPHELRKPMGNRIYGCDDCLAVCPWNKFASETKETKFQLTEATDAPSLATLLALDDQAFRAMFSGSPVKRIKRRRFLRNVLIATGNSGDAALVPAVKELLGDEEPLIRGAAIWALYQLAPDDARAEKLSRAPDETSEDVLSEWHLVE

SEQ ID NO: 79647 - protein, 361 aa, unidentified
  source 1..361: note = Ponticoccus marisrubri
  REGION 1..361: note = tr|A0A0W7WIX0|A0A0W7WIX0_9RHOB Epoxyqueuosine reductase OS=Ponticoccus marisrubri OX=1685382 GN=queG; PE = 3 SV=1
MPISTSETAPDPLSLKSRLLAEARQVGFAGARLCRPGDVPQVMDRLRAFLARGYHGQMGWLAERAHWRGDPTALWPEARSVLMLAENYGPDHDPLDVLGQRDRAAISVYAQNRDYHDVVKKRLKRLGRWLIAEAEAKTGEAPQIKVFVDTAPVPEKALAQAAGLGWQGKHTNLVSRELGSWLFLGAIFTTLELPPDAAETDHCGSCRKCLDICPTDAFPAPYQLDARRCISYLTIEHRGPVDAALRPGLGNRIYGCDDCLAVCPWNKFARRAEEVKYHARDDLRAPALAELAKLDDAGFRAHFSGSPIKRIGRDRFVRNVAYAIGNSTDPSLTGAVQPLCEDDDAAVADAARWAVGRLKAL

SEQ ID NO: 79648 - protein, 354 aa, unidentified
  source 1..354: note = Pontivivens insulae
  REGION 1..354: note = tr|A0A2R8A8K0|A0A2R8A8K0_9RHOB Epoxyqueuosine reductase OS=Pontivivens insulae OX=1639689 GN=queG PE=3; SV = 1
MIGRAEVEAEAKALGFAAMGVCTPDAIPQAMGRLQDFLDKDYHGTMNWMADRAHWRGDPTALWPDARSVIMLAEPYTPDVDPLTLLDARDRGAISVYARNKDYHDLVKKRLKRLGRWMIDQAGGEIKVFVDTAPVMEKPLGAAAGLGWQGKHTNLLSRELGNWFFLGAIFTTLNLDPDAPGVERCGSCTACLDACPTNAFPAPFQLDARRCISYLTIEHKGPVPLDLREKMGNRIYGCDDCLAVCPWNKFAQEARDAGYWARVELKAPKLAELAQLDDGTFREIFAGSPIKRIGRGRFVRNVLYAIGNSEDATLSKVAATLCRDDDVVVADAARWAVERLAGGATGSHAQEESK

SEQ ID NO: 79649 - protein, 353 aa, Porphyrobacter dokdonensis
  REGION 1..353: note = tr|A0A1A7BIV3|A0A1A7BIV3_9SPHN Epoxyqueuosine reductase OS=Porphyrobacter dokdonensis DSW-74 OX=1300349; GN = queG PE=3 SV=1
MVNDLATPDLAVRIAAEARALGFAACGIASARNDPLRSARLEEWLGEGYHGSMEWMAARAEHRRSPEGLWPAARSVIALGMSYAPAQDPLALEASDEHARISVYAQGRDYHDVVKKRLKALARWLVAEEPQAEVKVFVDTAPVMEKPLGEAAGIGWQGKHTNLVSPTHGSWLFLGAIYTTLELAPAEGHRDQCGTCRACLDACPTNAFPAPYRLDARRCISYLTIEHKGPVPEEFRATLGNRVYGCDDCLAVCPWNKFASEAQAIREFLPRAELVAPRLAELLALDDAGFRALFSGSPIKRIGRDRFVRNCLYAAGNSGNTALGAQVEALTEDPDPVVAEAARWALARLKSDP

SEQ ID NO: 79650 - protein, 351 aa, Porphyrobacter neustonensis
  REGION 1..351: note = tr|A0A192D2P9|A0A192D2P9_9SPHN Epoxyqueuosine reductase OS=Porphyrobacter neustonensis OX=1112 GN=queG; PE = 3 SV=1
MVNTAASLADRIGAQALAEGFAVCGFTGARENPLRAARLEQWLGEGHHGSMEWMATRLEHRRSPQGLWDEARSVIALGMSYAPAHDPLALEGSDSHARISVYAQGKDYHDVVKKRLKALARWLVAEVPGAGVKVFVDTAPVMEKPLGEAAGIGWQGKHTNMVSPTHGSWLFLGAIYTTLDLAPATPHRDQCGSCRACLDACPTNAFPAPYRLDARRCISYLTIEHKGPVDEDLRAGLGNRIYGCDDCLAVCPWNKFASQAQAMREFLPRAELVAPRLGELLALDDAGFRALFSGSPIKRIGRDRFVRNCLYAAGNSGNAGLAVQVQALTADPDPVVADAARWALARLTSGL

SEQ ID NO: 79651 - protein, 353 aa, Porphyrobacter sanguineus
  REGION 1..353: note = tr|A0A1M7T0F7|A0A1M7T0F7_9SPHN Epoxyqueuosine reductase OS=Porphyrobacter sanguineus OX=198312 GN=queG; PE = 3 SV=1
MVNVRERPGFAQRIAAEARTLGFAACGIAGAGEDPLRSARLEEWLGEGRHGSMEWMATRLEHRRSPQGLWPEARSVIALGMSYAPAHDPLALESAPGRGRISVYSQGRDYHDVVKKRLKALARWLVAEAPDAQVKVFVDTAPVMEKPLGEAAGIGWQGKHTNLVSPTHGSWLFLGAIYTTLDLAPAEPHHDQCGSCRACLDACPTDAFPAPYRLDARRCISYLTIEHKGPVPEEFREGLGNRIYGCDDCLAVCPWNKFASEAQAIREFLPRAELAAPRLSELLALDDAGFRALFSGSPIKRIGRDRFVRNCLYAAGNSGDGALVPQVDALTADPDPVVGEAARWALARLRSGL

SEQ ID NO: 79652 - protein, 353 aa, Porphyrobacter sp.
  REGION 1..353: note = tr|A0A0N1AZG6|A0A0N1AZG6_9SPHN Epoxyqueuosine reductase OS=Porphyrobacter sp. AAP60 OX=1523423 GN=queG; PE = 3 SV=1
MVKAPATSGLAARIADEAAALGFAACGFASAAEDPVRAARLEQWLGEGHHGSMEWMAARAEHRRSPQGLWPEARSVIALGMSYAPAHDPLALEGSDTHARISVYAQGKDYHDVVKKRLKALARWLVAEAPEAQVKVFVDTAPVMEKPLGEAAGIGWQGKHTNMVSAVQGSWLFLGAIYTTLDLAPAEPHRDQCGSCRACLDACPTNAFPAPYQLDARRCISYLTIEHKGPVAEDLRAGLGNRIYGCDDCLAVCPWNKFASQAQTIREFLPRAELVAPRLGELLALDDAGFRALFSGSPIKRIGRDRFVRNCLYAAGNSGNQALVPQVETLIADPDPVVAEAAQWALVRLTANP

SEQ ID NO: 79653 - protein, 351 aa, Porphyrobacter sp.
  REGION 1..351: note = tr|A0A4Y6VXY8|A0A4Y6VXY8_9SPHN Epoxyqueuosine reductase OS=Porphyrobacter sp. YT40 OX=2547601 GN=queG; PE = 3 SV=1
MVNAPANLAERIAERALGEGFAACGFASAGEDPLRAGRLEQWLGEGHHGSMEWMAARAAERRSPQGLWPAAKSVIALGMSYAPAHDPLALEGSPDHARISVYAQGRDYHDVVKKRLKALARWLVAEVPGAEVKVFVDTAPVMEKPLGEAAGIGWQGKHTNMVSPTHGSWLFLGAIYTTLELASAAPHRDQCGSCRACLDACPTDAFPAPYRLDARRCISYLTIEHKGPVDEEFRAALGNRIYGCDDCLAVCPWNKFASAAQAMKEFLPRAELVAPRLEELLALDDAGFRALFSGSPIKRIGRDRFIRNCLYAAGNSGNAALIAQVGALTADPDPVVADAARWALGRLRSDP

SEQ ID NO: 79654 - protein, 307 aa, unidentified
  source 1..307: note = Porphyromonadaceae bacterium
  REGION 1..307: note = tr|A0A353QAF1|A0A353QAF1_9PORP tRNA epoxyqueuosine(34) reductase QueG OS=Porphyromonadaceae bacterium OX=2049046 GN=queG PE=4 SV=1
MTFSEEIKQQAFALGFDACGICRAEDSGREAEYMRWLADECHADMGYLERNIDKRLDPRLLIEGAKSVICVALNYYPQRTLPDNVPQFAYYAYGQDYHDVLRDKLKRLFDFIKQRAPEAEGRYFSDSAPVLERYWAAQSGLGFVGKNSLLIIPRKGSYFFLGELILNLELEYDAPLTRSCGKCRRCMDACPTQAIEAPYRINAKRCISYQTIENKGEIDEELAPCLHNNVYGCDICQKVCPWNRFATPHHTPEFNPSDEFLSLDADKLLEMNVEDYQRIFKKSPVKRAKFEGLKRNIRTLDGATGKK

SEQ ID NO: 79655 - protein, 306 aa, unidentified
  source 1..306: note = Porphyromonadaceae bacterium
  REGION 1..306: note = tr|A0A1I6T7E8|A0A1I6T7E8_9PORP Epoxyqueuosine reductase OS=Porphyromonadaceae bacterium NLAE-zl-C104; OX = 1855399 GN=SAMN05216365_12326 PE=4 SV=1
MTFSEEIKQYALSLGFDACGICRATDSGEKERYMQWLAENGNAGMEYMARNIDKRLDPILLVDGAKSIISVALNYYPHEKLPEEVPQFAYYAYGKDYHDVVREKLSRLFEFIKSRYPEVTGRYFSDSAPVLERFWAAQAGLGFIGKNTLLIIPGKGSYFFLGELIIDMELDYDSPVSQNCGKCRRCLDACPTGAIERPHYLNANKCISYQTIENKGEISSDIAPLLSNNVYGCDICQKVCPWNRYSRPHSTPEFMPLDEFLSLDLKKLIEMDEEDYRRIFRKSAVKRAKFSGLKRNVAAISKTPDK

SEQ ID NO: 79656 - protein, 318 aa, Porphyromonas asaccharolytica
  REGION 1..318: note = tr|F4KKX1|F4KKX1_PORAD Uncharacterized protein; OS = Porphyromonas asaccharolytica (strain ATCC 25260 / DSM 20707 / BCRC 10618 / JCM 6326 / LMG 13178 / VPI 4198); OX = 879 243 GN=Poras_0050 PE=4 SV=1
MTHQSLSPTELIVRYAHDELRLSAVGLAPAEAVPPEVWRAYQQTITGDAYAGLDYLQRYDDVRADPRKLLPEAKSIIVVAQSYYPPVKQPLEAPQVAYYAYGRDYHKVVRKKLERLLAFIQSEVDQTATGRVCCDTAPLLERYWIMQSGLAYQGRSKMMIIPRLGTFFIYGFLVVSLPLEYGAAIDRSYCGRCRRCIDSCPGGALQADGTFLADRCLSYLTIEHRGAWPEGVAERLGNRLFGCDVCQAVCPHNAHCAPHDEQDFMIRPAIAQLTYEQLASFTPQLYETLTIGSSMRRCAYEDLLRNAEAVLANHTTSL

SEQ ID NO: 79657 - protein, 310 aa, Porphyromonas cangingivalis
  REGION 1..310: note = tr|A0A0A2EY86|A0A0A2EY86_PORCN Uncharacterized protein OS=Porphyromonas cangingivalis OX=36874; GN = HQ35_02680 PE=4 SV=1
MNDVVLRLDDIATELGIDRVGVASLMSPVEDRYMDKYDKWIAEGKHADMSYLVEHRWLREDPRTLLPEARTMIVCAVSYYPTALQAPDAPQISKYAYGRDYHKVLKKVLTSFAERMTDAFGSHTYRVCIDTAPISERYWAQRAGIGHIGKNQNLIIPKIGSYIFLGEILTSLNLTPSDPIHRSCGSCTKCIEACPTQALSSEGLDARRCLSYLTIEHRGEIPSDLRAALGSRIYGCDTCQDVCPYNHRPIKTRLFPASSKILTLSEDDIRNFDEETYASLFFGSAATRAKYEGMKRNIEIYFENKRRKEE

SEQ ID NO: 79658 - protein, 310 aa, Porphyromonas cangingivalis
  REGION 1..310: note = tr|A0A1T4LP37|A0A1T4LP37_PORCN Epoxyqueuosine reductase OS=Porphyromonas cangingivalis OX=36874; GN = SAMN02745205_01216 PE=4 SV=1
MNDVVLRLDDIATELGIDRVGVASLMSPVEDRYMDKYDKWIAEGKHADMSYLVEHRSLREDPRTLLPEARTMIVCAVSYYPTALQAPDAPQISKYAYGRDYHKVLKKVLTSFAERMTDTFGSHTYRVCIDTAPISERYWAQRAGIGHIGKNQNLIIPKIGSYIFLGEILTSLDLTPSDPVHRSCGSCTKCIEACPTQALSSEGLDARRCLSYLTIEHRGEIPSDLRAALGSRIYGCDTCQDVCPYNHRPIKTRLFPASSKILTLSEDDIRNFDEETYASLFFGSAATRAKYEGMKRNIEIYFENKRRKEE

SEQ ID NO: 79659 - protein, 332 aa, Porphyromonas catoniae
  REGION 1..332: note = tr|Z4WZD0|Z4WZD0_9PORP Epoxyqueuosine reductase; OS = Porphyromonas catoniae ATCC 51270 OX=887901 GN=queG; PE = 3 SV=1
MGISQQLNPIPYDETQSAIVTSIKAEALRLGFSACGVARAAPVAEDALREYDSWVEAGFHGDMEYLARNRALRANPCALLPGTRSLIVVAMNYYPQQKQHPDAPQFAYYAYGRDYHKVVKKRLDQLLKYMQIELGLEVEGRAFSDSAPIMERYWAERAGLGWRGKNGLLIIPRAGSYFFLGELLVDIDLPCDEPMRSMCGRCERCLKACPTSAFLSPGRIDARRCISYLTIEQKGEIPTELRASIGKRVYGCDACQQCCPWNRYARPTTVEDYKPRERLLALSPEELEAMTEEEYLALFAGTAVKRAGLVGLQRTIRNLRPNFDRAEQDCDK

SEQ ID NO: 79660 - protein, 332 aa, Porphyromonas catoniae
  REGION 1..332: note = tr|L1NA61|L1NA61_9PORP Epoxyqueuosine reductase; OS = Porphyromonas catoniae F0037 OX=1127696 GN=queG PE=3; SV = 1
MGISQQLNPIPYDETQRAIVTSIKAEALRLGFSACGVARAAPVAEDALREYDSWVEAGFHGDMEYLARNRALRANPCALLPGTRSLIVVAMNYYPQQKQHPDAPQFAYYAYGRDYHKVVKKRLDQLLKYMQTELGLEVEGRAFSDSAPIMERYWAERAGLGWRGKNGLLIIPRAGSYFFLGELLVDIDLPCDEPMRSMCGRCERCLKACPTSAFLSPGRIDARRCISYLTIEQKGEIPTELRASIGKRVYGCDACQQCCPWNRYARPTTVEDYKPRERLLALSPEELEAMTEEEYLALFAGTAVKRAGLVGLQRTIRNLRPNFDRTEQDCDK

SEQ ID NO: 79661 - protein, 328 aa, Porphyromonas crevioricanis
  REGION 1..328: note = tr|A0A2X4PG33|A0A2X4PG33_9PORP Epoxyqueuosine reductase OS=Porphyromonas crevioricanis OX=393921 GN=queG; PE = 4 SV=1
MKEELSPSISVQKIKAEAIRLGFSCVGIARAEAVPEEVARSYKEAVAEGKCGCMTYLDRNHPLREDPTQLLPGTQSIICVALNYYPALRQSPEAPQLAYYAYGKDYHKVVKKQLDKLLCFIRTEIDPQVQGRSFADSAPILERYWAVQAGLGWRGRSGLIVIPKRGTFFVLGELLVSTWLPADRPLAFGCGRCRRCIEACPTGALYDGGFDPLRCLSYLTIEQSDPLPEREAALLGNRLYGCDTCQQVCPHNRFASPTTVEAFAPKPELFDLSYDNLKNFDQETYTRLFSGSAVKRAGYEGLKRNANALLRKEKEGDHIENDRKDEKG

SEQ ID NO: 79662 - protein, 328 aa, Porphyromonas crevioricanis
  REGION 1..328: note = tr|T1CRG4|T1CRG4_9PORP Iron-sulfur cluster-binding protein OS=Porphyromonas crevioricanis JCM 15906; OX = 1305617 GN=PORCRE_1378 PE=4 SV=1
MKEELSPSISVQKIKAEAIRLGFSCVGIARAEAVPEEVARSYKEAVAEGKCGCMTYLDRNHPLREDPTQLLPGTQSIICVALNYYPALRQSPEAPQLAYYAYGKDYHKVVKKQLDKLLCFIRTEIDPQVQGRSFADSAPILERYWAVQAGLGWRGRSGLIVIPKRGTFFVLGELLVSTWLPADRPLAFGCGRCRRCIEACPTGALYDGGFDPLRCLSYLTIEQSDPLPEREAALLGNRLYGCDTCQQVCPHNRFASPTTVEAFAPKPELFDLSYDSLKNFDQETYTRLFSGSAVKRAGYEGLKRNANALLRKEKEGDHIENDRKDEKG

SEQ ID NO: 79663 - protein, 320 aa, Porphyromonas endodontalis
  REGION 1..320: note = tr|C3JBI3|C3JBI3_POREA Putative iron-sulfur cluster-binding protein OS=Porphyromonas endodontalis (strain ATCC 35406 / BCRC 14492 / JCM 8526 / NCTC 13058 / HG 370) O X=553175 GN=POREN0001_1716 PE=4 SV=1
MPQNIIDEIKALAKSLGFVALGIARSHPIPQEVRESYISSLQEQGVGDMGYLERNLEVRFDPDKLVSGARSIIVGAFNYFPEKTQRTDAPQIAYYAYGKDYHRVVKDKLFTLLKYLQERIETPFSSRVFVDSAPLMERYWAVQSGVGKVGRNGLLIVPRFGSFCFLGEIVTTLELPADIPSEGSPCGRCMRCVEHCPAQAISKDGRFSPTRCLSYQTIEHHGSLAPKVIAQLGERIYGCDACQLVCPHNRFAYPHQEGLLKPAPDLLEMTSDDWKNLDNETFEQLFEHSAVQRVGFDGLRRNINSLLPSEDLESSTQSEK

SEQ ID NO: 79664 - protein, 335 aa, Porphyromonas gingivalis
  REGION 1..335: note = tr|A0A1R4DXL2|A0A1R4DXL2_PORGN tRNA epoxyqueuosine(34) reductase QueG OS=Porphyromonas gingivalis OX=837 GN=PGIN_13-1_01463 PE=4 SV=1
MLGCMPDDEKIKLRYSPEESARLIKEEARRLGFSACGFAEAQALPPSVVGTYEKFLSEGRHGEMDYLERNRELRYSPAELLPGTRTVISVALNYYPKIKQPASAPQIAYYAYGKDYHKVVKRLLDKLLDYIRREVCPSVSGRSFSDSAPIAERYWACRAGIGWVGRSGMLILPRGGTFFFLGELLVDIDLPPDAPMPSRCGACRNCIESCPTGAISEEGMDSRLCVSYLTIEHEGEIPPELVGKLGNRFYGCDSCQLCCPWNRYAHPSEVEAFVPREALFTFDRDDLVSLDEEKYLHFFAGSPMKRAGLDGLRRNARALEQGDKKEDEQPTDEDG

SEQ ID NO: 79665 - protein, 313 aa, Porphyromonas gingivalis
  REGION 1..313: note = tr|A0A212GAQ5|A0A212GAQ5_PORGN (Fe-S)-binding protein (Fragment) OS=Porphyromonas gingivalis SJD12; OX = 1297567 GN=SJDPG12_04340 PE=4 SV=1
LIKEEARRLGFSACGFAEAQALPPSVVGTYEKFLSEGRHGEMDYLERNRELRYSPAELLPGTRTVISVALNYYPKIKQPASAPQIAYYAYGKDYHKVVKRLLDKLLDYIRREVCPSVSGRSFSDSAPIAERYWACRAGIGWVGRSGMLILPRGGTFFFLGELLVDIDLPPDAPMPSRCGACRNCIESCPTGAISEEGMDSRLCVSYLTIEHEGEIPPELVGKLGNRFYGCDSCQLCCPWNRYAHPSEVEAFVPREALFTFDRDDLVSLDEEKYLHFFAGSPMKRAGLDGLRRNARALEQGDKKEDEQPTDEDG

SEQ ID NO: 79666 - protein, 331 aa, Porphyromonas gulae
  REGION 1..331: note = tr|A0A0A2F5F8|A0A0A2F5F8_9PORP Epoxyqueuosine reductase OS=Porphyromonas gulae OX=111105 GN=HR08_06780; PE = 4 SV=1
MPDDEKIKLRYSPEESARLIKEEARRLGFSACGFAEAQALPPSVVGTYEKFLSEGRHGEMDYLERNRELRYSPAELLPGTRTVISVALNYYPKIKQPASAPQIAYYAYGKDYHKVVKRLLDKLLDYIRREICPSVSGRSFSDSAPIAERYWACHAGIGWVGRSGMLILPRGGTFFFLGELLVDIDLPPDAPMPSRCGACRNCIESCPTGAISEEGMDSRLCVSYLTIEHEGEIPPELIGKLGNRFYGCDSCQLCCPWNRYAHPSEVEAFVPREALFTFDKDDLASLDEEKYLHFFAGSPMKRAGLDGLRRNARALEQGDKKEDEQPTDEDG

SEQ ID NO: 79667 - protein, 331 aa, Porphyromonas gulae
  REGION 1..331: note = tr|A0A0A2FYK9|A0A0A2FYK9_9PORP Epoxyqueuosine reductase OS=Porphyromonas gulae OX=111105 GN=HR15_00280; PE = 4 SV=1
MSDDEKIKLRYSPEESARLIKEEARRLGFSACGFAEAQALPPSVVGTYEKFLSEGRHGEMDYLERNRELRYSPAELLPGTRTVISVALNYYPRIKQPASAPQIAYYAYGKDYHKVVKRLLDKLLDYIRREICPSVSGRSFSDSAPIAERYWACRAGIGWVGRSGMLILPRGGTFFFLGELLVDIDLPPDTPMPSRCGACRNCIESCPTGAISEEGMDSRLCVSYLTIEHEGEIPPELVGKLGNRFYGCDSCQLCCPWNRYAHPSEVEAFVPREALFTFDKDDLASLDEEKYLHFFAGSPMKRAGLDGLRRNARALEQGDKKEDEQPTDEDG

SEQ ID NO: 79668 - protein, 305 aa, Porphyromonas levii
  REGION 1..305: note = tr|A0A4Y8WRE8|A0A4Y8WRE8_9PORP tRNA epoxyqueuosine(34) reductase QueG OS=Porphyromonas levii; OX = 28114 GN=queG PE=4 SV=1
MLTEQITEIAEGLGIDAIGFVPIQKVDSDALAQYDSWLASGKQAGMEYLEKYKEQREDPQLLLPEAKSVIVIAVSYYPAELQPSDAPQIAKYALGRDYHKVIKQLLLTLARCIETEVAAHRYRPLVDTAPFMERYWAKRSGIGFVGKNSNLIVPRVGSFVFLGELLTSLELSSELVCAKSCGSCRRCIESCPTGALSEDGLDARRCINYLTIEHRGDIPQDLSRRFGKRLYGCDTCQDVCPHNRAPRPTRHFPSSPQLLKLKWEDVRELDEIRYAQIFYGSATTRAKLEGMQRNAMIYTINNKQS

SEQ ID NO: 79669 - protein, 327 aa, unidentified
  source 1..327: note = Porphyromonas loveana
  REGION 1..327: note = tr|A0A2U1FL39|A0A2U1FL39_9PORP Epoxyqueuosine reductase OS=Porphyromonas loveana OX=1884669; GN = C7382_104139 PE=4 SV=1
MQADEKITLRYSPTESARLIKEEARRLGFSACGFAEAEALPPAVVGTYERFLSEGRHGEMDYLERNRELRYAPAALLPGTRTVISVALNYFPKTKQSPSAPQIAYYAYGKDYHRVVKRLLDQLLDYIRREICPEVTGRSFSDSAPIAERYWACRAGIGWVGRSGMLVLPEGGTFFFLGELLVDIPLPSDGPMMSRCGSCRRCIESCPTGAISEAGFDSRLCVSYLTIEHAGEIPKSLAEKLGNRFYGCDSCQLCCPWNRYAHPSEVEAFTPREALLSFNREDLATLDEDSYRHFFGGSAMKRAGLDGLLRNARALRHAATEDEETPS

SEQ ID NO: 79670 - protein, 323 aa, Porphyromonas macacae
  REGION 1..323: note = tr|A0A379EAK1|A0A379EAK1_9PORP Epoxyqueuosine reductase OS=Porphyromonas macacae OX=28115 GN=queG PE=3; SV = 1
MNNEKSRNKLGSDVAAQIKQRAFELGFAACGIVQANPVDKNVADRYSNWLQDGKHGSMSYLERNMELRFDPESLFPGVKSIIVVAMNYKPQTLQSPELPQIAYYAYGRDYHKVVKKQLNTLLEYIVKEIAPECNGRAFADSAPIMERYWAQQAGLGWIGKNGLLIIPRIGSYIVLGELFVDVDIPADKPLIRNFCGNCMACLEACPTKALYAPGIIDARKCISYMTIEAKGEIPRELSSALGNRLYGCDACQQCCPHNRKTSATTVTDFLPKPELFGLSIEAILAMDEEEFDRISAGSPIRRAGLDALKKTAQIVKDNQNNKS

SEQ ID NO: 79671 - protein, 314 aa, Porphyromonas macacae
  REGION 1..314: note = tr|A0A0A2E8Z7|A0A0A2E8Z7_9PORP Epoxyqueuosine reductase OS=Porphyromonas macacae OX=28115 GN=queG PE=3; SV = 1
MGSDVAAQIKQRAFELGFAACGIVQANPVDKNVADRYSNWLQDGKHGSMSYLERNMELRFDPESLFPGVKSIIVVAMNYKPQTLQSPELPQIAYYAYGRDYHKVVKKQLNTLLEYIVKEIAPECNGRAFADSAPIMERYWAQQAGLGWIGKNGLLIIPRIGSYIVLGELFVDVDIPADKPLIRNFCGNCMACLEACPTKALYAPGIIDARKCISYMTIEAKGEIPRELSSALGNRLYGCDACQQCCPHNRKTSATTVTDFLPKPELFGLSIEAILAMDEEEFDRISAGSPIRRAGLDALKKTAQIVKDNQNNKS

SEQ ID NO: 79672 - protein, 341 aa, Porphyromonas somerae
  REGION 1..341: note = tr|A0A134B0X3|A0A134B0X3_9PORP Epoxyqueuosine reductase OS=Porphyromonas somerae OX=322095 GN=queG PE=3; SV = 1
MESISPHDIVTQIKAEALRLGFSACGIAQAGAVPEAILQEYDSWIETGYHGDMDYLARNRELRSDPRVLLPGTKTLIMVAMNYYPETKQAPEAPQFAYYAYGRDYHKVVKKRLDQLLAFMRSELQLPVTGRAFSDSAPIMERYWAEQAGLGWRGKNSLLIIPRAGSYFVLGELLIDIELPADSPMRNLCGRCERCQTSCPTEAFLEPGRIDARRCISYLTIEQKGEIPPELRERMGRRVYGCDACQQCCPWNRYARPTTIADYTPREALLSLSPEELEAMSEEEYLALFAGTAVKRAGLAGLQRTMRDLRDNFTLRIDTDSTSSAVRRFIRPTTGDTSSEG

SEQ ID NO: 79673 - protein, 94 aa, Porphyromonas sp.
  REGION 1..94: note = tr|A0A420YW27|A0A420YW27_9PORP tRNA epoxyqueuosine(34) reductase QueG (Fragment); OS = Porphyromonas sp. OX=1924944 GN=D8B41_05985 PE=4 SV=1
SEEIPDELAPLIGNKLYGCDTCQEVCPWNKFARPTEVSDFAPRNAIMGMNAELLEEMKDSDFELHFAGSPVRRAGLKGLQRTLRAIKKNPNKEQ

SEQ ID NO: 79674 - protein, 341 aa, Porphyromonas sp.
  REGION 1..341: note = tr|J5VV99|J5VV99_9PORP Epoxyqueuosine reductase; OS = Porphyromonas sp. oral taxon 279 str. F0450 OX=1125723; GN = queG PE=3 SV=1
MESISPHDIVTQIKAEALRLGFSACGIAKAGAVPEAILQEYDSWIETGYHGDMDYLARNRELRSDPRVLLPGTKTLIMVAMNYYPETKQAPEAPQFAYYAYGRDYHKVVKKRLDQLLAFMRSELQLPVTGRAFSDSAPIMERYWAEQAGLGWRGKNSLLIIPRAGSYFVLGELLIDIELPTDSPMRNLCGRCERCQISCPTEAFLEPGRIDARRCISYLTIEQKGEIPPELRERMGRRVYGCDACQQCCPWNRYARPTTIADYTPREALLSLSPEELEAMSEEEYLALFAGTAVKRAGLAGLQRTMRDLRDNFTLPIDTASTSSAVRRFIRPTTDDTTSEG

SEQ ID NO: 79675 - protein, 297 aa, Porphyromonas uenonis
  REGION 1..297: note = tr|C2MD96|C2MD96_9PORP Putative iron-sulfur cluster-binding protein OS=Porphyromonas uenonis 60-3; OX = 596327 GN=PORUE0001_0417 PE=4 SV=1
MSAVGLAAAGAVPPDVWQAYQQTITGDAYAGLDYLQRYDDVRSDPRKLLPDAQSIIVVAQSYYPPVKQPLEAPQVAYYAYGRDYHKVVRKKLERLLSFIQSEVDQSATGRVCCDTAPLLERYWIMQSGLAYQGRSKMMIIPKLGTFFIYGFLVVSLPLEYGTVIDRNYCGRCRRCIDHCPGGALQADGTFRADRCLSYLTIEHRGAWTEGVAERLGNRLFGCDVCQTVCPHNAHCTPHDEPDFMIRPAIAQLTYEQLANFTPELYETLTIGSSMRRCAYEDFLRNAEAVLTNHTTTL

SEQ ID NO: 79676 - protein, 370 aa, unidentified
  source 1..370: note = Porticoccaceae bacterium
  REGION 1..370: note = tr|A0A2A5GKW1|A0A2A5GKW1_9GAMM Epoxyqueuosine reductase OS=Porticoccaceae bacterium OX=2026782 GN=queG; PE = 3 SV=1
MEEIDYHHLSRQIKEWGKSLGFQQVTITGIDLPKTGERLNQWLQKGYQGDMQWMSKHGEKRYHPEQLLPGTQRVISVRMDYLPDNSNMIAVLKDEDKAYISRYALGRDYHKVIRQRLKTLSKEIENAVPGSVIQRPYVDSAPVMEKPLAEKAGLGWMGKHTLIINSEAGSWFFLGEIYTSLPLPIDQTVEKNQCGDCKACLKVCPTDAFPEPYVLDARRCISYLTIEHKGSIPEEFREPMGNRVFGCDDCQAVCPWNKEATPTQEKDFSPRHNLDNRELAELFLWTEAEFLKFTEGSPIRRIGYERWLRNLAIGLGNAPTTGTILNALKTRENYPSVLVQEHVTWAQEQHLKSTTGKKKRKRKIKRPETL

SEQ ID NO: 79677 - protein, 361 aa, unidentified
  source 1..361: note = Porticoccaceae bacterium
  REGION 1..361: note = tr|A0A2D5YGS6|A0A2D5YGS6_9GAMM Epoxyqueuosine reductase OS=Porticoccaceae bacterium OX=2026782 GN=queG; PE = 3 SV=1
MPDLHENINDLDLLATKIKAWGNDLGFQKVSIVKPDLKNASHKLKIWLDQKYHGSMDWMEKHGEKRYVPEKLVERTVRVISLRMNYLSDNKMIAVLKDDNKAYISRYALGSDYHKIIRKKLSTLAKQIEKEIPTKNINQRAFVDSAPVLEKPIAAQGGLGWIGKNTLLIDDSDGSWFFLGEIYTSIPLPPDNKKTQNLCGKCNACLRVCPTNAFPEPYVLDAKKCISYQTIENKREIPIEIRPLMGNRVFGCDDCQIWCPWNRQPSQASEDIFKPKHNLDNESLLSLFNWSELEFNEKTLGSPIKRIGYERWLRNLAVGLGNAPGCPEILESLKERKKGSSPLLEEHISWAIDEQIRKLSS

SEQ ID NO: 79678 - protein, 384 aa, Porticoccus sp.
  REGION 1..384: note = tr|A0A2G2QRE5|A0A2G2QRE5_9GAMM Epoxyqueuosine reductase OS=Porticoccus sp. OX=2024853 GN=queG PE=3 SV=1
MCSETPEIDYTQLALDIKDWGKQLGFQQVAITDTDLSEAGHRLNDWLAAGHQGEMRWMSEHGEKRYHPEQLLPSTLRVITVRMDYLTDNSNMIATLKDESKAYISRYALGRDYHKLIRNRLTTLSKEIEKAVPGTVVQRPFVDSAPVMEKPLAVKAGLGWMGKHTLVINSQAGSWFFLGEIYTNLPLPVDQSSETDQCGECQACLKVCPTDAFPAPYVLDARRCISYLTIEQKGSIPEEFREPMGNRVFGCDDCQAVCPWNKTASLSDEKDFTPRHNLDNRELAELFLWSEQEFLKKTEGSPIRRVGYEGWLRNLAVGLGNAPTSETVVSALRSRESHASPMVREHVEWALGQHQQQKRRKRKITNTLNRQSLPLNEGQSFPEG

SEQ ID NO: 79679 - protein, 370 aa, Porticoccus sp.
  REGION 1..370: note = tr|A0A2E5C5I6|A0A2E5C5I6_9GAMM Epoxyqueuosine reductase OS=Porticoccus sp. OX=2024853 GN=queG PE=3 SV=1
MSSETPEIDYTQLALDIKDWGRQLGFQQVAITDTDLSETGHQLNDWLAEGHQGEMRWMSEHGEKRYHPEQLLPGTLRVITVRMDYLTDNSNMIATLKDESKAYISRYALGRDYHKLIRNRLTTLTKEIEKAVPGAVVQRPFVDSAPVMEKPLAVKAGLGWMGKHTLVINSQAGSWFFLGEIYTSLPLPVDQSSETDQCGECQACLKVCPTDAFPAPYVLDARRCISYLTIEQKGSIPEEFREPMGNRVFGCDDCQAVCPWNKAASLSDEKDFTPRHNLDNRELAELFLWSEQEFLKKTEGSSIRRVGYQGWLRNLAVGLGNAPTSETVVSALRSRESHSSPMVREHVAWALGQHQQQKRRKRKIINTLNR

SEQ ID NO: 79680 - protein, 342 aa, Poseidonocella pacifica
  REGION 1..342: note = tr|A0A1I0WP47|A0A1I0WP47_9RHOB Epoxyqueuosine reductase OS=Poseidonocella pacifica OX=871651 GN=queG; PE = 3 SV=1
MDELKARLTQAAEDMGFDLCRICRPDAVPQVPDRLAEFLDAGRHGQMSWLGERAHWRGAPNVLWPEARSVIMLGESYTPAHDPLDILAEPEKAAISVYAQNRDYHDVVKKRLKRLARWLIADAGGEVKVFVDTAPVPEKPLGEAAGLGWQGKHTNLVSRDMGSWFFIGSVFTTLDLAPDAAEVDHCGSCRRCLDVCPTDAFPAPYKLDARRCISYLTIEHKGPVPHDLRERMGNRIYGCDDCLAVCPWNKFAQEAREAKYHARQELVSPDLSELAGLDDAGFRALFSGSPIKRIGRDRFVRNVLYAIGNSGRPALGPVAATLCSDPDETVAEAARWAVERLR

SEQ ID NO: 79681 - protein, 343 aa, Poseidonocella sedimentorum
  REGION 1..343: note = tr|A0A1I6EQX5|A0A1I6EQX5_9RHOB Epoxyqueuosine reductase OS=Poseidonocella sedimentorum OX=871652 GN=queG; PE = 3 SV=1
MDDLKVRLIEAAGEMGFELCRLTRPDAVPEVPERLRAFLDKGYHGQMSWLAERSHWRGAPQVLWPEARTVIMLGESYTPEHDPLEVLSHPDRAAISVYAQNRDYHDVVKKRLKRLARWLIAEAGGEVKVFVDTAPVPEKALGAAAGLGWQGKHTNLVSRDMGSWFFIGSVFTTLELAPDAAEVDHCGSCRRCLDICPTDAFPAPYQLDARRCISYLTIEHKGPVAEELRPLLGNRIYGCDDCLAVCPWNKFAQEAREVKYRARADLMAPRLAELAALDDAGFRALFSGSPIKRIGRDRFVRNVLYAIGNSGEAGLRPAADRLRGDPCETVADAASWAVDRLSN

SEQ ID NO: 79682 - protein, 380 aa, unidentified
  source 1..380: note = Pradoshia eiseniae
  REGION 1..380: note = tr|A0A2S7MWZ2|A0A2S7MWZ2_9BACI tRNA epoxyqueuosine(34) reductase QueG OS=Pradoshia eiseniae; OX = 2064768 GN=queG PE=4 SV=1
MNHQQLKQDLIEYSKTIGIDKIGFTTSDPFLELKNRLIEQQKRNYASGFEEPNLDKRTDPKRLMPEARSIIAIAVAYPSRLHNAPKSRKGQRRGIFSRSSWGLDYHHVVKDRLKKVEAFIQERVPDALLKSMVDTGELADRAVAERAGIGWSGKNCSVLDPEYGSYMYLGEIITNIPFLPDAPMEDLCGTCTKCLDACPTGALVAGGQINAKRCISFLTQTKELIPAEFRDKVGNRLYGCDSCQTSCPYNKRVDFHLHQELEADPEIAKPELLSLLSLSNRAFKEQYGSLSGAWRGKMPIQRNAILALAHFKDPEHIGPLAELLKKDARPVIRGTAAWALGKIGGIEAAVILKECLAMEQEELVRTEIESAIAKLEKLGE

SEQ ID NO: 79683 - protein, 379 aa, unidentified
  source 1..379: note = Pradoshia sp.
  REGION 1..379: note = tr|A0A5J6XMU7|A0A5J6XMU7_9BACI tRNA epoxyqueuosine(34) reductase QueG OS=Pradoshia sp. D12; OX = 2651284 GN=queG PE=4 SV=1
MDFQILKDELIEYSKTIGIDQIGFTSADPFQVLKKRLIDQQNLNFASGFEEPDLDKRTNPRRLMPEAQSIIAIAVAYPSKLKDAPKSKVGDRRGIFSRSSWGQDYHYVVKDRLKKLEAFILERMPNSYLSSMVDTGELVDRAVAERAGIGWSGKNCSILNEEFGSYMYLGEMITSIPFPPDTPMEDLCGTCTKCLDACPTGALVQGGQINAKRCISFLTQTKDMIPYEFRDKMGNRVYGCDSCQTSCPYNRRIDFHNHPECESDPELAKPQLVSLLSLSNRQFKEKFGSVSGSWRGKMPIQRNAIIALAHFKDSESVASIKELLQKDPRPVIRGTAAWALGKIGTEEAMAVLKDCLKEETDQMVVAEINNALERLMLPE

SEQ ID NO: 79684 - protein, 320 aa, Pragia fontium
  REGION 1..320: note = tr|A0A379DLP1|A0A379DLP1_9GAMM Epoxyqueuosine reductase OS=Pragia fontium OX=82985 GN=queG PE=4 SV=1
MLRARPHELQPGTLRVISVRMNYLPPDAAFARTLGNPQLGYISRYALGRDYHKVLRQRLKKLGEKIQSHCHQLSFRPFVDSAPIMERPLAAKAGLGWTGKHSLTINREAGSWFFLGELLVDIPLPVDTPVEEGCGRCVACMTICPTNAIVEPYVVDARRCISYLTIELEGAIPEELRPLMGNRIYGCDDCQMTCPWNRLAPLTEESDFHPRQYLYQPPLLELYAWNEAEFLAKTEGSPIRRIGHFRWLRNISVALGNAPYQPEIMSALQQRKGINIVLDEHIDWAIARQLERRQQQEITVQQPKLQRLIRSIEKGLTRDA

SEQ ID NO: 79685 - protein, 379 aa, Pragia fontium
  REGION 1..379: note = tr|A0A0G3CG99|A0A0G3CG99_9GAMM Epoxyqueuosine reductase OS=Pragia fontium OX=82985 GN=queG PE=3 SV=1
MSLPLDFNQLAQHIKQWGQALGFQQVGICDTDLTSEEPKLQAWLDNQYHGDMSWMARYGMLRARPHELQPGTLRVISVRMNYLPPDAAFARTLGNPQLGYISRYALGRDYHKVLRQRLKKLGEKIQSHCHQLSFRPFVDSAPIMERPLAAKAGLGWTGKHSLTINREAGSWFFLGELLVDIPLPVDTPVEEGCGRCVACMTICPTNAIVEPYVVDARRCISYLTIELEGAIPEEFRPLMGNRIYGCDDCQMTCPWNRLAPLTEESDFHPRQYLYQPPLLELYAWDEAEFLAKTEGSPIRRIGHFRWLRNISVALGNAPYQPEIMSALQQRKGINIVLDEHIDWAIARQLERRQQQEITVQQPKLQRLIRSIEKGLTRDA

SEQ ID NO: 79686 - protein, 379 aa, Pragia sp.
  REGION 1..379: note = tr|A0A411WFX5|A0A411WFX5_9GAMM Epoxyqueuosine reductase OS=Pragia sp. CF-458 OX=2498113 GN=queG PE=3 SV=1
MSHPLDFNLLAQHIKQWGQALGFQQVGICDTDLTLEEPRLQAWLDKQYHGDMAWMARYGMMRARPHELEPGTLRVISVRMNYLPPHASFAKSLADPNIGYISRYALGRDYHKVLRQRLKKLGEKIQQHCENLHFRPFVDSAPIMERPLAAKAGIGWTGKHSLIINREAGSWFFLGELLVDLPLPIDQPVAEECGRCIACMTLCPTGAIVEPYTVDARRCVSYLTIELEGVIPEELRPLMGNRIYGCDDCQLGCPWNRIAPLTEEQDFLPRPTLHHSSLLELYAWDEATFLSKTEGSPVRRIGHMRWLRNISVALGNAPYQPEIIEALKQRKGLYPIVDEHIEWALARQWEKREQQGTEVLAPKQLRLIRSVEKGLPRDA

SEQ ID NO: 79687 - protein, 310 aa, Prevotella amnii
  REGION 1..310: note = tr|A0A134BJ24|A0A134BJ24_9BACT Putative iron-sulfur cluster-binding protein OS=Prevotella amnii OX=419005; GN = HMPREF1860_00467 PE=4 SV=1
MLSSYVIKQEAKLLGFFACGMAKALPVEEKVAKAYRKWIDSGNEAGMLYMANNVEKRLDPRLLVPGVKTIISVALSYAPSKTIPDTEYQISVYALGQDYHTLMKERLRAFAEKILPVPLSEIGDNVVRCFCDTAPVLERYWATKAGLGWIGKNHQLIIPHAGSMFFLGEVFLPFEVDIYDEPIEGRCGKCHRCLDACPTKAISEDPVFKSDKCLSYQLIENRGELSSEAKEAMGNTIYGCDRCLTSCPWNRFSIPTTEPKLQPKPELLMMTKEDWHNLTVEEYRKLFKGSAVKRVKFEGLKRNIAAKNNK

SEQ ID NO: 79688 - protein, 310 aa, Prevotella amnii; identical to SEQ ID NO: 79687
  REGION 1..310: note = tr|A0A096B0P0|A0A096B0P0_9BACT (Fe-S)-binding protein OS=Prevotella amnii DNF00058 OX=1401066; GN = HMPREF9302_02755 PE=4 SV=1

SEQ ID NO: 79689 - protein, 345 aa, Prevotella baroniae
  REGION 1..345: note = tr|U2P7Y9|U2P7Y9_9BACT Epoxyqueuosine reductase; OS = Prevotella baroniae F0067 OX=1115809 GN=queG PE=4 SV=1
MNSRLLTDRIKAEAARLGFFACGMAKAGPVDELMAQRLKSWLQEGHHAGMAYMADHTDKRLDPRLLMPGLKSIVCVALNYAPAQHMAEEEYQLAAYALGKDYHDVVKAKLRQLAASIGAVDCLYQKVEDGAQPQADDTLKCRIFVDSGPVLERYWAEKAGLGWVGRNHQLIIPRAGSMFFLGELFLSAELEYDSPMPNRCGNCHKCVDACPTGALHRHSTTFNAEQCLSYQLIENRGTLSEEARQAMGNTIYGCDRCQTACPWNRFATPNTTPELQPSADLLGMKRANWQQLTEEQYRKLFKGSAVKRVKYAGLKRNIDAAMRGETGDRQRDDDANIALTTDNIE

SEQ ID NO: 79690 - protein, 311 aa, Prevotella bergensis
  REGION 1..311: note = tr|D1PSV0|D1PSV0_9BACT Epoxyqueuosine reductase; OS = Prevotella bergensis DSM 17361 OX=585502 GN=queG PE=3; SV = 1
MSSRFSNEIKAEAKRLGFFSCGIAKAERVSQEVENHLRQWLADGMNADMEWMGNYLDKRMDPRLLMDGLKSIVSVAMNYAPTQRLPQDQPQIAAYALGQDYHEVMKQRLHRLAAFIYGEDRLKDANYRVFVDSGPVLERYWAVRAGLGWVGKNRQLIIPHAGSMFFLGELFLDFETDYDRPIADRCGACTKCIDHCPTRALSPNHDFNSTLCLSYQTIENRKELSEEAKKAMGNVIYGCDRCQAACPWNRFATPSDIPEFQPKPELLRMTRDNWKNLSVEDYRRLFKGSAVKRVKYKGLMRNISTLFSEGE

SEQ ID NO: 79691 - protein, 293 aa, Prevotella bivia
  REGION 1..293: note = tr|A0A137SR78|A0A137SR78_9BACT Putative iron-sulfur cluster-binding protein OS=Prevotella bivia OX=28125; GN = HMPREF3202_02251 PE=4 SV=1
MAKALPVDEEVARGYQRWIAKGYEAGMQYMANNMDKRLDPRLLVPGVKTIVSVALNYAPRKTLPASEYQLAAYALGLDYHELMKERLRTFAESISPIPLPPHGQTEGDNLVRCFCDTAPVLERYWAMKSGLGWIGKNHQLIIPHAGSMFFLGEVFLPFEVDVYDKPMTSRCGNCHRCLDACPTHAITEKAEFESDKCLSYQLIENRGELSSEAKAAMGNTIYGCDRCLAACPWNRFSIPTTEPSLQAKPELLAMTKEDWHNLSVDDYRKLFKGSAVKRVKFEGLKRNIAAKKE

SEQ ID NO: 79692 - protein, 313 aa, Prevotella bivia
  REGION 1..313: note = tr|I4ZBM9|I4ZBM9_9BACT Uncharacterized Fe-S protein; OS = Prevotella bivia DSM 20514 OX=868129 GN=PrebiDRAFT_1944; PE = 4 SV=1
MINSSFIKEEAKRLGFFACGMAKALPVDEEVARGYQRWIAKGYEAGMQYMANNMDKRLDPRLLVPGVKTIVSVALNYAPRKTLPASEYQLAAYALGLDYHELMKERLRTFAESISPIPLPPHGQTEGDNLVRCFCDTAPVLERYWAMKAGLGWIGKNHQLIIPHAGSMFFLGEVFLPFEVDVYDKPMTSRCGNCHRCLDACPTHAITEKAEFESDKCLSYQLIENRGELSSEAKAAMGNTIYGCDRCLAACPWNRFSIPTTEPSLQAKPELLAMTKEDWHNLSVDDYRKLFKGSAVKRVKFEGLKRNIAAKKE

SEQ ID NO: 79693 - protein, 331 aa, Prevotella bryantii
  REGION 1..331: note = tr|A0A255SU02|A0A255SU02_PREBR tRNA epoxyqueuosine(34) reductase QueG OS=Prevotella bryantii; OX = 77095 GN=queG PE=4 SV=1
MNSKLLNNTVDKKVLSQKIKAEAKSLGFFSCGIAQAKAVDHETAQHIKKWLANGDHAGMAYMNNYTDKRLDPRLLMNGVKSIVSVALNYTPNITLPQEEYQFAAYALGKDYHDIVKSKLQQLAEKIGFTPLPYHEEDRKTDGSINYYRAFCDSAPVLERYWATQAGLGWTGKNHQLIIPRAGSMFFLGELFLDIELEYDQPLSNKCGKCHQCIDACPTGALLENQELDANKCLSYQTIENRGELNKEFAKKMGNVIYGCDRCQQACPWNRYATPNTTPELQPKDELLHMTKEKWQHLTEKQYQQLFQGSAVKRAKYSGLMRNINALDNEEL

SEQ ID NO: 79694 - protein, 331 aa, Prevotella bryantii; identical to SEQ ID NO: 79693
  REGION 1..331: note = tr|D8DT88|D8DT88_PREBR Epoxyqueuosine reductase; OS = Prevotella bryantii B14 OX=752555 GN=PBR_2841 PE=4 SV=1

SEQ ID NO: 79695 - protein, 329 aa, Prevotella buccae
  REGION 1..329: note = tr|E6K816|E6K816_9BACT Putative iron-sulfur cluster-binding protein OS=Prevotella buccae ATCC 33574; OX = 873513 GN=HMPREF6485_1596 PE=4 SV=1
MSSKSLNSNDIKAEALRLGFFACGIAKAEPVDAGVAASFSHWLTEGGNADMGYMTNYLDKRLDPRLLMEGARSIISVAMNYTPAARPAEGEYQLAAYALGKDYHDVVKDRLRQLAAHLGWKDALHNEDENAHKCRIFVDSGPILERYWAERAGLGWTGRNHQLIIPKAGSMFFLGEILVDVELDYDSPMSNRCGNCHACIDACPTKALGKIFHADRCLSYQLIENRGQLTSEAQQSMGDTIYGCDRCQSACPWNRYAHPNTIPEFQPKQELLNMTRQDWQHLSEEQYRSLFKGSAVKRAKYAGLVRNITAATLQEHTVQDQLQEEEKRS

SEQ ID NO: 79696 - protein, 329 aa, Prevotella buccae
  REGION 1..329: note = tr|D3HVJ5|D3HVJ5_9BACT Putative iron-sulfur cluster-binding protein OS=Prevotella buccae D17 OX=575611; GN = HMPREF0649_00277 PE=4 SV=1
MSSKSLNSNDIKAEALRLGFFACGIAKAEPVDAGVAASFSHWLTEGGNADMGYMTNYLDKRLDPRLLMEGARSIISVAMNYTPAARPAEGEYQLAAYALGKDYHDVVKDRLRQLAAHFGWKDALHNEDGKAHKCRIFVDSGPILERYWAERAGLGWTGHNHQLIIPKAGSMFFLGEILVDIELDYDSPMPNRCGNCHACIDACPTKALGKIFHADRCLSYQLIENRGQLTSEAQQSMGDTIYGCDRCQSACPWNRYAHPNTIPEFQPKQELLNMTRQDWQHLSEEQYRSLFKGSAVKRAKYAGLVRNITAATLQEHTVQDQLQEEEKRS

SEQ ID NO: 79697 - protein, 326 aa, Prevotella buccalis
  REGION 1..326: note = tr|A0A2N6QSP9|A0A2N6QSP9_9BACT tRNA epoxyqueuosine(34) reductase QueG OS=Prevotella buccalis; OX = 28127 GN=queG PE=4 SV=1
MNSRLSSELKAEALNLGFFACGIAHAEAVDDTNASHVRQWIEDGRLADMDYMRNHTDMRLDPRLLMKGVKSIVSVAMNYTPAQHIPSDQLQFAAYAYGEDYHDIVKKKLRQLALTFDFKELRMQDEPNKEDNDTYFRVFCDSAPVLERYWATRAGLGWIGRNHQLIIPKAGSMFFLGELFLTIELDYDEPMRSHCGNCHACIDACPTGAITKDGPLDANKCLSYQTIENRGGISKDIAEKMGNTVYGCDRCQQACPWNRFSIPNNTPELQPKPEFLSMTRDKWMQLSEDEYRQLFKKSAVKRAKYEGLMRNIQAIVDLSKEQKQDH

SEQ ID NO: 79698 - protein, 326 aa, Prevotella buccalis
  REGION 1..326: note = tr|A0A096BM92|A0A096BM92_9BACT (Fe-S)-binding protein OS=Prevotella buccalis DNF00853 OX=1401074; GN = HMPREF2137_08605 PE=4 SV=1
MNSRLSNELKAEALNLGFFACGIARAEAVDATTAQHIRQWINEGRQADMDYMRNHTEMRLDPRLLMKGVKSIVSVAMNYTPAQHIPSDQLQFAAYAYGEDYHDIVKKKLRQLALKFDFKELRMQDEPNKEEEDVYFRVFCDSAPVLERYWATRAGLGWIGHNHQLIIPKAGSMFFLGELFLTIELDYDESMHSRCGNCHACIDACPTGAITKDGPLDANRCLSYQTIENRGDISKDIAEKMGNTVYGCDRCQQACPWNRFSMPNNTPELQPKPEFLSMTRDKWMQLSENEYRQLFKKSAVKRAKYEGLMRNIKAIADLSEEQKQDH

SEQ ID NO: 79699 - protein, 311 aa, unidentified
  source 1..311: note = Prevotella colorans
  REGION 1..311: note = tr|A0A2U0UM01|A0A2U0UM01_9BACT Epoxyqueuosine reductase OS=Prevotella colorans OX=1703337; GN = C7379_102167 PE=4 SV=1
MNSKLSSDIKAEAKRLGFSACGVAKAERVNQEEERHLRRWLRDGMNADMTWMGNYLEKRINPCLLMDGVRSIISVAMSYAPAKNLPKGEPQIAAYALGQDYHDVVKHKLHKLATYIYGPENVQTANYRAFVDSGPVLERYWAQRAGIGFVGKNRQLIIPKAGSMFFLGELFVDFETDYDEPMNNKCGSCTCCIDHCPTHALSMEHDFDAKLCLSYQTIENRKELSETAKKNMGNVIYGCDKCQQWCPWNRYATPNNIPEFQPKEELLSMTSEKWRSLSIDDYRRLFKGSAVKRGKYDGLMRNIKNYFNNYK

SEQ ID NO: 79700 - protein, 338 aa, Prevotella corporis
  REGION 1..338: note = tr|A0A133PT12|A0A133PT12_9BACT Putative iron-sulfur cluster-binding protein OS=Prevotella corporis OX=28128; GN = HMPREF3226_02863 PE=4 SV=1
MADDNRHTTTASRQDSKSPQKAQLQLNDIKAEAQRLGFFACGAARAEAVDAKTAATVRSWLDKGSQANMAYMANYTEKRLDPRLLVPGVKTILSLAMNYAPARPMPDGEYQLAAYAYGQDYHELMKDRLRELADSLIPHPLETGEPATEGEIRIFVDTAPVLERYWAWKAGIGWIGKNHQLIIPRAGSMFFLGEIFLPFELDAYDKPMANHCGGCHRCIDACPTHALTDEIGFDAARCLSYQLIENRGELSDEARSNMGDTIYGCDRCQQACPWNRFAMPNTEPALQPKPELLRMTKDDWHALTVEQYRALFKGSAVKRAKYEGLKRNIDATKPREKH

SEQ ID NO: 79701 - protein, 324 aa, Prevotella dentalis
  REGION 1..324: note = tr|F9D084|F9D084_PREDD Iron-sulfur cluster-binding protein OS=Prevotella dentalis (strain ATCC 49559 / DSM 3688 / JCM 13448 / NCTC 12043 / ES 2772) OX=908937 GN=Pred e_0512 PE=4 SV=1
MTSNEQLTQEIKAEAKRLGFFACGMARADRVSAAAERHLRQWLDSGMNADMDWMHNYLDKRIDPRLLMDGLQTIVCVATSYAPARTLPEGEPQIAAYALGQDYHDLLKRRLHQLAAFALRRRASDDAPTPETTGDAPRYRVFVDSGPVLERYWAVQAGLGWIGRNQQLIIPRAGSMFFLGELFLDFELCYDTPMPDRCGSCHRCIDHCPTHALLPNRDFDARRCLSYQTIENRGELSPEAREAMGDCIYGCDRCQQACPWNRFATPNATPELQPKPELLAMTREKWQHLSEEDYRRLFKGSAVKRAKYAGLMRNISNLFRNFTP

SEQ ID NO: 79702 - protein, 365 aa, Prevotella denticola
  REGION 1..365: note = tr|A0A347AWU9|A0A347AWU9_9BACT tRNA epoxyqueuosine(34) reductase QueG OS=Prevotella denticola; OX = 28129 GN=queG PE=4 SV=1
MTRQIPTSDHQPISPVPPFVIAHHRQTTSSLRGGSEEAIPSSSMSSSALNRQTATVLSASSIKSFARSLGFFSCGIAKAGPVDESTAQQYRRWLDNGEEASMAYMANYQEKRLDPRLLVPGVRSIISLALNYAPSQLLPKGEYQFAAYALGQDYHNLMKEKMRKLAEEIKNRQPLPLEEDLSIRCFCDTAPVLERYWAQKAGLGWVGRNHQLIIPHAGSMFFLGEIFIPFDVDAYDEPMPNRCGNCHRCIDACPTHAIVPGEDFHARHCLSYQLIEKRGELSEEAKAAMGDTIYGCDRCQTACPWNQFATPNTEPDLQPKPELLSMNKDKWHHLTVEDYRRLFKGSAVKRVKFEGLIRNITAKES

SEQ ID NO: 79703 - protein, 304 aa, Prevotella denticola
  REGION 1..304: note = tr|A0A096BIL0|A0A096BIL0_9BACT (Fe-S)-binding protein OS=Prevotella denticola DNF00960 OX=1401077; GN = HMPREF2139_02695 PE=4 SV=1
MKSFARSLGFFSCGIAKAGPVDESTAQQYRRWLDNGEEASMAYMANYQEKRLDPRLLVPGVRSIISLALNYAPSRLLPEGEYQFAAYALGQDYHNLMKEKMRKLAEEIKNQQPLPLEEDLSIRCFCDTAPVLERYWAQKAGLGWVGRNHQLIIPHAGSMFFLGEIFLPFDVDAYDEPMPNRCGNCHRCIDACPTHAIVPGEDFHARRCLSYQLIENRGELSEEAKAAMGDTIYGCDRCQTACPWNRFATPNTEPDLQPKPELLSMNKDKWHHLTVEDYRRLFKGSAVKRVKFEGLIRNITAKES

SEQ ID NO: 79704 - protein, 354 aa, Prevotella disiens
  REGION 1..354: note = tr|A0A3E4QLZ6|A0A3E4QLZ6_9BACT DUF1730 domain-containing protein OS=Prevotella disiens OX=28130; GN = DXC89_02405 PE=4 SV=1
MSLKFSRKEIKAAAKHFGFFACGVAKAERVDAETAARVCAWLEKGSQADMAYMGNYTDKRLDPRLLVPGTKTILSLAMNYAPAKTLPKGEYQLAAYAYGLDYHDIMKAKLRDLVEAKLRVKEEPNSRGESDSSDPSDLSDQSDQSELSDQSDTSDSSPKQSPQISPSEIRVFVDTAPVLERYWAWKAGLGWIGKSHQLIIPHAGSMFFLGEIFLPYEFDEYDEPMPSRCGNCRRCIDACPTHAITEAQGFDSVKCLSYQLIENRGSLSEEAVSAMHDTIYGCDRCQTACPWNKFATPNTTPEFQPKPELMAMTKDDWHNLTLEQYRKLFKGSAVKRVKFEGLSAILPLPMVIAT

SEQ ID NO: 79705 - protein, 354 aa, Prevotella disiens
  REGION 1..354: note = tr|U2K3J3|U2K3J3_9BACT Putative iron-sulfur cluster-binding protein OS=Prevotella disiens JCM 6334 = ATCC 29426 OX=1235811 GN=HMPREF0653_02543 PE=4 SV=1
MSLKFSRKEIKAAAKHFGFFACGVAKAERVDAETAARVCAWLEKGSQADMAYMGNYTDKRLDPRLLVPGTKTILSLAMNYAPAKTLPKGEYQLAAYAYGLDYHDIMKAKLRELVEAKLRVKEEPNSRGESDSSDQSDLSDQSNQSELSDQSDSSPKQSPQISPSEIRVFVDTAPVLERYWAWKAGLGWIGKSHQLIIPHAGSMFFLGEIFLPYEFDEYDEPMPSRCGNCRRCIDACPTHAITEAQGFDSVKCLSYQLIENRGSLSEEAVSAMHDTIYGCDRCQTACPWNKFATPNTTPEFQPKPELMAMTKDDWHNLTLEQYRKLFKGSAVKRVKFEGLKRNIAAANGNSDVIE

SEQ ID NO: 79706 - protein, 338 aa, Prevotella enoeca
  REGION 1..338: note = tr|A0A0S2KKA4|A0A0S2KKA4_9BACT Epoxyqueuosine reductase OS=Prevotella enoeca OX=76123 GN=AS203_06195; PE = 4 SV=1
MRLKLSNEIKAEALRLGFFACGIARAEPVADEVAAHVRRWLDVGGNAGMTYMGNYIDKRLDPRLLMDGVKSIVCVALNYAPAQHIPPGELQLASYAYGADYHDVVKEKLHQLAAHFGLQPFVIQESVKHPAINDISQEDRPHYRAFCDSAPVLERYWAQRAGLGWTGRNHQLIIPKAGSMFVLGELFIDIELTYDTPMQSRCGTCHKCIEACPTCALGMPNDMQGDAPGLFDAEKCLSYQTIENRGELSADASAAMGSTIYGCDRCQTACPWNRFAPPTTVPEFQPKPELLAMTREKWRKLTEEEYRKLFKGSAIKRAKYAGLMRNIRAVEKNDTHVK

SEQ ID NO: 79707 - protein, 359 aa, Prevotella fusca
  REGION 1..359: note = tr|A0A0K1NI21|A0A0K1NI21_9BACT (Fe-S)-binding protein OS=Prevotella fusca JCM 17724 OX=1236517; GN = ADJ77_02590 PE=4 SV=1
MSPVEQAKLPTPRDSYGLGNSSVIKSLAHSLGFFACGIAKAEPVDEAVAQKYRKWLENGEEASMAYMANYLEKRLDPRLLVPGVRSIVSLALNYAPAQQLPEGEYQIAAYALGLDYHDLMKVKMRELAEKIAAKFHSFQETEENQPLNRETRTKDNETNIKECGKKVPLSPRGERGWGCFCDTAPVLERYWAQKAGIGWIGRNHQLIIPHAGSMFFLGEIFLPFEVDVYDEPMANRCGSCHRCIDACPTRAIIPGEDFHAERCLSYQLIENRGELSAEAKTAMGDTIYGCDRCQTACPWNRFATPNTEPALQPKPELLNMSKEKWHNLTVEDYRRLFKGSAVKRVKFEGLKRNITVKKP

SEQ ID NO: 79708 - protein, 325 aa, Prevotella histicola
  REGION 1..325: note = tr|G6AGB4|G6AGB4_9BACT 4Fe-4S ferredoxin-type domain-containing protein OS=Prevotella histicola F0411; OX = 857291 GN=HMPREF9138_01141 PE=4 SV=1
MKQDEKMIASKIKAEAQRLGFFACGIAKAAPVEENVAEAYRKWLENGEEASMAYMTNYLEKRLNPALLVPGVRSIVSLAMNYAPAQQLPEGEYQLAAYALGQDYHDLMKQRLRELAVNIGAPMELFQKGKKPQSADEKEETGWGVFCDTAPVLERYWAQKAGLGWVGRNHQLIIPHAGSMFFLGEVFLPFAVDVYDTPMQSRCGSCHRCIDACPTHAIIPDEDFHADRCLSYQLIENRGELSDEAKAAMGDTIYGCDRCQTACPWNRFATPNTEPALQPKPELLSMSKEAWHNLSVEDYRRLFKGSAVKRVKFDGLKRNIDATNN

SEQ ID NO: 79709 - protein, 319 aa, Prevotella histicola
  REGION 1..319: note = tr|A0A096AW01|A0A096AW01_9BACT (Fe-S)-binding protein OS=Prevotella histicola JCM 15637 = DNF00424; OX = 1236504 GN=HMPREF2132_10385 PE=4 SV=1
MIASKIKAEAQRLGFFACGIAKAAPVEENVAEAYRKWLENGEEASMAYMTNYLEKRLNPALLVPGVRSIVSLAMNYAPAQQLPEGEYQLAAYALGQDYHDLMKQRLRELAVNIGAPMELFQKGKKPQSADEKEETGWGVFCDTAPVLERYWAQKAGLGWVGRNHQLIIPHAGSMFFLGEVFLPFAVDVYDTPMQSRCGSCHRCIDACPTHAIIPDEDFHADRCLSYQLIENRGELSDEAKAAMGDTIYGCDRCQTACPWNRFATPNTEPALQPKPELLSMSKEAWHNLSVEDYRRLFKGSAVKRVKFDGLKRNIDATNN

SEQ ID NO: 79710 - protein, 336 aa, Prevotella intermedia
  REGION 1..336: note = tr|A0A2G9IDE3|A0A2G9IDE3_PREIN tRNA epoxyqueuosine(34) reductase QueG OS=Prevotella intermedia; OX = 28131 GN=queG PE=4 SV=1
MSSRYSRKEIKVEAERLGFFACGIARAEPVDAETAAAVRGWINKGSQATMDYMANYTEKRLNPCLLVPGTKSIVSLAMNYAPAQTMPETEYQLAAYAYGQDYHDVMKAKLRQLATLIANKFEGESDSEVGENDGDSTAITTPKTNETSEEPAGEIRVFVDTAPVLERYWAQRAGLGWIGKNHQLIIPRAGSMFFLGEIFLPYEFDSYDSPMPSRCGNCRRCIEACPTCAITDEWGFDSEKCLSYQLIENRGELSEQAKQSMGTTIYGCDRCQTACPWNKFATPNTTPEFQPKSELLAMTKADWHNLTIDEYRALFKGSAVKRVKFDGLKRNISAKE

SEQ ID NO: 79711 - protein, 336 aa, Prevotella intermedia
  REGION 1..336: note = tr|A0A1P8JGJ7|A0A1P8JGJ7_PREIN Epoxyqueuosine reductase OS=Prevotella intermedia ATCC 25611 = DSM 20706; OX = 1122984 GN=BWX39_09055 PE=4 SV=1
MSSRYSRKEIKVEAERLGFFACGIARAEPVDAETAAAVRGWISKGSQATMDYMANYTEKRLNPCLLVPGTKSIVSLAMNYAPAQTMPETEYQLAAYAYGQDYHDVMKAKLRQLAALIANKFEGENDSEVGENDGNSTAITTPKTNKTSEEPTGEIRVFVDTAPVLERYWAQRAGLGWIGKNHQLIIPRAGSMFFLGEIFLPYEFESYDSPMPSRCGNCRRCIEACPTCAITDEWGFDSEKCLSYQLIENRGELSEQAKQSMGTTIYGCDRCQTACPWNKFATPNTTPEFQPKSELLAMTKADWHNLTIDEYRALFKGSAVKRVKFDGLKRNISAKE

SEQ ID NO: 79712 - protein, 330 aa, unidentified
  source 1..330: note = Prevotella jejuni
  REGION 1..330: note = tr|A0A2K9HG21|A0A2K9HG21_9BACT tRNA epoxyqueuosine(34) reductase QueG OS=Prevotella jejuni; OX = 1177574 GN=queG PE=4 SV=1
MSSIDTFNTNTHGMDSSVVQSSVIKSLAHSMGFFACGIAKAAPVDEVIALKYRQWLKKGEEASMAYMANYLEKRLNPCLLVPGVRSIISLALNYAPAQQIPEGEYQIAAYALGQDYHDLMKRKMRELATKIAEQYQIPQNKEDEKPTIRCFCDTAPVLERYWAQKAGLGWVGRNHQLIIPHAGSMFFLGEIFLPFDTDNYDEPMPNRCGRCHRCIDACPTRAIIPDEDFHAERCLSYQLIENRGELSDEAKAAMGDTIYGCDRCQTACPWNRYATPNTEPTLQPKPELLSMSKEKWHNLTVEEYQRLFKGSAVKRVKFEGLKRNITVKKF

SEQ ID NO: 79713 - protein, 352 aa, Prevotella loescheii
  REGION 1..352: note = tr|A0A069QLA6|A0A069QLA6_PRELO Putative iron-sulfur cluster-binding protein OS=Prevotella loescheii DSM 19665 = JCM 12249 = ATCC 15930 OX=1122985; GN = HMPREF1991_00230PE=4 SV=1
MSLRLSNDIKAEAKRLGFFACGIAKAAPVEPTTAAEVTRWLDKGCFAEMSYMNNYTDKRLNPQLLMPGLKSIVCVAMSYAPAKRMPKGQYQLASYAYGQDYHEIVKGKLRQLATHFGFEPYTEENVVPSPSPDYAAPKYRVFCDSAPILERYWAVKAGLGWTGRNHQLIIPKAGSMFVLGELFLDIELDYDAEMPNRCGNCHKCIDVCPTKALGSWQDTVGKKTFLFDAKRCLSYQTIEYRGDLKPEVAQAMGDTIYGCDKCQTICPWNAHPIATNIEELAPKPELMSMTREQWHSLTEDDYKRLFKGSAVKRAKYAGLMRNIKAVEEFQLRHRQQTNDGNNATTNNKEKKQ

SEQ ID NO: 79714 - protein, 339 aa, Prevotella maculosa
  REGION 1..339: note = tr|H1HPZ4|H1HPZ4_9BACT Putative iron-sulfur cluster-binding protein OS=Prevotella maculosa OT 289; OX = 999422 GN=HMPREF9944_02319 PE=4 SV=1
MNSRPLNKQDLTNEIKAEALRLGFFACGIAEAAPVEKATADHVKQWLKKGNHANMDYMANHTDKRLDPRLLMTGVRSIICVALNYAPHTTFPDSEYQLAAYAIGLDYHDIMKEKLRQLAAKFGYEDALFSQNAKRKCRIFADTGPVLERYWAEKAGLGWTGKNHQLIIPHAGSMFFLGELIVDEELVYDSPMENRCGNCRRCIEACPTKAITEGHEMNAARCLSYQTIENKSALSKDIIVEMGNTIYGCDRCLKACPWNRFATPNDIPELQPKAELLEMTKQQWENLTEEEYRKLFKGSAVKRAKYAGLMRNIQAVAWHSQEKQLPLPLKMKNNEQESK

SEQ ID NO: 79715 - protein, 321 aa, Prevotella marshii
  REGION 1..321: note = tr|E0NV24|E0NV24_9BACT Putative iron-sulfur cluster-binding protein OS=Prevotella marshii DSM 16973 = JCM 13450 OX=862515 GN=yjeS PE=4 SV=1
MSSRRSSEVKAEALRLGFFACGIAKAVPVDKDVATRFRQWIRNGSHADMQYMANHTDARLDPRLLMEGVKSIVCVAMNYTPAHRLSDNGYELSAYVYGKDYHDVMKVRLHTLAARLGFTRYRAFCDTAPVLERYWAVKAGLGWTGKHHQLIIPGAGSMFFLGELFTDEVFDYDSPVAGRCGRCTRCIEACPTGVLGTTFNCVKCLSYQTIENRNELSPEAARHMGNTIYGCDRCLQACPWLRTASPTTIPEFAPTEKLLSMTKERWHHLTEEDYRYLFKGSAVKRAKYTGLMRNIQAVRENNQDCDIDTTPDSPNIPSQHE

SEQ ID NO: 79716 - protein, 330 aa, Prevotella melaninogenica
  REGION 1..330: note = tr|A0A250KH45|A0A250KH45_9BACT tRNA epoxyqueuosine(34) reductase QueG OS=Prevotella melaninogenica OX=28132 GN=PMEL1_00817 PE=4 SV=1
MSSIDTFNPIMHKENSTVVQSSTIKSLARSMGFFACGIAKAAPVDEEIAQKYRRWLENGEEASMAYMTNYLEKRLDPRLLVPGVRSIVSLALNYAPAQQMPEGEYQIAAYALGQDYHDLMKQKMRELAMQITERWQLPQQKEGEEPSIRCFCDTAPVLERYWAQKAGLGWVGRNHQLIIPHAGSMFFLGEIFLPFDVDVYDEPMSNRCGNCHRCIDACPTRAIIPNEDFHAERCLSYQLIENRGELSDEAKNHMGDTIYGCDRCQTACPWNRFATPNTEPALQPKPELLCMSKEKWHNLTIEEYQRLFKGSAVKRVKFEGLKRNITVKVK

SEQ ID NO: 79717 - protein, 330 aa, Prevotella melaninogenica
  REGION 1..330: note = tr|A0A096AIE0|A0A096AIE0_9BACT (Fe-S)-binding protein OS=Prevotella melaninogenica DNF00666 OX=1401073; GN = HMPREF0661_08010 PE=4 SV=1
MSSIDALSPNINKEDSIVVQSSTIKSLAHSMGFFACGIAKAAPVDKAVAQKYRKWLENGEEATMAYMTNYLEKRLDPRLLVPGVRSIVSLALNYAPAQQLPKGEYQIAAYALGLDYHDLMKQKMRELAIKITERWQLPKQEEGEEPSVRCFCDTAPVLERYWAQKAGLGWVGRNHQLIIPHAGSMFFLGEIFLPFDVDVYDEAMSNRCGSCHRCIDACPTRAIIPDEVFHAKRCLSYQLIENRGELTDEAKSHMGDTIYGCDRCQTACPWNRFATPNTEPALQPKPELLSMSKEKWHNLTIEDYQRLFKGSAVKRVKFEGLKRNITVKEK

SEQ ID NO: 79718 - protein, 369 aa, Prevotella micans
  REGION 1..369: note = tr|H1Q0J1|H1Q0J1_9BACT Uncharacterized protein; OS = Prevotella micans F0438 OX=883158 GN=HMPREF9140_00429; PE = 4 SV=1
MRFGNIGFILKKEEYKFNSGFMKSFSSFFILLKSFLKPVIQIFIFLTLCTVMTIQVKKIDNSYLKCEARRLGFTACGIARAEPVEKETADRLRAWLSSGGEADMHYMAAHTDKRLDPRLLVPDVKSIVSVALNYAPARTFPEEEYQLAAYAYGRDYHDLMKGRLRELALTICNALSEGTESVRVFVDTAPVLERYWAWKAGLGWTGKNHQLIIPHGGTMFFLGEIFFPFDADAYDSPMPSRCGSCRRCLDACPTGAIVETKEFCSEKCLSYQLIENRGELSAEAKSAMGNMIYGCDRCQEVCPWNRFANPTDEPLLQPSDELMSMCKTDWQRLTPEKYRTLFKGSAVKRAKFEGIKRNINAANSNNKDL

SEQ ID NO: 79719 - protein, 377 aa, Prevotella multiformis
  REGION 1..377: note = tr|F0F5H9|F0F5H9_9BACT Putative iron-sulfur cluster-binding protein OS=Prevotella multiformis DSM 16608 OX=888743 GN=HMPREF9141_0845 PE=4 SV=1
MTAKTYPASLPGKADHIPVLRAVSIKSLARSFGFSACGIAKADAVEESIARRYRRWLENGEEASMSYMANYLEKRLDPRLLVPGVRSIVSLALNYAPSQLLPKGEYQFAAYALGKDYHDLMKERMRQLAGKIKELHPLLPFLPRKEAHATFPPSQQGILPIRRQAMPASSAEDPSQTSRPCTASSPPAPQREPGWGCFCDTAPVLERYWAQKAGLGWVGRNHQLIIPHAGSMFFLGEIFLPFEVDVYDESMPDRCGKCHRCVDACPTRAIVPGEDFHASRCLSYQLIENRGELSEEAKAAMGDTIYGCDRCQTACPWNRFATPSTEPELQPKPELLSMSKEKWHRLTVEDYRRLFKGSAVKRAKFDGLKRNIQAKEQ

SEQ ID NO: 79720 - protein, 329 aa, Prevotella multisaccharivorax
  REGION 1..329: note = tr|F8NC57|F8NC57_9BACT Uncharacterized protein; OS = Prevotella multisaccharivorax DSM 17128 OX=688246; GN = Premu_2674 PE=4 SV=1
MTTASSLKEIIKAGAADLGFSSIGFARALPVTESMREHYLHWLSVGGHADMRYLENNLDKRFDPRLLMPGVKTIVVVALNYFPSCRLPEGEPQIADYALGNDYHDLVKAKLRLLAERTGFQLLQRDAVAVKEGDPPGYRAFVDSAPVLERYWAVQAGLGWIGKNHQLIIPHAGSEFFLGELFVTEELPPDKPMTSRCGKCHRCVDACPTQALCLPARQVDGYGEITGFSSYRCLSYQTIENRGELSAGAQAAMDCTFYGCDCCQRACPWNRFAIPTTEEALQPRRELLEMTRQKWDNLTVETYRRLFKGSAVKRVKYEGLMRNIRALKS

SEQ ID NO: 79721 - protein, 316 aa, Prevotella nigrescens
  REGION 1..316: note = tr|A0A246EK25|A0A246EK25_9BACT tRNA epoxyqueuosine(34) reductase QueG OS=Prevotella nigrescens; OX = 28133 GN=CBG57_10485 PE=4 SV=1
MSLKYSRKEIKAEAESLGFFACGVVPAAPVDAETAAAVRRWISKGSQATMDYMANYTEKRLNPCLLVPGTKSIVSLAMNYAPAKTMPETEYQLAAYAYGQDYHDVMKAKLRQLAAIIINNFHTNNHEEPTGEIRVFVDTAPVLERYWAQRAGLGWIGKNHQLIIPHAGSMFFLGEIFLPFEFDSYDSPMPSRCGKCRRCIEACPTCAITDDFNFDSERCLSYQLIENRGELSEQAKQSMGSTIYGCDRCQTACPWNKFATPNTTPEFQPKSELLAMTKADWHNLTVEQYRALFKGSAVKRVKFDGLKRNISAKDKT

SEQ ID NO: 79722 - protein, 316 aa, Prevotella nigrescens; identical to SEQ ID NO: 79721
  REGION 1..316: note = tr|L9PY47|L9PY47_9BACT Uncharacterized protein; OS = Prevotella nigrescens F0103 OX=702439; GN = HMPREF0662_00024 PE=4 SV=1

SEQ ID NO: 79723 - protein, 318 aa, Prevotella oralis
  REGION 1..318: note = tr|E7RNK3|E7RNK3_9BACT Putative iron-sulfur cluster-binding protein OS=Prevotella oralis ATCC 33269; OX = 873533 GN=HMPREF0663_10754 PE=4 SV=1
MSSELSNSIKAEAIGLGFTACGIAKAEPVDNFTAQKVMRWLAQGDYAGMAYMNNYTDKRLDPRLLMPEVKSIVCVALNYAPARTLPEGEYQFAAYALGKDYHDIVKAKLHRLAAIFGFENYRAFCDSAPVLERYWAERAGLGWTGRNHQLIIPKAGSMFFLGELFLDVELEYDRPQVSKCGRCHACIDACPTQAILPDREFDAEKCLSYQTIENRGELTDAFACKMGNTIYGCDRCQQACPWNRFATPNTTPELQPNEALLGMTKERWHNLSEEEYRQIFKGSAVKRAKYAGLMRNIQAANKHQEETGNEYTDERQHS

SEQ ID NO: 79724 - protein, 318 aa, Prevotella oralis
  REGION 1..318: note = tr|V8BKX7|V8BKX7_9BACT 4Fe-4S ferredoxin-type domain-containing protein OS=Prevotella oralis CC98A; OX = 1073367 GN=HMPREF1199_02484 PE=4 SV=1
MSSELSNSIKAEAIGLGFTACGIAKAEPVDNVTARKVMRWLAQGDYAGMAYMNNYTDKRLDPRLLMPEVKSIVCVALNYAPARTLPEGEYQFAAYALGKDYHDIVKAKLHRLAAIFGFENYRAFCDSAPVLERYWAERAGLGWTGRNHQLIIPKAGSMFFLGELFLDVELEYDRPQVSKCGRCHACIDACPTQAILPDREFDAEKCLSYQTIENRGELTDAFACKMGNTIYGCDRCQQACPWNRFATPNTTPELQPNEALLGMTKERWHNLSEEEYRQIFKGSAVKRAKYAGLMRNIQAANKHQEETDNEYTDERQHS

SEQ ID NO: 79725 - protein, 340 aa, Prevotella oris
  REGION 1..340: note = tr|A0A448L7U2|A0A448L7U2_9BACT Epoxyqueuosine reductase OS=Prevotella oris OX=28135 GN=queG PE=4 SV=1
MNSRPLNKQDLTNEIKAEALRLGFFTCGIAKADSVEKATADHVKRWLKEGKQANMDYMANYMEKRLDPRLLMEGARSIICVALNYAPHNYCSDSEYQLAAYALGQDYHDIMKAKLRRLAAKFGYEDALISQNPEAHKCRIFVDTGPILERYWAEKAGLGWTGKNHQLIIPHAGSMFFLGEILVDEELIYDQPVKNRCGNCRKCIEACPTKAIIENCEIDAEKCLSYQTIENRSELSSEATARIGNTIYGCDACLKACPWNRFATPNDTPELQPKAELLQMTRQQWEYLSEEEYRKLFKGSAVKRAKYKGLMRNIEAAACFSREKQLPLSNKSKDYEQENK

SEQ ID NO: 79726 - protein, 340 aa, Prevotella oris
  REGION 1..340: note = tr|D1QPZ7|D1QPZ7_9BACT Putative iron-sulfur cluster-binding protein OS=Prevotella oris F0302 OX=649760; GN = HMPREF0971_01044 PE=4 SV=1
MNSRPLNKQDLTNEIKAEALRLGFFTCGIAKADSVEKATADHVKRWLKEGKQANMDYMANYMEKRLDPRLLMEGARSIICVALNYAPRNYCSDSEYQLAAYALGQDYHDIMKAKLRRLAAKFGYEDALISQNPEAHKCRIFVDTGPILERYWAEKAGLGWTGKNHQLIIPHAGSMFFLGEILVDEELIYDQPVKNRCGNCRKCIEACPTKAIIENCEIDAEKCLSYQTIENRSELSSEATARIGNTIYGCDACLKACPWNRFATPNDTPELQPKAELLQMTRQQWENLSEEEYRKLFKGSAVKRAKYKGLMRNIEAAACFSREKQLPLSNKSKDYEQENK

SEQ ID NO: 79727 - protein, 314 aa, unidentified
  source 1..314: note = Prevotella oryzae
  REGION 1..314: note = tr|A0A010ZGG8|A0A010ZGG8_9BACT Putative Fe-S protein; OS = Prevotella oryzae DSM 17970 OX=915438; GN = XylorDRAFT_0146 PE=4 SV=1
MNSKLSNNTISERSELSQKIKAEALSLGFSACGIAKAEPVSADVADHLKKWLYNKYNADMDYMNNYTDKRLDPRLLMDRLKSIVCVALNYYPQKRIPDNELQFAAYAYGNDYHDIVKSKLKLLAKKLGVTNYRAFCDSAPVLERYWAVQSGIGWTGRNHQLIIPKAGSMFFLGELFLDIELDYDKPQINRCGKCKACIEVCPTHAITADKEIDANLCLSYQTIENRGPIPQNITTAMGDTIYGCDKCQKVCPWNRFAVPTKEPELQPKEELMAMTKDKWYSLSEDDYKRLFKGSAVKRVKYTGLMRNIQAVKDK

SEQ ID NO: 79728 - protein, 340 aa, Prevotella oulorum
  REGION 1..340: note = tr|A0A1T4PA40|A0A1T4PA40_9BACT Epoxyqueuosine reductase OS=Prevotella oulorum OX=28136; GN = SAMN02745202_01368 PE=4 SV=1
MNLKHSNDIETLTLHIKAEAQRLGFFACGIAQARPVDEETAAHLKRWLDDEKFAGMDYMSNNTDKRLDPRLLLKNAQSIICVALNYAPKQAFAPHEYHIANYALGQDYHDIMKHKLRQLAASCGFEDDLISQNPQAKRCRIFVDSGPILERYWAERAGLGWIGKNHQLIIPHAGSMFFLGEILVEQPLLYDEPAKNRCGKCTKCLQACPTKAITSDNEIDAFRCLSYQTIENRSDIAAPFSTALGNTIYGCDECLKACPWNRFATPNDTPELQPRPELMAMTQEQWQNLTEEEYRKLFKGSAVKRAKYQGLMRNIKAAACASQKNKLSLPPKRREHDTED

SEQ ID NO: 79729 - protein, 340 aa, Prevotella oulorum
  REGION 1..340: note = tr|G1W915|G1W915_9BACT Uncharacterized protein; OS = Prevotella oulorum F0390 OX=702438 GN=HMPREF9431_00316; PE = 4 SV=1
MNLKHSNDIEALTLHIKAEAQRLGFFACGIAQARPVDEETAAHLKRWLDDEKFAGMDYMNNNTDKRLDPRLLLKNAQSIICVALNYAPKQAFAPHEYHIANYALGQDYHDIMKHKLRQLAASCGFEDDLISQNPQAKRCRIFVDSGPILERYWAERAGLGWIGKNHQLIIPHAGSMFFLGEILVDQPLIYDEPAKNRCGKCTKCLQACPTKAITSDNEIDAFRCLSYQTIENRSDIAAPFSAALGNTIYGCDECLKACPWNRFATPNNTPELQPRPELLAMTQEQWQNLTEEEYRKLFKGSAVKRAKYQGLMRNIKAAACASQKNKLSLPPKRREHDTED

SEQ ID NO: 79730 - protein, 314 aa, Prevotella pallens
  REGION 1..314: note = tr|A0A379GA32|A0A379GA32_9BACT Epoxyqueuosine reductase OS=Prevotella pallens OX=60133 GN=queG PE=4 SV=1
MSLKYSRKEIKAEAKSLGFFACGIVQAMPVDAETAAAVRQWISKGSQATMDYMANYTEKRLNPCLLVPGTKTIVSLAMNYAPAKTMAATEFQLAAYAYGQDYHDVMKTKLRQLATIIANKFDTDEVEKPTGEIRIFVDTAPVLERYWAQKAGLGWIGKNHQLIIPKAGSMFFLGEIFLPYEFDSYDVPMPNRCGRCKRCINACPTCAICEGKNFESERCLSYQLIENRGELSKQAKQTMGTTIYGCDRCQTACPWNKFATPNTTPEFQPKSELLAMTKADWHNLTIEQYRALFKGSAVKRVKFDGLKRNISATE

SEQ ID NO: 79731 - protein, 314 aa, Prevotella pallens
  REGION 1..314: note = tr|F9DKW8|F9DKW8_9BACT Iron-sulfur cluster-binding protein OS=Prevotella pallens ATCC 700821 OX=997353; GN = HMPREF9144_2310 PE=4 SV=1
MSLKYSKKEIKAEAKSLGFFACGIVQATPVDAETAAAVRQWISKGSQATMDYMANYTEKRLNPCLLVPGTKTIVSLAMNYAPAKTMAATEFQLAAYAYGQDYHDVMKKKLRQLATIIANKFDTDEVEKPIGEIRIFVDTAPVLERYWAQKAGLGWIGKNHQLIIPKAGSMFFLGEIFLPYEFDSYDVPMPNRCGRCKRCINACPTCAICEGKNFESERCLSYQLIENRGELSKQAKQTMGTTIYGCDRCQTACPWNKFATPNTTPEFQPKSELLAMTKADWHNLTIEQYRALFKGSAVKRVKFDGLKRNISATE

SEQ ID NO: 79732 - protein, 342 aa, Prevotella pleuritidis
  REGION 1..342: note = tr|U2MQW4|U2MQW4_9BACT Epoxyqueuosine reductase; OS = Prevotella pleuritidis F0068 OX=1081904 GN=queG PE=4; SV = 1
MRLKLSNEIKAEALRLGFFACGIARAEPVADEVAAHVRRWLDVGGNAGMTYMGNYIDKRLDPRLLMDGVKSIVCVALNYAPAQHIPPGELQLASYAYGADYHDVVKEKLHQLAAHFGLQPLVMQESVKHPAINDISQEDRPHYRAFCDSAPILERYWAERAGLGWTGRNHQLIIPKAGSMFVLGELFIDIELVYDTPIPNRCGTCYKCIDACPTRALGSHSDISAGVPALFDAEKCLSYQTIENRGPLSSAVSTAMGNTIYGCDRCQSACPWNRNAPPTTVPELQPKPELLAMTRDKWRQLTEEEYRKLFKGSAVKRAKYTGLMRNINAVTENYSKDSLNKE

SEQ ID NO: 79733 - protein, 368 aa, Prevotella saccharolytica
  REGION 1..368: note = tr|L1NFU9|L1NFU9_9BACT Putative iron-sulfur cluster-binding protein OS=Prevotella saccharolytica F0055; OX = 1127699 GN=HMPREF9151_00788 PE=4 SV=1
MTSKHSEEINSILSEETKTKLSEEIKVEAQRLGFFACGIAQATAVDPDTAAEVKRWLDKGGYAEMNYMNNHTDKRLDPRLLMPGLKSIVCVALNYAPEQRIPQTEFQLAGYAYGQDYHDVVKNKLRQLATTFGFQPYTEPTGSHTPAVPTPQTTPNPSSLIPPPLPPQFRVFCDSAPILERYWAVKAGLGWTGRNHQLIIPNAGSMFVLGELFLDIPLTYDQPLPNRCSSCHRCIDACPTGALGTWNSLTTHHLHPFDAARCLSYQTIENRGTLSTDIAAAMGNTIYGCDKCQTACPWNRFASPTNIAELRPRPELLAMTREKWLHLSEEDYQKLFKGSAVKRAKYSGLMRNITAVNNQEKDKEQPSE

SEQ ID NO: 79734 - protein, 340 aa, Prevotella salivae
  REGION 1..340: note = tr|E6MN46|E6MN46_9BACT Putative iron-sulfur cluster-binding protein OS=Prevotella salivae DSM 15606; OX = 888832 GN=yjeS PE=4 SV=1
MSSRPLNKQDLTNEIKAEALRLGFFACGIARAEHVDKATTDHINRWLKEGKFANMEYMANYTDKRLDPRLLMEGAKSIICVALNYAPQHKFNENEFHLASYALGLDYHDIMKNKLRQLAARFGFNDALKCLKSERKMCRIFVDTGPILERYWAEKAGLGWVGKNHQLIIPHAGSMFFLGEIIVDEELVYDQPAKNRCGNCHRCIDACPTKAIDEGREINAEKCLSYQTIENRESLSEEAFASIGNTIYGCDACLKACPWNKFAIPNDTPELQPKAELMQMTRQEWEILSEEDYQKLFKGSAVKRVKYKGLMRNIKAAACYSQGKHLPLSTKTKDNEQKNK

SEQ ID NO: 79735 - protein, 340 aa, Prevotella salivae
  REGION 1..340: note = tr|U2MMP2|U2MMP2_9BACT Epoxyqueuosine reductase; OS = Prevotella salivae F0493 OX=1395125 GN=queG PE=4 SV=1
MSSKSLNKQDLTNEIKAEALRLGFFACGIARAEHVDKATTDHINRWLKEGKYANMEYMANYTDKRLDPRLLMEGAKSIICVALNYAPQHKFNENEFHLASYALGLDYHDIMKNKLRQLAARFDFNDALKCLKSERKMCRIFVDTGPILERYWAEKAGLGWVGKNHQLIIPHAGSMFFLGEIIVDEELVYDQPAKNRCGNCHRCIDACPTKAIDEGREINAEKCLSYQTIENRECLSEEASASIGNTIYGCDACLKACPWNKFAIPNDTPELQPKAELMQMTRQEWEILSEEDYQKLFKGSAVKRVKYKGLMRNIKAATCYSQGKHLPLSTKTKDNEQKNK

SEQ ID NO: 79736 - protein, 308 aa, Prevotella scopos
  REGION 1..308: note = tr|A0A1B1I976|A0A1B1I976_9BACT tRNA epoxyqueuosine(34) reductase QueG OS=Prevotella scopos JCM 17725 OX=1236518 GN=AXF22_05395 PE=4 SV=1
MKFLARDVGFSACGIAKAAPVDEEIAQKYRRWLENGEEASMAYMSNYLEKRLDPRLLIPGVRSIVSLAFNYTPAQQMPKGEYQIAAYALGQDYHDLMKRKMRELAMKISERWQIPQNENKGEEPLIRCFCDTAPVLERYWAQKAGLGWVGRNHQLIIPHAGSMFFLGEIFLPFEVDVYDEPMSNRCGKCHRCIDACPTRAIIPDEDFHAERCLSYQLIENRGELSDEAKSSMGDTIYGCDRCQTACPWNRFSTPNTEPSLQPKPELLSMSKEMWHNLTVEDYQRLFKGSAVKRVKFDGLKRNIKAKKR

SEQ ID NO: 79737 - protein, 352 aa, Prevotella shahii
  REGION 1..352: note = tr|A0A318I0S9|A0A318I0S9_9BACT Epoxyqueuosine reductase OS=Prevotella shahii DSM 15611 = JCM 12083; OX = 1122991 GN=EJ73_00290 PE=4 SV=1
MSLKLSNEIKAEAKRLGFFACGIAKAAPVDATTATEVKRWLDNGCFGDMAYMNNYTDKRLNPKLLMPGLKSIVCVAMSYAPAKRIPEGQYQLASYAYGQDYHEVVKGKLRQLATHFGFEPHTEDTTLACSSFVNAIPKFRVFCDSAPILERYWAVKAGLGWTGRNHQLIIPKAGSMFVLGELFLDIELNYDEEMPNRCGACYKCIDICPTKALGTPEETMGKQTFLFNAERCLSYQTIEYRGDLQPEMANAMGDTIYGCDKCQTICPWNAHPVATNIEELSPRPELMNMTREQWHNLTEDDYKRLFKGSAVKRAKYAGLMRNIKAVEQYQKLHRLQDNKGPNALNNNEENKQ

SEQ ID NO: 79738 - protein, 318 aa, Prevotella sp.
  REGION 1..318: note = tr|A0A3D3MWS9|A0A3D3MWS9_9BACT tRNA epoxyqueuosine(34) reductase QueG OS=Prevotella sp.; OX = 59823 GN=queG PE=4 SV=1
MNSELSNHIKAEAKSLGFYACGIAKADAVDNETATRFQDWLAQGKNADMAYLNNYTDKRLDPRLLMTGLKSIVCVALNYAPAERMPDDEYQLAAYAYGQDYHNIVKNKLRQLASRFGFECMDSKGTPINDGNIHYRVFCDSAPILERYWAVRAGIGWKGKSQQLIIPQAGTMFVLGELFLDIELEYDQPMKSRCGRCHRCIDACPTQALKEGEGMDARRCLSYLTIENRGDISPEVAAKMGNTIYGCDRCQQACPWNHFAQPNHTPELQPRPELMNMTKEKWQNLTEEEYRALFRGSAVKRAKYTGLMRNIHAVEKKK

SEQ ID NO: 79739 - protein, 331 aa, Prevotella sp.; identical to SEQ ID NO: 79693
  REGION 1..331: note = tr|W5QSM5|W5QSM5_9BACT Uncharacterized protein; OS = Prevotella sp. Sc00026 OX=1231727 PE=4 SV=1

SEQ ID NO: 79740 - protein, 311 aa, Prevotella stercorea
  REGION 1..311: note = tr|A0A3R6FEC4|A0A3R6FEC4_9BACT tRNA epoxyqueuosine(34) reductase QueG OS=Prevotella stercorea; OX = 363265 GN=queG PE=4 SV=1
MTTTITSELIKAEAASLGFFACGIAKADAVEQSVVDSYRRWIAEGCNGSMAYLENYPDKRFDPRLLVPGVRSIVSVALNYAPSRCMPSDAPQFASYALGKDYHDVVKQKLSQLAERLGLELNDQIRAFCDSAPVLERYWAVRAGLGWIGRNHQLIIPRAGSMFFLGELFLPVEVEYDEPMHSRCGTCNRCVEACPTQALQRNADGETCKFDGRLCLNYQTIENRGDIPEDLASKLAPYIYGCDRCQSACPWNRFAVPNTTPELQPSDELLAMKREDWLKLTEEEYRKLFKGSAVKRAKYAGLMRNIKDALG

SEQ ID NO: 79741 - protein, 311 aa, Prevotella stercorea
  REGION 1..311: note = tr|G6AXI4|G6AXI4_9BACT Putative iron-sulfur cluster-binding protein OS=Prevotella stercorea DSM 18206; OX = 1002367 GN=HMPREF0673_01327 PE=4 SV=1
MTTTITSEQIKAEAASLGFFACGIAKADAVEQSVVDSYRRWIAEGCNGSMAYLENYPDKRFDPRLLVPGVRSIVSVALNYAPSRCMPSDAPQFASYALGKDYHDVVKQKLSQLAERLGLELNDQIRAFCDSAPVLERYWAVRAGLGWIGRNHQLIIPRAGSMFFLGELFLPVEVEYDEPMHSRCGTCNRCVEACPTQALQRNADGETCKFDGRLCLNYQTIENRGDIPEELASKLAPYIYGCDRCQSACPWNRFAVPNTTPELQPSDELLAMKREDWLKLTEEEYRKLFKGSAVKRAKYAGLMRNIKDALG

SEQ ID NO: 79742 - protein, 325 aa, Prevotella timonensis
  REGION 1..325: note = tr|A0A2K0XKZ1|A0A2K0XKZ1_9BACT tRNA epoxyqueuosine(34) reductase QueG OS=Prevotella timonensis; OX = 386414 GN=BFS16_05620 PE=4 SV=1
MNSKLSTEIKQEALKLGFTKCGIAQAKAVDEWTATQYKQWIAEEKCASMDYMRNNIEKRLDPRMLMDGVKSIVCVALNYAPAQFMPEKEWQLAAYAYGQDYHYIVKNKLRQLAQRFGFHEIIQPNNPTNDGDAIHYRVFCDSAPILERYWAVQAGLGWMGKHHQLIVPKAGSMFFLGELFLDIELTFDTPMESHCGNCRACIEACPSGAIQLDSSLDANKCLSYQTIENRGELAEGVAKDMGDMLYGCDRCLRACPWNRFSKPNDTPELQPKTELLEMTRDKWMNLSVENYQKLFKKSAVKRAKYEGLMRNIRAIASLSKNKNKE

SEQ ID NO: 79743 - protein, 325 aa, Prevotella timonensis
  REGION 1..325: note = tr|A0A098YTN1|A0A098YTN1_9BACT (Fe-S)-binding protein OS=Prevotella timonensis S9-PR14 OX=1401062; GN = HMPREF9304_06860 PE=4 SV=1
MNSKLSTEIKQEALKLGFTKCGIAQAKAVDEWTATQYKQWIAEEKCASMDYMRNNIDKRLDPRMLMEGVKSIVCVALNYAPAQFMPEKEWQLAAYAYGQDYHYIVKNKLRQLAQHFGFHEIIPPNNPTNDGDAIHYRVFCDSAPILERYWAVQAGLGWLGKHHQLIVPKAGSMFFLGELFLDIELTFDTPMESHCGNCRACIEACPSGAIQLDSSLDANKCLSYQTIENRGELAEDVAKDMGDMFYGCDRCLRACPWNRFSKPNDTPELQPKTELLEMTRDKWMNLSVENYQKLFKKSAVKRAKYEGLMRNIRAIASLSKNKNKE

SEQ ID NO: 79744 - protein, 325 aa, Prevotella veroralis
  REGION 1..325: note = tr|C9MLP6|C9MLP6_9BACT Putative iron-sulfur cluster-binding protein OS=Prevotella veroralis F0319; OX = 649761 GN=HMPREF0973_00521 PE=4 SV=1
MININATWIKEEAKRLGFFTCGVAKAEPVDEEVAKGYRKWLENGEEATMAYMSNYLEKRLDPCKLVPCVRSIVSLALNYAPSQHLPKGEYQFAAYALGQDYHDLMKVKMRELANKIMESEPYPNAFQENKEGQEEELEIRCFCDTAPVLERYWAQKAGLGWVGRNHQLIIPHAGSMFFLGEIFLPFDVDKYDEPMESRCGNCHRCIDACPTKAIIPNEDFHTDRCLSYQLIENRGDLSEDAKAAMGDTIYGCDRCQTACPWNRFATPNTEPSLQPKSELLSMSKEAWHNLSIEDYRRLFKGSAVKRVKFEGLKRNIAATQHKENE

SEQ ID NO: 79745 - protein, 313 aa, unidentified
  source 1..313: note = Prevotellaceae bacterium
  REGION 1..313: note = tr|A0A316NRN5|A0A316NRN5_9BACT tRNA epoxyqueuosine(34) reductase QueG OS=Prevotellaceae bacterium OX=2049047 GN=queG PE=4 SV=1
MLSAEYIKSVSAELGFSACGICKAEKMNKSYSDYVKRFIAEGRNGEMDYLSRNMDMRFNPEKLVEGTKSIISVALNYYPARKMNAKEYTFSYYAYGKDYHTVVKQRLFELFNRLKKSCEGNEKELEGRAFCDTAPVSERYWAWRAGVGFIGKNTLLIIPHKGSFFFLGELFVNAEVDKYDEPLKNYCGNCTKCIDACPGNAIFEPYNLDARKCLSYLTIESRKELPAGTENKMDNCIYGCDRCQSACPHNNFATPTDVIEFAPSEELFEMKREDWDSLTEEEYRKLFKGSAVKRAKYSGLMRNINAVNKKKSK

SEQ ID NO: 79746 - protein, 342 aa, unidentified
  source 1..342: note = Prevotellaceae bacterium
  REGION 1..342: note = tr|A0A239RIG7|A0A239RIG7_9BACT Epoxyqueuosine reductase OS=Prevotellaceae bacterium KH2P17 OX=1945886; GN = SAMN06298210_101209 PE=4 SV=1
MRLGFFACGIAKAGKVDADFATYYLKQVEAHNYADMSYMYEHVEMRLDPRLLMPQAQSVICVALNYAPSSRIADGELQVASYALGQDYHDIVKRKLHQLAAFIYQGAAAPTPIHHPTPATQHPSPATQHPSPTTPRYRACCDTAPILERYWAQQAGLGWIGRNRQLIIPHAGSLFFLGELLVDIDLEYDSPMPNRCGKCRSCIDSCPTHALCPSADAAQPQFSTLDAGRCLSYQTIENRGELSAEAKAKMGNNIYGCDKCQLACPWNRFQQPTSVPEFEPKPELLNMKRADWLQLSEERYRQLFKGSAVKRAKYKGLMRNIRAALASERQPQTKPSWNEKND

SEQ ID NO: 79747 - protein, 297 aa, unidentified
  source 1..297: note = Pricia antarctica
  REGION 1..297: note = tr|A0A1G7AHH1|A0A1G7AHH1_9FLAO Epoxyqueuosine reductase OS=Pricia antarctica OX=641691 GN=queG PE=3 SV=1
MIKTEAKRLGFLSCGISKAEFLEKEAPRLEKWLNKNMNGEMGYMENHFDKRLDPRLLVDGAKSVISLLLNYYPDETQREDTYKISKYAYGHDYHHVIKSKLRQLQEFISEEIGEVSGRAFVDSAPVLDKAWAAKSGLGWIGKHSNLLTQQVGSFYFIAELIVDLDLEYDTPVTDHCGTCTACIDACPTQAITEPYVVDGSKCISYFTIELKNEIPEEFQGKFDDWAFGCDICQDVCPWNRFSKPHAEPLFNPHPELLEFSKKDWEEITEDVFRKVFQKSAVKRTKFSGLTRNIEFLK

SEQ ID NO: 79748 - protein, 345 aa, unidentified
  source 1..345: note = Primorskyibacter insulae
  REGION 1..345: note = tr|A0A2R8AYN6|A0A2R8AYN6_9RHOB Epoxyqueuosine reductase OS=Primorskyibacter insulae OX=1695997 GN=queG; PE = 3 SV=1
MTSLADILKAEASALGFDACQICRPWDVPQVPDRLTAFLEAGYHGQMSWMADRTHWRSNPHALWPEAKSVIVLAESYTPDHDPTEVLNHPDQGAISVYAQNKDYHDTVKKRLKRLARWLIAEAGGEVKVFVDTAPVPEKPLGQAAGLGWQGKHTNLVSRGLGNWFFIGSVFTTLDLPPDPPEVDHCGSCRACLSACPTEAFPAPYQLDARRCISYLTIEHHGPVDPDLRPLMGNRIYGCDDCLAACPWNKFAVEAREAKYHARPDLIAPDLAELASLDDTAFRAKFSGSPIKRIGRNRFVRNVLYAIGNSGRPALATVAQGLTDDPDETVADAARWALQRLKPQQ

SEQ ID NO: 79749 - protein, 350 aa, Primorskyibacter sedentarius
  REGION 1..350: note = tr|A0A4V2UNC0|A0A4V2UNC0_9RHOB Epoxyqueuosine reductase OS=Primorskyibacter sedentarius OX=745311; GN = queG PE=3 SV=1
MEGLKDRLVARALEEGFSACRICRPWDVPQVAGRLAGFLEAGHHGQMGWMAERTHWRGDPAALWPEARSVIMLAENYGPSHDPLEILAHRDRAAISVYAQNRDYHDVVKKRLKRLGRWLIEQAAKPPSSVEPPEIKVFVDTAPVPEKPLGAAAGLGWQGKHTNLVSRELGSWFFLGSIFTTLDLPADEAERDHCGSCRACLDICPTNAFPAPYQLDARRCISYLTIEHHGPVEEDLRSLLGNRIYGCDDCLAACPWNKFAQAASEAKYHARPELLAPKLADLAVLDDAGFRAHFSGSPIKRIGRGRFVRNVLYAIGNSGDAGLLGVAQGLCEDADTVVADAARWAVSRLA

SEQ ID NO: 79750 - protein, 346 aa, Primorskyibacter sp.
  REGION 1..346: note = tr|A0A4R6AJG2|A0A4R6AJG2_9RHOB Epoxyqueuosine reductase OS=Primorskyibacter sp. SS33 OX=2547833 GN=queG; PE = 3 SV=1
MTGSLKSDLTREALEAGFAKVGICRPDAIPEAAGRLRAFLDAGCHGEMGWMAERTHWRGDPAALWPEARSVVMLAEAYTPDHDPLEDLDHPDRAAISVYAQGRDYHDVVKKRLKRVGRWLLERAPGHGIKVFVDTAPVMEKPLAQAAGLGWQGKHTNLLGRDLGNWVFLGAIFTTVELEPDPPAAESCGSCRRCLDICPTDAFPAPFQLDARRCISYLTIEHSGPVPEDLRARMGNRIYGCDDCLAVCPWNKFAVRGRDMRLATQPGRRLPELAELAALDDAAFRARFSGSPVKRIGRDRFVRNVAYAIGNSGVPRLSQAVAPLHDDPSPVVADAARWASLRLRKD

SEQ ID NO: 79751 - protein, 318 aa, Prochlorococcus marinus
  REGION 1..318: note = tr|A2BND3|A2BND3_PROMS Uncharacterized Fe-S protein; OS = Prochlorococcus marinus (strain AS9601) OX=146891; GN = A9601_00061 PE=4 SV=1
MIDTIQEKKEISKKLKERAIFEGFSVAGIASLPGSSRVKLRTNALERWLSNNYHAEMKWMEAEKRKNIGSLFKDAKSVLSVGFTYINSQNSNNNFLKVAKFSQGEDYHKVIHKKLKNIGKWIDLEIPNCKWKICVDTSPLLEKAWAEEAGIGWIGKNSNLISKKNGSWFTLGFMILTKDLMPDKPHESLCGKCDICIEHCPTKAIVEPFVIQSDLCIAYHTIESRDKTIPKKIEKNLGGWVAGCDICQDVCPWNKSVPHNNNHETTPKEWIKNLTSESLKWEDKTWQENLKGTTLKRIKPWMWRRNIQANISNKKIKK

SEQ ID NO: 79752 - protein, 312 aa, Prochlorococcus marinus
  REGION 1..312: note = tr|A0A318R4H2|A0A318R4H2_PROMR Epoxyqueuosine reductase OS=Prochlorococcus marinus XMU1408 OX=2213228; GN = queG PE=3 SV=1
MKKSVDLTKKIKEKAFEEGFDAVGIAKVPGSSRIKLRNASLERWLQAGHQAKMEWMKSPRRKNIEYMLKGVQSVLAVGLNYYVEVEKTPKDISIARYGWGKDYHKVIENKLKRIGQFLEKERPNSKWKICVDTSALLDKAWAEEAGIGWIGKHSNIINSKIGSWMFLGHLLSTEILEADEPSKPICGECEKCIDACPTKAIEEPFIVNSNKCLAYHTLENREEQLPRNIINKMGNWVAGCDICQEVCPWNKKSIPTTSEPDLQPSEWILNLTKKDALSWSDTKWKENLNSSALKRIKPWMWRRNINSISNNL

SEQ ID NO: 79753 - protein, 78 aa, Prochlorococcus sp.
  REGION 1..78: note = tr|A0A1Y3K154|A0A1Y3K154_9PROC Epoxyqueuosine reductase (Fragment) OS=Prochlorococcus sp. HOT_208_60; OX = 1945637 GN=B0W81_01820 PE=4 SV=1
GWVAGCDICQDVCPWNKKVQYNNIHETTPKEWIKNLNMDSLNWDDKTWQENLKGTTLKRIKPWMWKRNIQANIKNKKI

SEQ ID NO: 79754 - protein, 324 aa, Prochlorococcus sp.
  REGION 1..324: note = tr|A0A3R7SRZ4|A0A3R7SRZ4_9PROC Epoxyqueuosine reductase OS=Prochlorococcus sp. TMED223 OX=1986612; GN = queG PE=3 SV=1
MVVKICANQDQLSHELKEQAKKQGFDPVGIARFPGSDRLQLRSAALQRWLKAGHQADMAWMASSQRQQADQLLEGMTSLLAVGLNYFVNVQRAPGKLLVARYAWGRDYHRVIKQRLRRVGRWLEQQRPNCRWKICVDTAPLLDKAWAEEAGLGWIGKHSNLINTQRGSWMVLGHLLCTEPLTPDQPAKSLCGKCQSCLEMCPTEAITEPFVIDSRRCLAYHTIENRNPDLPENIVRSLGDWVAGCDICQDVCPWNQQSLPHSNDPDVQPRDWLLKLTRNQALSWSDTTWSEQLRGSALKRIKPWMWRRNAASTQTNKPPTLQKN

SEQ ID NO: 79755 - protein, 329 aa, unidentified
  source 1..329: note = Prochlorothrix hollandica
  REGION 1..329: note = tr|A0A0M2PSV5|A0A0M2PSV5_PROHO Epoxyqueuosine reductase OS=Prochlorothrix hollandica PCC 9006 = CALU 1027 OX=317619 GN=queG PE=3 SV=1
MPQSSPPAAAAEDTLALATALKTQALALGFHKVGIAAVPDAPTPEGLGDWLDRGYQADMAWMQNPKRQDLHQVLPGVRSVIAVALNYYTPTPHSTDPQVGKISRYGWGRDYHRILHKKLKALNLWLQQQAAAQGIPQESRYYADTGPVQDKGWAQRAGLGWIAKNGNVITRDYGSWVFLGEVLTTVALPPDAPHLAHCGTCSRCLEACPTGAIVAPAVVDANRCLAYHTIENRSPQLPAAIVPHLQGWVAGCDICQDVCPWNQRFAQETDVAEFQPYPDNIAPPLAALATLTAAQWEDRFPASALRRIKPAQWRRNAQANLDALNPEDQ

SEQ ID NO: 79756 - protein, 364 aa, Prolinoborus fasciculus
  REGION 1..364: note = tr|A0A2U3MLZ5|A0A2U3MLZ5_9NEIS Epoxyqueuosine reductase OS=Prolinoborus fasciculus OX=1056810 GN=queG; PE = 3 SV=1
MATPDSQAQIKVYQQDPAELKAWIKAQALELGFSDCVIAKPDAQAELARLQEYLDRGYHGDMKFLEENLEKRANPALLVPGTRSIICVRMDYLVDAPEPRYIPYAPNSAIIARYARGRDYHKTMRGRLKTLATKIRGKIGDFESRPFADSAPIFEKSLAESAGMGWTGKHTLLIHKTSGSFFVLGELFTSLELPFDEPATKHCGSCTACIDICPTQAIVEPYMLDARRCIAYLTIEYKGIIPEDLRRGIGNRVFGCDDCQLICPWNSFAQVTSIEDFHPRHGLDQVSLLDLWQWDEATFLSATEGSPMRRTGYQSFMRNIAIGLGNAPFDGQIIPALQQQRNQHDEIVQVHIDWAIQEQLAKSS

SEQ ID NO: 79757 - protein, 309 aa, unidentified
  source 1..309: note = Prolixibacter denitrificans
  REGION 1..309: note = tr|A0A2P8CI98|A0A2P8CI98_9BACT Epoxyqueuosine reductase OS=Prolixibacter denitrificans OX=1541063; GN = queG PE=3 SV=1
MDTEKATYSERIKEEAKRLGFTDCGIAAVEHLDEEEPRLLQWLEKGMNGQMGYMERNVEKRLDSGKLVEGARSVVSVILNYYPGETQKAEDAPVISKYAYGTDYHFVIKDKLKSLMRFIQEEIAPCSGRPFVDSAPVLDRAWARRAGLGWIGKNSHLISPKHGSFFFIGELIIDLELAYDKPADTDFCGSCTRCIDSCPTKAIVAPHTIDARKCISYLTIENREEIPEAFKGQLQDRMYGCDICQDVCPWNRTPAPHNVEAFQPKPELLEMSRAEWKELDREHFNQLFRKSAVKRAGFKGLRRNIDFLD

SEQ ID NO: 79758 - protein, 307 aa, unidentified
  source 1..307: note = Prolixibacteraceae bacterium
  REGION 1..307: note = tr|A0A3B9ZMA1|A0A3B9ZMA1_9BACT Epoxyqueuosine reductase OS=Prolixibacteraceae bacterium OX=2053594; GN = queG PE=3 SV=1
MIRNAVEGIRTKASELGFLDCGFSKAQFLGEEKERLLNWLENEMNGEMGYMANHLEKRLDPRLLVENAKSVISVLLNYFPSEKQTDPEAPVLSKYAYGTDYHFVMKDKLGELLRYIQTTIASCEGRVFVDSAPVLDRAWAARAGLGWIGKNTNLLSTEHGSFFFIGELIIDLELPSEDKVVRDHCGNCTRCIDACPTQAIVAPYILDARKCISYQTIENHGEIDPSLKDKFENRVFGCDICQDVCPWNLKSEVHHEPAFHPDLQLMKLTKEEWNEMDKPRFNELFRNSAVKRTRFEGLKRNLKFLED

SEQ ID NO: 79759 - protein, 310 aa, unidentified
  source 1..310: note = Prolixibacteraceae bacterium
  REGION 1..310: note = tr|A0A399SYJ0|A0A399SYJ0_9BACT Epoxyqueuosine reductase OS=Prolixibacteraceae bacterium XSD2 OX=2305463; GN = queG PE=3 SV=1
MKSTQTSDLIKEKAKSLGLSDCAIVPVSFLAEEKEHFESWLSAQMHGEMGYMARNTEKRLNPQLLVENAKSIIVVLQNYFPKETQSDKEAPVLSKYAYGTDYHFVLKDKLRRLLEFIHTEITSCTGRPFVDSAPVLERAWARKAGLGWIGKNSNLISLHHGSFFFIGELIVNIELPYDNPKPVSDHCGRCTKCIDACPTKAIVANRVVDARKCISYQTIEVKGELDESLKGQFDNRVFGCDICQDVCPWNLKSEPHNEASFNPHPKLLQLNKDDWENMERPLFNELFKNSAVKRAGFNGLKRNLKFLGNA

SEQ ID NO: 79760 - protein, 325 aa, unidentified
  source 1..325: note = Propionibacteriaceae bacterium
  REGION 1..325: note = tr|A0A2E0ECC2|A0A2E0ECC2_9ACTN Epoxyqueuosine reductase OS=Propionibacteriaceae bacterium OX=2021380; GN = queG PE=3 SV=1
MTSSAGQTLLSAALKERARLEGFDPVGIACLPGSPRLQMRTEALQRWLDAGFQAEMGWMAAPRRLDASSLLEGSRSLLAVGLNYYVSESRQTKNLAIARYAWGRDYHRVISQRLRRVGRWLETQRPNSRWRVCVDAEPLMDKAWAEEAGLGWIGKHSNVIHPQRGSWMVIGHLLTTEHLVADQPAQPRCGRCRACMDACPTNAIREPFVVDSHRCIAYHTIENRDQELPEFIKAGMGPWVAGCDICQDVCPFNQRQLPLSQDPEVQPRQWVLNLSAAQVEKWDLHTWDLNLRGSALRRIKPWMWRRNAASAKPVDPPTVGSSEIR

SEQ ID NO: 79761 - protein, 337 aa, Propionispora hippei
  REGION 1..337: note = tr|A0A1M6DUE8|A0A1M6DUE8_9FIRM Epoxyqueuosine reductase OS=Propionispora hippei DSM 15287 OX=1123003; GN = SAMN02745170_01004 PE=4 SV=1
MGTWEAAIKTKARELGYDGCGIIAAAPFQDFLAGVERRAGLFPHAAPFYERLKARVVSRPQSMAPWAHSIVVCLRRYDKYKLQPQLDRLVGKYYLFDGRLSYSTEYAAQAGFEQFLTDSGFRIARERLPLRWAAVKAGLGKFRNNNFVYTAQGSWHWIDAWLIDRPLTYDQPAGDSHFPCPPNCNKCIEACPTGALTAPLTMDATRCIAHLTFSEWEALPPEDVRKDMGTYLYGCDECQNACPMNKAWQGETEFTEPVALNSLLELEKLLAMDEMTYRNVLQPRFWYIAQENFWQWRCNVIRAMANKDSKAYAPYFTKALEDPDARVRQMAEWALSR

SEQ ID NO: 79762 - protein, 349 aa, Propionispora hippei
  REGION 1..349: note = tr|A0A1M6G0V3|A0A1M6G0V3_9FIRM Epoxyqueuosine reductase OS=Propionispora hippei DSM 15287 OX=1123003; GN = SAMN02745170_01581 PE=4 SV=1
MNSLAFQIKSAALEAGYEKCGIIKIAAMAGYEEKLNERMEYLPQTRPFYERFRGFAHLQDVYPWAKSIVICVEQYGKYQVPDHLQGLVGKAYLFDSRIDEHAAGYQASLQFEAAMQKMGLKTETKRKFGITGVRWAAVKAGLGIVRRNNFFYTESGSWVHLEAWLIDQELELIDTPTVRACPEHCNRCVKACPTASLSKPYTMNPLACISFLTTFGGRDLPRETYNAQIGGWIYGCDACQDVCPMNKNRWEAKEEFPFLAEISEHISLGKILSMDYELLQQILPAKFFYITKDDVWKWKVNVINAMVNEYQEKYKEAIYAACNDSHAKVREMAEWAVKKLKLPCYASNR

SEQ ID NO: 79763 - protein, 299 aa, Propionispora sp.
  REGION 1..299: note = tr|A0A0K8JH86|A0A0K8JH86_9FIRM 4Fe-4S ferredoxin-type domain-containing protein OS=Propionispora sp. 2/2-37 OX=1677858 GN=P22_2768 PE=4 SV=1
MKTESTEAKIKAKAKALGYDSCGIIAAVKFHEFLTQLDTRSNLFPHSGRFYNRLRRLVDPKENIDWAQSIIVCLRRYDKYRIPDGLDRLIGRTYLVDGRLPYAKEHAGYVAFEQFLQELGFRTAQNVVPARWSAVRAGLGKFRNNNFVYTDHGSWNWIDTWVIDKPLDYETPNDSTRYSCPEGCAKCVKACPTDALSAPLTMDATNCIAYLSFTPGFFPPENVLPKMGTWLYGCDICQNVCPVNRKTWQGNSGYFPDPFPLPDLLTLEAVFSMDEATYLEKIQPRFLVSWQAGYSTLEI

SEQ ID NO: 79764 - protein, 343 aa, Propionispora vibrioides
  REGION 1..343: note = tr|A0A1H8XFX3|A0A1H8XFX3_9FIRM Epoxyqueuosine reductase OS=Propionispora vibrioides OX=112903; GN = SAMN04490178_12351 PE=4 SV=1
MDSLAFQIKSAALAVGYEKCGIIKIADMAGYEDKLNERMEYLPQTKPFYERFRGFAHLQDTYSWAKSVVVCVEQYGKYQMPDHLQGLVGKAYLFDSRIDEHTAGYQASLQFEAAMQKMGLKTEAKRKFGITAVRWAAVKAGLGIVRRNNFFYTESGSWVHLEAWLIDQELELIDTPTVKACSEHCNRCVKACPTASLAKPYTMNPLSCISFLTTFGGRDLPQETYNAQMGGWIYGCDACQDVCPMNKNRWEATGEFPFLAEISEHISLEKILSMDYELLQQILTAKFFYITKDDVWKWKVNVINAMVNEYQEKYKEAIYAACNNSHAKVRKMAEWAVKKLNLS

SEQ ID NO: 79765 - protein, 342 aa, Propionispora vibrioides
  REGION 1..342: note = tr|A0A1H8VXA1|A0A1H8VXA1_9FIRM Epoxyqueuosine reductase OS=Propionispora vibrioides OX=112903; GN = SAMN04490178_11323 PE=4 SV=1
MGTWEEAIKAKARELGYDGCGIIAAAPFQEFLAGVERRARLFPHAAPFYDKLEARVASQPQAVVPWARSIVVCLRRYDKYKLQPQLDQLVGKYYLFDGRLPYSPEYAAQADFEQFLTDSGFRIARERLPLRWAAVKAGLGKFRNNNFVYTAQGSWHWIDAWLVDKPLAYDQPGGDSRFPCPPNCNKCIQACPTGALTAPLTMDATRCIAHLTFSEWDALPPEDVRKTMGTYLYGCDECQNACPMNKAWQGKEEFVEPVALDSLLELETLLAMDEVTYRNVLQPRFWYIAQEDFWQWRCNIIRAMANKDPKAYAPYFTRALEDPDARVRQMAEWALNRNRPTG

SEQ ID NO: 79766 - protein, 356 aa, Propionivibrio dicarboxylicus
  REGION 1..356: note = tr|A0A1G7ZPW1|A0A1G7ZPW1_9RHOO Epoxyqueuosine reductase OS=Propionivibrio dicarboxylicus OX=83767; GN = queG PE=3 SV=1
MLAALAADIRQQARALGFSACGIARADVTPDAAERLRRWLAAGRHGGMDYMAKHAALRTDPSALLPGVLSVISVRLPYWPQASSEPEQHDDAIAEVSRYARGRDYHKTVRQRLQKLAEHIQAHVRTRLGNDDFFIFRAFSDSAPVMETEFAQRAGIGWRGKHTLTLSRQGSWHFLGELFTNLPLPADASAEAHCGNCRRCLDTCPTGAIVAPYEVDARRCISYLTIELDGAIPEELRPLIGQRIYGCDDCQTCCPWNRFAQAGDPDFAVRNHLDHSPLTALFAWPADEFERRLAGSPIRRIGHERWLRNIAVALGNAAPTDAHRLALQSRRDDPSALVREHVAWALNRYDRPITTV

SEQ ID NO: 79767 - protein, 341 aa, Prosthecobacter debontii
  REGION 1..341: note = tr|A0A1T4WJB4|A0A1T4WJB4_9BACT Epoxyqueuosine reductase OS=Prosthecobacter debontii OX=48467 GN=queG; PE = 3 SV=1
MSDLKELLIAKTRELGFADCRIAPAKPAARREIFEQWVAEGKYGDMAWMAKNLDRRTDPCIVQPGAKTVIVLAMNYYQGQAPATAAGGYRIARYAWNEDYHDLIQKKLKELDAFLISHGGTQRYYVDTGPVLERDFASEAGLGWGGKSTMQIHRELGTWFFLAELISTLDFPVDTPAKDLCGKCTRCIDACPTQAITAPRRMDARRCVSYLTIESKGPIPPEFRRALGDRIYGCDDCLKACPWNKFAQVSHEATFQARESVFNQKLRDFLSLDDDGFRALFAKSPIKRIKRPAFLRNVCVALGNVGTQADVPALEAAAQDEHPLIAEHAQWALAEIRERLG

SEQ ID NO: 79768 - protein, 355 aa, Prosthecobacter fusiformis
  REGION 1..355: note = tr|A0A4R7STI2|A0A4R7STI2_9BACT Epoxyqueuosine reductase OS=Prosthecobacter fusiformis OX=48464 GN=queG; PE = 3 SV=1
MMELKTLLIAKAHELGFADCRIAPAKPAAHRELYEQWVAEGKYGDMAWMARNMDRRTDPTIVQPGAKTVIVLAMNYFQGPAPATAAGGYRIARYAWNEDYHDLIVKKLKDLDAFLIQQGGTQRYYVDTGPVLERDFASEAGLGWGGKSTMQIHRQLGTWFFLAELITTLDLPVDTPARDLCGKCTRCMVACPTQAITAPRRMDARRCVSYLTIESKGPIPLEFRRAMGDRIYGCDDCLSACPWNKFAQVSHEATFQARESVFNKKLSDFLTLTDEDFRTLFAKSPIKRIKRPAFIRNVCVALGNVGNLEDLPLLEAATHDEHPLISEHALWAVEEIHRRHAESLTASAAVGDTAF

SEQ ID NO: 79769 - protein, 318 aa, Prosthecochloris aestuarii
  REGION 1..318: note = tr|B4S3H8|B4S3H8_PROA2 4Fe-4S ferredoxin-type domain-containing protein OS=Prosthecochloris aestuarii (strain DSM 271 / SK 413) OX=290512 GN=Paes_1699 PE=4 SV=1
MHSSSPSHELTFMIMQHAQTLGFCAAGCAPLSPMNEADEKLDSMIREQRHASMLYLERQRDTRRNAAELLPGARTILCAALPYHQPQKAQPASSISQYALIPDYHKVVRDKLQQLLEFIRTRHHGTVNAIIAVDSAPLFEKAWAATAGLGRTGKNTLCIIPGHGSYIFLGEILLDIDLDCQPKRLPDPCHECDRCIRACPTGAITAPGTIDARRCISYLTVEHKDEFTPEEEIMVGTHLFGCDICQEVCPHNQQTRPDSSQAFPILEHLLGITPEEILTLSRSQFKTLFARTPIYRTGLKRLKRNARTVLKNRVIGDW

SEQ ID NO: 79770 - protein, 314 aa, unidentified
  source 1..314: note = Prosthecochloris marina
  REGION 1..314: note = tr|A0A317T4Z7|A0A317T4Z7_9CHLB tRNA epoxyqueuosine(34) reductase QueG OS=Prosthecochloris marina OX=2017681 GN=queG PE=4 SV=1
MSKDKFLSHVLQKAKECGFCAAGFTSLSSCRQETGRLVSMIEENRHGEMHYMQKNLNARVDPTNLLPGAKTIFSAALPYNFPIGQPEKKGKISRYALCTDYHCVMRDKLEKLLDYISRNHEGEVNGKVFVDSSPVFEKAWAEKAGIGRTGKNTVLISPGTGSYLFLGEILLDIELESNTKKVPDLCGNCDICLKSCPTGALLEPGKIDARRCISYLTVELKREFTTEEATMIDDWLFGCDLCQEACPHNKQKSSTEAYPELMPREELLRITPEQILALTRSQFKMLFAATPIYRTGLKRLKRNAKAVLENLKKS

SEQ ID NO: 79771 - protein, 313 aa, Prosthecochloris sp.
  REGION 1..313: note = tr|A0A1B1Q460|A0A1B1Q460_9CHLB Epoxyqueuosine reductase OS=Prosthecochloris sp. CIB 2401 OX=1868325; GN = queG PE=4 SV=1
MNRTELRERILQKAGELGFCAAGIAAPGKMEQPARMLEMMVAEGRHGQMTWLATQKNERRNPSLLFPNLTSVLCVAYPAAAHKEKTNPYLARYALREDYHAVMKRKLGLLLQTIEELSDTPVKGMACVDSSPVFEKAWAERAGILRTGKHTLGIIPGWGSNIMLGELLLDMHLEPTTTDVTDPCAHCNRCLQACPTGALTVAGRIDARKCIAYLTIEHKGEFSEKEEKMIGTHLFGCDICQDACPHNGQAGSVTDQTTTSAVREPLLELTPEKVITLTRSSFKALCAGTPIYRTGLKRLKRNARAVLKNRDVL

SEQ ID NO: 79772 - protein, 322 aa, Prosthecochloris sp.
  REGION 1..322: note = tr|A0A3R7I000|A0A3R7I000_9CHLB tRNA epoxyqueuosine(34) reductase QueG OS=Prosthecochloris sp. ZM_2 OX=2045206 GN=queG PE=4 SV=1
MARTTDLQTLTGAIIHHALELGFAAAGCAPVTGSSLPAHRLSMMIDEKRHGTMQYLEQQQNERNDPALLLPGARTVLSVALSYNQPSNEQPSSGISRYATIPDYHRVMRDLLEQLLTYITTHCPEPVSSLICVDGAPVYEKSWARHAGIGATGNNTLCIVPGCGTACFLGEILLNIDLHCPPHKAEEPCGTCTRCLDACPTGALTAPGTLDARRCISYLTVEHKENFTPEEEEMIGTHLFGCDICQDVCPHNQNAHTPPHPLFQPRKDLLTINPEQVLQLTRSQFKKLFAGTPIYRTGLKRLKRNARAVLNNRKTQEVTSKE

SEQ ID NO: 79773 - protein, 313 aa, Prosthecochloris vibrioformis; identical to SEQ ID NO: 79771
  REGION 1..313: note = tr|A0A5C4S4H7|A0A5C4S4H7_PROVB tRNA epoxyqueuosine(34) reductase QueG OS=Prosthecochloris vibrioformis OX=1098 GN=queG PE=4 SV=1

SEQ ID NO: 79774 - protein, 392 aa, Prosthecomicrobium hirschii
  REGION 1..392: note = tr|A0A0P6VQA7|A0A0P6VQA7_9RHIZ Epoxyqueuosine reductase OS=Prosthecomicrobium hirschii OX=665126 GN=queG; PE = 3 SV=1
MTPGPAKPDPAQRLAAFVKAEALRLGFAEARIVRPDAIPQAPARLAACLAEGHHGSMAWLAETAERRADPRVLWPAVRSILMLGLDYGPDEDPRAALAEPRCGAISVYARNRDYHDLIKGRLKELAGRLVARARTLGLDGDVKVFVDTAPVMEKPLAAAAGLGWQGRHTNLVSRRHGSWLFLGAVFTSLDLAPDPAETDHCGSCRACLDACPTAAFPAPYRLDARRCISYLTIEHAGPIPAEFRPLIGNRIYGCDDCLAVCPWNKFAQTAREARLVARDDLRRPALAALARLDDAAFRALFAGSPIKRIGRDRFLRNVLIAIGNSAEPSLAADALRLSADPAALVRGAAVWALSRLLDTAAFRALAEARAPAETDPDVRAEWEAASPAAAAR

SEQ ID NO: 79775 - protein, 372 aa, Proteiniborus ethanoligenes
  REGION 1..372: note = tr|A0A1H3SD20|A0A1H3SD20_9FIRM Epoxyqueuosine reductase OS=Proteiniborus ethanoligenes OX=415015; GN = SAMN05660462_02805 PE=4 SV=1
MDLKEYIAHKSKIVGIDIIGFTKPKKMDNLIGFLEKRKEKEYNTEFEESNILSRTNPLALMPESRTIIAIGVSYNIEYKSVPHESGKGTGLLSKSSWGEDYHKVLKNKMEDLVKEIKKEIDFKYIICVDTSSLIDREISKSAGIGWYGKNCSIINDDYGSFIFLGYILTDLDLEENERIEEKCGNCRLCIDACPTQAIEEGYIINAKRCISYMTQTKKKIPYDLREKIGMKIYGCDTCQLVCPKNDKVIKGSSKEFVPQLTKGIIPVEEIITISNKDFKEKYGSMSGAWRGKNILKRNAIIALGNIRDKSSIKLLKTALHDESPMIREYAAWSLIRIDKEEGVKLIRERLFKENDIEAFEEMRRLIHLFGHD

SEQ ID NO: 79776 - protein, 382 aa, Proteiniborus sp.
  REGION 1..382: note = tr|A0A1M4M5P1|A0A1M4M5P1_9FIRM Putative iron-sulfur cluster-binding protein OS=Proteiniborus sp. DW1; OX = 1889883 GN=DW1_1396 PE=4 SV=1
MDLKEYIINKSKKLGIDIIGFTKTEKLNDMAKFLRDREEKGYDTEFEEKDVVLRTNPLILMPDSRTIIAIGLSYNVEYKMISSKDIKWQGVLSKSSWGEDYHKVLRSKMEMLVKEISKVVDFKYTVCVDTSPLIDRQIAMRAGIGWYGKNCSIINDDFGSFIFLGYILTDLELEEDNRVEEKCGDCRLCIDACPGGAIEEGYIINTKRCISYLTQTKDRVPYDLREKMGVKIYGCDTCQQVCPKNQNIQKGNSEEFIPKTTNGVVNIEEIMTISNKEFKGKYGTMSGAWRGKNVLKRNAIIALANIGDKSCMELLKDALNDESPMIREYAAWAIIKIDEERGIELVQERILKEKDIDIAEEMKRLIELQRNSNQKILVKKKT

SEQ ID NO: 79777 - protein, 333 aa, Proteiniclasticum ruminis
  REGION 1..333: note = tr|A0A1I4Z1X6|A0A1I4Z1X6_9CLOT Epoxyqueuosine reductase OS=Proteiniclasticum ruminis OX=398199; GN = SAMN04488695_101897 PE=4 SV=1
MSAEGIQSKVIEKLEDLGLRHYGFMKAQALSRDSLAYFRERDERNFTTSFEENDLMRKVNLQSEMENAQTIISVAFPYFYDAYIHKEGYFSLYTLGQDYHIVVKDYLEKLAEVIRSHGYEAKVFADNNSLPERYIAYASYVGEIGKNHMLITKEYGSYVFLGEILTNLVLETRERDYQEIPLHAICGDCTNCIKACPTQILGSEFYDTKRCMSYITQSKEVPDEDLLLFKGRLFGCDTCQRSCPLNRKVNTSSIEAFRPREYMKYPNLLELLELTNQEFLKYKETSSGWRGKKLLQRNAMVELVRKGNTLDVEKLPTEYLREYYHRLEKIFNL

SEQ ID NO: 79778 - protein, 333 aa, Proteiniclasticum ruminis
  REGION 1..333: note = tr|A0A1G8H669|A0A1G8H669_9CLOT Epoxyqueuosine reductase OS=Proteiniclasticum ruminis OX=398199; GN = SAMN05421804_101485 PE=4 SV=1
MSEGIIQKKIMEKLEDLGLTQYGFMKAQALSQDSLAYFKEREERNFTTSFEENDLLRKVNLRSEMENAQTIISVAFPYFYDAYIHKEGYFSLYTLGQDYHIVVKDYLEKVADVIRSHGYEAKVFADNNSLPERYIAYASYVGEIGKNHMLITKEYGSYVFLGEILTNLVLDTRERDYHEIPLHSICGECTNCIKACPTQILGSEYYDTKRCMSYITQSKEVPDEDLLLFKGRLFGCDTCQRSCPLNRKVKTSPIEAFRPREYMKYPNLRELLELSNQEFLKYKETSSGWRGKKLLQRNAMVELVRKGNTLDLERLPTEYLREYYHRLERLFNI

SEQ ID NO: 79779 - protein, 333 aa, Proteiniclasticum sp.
  REGION 1..333: note = tr|A0A358S8K7|A0A358S8K7_9CLOT tRNA epoxyqueuosine(34) reductase QueG OS=Proteiniclasticum sp.; OX = 2053595 GN=queG PE=4 SV=1
MSAEGIQSKVIEKLENLGLRHYGFMKAQALSRDSLAYFREREERNFTTSFEENDLMRKVNLQSEMENAQTIISVAFPYFYDAYIHKEGYFSLYTLGQDYHIVVKDYLEKVAEVIRSHGYEAKVFADNNSLPERYIAYASYVGEIGKNHMLITKEYGSYVFLGEILTNLVLETRERDYQEIPLHTICGDCTNCIKACPTQILGSELYDTKRCMSYITQSKEVPDEDLLLFKGRLFGCDTCQRSCPLNRKVNTSSIEAFRPREYMKYPNLLELLELNNQEFLKYKETSSGWRGKKLLQRNAMVELVRKGNTLDAEKLPTEYLREYYHRLEKIFNL

SEQ ID NO: 79780 - protein, 306 aa, Proteiniphilum acetatigenes
  REGION 1..306: note = tr|A0A117M155|A0A117M155_9BACT Uncharacterized protein OS=Proteiniphilum acetatigenes OX=294710; GN = XD92_0125 PE=4 SV=1
MSFSEEIKQQALDLGFDACGICRATDSGEEERYMEWLRDHCQGSMRYLERNIDKRLDPRRLVEGARSIISVALNYYPLEKLPGKVPQFAYYAYGKDYHDVVREKLRALYNWIRERDPVVAGRYFTDSAPVLERFWAAQAGLGFIGKNTLLILPGRGSYFFLGELIINIELEYDAPVAENCGDCTRCLRSCPTGAIEKPYRLNGARCISYQTIENRGEIAPDIVPNLRNNVYGCDICQKVCPWNRDAVPHSTPELMPTADFLSLNLEQLQEMDEERWRIVFRHSAVKRARFEGLKRNAEAISKSRRK

SEQ ID NO: 79781 - protein, 306 aa, unidentified
  source 1..306: note = Proteiniphilum saccharofermentans
  REGION 1..306: note = tr|A0A1R3T2J5|A0A1R3T2J5_9BACT Epoxyqueuosine reductase OS=Proteiniphilum saccharofermentans OX=1642647; GN = queG PE=4 SV=1
MTFSEEIKQYALSLGFDACGICRATDSGEEERYMQWLAENGNAGMEYMSRNIDKRLDPRLLVDGAKSIISVALNYYPHERLAEEVPQFAYYAYGKDYHDVVREKLSRLFEFIKSRYPEVTGRYFSDSAPVLERFWAAQAGLGFVGKNTLLIIPRKGSYFFLGELIVDMELDYDSPISINCGKCRRCLDACPTGAIERPHYLNANKCISYQTIENKGEISSGIAPLLSNNVYGCDICQKVCPWNRYSRPHSTPEFMPLDEFLSLDLKKLIEMDEEDYRRIFRKSAVKRAKFSGLKRNVAAISKTPDK

SEQ ID NO: 79782 - protein, 312 aa, Proteiniphilum sp.
  REGION 1..312: note = tr|A0A101J3G5|A0A101J3G5_9BACT Uncharacterized protein OS=Proteiniphilum sp. 51_7 OX=1641377 GN=XE13_0628; PE = 4 SV=1
MQIEKKMSFSEEIKQQALDLGFDACGICRATDSGEEERYMEWLRDHCQGSMRYLERSIDKRLDPRRLVEGARSIISVALNYYPLEKLPGKVPQFAYYAYGKDYHDVVREKLRALYSWIRERDPAVAGRYFTDSAPVLERFWAAQAGLGFIGKNTLLILPGRGSYFFLGELIINIELEYDAPVAENCGDCTRCLRSCPTGAIEKPYRLNGARCISYQTIENRGEIAPDIVPNLRNNVYGCDICQKVCPWNRDAVPHSTPELMPTADFLSLNLEQLQEMDEERWRIVFRHSAVKRARFEGLKRNAEAISKSRRK

SEQ ID NO: 79783 - protein, 306 aa, Proteiniphilum sp.
  REGION 1..306: note = tr|A0A3M8EBG4|A0A3M8EBG4_9BACT tRNA epoxyqueuosine(34) reductase QueG OS=Proteiniphilum sp. X52 OX=2382159 GN=queG PE=4 SV=1
MTFSEEIKQYALSLGFDACGICRATHSGEEERYMRWLAENGNAGMEYMARNIDKRLDPGLLVDGAKSIISVALNYYPREKLPEEVPQFAYYAYGKDYHDVVRGKLSRLFEFVKSRYPEASGRYFSDSAPVLERFWAARAGLGFIGKNTLLIIPRKGSYFFLGELIVDIELDYDSPVSQNCGKCRRCLDACPTGAIERPHYLNANKCISYQTIENKGEISSAIAPFLSNNVYGCDICQKVCPWNRYSSPHGTPEFMPLDEFLSLDLKKLIGMDEEDYRRIFRKSAVKRAKFSGLKRNVAAISKTPDK

SEQ ID NO: 79784 - protein, 398 aa, unidentified
  source 1..398: note = Proteobacteria bacterium
  REGION 1..398: note = tr|A0A2W4MYG7|A0A2W4MYG7_9PROT Epoxyqueuosine reductase OS=Proteobacteria bacterium OX=1977087 GN=queG; PE = 3 SV=1
MGQNLKNSLIAHARELGFAVVRVTTPDRIGEAGARLRAFLAEGRHGDMNWMETTADRRADPRVLWPDVRSIVMLGFNYAPDHDPLSGLENPLLGVISRYAQSKDYHDIIKGRLKQLASWLAREAGADVKVFVDTAPLMEKPLAAAAGIGWQGKHTNLVSRTFGSWLFLGSILTTAELPTDEPEQDHCGSCRRCLDACPTRAFPAPYQLDARRCIAYLTIEHKGHIAEEFRIPMGNRVFGCDDCLAVCPWNKFARVSREIQPYLRLEASDAPLAEFLQLDDAAFRKRFAGTPVKRTGRDRFVRNALIAAGNSGQPDFVVYVEPLLSDPSPLVRAMAVWAAWRLTDQETFRRLRLRFAGNEADPVVRTEWERSPRAGNSQSHPVNARLTTADHQFIDPPR

SEQ ID NO: 79785 - protein, 365 aa, unidentified
  source 1..365: note = Proteobacteria bacterium
  REGION 1..365: note = tr|A0A3R7S879|A0A3R7S879_9PROT tRNA epoxyqueuosine(34) reductase QueG OS=Proteobacteria bacterium TMED72 OX=1986848 GN=queG PE=4 SV=1
MSPGAELDRGPTLTTRVKALGHALGLDRIGVSSPGESAQTRFLSEWLDRGYAGGMAYMSARSAERGSPERLMPGVKSVISVALAHPAPVETSGDSASNGTGRAVASYAGGEDYHDVLLDRVRALAAGVKALAGHAVETRPYVDTGPVLERVFAARAGLGWQGKNTCLIDRELGSRILLGVVLTDLELDFDRAEPDHCGTCRACIDACPTDALVEPYVLDARRCISYTTIESRESTPPDLRAAQGDWIFGCDICQDVCPWNRKPDEKEQPDPLALRERLQPDPRWVRAELHWVLSLTEETWREATRGTALRRARFQGLMRNALVAAGNSGDGSLRPLIARFSGGEDPLLVEHAEWALDRLPEAGLG

SEQ ID NO: 79786 - protein, 384 aa, Proteus hauseri
  REGION 1..384: note = tr|A0A410X9V4|A0A410X9V4_PROHU Epoxyqueuosine reductase OS=Proteus hauseri OX=183417 GN=queG PE=3 SV=1
MPLLDLNLLAHNIKLWGTELGFQQTGICDTDLSLEEPRLQAWLDKQYHGEMAWMAKYGMTRARPHELVPGTLRVISVRMNYLPTDAAFARTLNNPEQGYISRYALGRDYHKVLRQRLKKLGEKITQYCQEYEYQDIVNFRPFVDSAPIMERPLAVKAGLGWVGKHSLVLNNKAGSWFFLGELLIDLPLPVDSPVEEQCGKCVACMTTCPTGAIVEPYTIDARRCISYLTIELDGAIPEEFRPLMGNRIYGCDDCQLICPWNRFSSLTDEDDFSPRRALHTPELLDLFHWTEEKFLRITEGSPIRRIGYLRWLRNISVALGNAPYQDKIILALQERFGLSEVLDEHLHWAISQQTAKRNEKEIKIQTSQQKRLVRAITKGLPRDA

SEQ ID NO: 79787 - protein, 384 aa, Proteus hauseri
  REGION 1..384: note = tr|V6MGI4|V6MGI4_PROHU Epoxyqueuosine reductase; OS = Proteus hauseri ZMd44 OX=1312367 GN=queG PE=3 SV=1
MSSLDLNLLAQHIKLWGSELGFQQTGICDTDLSLEEPRLQAWLDKQYHGEMAWMEKYGMTRARPHELVPGTLRVISVRMNYLPTDAAFARTLNNPEQGYISRYALGRDYHKVLRQRLKKLGEKISQYCQQFEYQGIVNFRPFVDSAPIMERPLAVKAGLGWVGKHSLVINNQAGSWFFLGELLIDLPLPTDSPVEEQCGKCVACMTTCPTGAIVEPYTIDARRCISYLTIELEGAIPEEFRPLMGNRIYGCDDCQLICPWNRFSSLTDEEDFSPRRALHTPELLDLFQWSEDKFLRITEGSPIRRIGYLRWLRNISVALGNAPYQDKIILALQERFGLSDVLDEHLNWAIAQQTAKRNEKEVKIQTSQQKRLVRAITKGLPRDA

SEQ ID NO: 79788 - protein, 83 aa, Proteus mirabilis
  REGION 1..83: note = tr|A0A2X2BKG9|A0A2X2BKG9_PROMI 4Fe-4S binding protein OS=Proteus mirabilis OX=584 GN=queG_2 PE=4 SV=1
MPIDSPVEEQCGKCVACMTTCPTGAIVEPYTIDARRCISYLTIELEGAIPEEFRPLMGNRIYGCDDCQLICPWNRFFFAHRGR

SEQ ID NO: 79789 - protein, 384 aa, Proteus mirabilis
  REGION 1..384: note = tr|B4F200|B4F200_PROMH Epoxyqueuosine reductase; OS = Proteus mirabilis (strain HI4320) OX=529507 GN=queG; PE = 3 SV=1
MSSLDLHHLAQNIKRWGTELGFQQTGICDTDLSLEEPRLQAWLDKQYHGEMAWMAKYGMTRARPHELVPGTLRVISVRMNYLPTDAAFARTLNNPEQGYISRYALGRDYHKVLRQRLKKLGEKITQYCQQFEYQGIVNFRPFVDSAPIMERPLAVKAGLGWVGKHSLVINNQAGSWFFLGELLINLPLPIDSPVEEQCGKCVACMTTCPTGAIVEPYTIDARRCISYLTIELEGAIPEEFRPLMGNRIYGCDDCQLICPWNRFSSLTEEDDFSPRRALHTPELLDLFQWSEEKFLRITEGSPIRRIGYLRWLRNISVALGNAPYQDKIVLALQEHFGLGEVLDEHLHWAIAQQKAKREEKTLKIQTSQQKRLVRAITKGLPRDA

SEQ ID NO: 79790 - protein, 326 aa, Proteus penneri
  REGION 1..326: note = tr|A0A379EHK0|A0A379EHK0_9GAMM 4Fe-4S binding protein OS=Proteus penneri OX=102862 GN=queG PE=4 SV=1
MTRARPHELVPGTLRVISVRMNYLPTDAAFARTLNNPEQGYISRYALGRDYHKVLRQRLKKLGERISQYCQQFEYQGIVNFRPFVDSAPIMERPLAVKAGLGWVGKHSLVINNQAGSWFFLGELLIDLPLPTDSPVEEQCGKCVACMTTCPTGAIVEPYTIDARRCISYLTIELDGAIPEEFRPLMGNRIYGCDDCQLICPWNRFSSLTDEDDFSPRRALHTPELLDLFQWSEDKFLRITEGSPIRRIGYLRWLRNISVALGNAPYQDKIILALQERFGLSDVLDEHLNWAIAQQTAKRNEKEVKIQTSQQKRLVRAITKGLPRDA

SEQ ID NO: 79791 - protein, 209 aa, Proteus penneri
  REGION 1..209: note = tr|C0ART5|C0ART5_9GAMM Putative iron-sulfur cluster-binding protein OS=Proteus penneri ATCC 35198; OX = 471881 GN=PROPEN_00506 PE=4 SV=1
MVFLGELLIDLPLPTDSPVEEQCGKCVACMTTCPTGAIVEPYTIDARRCISYLTIELDGAIPEEFRPLMGNRIYGCDDCQLICPWNRFSSLTDEDDFSPRRALHTPELLDLFQWSEDKFLRITEGSPIRRIGYLRWLRNISVALGNAPYQDKIILALQERFGLSDVLDEHLNWAIAQQTAKRNEKEVKIQTSQQKRLVRAITKGLPRDA

SEQ ID NO: 79792 - protein, 384 aa, Proteus sp.; identical to SEQ ID NO: 79786
  REGION 1..384: note = tr|A0A3D2BIB5|A0A3D2BIB5_9GAMM Epoxyqueuosine reductase OS=Proteus sp. OX=229037 GN=queG PE=3 SV=1

SEQ ID NO: 79793 - protein, 379 aa, Proteus sp.; identical to SEQ ID NO: 77509
  REGION 1..379: note = tr|A0A1F2H937|A0A1F2H937_9GAMM Epoxyqueuosine reductase OS=Proteus sp. HMSC10D02 OX=1581079 GN=queG PE=3; SV = 1

SEQ ID NO: 79794 - protein, 384 aa, Proteus vulgaris
  REGION 1..384: note = tr|A0A292C5X7|A0A292C5X7_PROVU Epoxyqueuosine reductase OS=Proteus vulgaris OX=585 GN=queG PE=3 SV=1
MSSLDLNLLAQNIKLWGSELGFQQTGICDTDLSLEEPRLQAWLDKQYHGEMTWMEKYGMTRARPHELVPGTLRVISVRMNYLPMDAAFARTLNNPEQGYISRYALGRDYHKVLRQRLKKLGEKISQYCQQFEYQGVVNFRPFVDSAPIMERPLAVKAGLGWVGKHSLVINNQAGSWFFLGELLIDLPLPTDSPVEEQCGKCVACITTCPTGAIVEPYTIDARRCISYLTIELDGAIPEEFRPLMGNRIYGCDDCQLICPWNRFSSLTDEEDFSPRRALHTPELLDLFQWNEDKFLRITEGSPIRRIGYLRWLRNISVALGNAPYQDKIILALQERFGLSDVLDEHLNWAIAQQTAKRNEKEVKIQTSQQKRLVRAITKGLPRDA

SEQ ID NO: 79795 - protein, 384 aa, Proteus vulgaris
  REGION 1..384: note = tr|A0A0G4QBM0|A0A0G4QBM0_PROVU Epoxyqueuosine reductase OS=Proteus vulgaris OX=585 GN=queG PE=3 SV=1
MSSLDLNLLAQNIKLWGFELGFQQTGICDTDLSLEEPRLQAWLDKQYHGEMAWMAKYGMTRARPHELVPGTLRVISVRMNYLPTDAAFARTLNNPEQGYISRYALGRDYHKVLRQRLKKLGEKITQYCQQYEYQGIINFRPFVDSAPIMERPLAVKAGLGWVGKHSLVINNQAGSWFFLGELLIDLPLPTDSPVEEQCGKCVACMTTCPTGAIVEPYTIDARRCISYLTIELDGAIPEEFRPLMGNRIYGCDDCQLICPWNRFSSLTGEEDFSPRRALHTPELLDLFQWSEEKFLRITEGSPIRRIGYLRWLRNISVALGNAPYQDKIILALKERFGLSDVLDEHLNWAIAQQTAKRNEKEVKIQTSQQKRLVRAITKGLPRDA

SEQ ID NO: 79796 - protein, 385 aa, Providencia alcalifaciens
  REGION 1..385: note = tr|A0A4R3NNU6|A0A4R3NNU6_9GAMM Epoxyqueuosine reductase OS=Providencia alcalifaciens OX=126385 GN=queG; PE = 3 SV=1
MSTRLDLDLLAQNIKQWGIDAGFQQVGICDTDLTLEEPKLQAWLDKQYHGEMEWMKRHGMMRARPHELHPGTLRVISVRMNYLPAKAAFASTLNNPELGYVSRYALGRDYHKLLKKRLKVLSDRILEYCSQFECSDDLNFRPFVDSAPILERPLAVKAGLGWTGKHSLVLNQHSGSWFFLGELLVNLPLPVDQPVEEQCGRCVACMTTCPTGAIVEPYTVDARRCISYLTIELDSAIPEEFRPLMGNRIYGCDDCQLICPWNRFSQLTDEEDFSPRAALHTPELLDLFSWDEEKFLRITEGSAIRRIGYIKWLRNISVALGNAPYQDNIILALQSRLGINPMLDEHFQWSIGQQLKRREENRVTIQTSQQKRLVRAITKGLPRDA

SEQ ID NO: 79797 - protein, 385 aa, Providencia alcalifaciens
  REGION 1..385: note = tr|X6Q6Y8|X6Q6Y8_9GAMM Epoxyqueuosine reductase; OS = Providencia alcalifaciens F90-2004 OX=1256987 GN=queG; PE = 3 SV=1
MSTRLNLELLAQNIKQWGIDAGFQQVGICDTDLTLEEPKLQAWLDKQYHGDMEWMNRHGMMRARPHELHPGTLRVISVRMNYLPAKAAFASTLNNPELGYVSRYALGRDYHKLLKKRLKVLGDQILDYCQQFECSDDINFRPFVDSAPILERPLAVKAGLGWTGKHSLVLNQHAGSWFFLGELLINLPLPVDQPVEEQCGRCVACMTTCPTGAIVEPYTVDARRCISYLTIELDSAIPEEFRPLMGNRIYGCDDCQLICPWNRFSQLTDESDFSPRAALHTPELLDLFSWSEEKFLRITEGSAIRRIGYIKWLRNVSVALGNAPYQDSIVLALQNRLGMNPMLDEHFQWSIEQQLKRRAENQVTIQTSQQKRLVRAITKGLPRDA

SEQ ID NO: 79798 - protein, 385 aa, Providencia burhodogranariea
  REGION 1..385: note = tr|K8WY12|K8WY12_9GAMM Epoxyqueuosine reductase; OS = Providencia burhodogranariea DSM 19968 OX=1141662; GN = queG PE=3 SV=1
MATLLDFNLLAKNIKQWGIEIGFQQVGICDTDLSLEEPKLQAWLDKQYHGDMEWMNRHGMMRARPHELHPGTLRVISVRMNYLPAKAAFASTLSNPELGYVSRYALGRDYHKLLKKRLKTLSDRILEYCHEHACSDDLNFRPFVDSAPILERPLAVKAGLGWTGKHSLILNREAGSWFFLGELLVNLPLPVDQPVEEQCGRCVACMTTCPTGAIVEPYVVDARRCISYLTIELNGPIPEEFRPLMGNRIYGCDDCQLICPWNRFSQLTDEEDFSPRRALHTPELLELFSWSEETFLRITEGSAIRRIGYLKWLRNISVALGNAPYQDTIISALRARSGMGEMLDEHIQWAVQQQLNRREENQVTIQTSQQKRLVRAISKGLPRDA

SEQ ID NO: 79799 - protein, 385 aa, Providencia heimbachae
  REGION 1..385: note = tr|A0A4D7J9E1|A0A4D7J9E1_9GAMM Epoxyqueuosine reductase OS=Providencia heimbachae OX=333962 GN=queG PE=3; SV = 1
MTTLLDLNLLAHNIKQWGIEAGFQQVGICDTDLSLEEPKLQAWLDKQYHGDMAWMSRHGMMRARPHELHPGTLRVISVRMNYLPAKAAFASTLNNPELGYISRYALGRDYHKLLKKRLKTLSDRILKYCRELNYPDDLNFRPFVDSAPILERPLAVKAGLGWTGKHSLVLNREAGSWFFLGELLINLPLPVDHPIEEECGRCVACMTTCPTGAIVEPYTVDARRCISYLTIELDSAIPEEFRPLMGNRIYGCDDCQLICPWNRFSKLTDEEDFSPRQILHTPELLDLFAWNEEKFLRVTEGSAIRRIGYIKWLRNISVALGNAPYQDSIVIALQEKLGMNEMLDEHFHWSIAQQLTRREEHTVTIQTSQQKRLVRAITKGLPRDA

SEQ ID NO: 79800 - protein, 385 aa, Providencia heimbachae
  REGION 1..385: note = tr|A0A1B7JVZ8|A0A1B7JVZ8_9GAMM Epoxyqueuosine reductase OS=Providencia heimbachae ATCC 35613 OX=1354272; GN = queG PE=3 SV=1
MTTLLDLNLLAHNIKQWGIEAGFQQVGICDTDLSLEEPKLQAWLDKQYHGDMAWMSRHGMMRARPHELHPGTLRVISVRMNYLPAKAAFASTLNNPELGYISRYALGRDYHKLLKKRLKTLSDRILEYCRELNYPDDLNFRPFVDSAPILERPLAVKAGLGWTGKHSLVLNREAGSWFFLGELLINLPLPVDHPIEEECGRCVACMTTCPTGAIVEPYTVDARRCISYLTIELDSAIPEEFRPLMGNRIYGCDDCQLICPWNRFSKLTDEDDFSPRQTLHTPELLDLFAWNEEKFLRVTEGSAIRRIGYIKWLRNISVALGNAPYQDSIVIALQEKLGMNEMLDEHFHWSIAQQLTRREEHTVTIQTSQQKRLVRAITKGLPRDA

SEQ ID NO: 79801 - protein, 391 aa, Providencia rettgeri
  REGION 1..391: note = tr|A0A2X2DUQ0|A0A2X2DUQ0_PRORE Epoxyqueuosine reductase OS=Providencia rettgeri OX=587 GN=queG PE=3 SV=1
MPRYLDLLAQNIKQWGVEAGFQQVGICDTDLSAEEPKLQAWLDKQFHGEMEWMNRHGMMRARPHELHPGTLRVISARMNYLPAKAAFASTLNNPELGYISRYALGRDYHKLLKKRLKQLSDRILDYCREFNGVILADGTTIDDLNFRPFVDSAPILERPLAVKAGLGWTGKHSLVLNREAGSWFFLGELLINLPVSVDKPVEEDCGRCVACMTTCPTGAIVEPYTVDARRCISYLTIELDSAIPEEFRPLMGNRIYGCDDCQLICPWNRFSQLTDEDDFSPRKDLHTPKLLDLFSWDEKTFLKVTEGSAIRRIGYIKWLRNISVALGNAPYQDSIVLALQNRLGINEMLDEHFQWSIQQQLNRRNANQVTIQTSQQKRLVRAINKGLPRDA

SEQ ID NO: 79802 - protein, 393 aa, Providencia rettgeri
  REGION 1..393: note = tr|D4C3X0|D4C3X0_PRORE Epoxyqueuosine reductase; OS = Providencia rettgeri DSM 1131 OX=521000 GN=queG PE=3; SV = 1
MPRYLDLDLLAQNIKQWGVEAGFQQVGICDTDLSAEEPKLQAWLDKQFHGEMEWMNRHGMMRARPHELHPGTLRVISVRMNYLPAKAAFASTLNNPELGYISRYALGRDYHKLLKKRLKQLSDRILDYCREFNGVILADGTTIDDLNFRPFVDSAPILERPLAVKAGLGWTGKHSLVLNREAGSWFFLGELLINLPVSVDKPVEEDCGRCVACMTTCPTGAIVEPYTVDARRCISYLTIELDSAIPEEFRPLMGNRIYGCDDCQLICPWNRFSQLTDEDDFSPRKNLHTPELLDLFSWDEKTFLKVTEGSAIRRIGYIKWLRNISVALGNAPYQDSIVLALQNRLGINEMLDEHFQWSIQQQLNRRNANQVTIQTSQQKRLVRAINKGLPRDA

SEQ ID NO: 79803 - protein, 385 aa, Providencia rustigianii
  REGION 1..385: note = tr|A0A379G855|A0A379G855_9GAMM Epoxyqueuosine reductase OS=Providencia rustigianii OX=158850 GN=queG; PE = 3 SV=1
MSTRLDLNLLAQNIKQWGLDAGFQQVGICDTDLSLEEPKLQAWLDKQYHGDMEWMNRHGMMRARPHELHPGTLRVISVRMNYLPAKAAFASTLNNPELGYISRYALGRDYHKLLKKRLKILGDRILDYCRQFECSDDLNFRPFVDSAPILERPLAVKAGLGWTGKHSLVINQQAGSWFFLGELLINLPLPVDQPIEEQCGRCVACITTCPTGAIVEPYTIDARRCISYLTIELDSAIPEEFRPLMGNRIYGCDDCQLICPWNRFSQLTDEDDFSPRVALHTPELLDLFAWSEDKFLRATEGSAIRRIGYIKWLRNISVALGNAPYQDQIVLALQNRLGINPMLDEHFQWSIHQQLQRREENQVTIQTSQQKRLVRAITKGLPRDA

SEQ ID NO: 79804 - protein, 385 aa, Providencia rustigianii
  REGION 1..385: note = tr|D1P2U5|D1P2U5_9GAMM Epoxyqueuosine reductase; OS = Providencia rustigianii DSM 4541 OX=500637 GN=queG PE=3; SV = 1
MSTRLDLNLLAQNIKQWGLDAGFQQVGICDTDLSLEEPKLQAWLDKQYHGDMEWMNRHGMMRARPHELHPGTLRVISVRMNYLPAKAAFASTLNNPELGYISRYALGRDYHKLLKKRLKILGDRILDYCRQFECSDDLNFRPFVDSAPILERPLAVKAGLGWTGKHSLVINQQAGSWFFLGELLINLPLPVDQPIEEQCGRCVACITTCPTGAIVEPYTIDARRCISYLTIELDGAIPEEFRPLMGNRIYGCDDCQLICPWNRFSQLTDEDDFSPRAALHTPELLDLFAWSEDKFLRATEGSAIRRIGYIKWLRNISVALGNAPYQDQIVLALQNRLGINPMLDEHFQWSIRQQLQRREENQVTIQTSQQKRLVRAITKGLPRDA

SEQ ID NO: 79805 - protein, 385 aa, Providencia sneebia
  REGION 1..385: note = tr|K8WM12|K8WM12_9GAMM Epoxyqueuosine reductase; OS = Providencia sneebia DSM 19967 OX=1141660 GN=queG PE=3; SV = 1
MAILLDLDLLAQNIKQWGLEVGFQQVGICDTDLSLEEPKLQAWLDKQYHGDMAWMERHGMMRARPHELHPGTLRVISVRMNYLPAKAAFASTLNNPELGYISRYALGRDYHKLLKQRLKKLSDRILEYCREHTCSDELNFRPFVDSAPILERPIAVKAGLGWTGKHSLILNREAGSWFFLGELLVNLPLPVDQPIEEQCGRCVACMTTCPTGAIVEPYVVDARRCISYLTIELDGPIPEEFRPLMGNRIYGCDDCQLICPWNRFSQLTDEEDFSPRRALHTPELLELFSWTEEKFLRITEGSAIRRIGYMKWLRNISVALGNAPYQDGIVVALRERLGMGEMLDEHFNWAIQQQLYRREENQVAIQTSQQKRLVRAISKGLPRDA

SEQ ID NO: 79806 - protein, 385 aa, Providencia sp.
  REGION 1..385: note = tr|A0A356D3R3|A0A356D3R3_PROSP Epoxyqueuosine reductase OS=Providencia sp. OX=589 GN=queG PE=3 SV=1
MAKLLDLNTLVQNIKQWGIEAGFQQVGICDTDLSLEEPKLQAWLDKQYHGDMEWMKRHGMMRARPHELHPGTLRVISVRMNYLPAKAAFASTLNNPDLGYVSRYALGRDYHKLLKKRLKILADKILAYCLEFDYPDALNFRPFVDSAPILERPLAVKAGLGWTGKHSLVLNQEAGSWFFLGELLVNLPLPVDQPVEEQCGRCVACMTTCPTGAIVEPYTIDARRCISYLTIELDTAIPEEFRSLMGNRIYGCDDCQLICPWNRFSQLTDEEDFSPRQALHTPELLDLFSWNEEKFLRVTEGSAIRRIGYIKWLRNISVALGNAAYQDRIVLALQEKLGINEMLDEHFHWAILQQLNRREENQVTIQTSQQKRLVRVITKGLPRDA

SEQ ID NO: 79807 - protein, 393 aa, Providencia sp.
  REGION 1..393: note = tr|A0A345M041|A0A345M041_9GAMM Epoxyqueuosine reductase OS=Providencia sp. WCHPHu000369 OX=2027290; GN = queG PE=3 SV=1
MARYLDLDLLAQNIKQWGVDAGFQQVGICDTDLSAEEPKLQAWLDKQFHGEMEWMSRHGMMRARPHELHPGTLRVISVRMNYLPAKAAFASTLNNPELGYISRYALGRDYHKLLKKRLKQLSDRILDYCREFNGMILPDGTTIDDLNFRPFVDSAPILERPLAVKAGLGWTGKHSLVLNREAGSWFFLGELLINLPVPVDKPIEEDCGRCVACMTTCPTGAIVEPYTVDARRCISYLTIELDSAIPEEFRPLMGNRIYGCDDCQLICPWNRFSQLTDEDDFSPRKELHTPELLDLFSWDEKTFLKVTEGSAIRRIGYIKWLRNISVALGNAPYQDSIVVALQNRLGINAMLDEHFQWSIQQQLKQRNTNQVTIQTSQQKRLVRVINKGLPRDA

SEQ ID NO: 79808 - protein, 385 aa, Providencia stuartii
  REGION 1..385: note = tr|A0A379GSQ3|A0A379GSQ3_PROST Epoxyqueuosine reductase OS=Providencia stuartii OX=588 GN=queG PE=3 SV=1
MATHLDLNLLAQNIKQWGSEVGFQQVGICDTDLSLEEPKLQAWLDKQYHGEMAWMARHGMMRARPHELHPGTLRVISVRMNYLPAKAAFASTLSNPELGYISRYALGRDYHKLLKKRLKMLSDRILAYCREHICSDDLNFRPFVDSAPILERPLAVKAGLGWTGKHSLILNREAGSWFFLGELLVNLPLPIDQPVEEQCGRCVACMTTCPTGAIVEPYVVDARRCISYLTIELDGPIPEEFRPLMGNRIYGCDDCQLICPWNRFSQLTDEEDFSPRRVLHTPELLELFSWDEETFLKVTEGSAIRRIGYLKWLRNISVALGNAPYQDTIVNALHSRLGMGEMLDEHIQWAIQQQLQRREENQVTIQTSQQKRLVRAISKGLPRDA

SEQ ID NO: 79809 - protein, 385 aa, Providencia stuartii
  REGION 1..385: note = tr|B2Q4Q6|B2Q4Q6_PROST Epoxyqueuosine reductase; OS = Providencia stuartii ATCC 25827 OX=471874 GN=queG PE=3; SV = 1
MATHLDLNLLAQNIKQWGSEVGFQQVGICDTDLSLEEPKLQAWLDKQYHGEMAWMARHGMMRARPHELHPGTLRVISVRMNYLPAKAAFASTLSNPELGYISRYALGRDYHKLLKKRLKMLSDRILAYCREHICSDDLNFRPFVDSAPILERPLAVKAGLGWTGKHSLILNREAGSWFFLGELLVNLPLPIDQPVEEQCGRCVACMTTCPTGAIVEPYVVDARRCISYLTIELDGPIPEEFRPLMGNRIYGCDDCQLICPWNRFSQLTDEQDFSPRRVLHTPELLELFSWDEETFLKVTEGSAIRRIGYLKWLRNISVALGNAPYQDTIVNALRSRLGMGEMLDEHIQWAIQQQLQRREENQVTIQTSQQKRLVRAISKGLPRDA

SEQ ID NO: 79810 - protein, 400 aa, unidentified
  source 1..400: note = Unknown
  REGION 1..400: note = tr|A0A368DZZ5|A0A368DZZ5_9PROT Epoxyqueuosine reductase OS=PS1 clade bacterium OX=2175152 GN=queG PE=3; SV = 1
MTSNLENHQHDDAPEDLKSLFRDIAHAEGFDAVGFVSPDALPEAASRLSEFISAGRHGDMDWMETHQTRREAPLNLWSEVKTVIMLGMNYGPDTNPLDALEVKDKGVISVYARGHDYHDIIKKKLKKLARRLVEESGGAVKVFVDTAPIMEKPLAEAAGLGWQGKHTNLVSRSYGSWLFLGSIFTTSDLPKDAPEIDHCGSCSSCLDICPTEAFPEPYKLDARRCISYLTIEAKSQVPLEFRSKMGNHIYGCDDCLAVCPWNKYAAISREAKLQARAELIAPDLLELVSLDDTNFRALFRASPVKRTGRDRFVRNVLIAIGNAAGSINARQRLKFLTAIENRLADTAPLVRGMAVWALGQYLSAEEMKSRATEKLSEALSETVSGKEKDETVRAEWEVWL

SEQ ID NO: 79811 - protein, 400 aa, unidentified
  source 1..400: note = Unknown
  REGION 1..400: note = tr|A0A368EIM7|A0A368EIM7_9PROT Epoxyqueuosine reductase OS=PS1 clade bacterium OX=2175152 GN=queG PE=3; SV = 1
MTSNLENHEHVDAPEDLTSLFRDIAHAEGFDAVGFVSPDAIPEAASRLNEFISAGRHGDMDWMETHQTRREAPLNLWSEVKTVIMLGMNYGPDTNPLDALEVKDKGVISVYARGHDYHDIIKKKLKKLARRLVEETGGAVKVFVDTAPIMEKPLAEAAGLGWQGKHTNLVSRSYGSWLFLGSIFTTSDLPKDAPEIDHCGSCSSCLDICPTEAFPAPYKLDARRCISYLTIEAKSQVPLEFRSKMGNHIYGCDDCLAVCPWNKYAAISREAKLQARAELTAPDLLELVDLDDTDFRALFRTSPVKRTGRDRFVRNVLIAIGNAAESAKKSQKLKLLKAIENRLADTAPLVRGMAVWALGQYLSVEEMKSRAKEKLSEALSESISGREMDETVRAEWEIWL

SEQ ID NO: 79812 - protein, 353 aa, Pseudacidovorax intermedius
  REGION 1..353: note = tr|A0A370FKA0|A0A370FKA0_9BURK Epoxyqueuosine reductase OS=Pseudacidovorax intermedius OX=433924 GN=queG; PE = 3 SV=1
MARIRAWAGELGFSQIGIAGIDLSDAEPGLAEWLAQGFHGEMGYMAAHGMRRARPAELVPGTLSVITARMDYLPRQTPEDWQAVEWSRLERPGEAIVSLYARGRDYHKVLRARLQKLADRLAAEIGPFGHRVFTDSAPVLEAELASRSGQGWRGKHTLVLSREAGSMFFLGEIYVDLALPPTEPVAAHCGRCTACIDACPTGAILGPHRLDARRCISYLTIEHAGVIPEALRPAMANRIYGCDDCQLACPWNKFAQRSALPDFDPREGLTGVTLAQLFTWTEDEFLRRTEGSPIRRIGHERWLRNIAVALGNALRRGDASAAVALTSRRDTATPLLREHIDWALAQARTAESA

SEQ ID NO: 79813 - protein, 350 aa, Pseudacidovorax intermedius
  REGION 1..350: note = tr|A0A147GMD9|A0A147GMD9_9BURK Epoxyqueuosine reductase OS=Pseudacidovorax intermedius OX=433924 GN=queG; PE = 3 SV=1
MRAWAGELGFSQIGVAGIDLSAAEPGLREWLAQGFHGEMGYMAVHGMRRARPAELVPGTLSVITARMDYLPRGTPEDWQAVEWSRLARPHEGIVSLYARGRDYHKVLRTRLQKLADRLAAEVGPLGHRVFTDSAPVLEAELASRSGQGWRGKHTLVLSREAGSMFFLGEIYVDLALPPTEPVAPHCGRCTACIDACPTGAIVAPQRLDARRCISYLTIEHAGPIPEALRPALANRIYGCDDCQLACPWNKFAQRSALPDFDPREGLAGATLAQLFAWTEEEFLRRTEGSPIRRIGHERWLRNIAVALGNAWRSGDASAARALAARRDSASPLVREHIDWALAQAPAGAPA

SEQ ID NO: 79814 - protein, 309 aa, Pseudacidovorax sp.
  REGION 1..309: note = tr|A0A1N6NRB6|A0A1N6NRB6_9BURK Epoxyqueuosine reductase OS=Pseudacidovorax sp. RU35E OX=1907403; GN = SAMN05880557_101238 PE=4 SV=1
MAAHGMRRARPAELVPGTLSVITARMDYLPRETPDDWQAVEWSRLERPGEAIVSLYARGRDYHKVLRARLQKLADRLAAEIGPFGHRVFTDSAPVLEAELAGRSGQGWRGKHTLVLSREAGSMFFLGEIYVDLALPPTEPVAAHCGRCTACIDACPTGAILGPHRLDARRCISYLTIEHAGAIPEALRPAIGNRIYGCDDCQLACPWNKFAQRSALPDFDPREGLTGVTLAQLFAWTEDEFLRRTEGSPIRRIGHERWLRNIAVALGNALRQGDASAAVALTARRDTATSLLREHIDWALAQAPTVAPT

SEQ ID NO: 79815 - protein, 342 aa, unidentified
  source 1..342: note = Pseudaestuariivita atlantica
  REGION 1..342: note = tr|A0A0L1JQ73|A0A0L1JQ73_9RHOB Epoxyqueuosine reductase OS=Pseudaestuariivita atlantica OX=1317121; GN = ATO11_10320 PE=4 SV=1
MTARVKAEALSAGFTLCRVCAPGAVDISEGLRGYLDAGYHGSMGWMEERVAWRSSPAALWPEARSVIVLGEAYTPDHDPLEVLDHPDRAAISVYAQNRDYHDVVKKRLKRLARWLVAEAGGEVKVFVDTAPVPEKALGQAAGLGWQGKHTNLVSREMGSWFFIGSVFATVALEPDAAEVDHCGSCRACLDVCPTDAFPAPYQLDARRCISYLTIEHAGPVDAALRPLMGNRIYGCDDCLAVCPWNKFAQAATEVKYHARDDLRAPALAELAVLDDAAFRAKFSGSPIKRIRRGRFVRNVLYAIGNSGVPALREVARGLCEDADPVVADAARWAVSQTGAKRG

SEQ ID NO: 79816 - protein, 390 aa, unidentified
  source 1..390: note = Pseudaminobacter manganicus
  REGION 1..390: note = tr|A0A1V8RT10|A0A1V8RT10_9RHIZ Epoxyqueuosine reductase OS=Pseudaminobacter manganicus OX=1873176; GN = queG PE=3 SV=1
MRISISEKADPAAKLRALIDVEAARAGFDVVAVTRPDAIPLAPARLVDFVAAGFHGSMAWMEETLARRADPTTLWPDVRSIIVLAMNYGPDHDPRAVLERRDRGAISVYAQNRDYHDVMKGRLKEIAGKIVARAGGDVKVFVDTAPVMEKPLAEAAGVGWQGKHTNLVSRAHGSWLFLGSIFTTAELAPDALEKDHCGSCRACLDACPTNAFPAPYQLDARRCISYLTIENKGPIPHEFREAIGNHIYGCDDCLAACPWNKFARAASELKLVARPELHEPPLAGLLVLDDAGFRAFFSGSPVKRIGRDRFIRNVLIAAGNSNDAALVPQVAALLNDLSPLVRGAAVWAFSRLAANGDFTRKARDALVGEGEETVRSEWRQALARHPGGAG

SEQ ID NO: 79817 - protein, 391 aa, Pseudaminobacter salicylatoxidans
  REGION 1..391: note = tr|A0A316BVY6|A0A316BVY6_PSESE Epoxyqueuosine reductase OS=Pseudaminobacter salicylatoxidans OX=93369; GN = queG PE=3 SV=1
MRTSTSDIAARAKPEPGQRLRQMIEREARNAGFAAIAVTSPEAIPQAPARLAQFLTEGLHGSMGWMAETFERRSAPKTLWPEVRSIVVLAMNYGPDHDPRALQQQAGRGAISVYARNRDYHDVIKGRLKELAGKIVARAGGDVKVFVDTAPVMEKPLAQAAGIGWQGKHTNLVSREFGSWLFLGTIFTTAEIAPDQPDIDHCGSCRACLDACPTHAFPAPYRIDARRCISYLTIENKGPIPHEFRAALGNRIYGCDDCLAACPWNKFAQAAAEAKLAARDDLLAPKLADFLAMDDPAFRTFFSGSPVKRIGRDRFVRNVLIAAGNSGDDALAAPCESLLDDPSPLVRGAAVWALSRLMRSPDFARLAAARQNTESDAEVRREWALATGQPD

SEQ ID NO: 79818 - protein, 389 aa, Pseudaminobacter sp.
  REGION 1..389: note = tr|A0A432V8J4|A0A432V8J4_9RHIZ Epoxyqueuosine reductase OS=Pseudaminobacter sp. CB3 OX=1851146 GN=queG; PE = 3 SV=1
MRTSTSERPDKAAALRQLIDREAQRAGFDAVAVTTPEAIPQAPERLAQFVAAGFHGSMEWISETLARRSAPSTLWPDVRSIIVLAMNYGPDHDPRELARMPDRGAISVYARNRDYHDVMKGRLKEIAGKLVARAGGDVKVFVDTAPIMEKPLAQAAGIGWQGKHTNLVSREFGSWLFLGTIFCTAELVPDEPLADHCGSCRACLDACPTQAFPAPYRLDARRCISYLTIENKGPIPHEFREAIGNRIYGCDDCLAACPWNKFAQTASEAKLAAREDLRAPALADFLALDDAGFRSFFSGSPVKRIGRDRFLRNVLIAAGNSGDARLVPACERLLCDPSPLVRGAAVWALSHLASPSTVLALRPEGEEDEDVRHEWAVAMSQPEIARSIA

SEQ ID NO: 79819 - protein, 329 aa, unidentified
  source 1..329: note = Pseudanabaena biceps
  REGION 1..329: note = tr|L8N5Z0|L8N5Z0_9CYAN Epoxyqueuosine reductase; OS = Pseudanabaena biceps PCC 7429 OX=927668 GN=queG PE=3; SV = 1
MENLSQAEIKQAIQQKAIALGFSKVGIARAESGIEAERLQEWLKLGYQADMDWMANPKRQDITAVMPGVKSVICVALNYYTPNQHSSDRQIGKISRYGWGRDYHKVLTKKLKALAAWLTTQGEDIQTRYYVDTGPIAEKALAQRAGIGWVGKHSNVITRDYGSWLFLGELLTNLEIEPDRPHTDHCGTCTRCIEACPTGAIAQPFVVDANRCIAFHTIENKSEQIPQAIGANLQNWVAGCDICQDVCPWNQRFAQETLETDFQPFPHNLNPQLTDLATMTDEQWNQYFTGSALRRIKRDRWQRNAQTVIHNVVNNLDSNLDSNLDSNPT

SEQ ID NO: 79820 - protein, 318 aa, unidentified
  source 1..318: note = Pseudanabaena frigida
  REGION 1..318: note = tr|A0A2W4W9R4|A0A2W4W9R4_9CYAN Epoxyqueuosine reductase OS=Pseudanabaena frigida OX=945775 GN=queG PE=3; SV = 1
MKDNNLTKEEIKSAIAQKALELGFSKVGFAKAESGIEADRLREWLSLGYQADMDWMTNPKRQDISQIMAGVKTVICVALNYYTPHQHSRDRDVGKISRYGWGRDYHKVLTKKLKALATWLESLGNHPSEKIQARYYVDTGPIAEKAFAQRAGIGWIGKHSNVITRDYGSWLFLGEILTNLELEPDRPHTDHCGTCTRCIDACPTGAIAQPFVVDANRCIAYHTIENKAEQIPEAIAKNLQNWVAGCDICQDICPWNQRFAQETLESDFQPFPHNVDPKLDNLAKMTEETWDRNFTGSALRRIKRDRWHRNAKTARPNL

SEQ ID NO: 79821 - protein, 325 aa, Pseudanabaena sp.
  REGION 1..325: note = tr|A0A2W6YW35|A0A2W6YW35_9CYAN Epoxyqueuosine reductase OS=Pseudanabaena sp. OX=1153 GN=queG PE=3 SV=1
MTISKQALKQAIAEKATELGFSKIGIAKAESGIEVARLQSWLDLGYQADMDWMTNPKRQDITQVMAGVKSLICVALNYYTPHQHSSDPQIGKISRYGWGRDYHKVLSKKLKALSNWLIELGKQNGIEIQARYYVDTGPIAEKAFAQRAGIGWIGKHSNVISREYGSWLFLGEILTNLDLEPDQPHTDHCGTCTRCLEACPTGAIASPYVVDANRCIAFHTIENKAEQIPDAIATNLQNWVAGCDICQDVCPWNQRFAHETTESDFQPFDQNIDPKLSDLENMSDTEWDRRFIGSALRRIKRDRWQRNARTITLTRSKKNTPPLVT

SEQ ID NO: 79822 - protein, 313 aa, Pseudanabaena sp.
  REGION 1..313: note = tr|A0A256BGG3|A0A256BGG3_9CYAN Epoxyqueuosine reductase OS=Pseudanabaena sp. SR411 OX=1980935 GN=queG; PE = 3 SV=1
MENLSQAAIKLAIQQKAIALGFSKVGIAKAESGIEAERLQQWLELGYQADMDWMTNPKRQDITQVMTGVKSVICVALNYYTPHQHSIDRTVGKISRYGWGRDYHKVLTKKLKALVTWLNTQGENIQTRYYVDTGPIAEKAFAQRAGIGWIGKHSNVITRDYGSWLFLGEVLTNLELEPDHPHTDHCGTCTRCIDACPTGAIAQPFVVDANRCIAFHTIENKAAQIPEAIATNLQNWVAGCDICQDVCPWNQRFAQETLESDFQPFPHNVDPRLEDLANMTEEEWDQNFTGSALRRIKHDRWQRNAKTAIDSAI

SEQ ID NO: 79823 - protein, 310 aa, unidentified
  source 1..310: note = Pseudarcicella hirudinis
  REGION 1..310: note = tr|A0A1I5RPV5|A0A1I5RPV5_9BACT Epoxyqueuosine reductase OS=Pseudarcicella hirudinis OX=1079859 GN=queG; PE = 3 SV=1
MTALHKQNNTRLIKQKAQELGFLFCGISQAEFLEDEAPLLEKWLKNNMQGQMAYMENHFDKRLDPRLLVEDAKSVVSLLYNYFPEKRLPEDGSTLKISKYAYGVDYHFVIKEKLKELLNFIREEIGEVGGRAFVDSAPVLEKAWAKRSGLGWQGKHSNLLNRQAGSFFFIAELIIDLDLEHDGPVKDYCGTCTRCIDACPTDAIVEPYVVDGSKCISYFTIELKEAIPAEMKGKFEDWAFGCDICQDVCPWNRFSKPHNEPQFEFHPDLALYTRKDWDEITEDVFQVLFRKSPVKRTRLSGLKRNIEFLK

SEQ ID NO: 79824 - protein, 313 aa, unidentified
  source 1..313: note = Pseudarcicella sp.
  REGION 1..313: note = tr|A0A2S2DUI9|A0A2S2DUI9_9BACT Epoxyqueuosine reductase OS=Pseudarcicella sp. HME7025 OX=2183547 GN=queG; PE = 3 SV=1
MTLDSKQVSSLIKKRAFEAGFSFCGISKADFLDEEAPRLEAWLNQGLQGEMAYMANHFDKRLDPRKLVEGCQTVVSLVFNYYPSPSLTPLNHHFKVSKYAFGEDYHRVVKDKMQVLWDAMQEDLGEISGRMFVDSAPVLEKAWAKKSGLGWIGKNGNLIIPKQGSFYFIAELLIDIPAEPDGPIKDFCGTCTRCIDACPTEALTPYWVDGSKCISYFTIELKEGIPASMKSDFQDWIFGCDICQDVCPWNRFSTPHQEPRLEAKLTFLEMERGDWEDLSEEVFKELFHYSAIKRTKITGLQRNIQYINKKNES

SEQ ID NO: 79825 - protein, 379 aa, unidentified
  source 1..379: note = Pseudescherichia vulneris
  REGION 1..379: note = tr|A0A090UWN4|A0A090UWN4_PSEVU Epoxyqueuosine reductase OS=Pseudescherichia vulneris NBRC 102420; OX = 1115515 GN=queG PE=3 SV=1
MSQPLDLNQLAQNIKQWGTELGFQQVGITDTDLSASEPKLQAWLDKQYHGEMAWMARHGMMRARPHELLPGTLRVISVRMNYLPANAAFASTLKNPALGYVSRYALGRDYHKLLRNRLKKLGETIQQHCVSLNFRPFVDSAPLLERPLAEKAGLGWTGKHSLILNQEAGSFFFLGELLIDLPLPIDQPVEEKCGKCVACMTICPTGAIVEPYTVDARRCISYLTIELEGSIPPEFRPLIGNRIYGCDDCQLICPWNRFSQLTDEEDFSPRKALHAPELIALFGWSEAHFLKVTEGSAIRRIGHLRWLRNVAVALGNAPWDEANIQALEQRRGEHPLLEEHIEWAIAQQIEKRNACVVEVQLPQKLRLVRVVEKGLPRDA

SEQ ID NO: 79826 - protein, 371 aa, unidentified
  source 1..371: note = Pseudidiomarina sp.
  REGION 1..371: note = tr|A0A451GE62|A0A451GE62_9GAMM Epoxyqueuosine reductase OS=Pseudidiomarina sp. R04H25 OX=2487740 GN=queG; PE = 3 SV=1
MDYHQLAEDIKRWGTELGFQKVGITDVDLSTEREHLQRWLDQGMHGDMEWMARHGDLRTRPDQLHPGAVRAISVRMNYLPAEAGFAKTLKNPRLGYISRYALGRDYHKLMRKRLKQLGDKIQSACAELDFRPFVDSAPIMEKPLAIKAGLGWRGKHTLVLDEGSGSWFFLGELLVNLPLPMDTEVEEKCGTCSACITICPTQAIVEPYVLDARRCISYLTIELRDSIPEQYRPLMGNRIYGCDDCQLICPWNRYAQLTGEDDFAPRKDLHAPELLELWQWDEEQFLKRTEGSPIRRIGYECWQRNLAVAFGNAPTDTDIIAALEQRYPSSTPMVQEHIEWALARQRSGAVKVEKQVIRLVRAVEKGLKRDA

SEQ ID NO: 79827 - protein, 377 aa, unidentified
  source 1..377: note = Pseudoalteromonadaceae bacterium
  REGION 1..377: note = tr|A0A2D7N2T9|A0A2D7N2T9_9GAMM Epoxyqueuosine reductase OS=Pseudoalteromonadaceae bacterium OX=2026783; GN = queG PE=3 SV=1
  VARIANT 8: note = Xaa can be any naturally occurring amino acid
  VARIANT 42: note = Xaa can be any naturally occurring amino acid
  VARIANT 50: note = Xaa can be any naturally occurring amino acid
  VARIANT 61: note = Xaa can be any naturally occurring amino acid
  VARIANT 155: note = Xaa can be any naturally occurring amino acid
MSNSTPNXQQLAKNIKAWGQELGFSEVGITDIDLSKHEAQLXRWLDAGYXGSMDYMAAHGXKRARPAELVPGTQRVISVKMNYLPPDASFAETLKNTEKAYISRYALGRDYHKLMRNRLKKLGQKIEQEIGDYGFRPFVDSAPVLERQLAEKAGXGWRGKHSLLINQEAGSWFFLGELFVDLPLPIDNENTFEGCGKCVACITLCPTGAIVEPYVVDARKCISYLTIEHQGPIPEQYRALLGNRVYGCDDCQLVCPWNRYGQITDEQDFHPRTQLKNKDLLELFAWDEPTFLKNTEGSPIRRIGHERWLRNLAVGLGNADFSPSIINALESKHESSSQLVKEHIEWALEQQNNKQREQLRKTQRLIRIVEKGLPRDA

SEQ ID NO: 79828 - protein, 377 aa, unidentified
  source 1..377: note = Pseudoalteromonadaceae bacterium
  REGION 1..377: note = tr|A0A2E9T093|A0A2E9T093_9GAMM Epoxyqueuosine reductase OS=Pseudoalteromonadaceae bacterium OX=2026783; GN = queG PE=3 SV=1
MTTPATDYEQLALQIKQWGKDLGFAEVGITDIDLTKHEAQLQRWLDLGYHGEMEYMAAHGMKRARPAELVPGTQRVISVKMNYLPPDASFAKNLKQTDKAYISRYALGRDYHKLIRNRLKKLGQQIEQHVGQLGFRPFVDSAPVLERQLAEKAGLGWRGKHSLLINKEAGSWFFLGELFVDIPLPIDQENSFEGCGKCVACMTLCPTGAIVEPYVVDARKCISYLTIELQGAIPEEYRPLLGNRVYGCDDCQLVCPWNRYGQITDEADFHPRQQLKDQDLLTLFAWDEATFLKNTEGSPIRRIGHERWQRNLAVGLGNADYNDNIIQALSDTLVNASPLVAEHIEWALEQQQNKRQIKLRKTARLIRIVEKGLPRDA

SEQ ID NO: 79829 - protein, 379 aa, Pseudoalteromonas agarivorans
  REGION 1..379: note = tr|A0A290RRR1|A0A290RRR1_9GAMM Epoxyqueuosine reductase OS=Pseudoalteromonas agarivorans DSM 14585; OX = 1312369 GN=queG PE=3 SV=1
MCVSNSTPNYQQLAKNIKAWGQELGFSEVGITDIDLSKHEAQLQRWLDAGYHGSMDYMAAHGMKRARPAELVPGTQRVISVKMNYLPPDASFAKTLKNTEKAYISRYALGRDYHKLMRNRLKKLGQKIEQEIGDYGFRPFVDSAPVLERQLAEKAGLGWRGKHSLLINQEAGSWFFLGELFVDLPLPIDNENTFEGCGKCVACITLCPTGAIVEPYVVDARKCISYLTIEHQGPIPEQYRALLGNRVYGCDDCQLVCPWNRYGQITDEQDFHPRTQLKNKDLLELFDWDEPTFLKNTEGSPIRRIGHERWLRNLAVGLGNADFSPSIINALESKHESSSQLVKEHIEWALEQQNNKQREQLRKTQRLIRIVEKGLPRDA

SEQ ID NO: 79830 - protein, 379 aa, Pseudoalteromonas agarivorans
  REGION 1..379: note = tr|N6VTI0|N6VTI0_9GAMM Epoxyqueuosine reductase; OS = Pseudoalteromonas agarivorans S816 OX=1307437 GN=queG; PE = 3 SV=1
MCVSNSTPNYQQLAKNIKAWGQELGFSEVGITDIDLSKHEAQLQRWLDAGYHGSMDYMAAHGMKRARPAELVPGTQRVISVKMNYLPPDASFAKTLKNTEKAYISRYALGRDYHKLMRNRLKKLGQKIEQEIGDYGFRPFVDSAPVLERQLAEKAGLGWRGKHSLLINQEAGSWFFLGELFVDLPLPIDNENTFEGCGKCVACITLCPTGAIVEPYVVDARKCISYLTIEHQGPIPEQYRAFLGNRVYGCDDCQLVCPWNRYGQITDEQDFHPRTQLKNKDLLELFTWDEPTFLKNTEGSPIRRIGHERWLRNLAVGLGNADFSPSIINALESKHESSSQLVKEHIEWALEQQNNKQREQLRKTQRLIRIVEKGLPRDA

SEQ ID NO: 79831 - protein, 377 aa, Pseudoalteromonas aliena
  REGION 1..377: note = tr|A0A1Q2H3R2|A0A1Q2H3R2_9GAMM Epoxyqueuosine reductase OS=Pseudoalteromonas aliena OX=247523 GN=queG; PE = 3 SV=1
MSNPTPDYKKIALQIKAWGLELGFSEVGITDIDLSQHEAQLQRWLDAGFHGSMDYMAAHGMKRARPAELVLGTQRVISVKMNYLPPDAGFAKTLKSKEKAYISRYALGRDYHKLMRNRLKKLGQKIEQEIGEYGFRPFVDSAPVLERQLAEKAGLGWRGKNSLLINQKAGSWFFLGELFIDLPLPIDAENTFEGCGKCVACITLCPTGAIVEPYVVDARKCISYLTIELQGPIPEQYRALLGNRVYGCDDCQLVCPWNRYGQITDENDFHPRTQLKDKDLLELFAWDEPTFLKNTEGSPIRRIGHERWLRNIAVGLGNAEFSPAIIHALEDKGQHCSALVLEHIEWALAQQNDKQRVALRKTARLIRIVEKGLPRDA

SEQ ID NO: 79832 - protein, 377 aa, unidentified
  source 1..377: note = Pseudoalteromonas amylolytica
  REGION 1..377: note = tr|A0A1S1MXP0|A0A1S1MXP0_9GAMM Epoxyqueuosine reductase OS=Pseudoalteromonas amylolytica OX=1859457; GN = queG PE=3 SV=1
MTTDSINYIELAEKIKQWGKALGFADVGITDIDLSAHEEQLQRWLDHSYHGDMEYMAAHGMKRARPDELVPGTQRVISVRMNYLPPDASFAKALANKSTAYISRYALGRDYHKVMRNRLKQLGQKISSEVEPLGYRPFVDSAPVLERQLAEKAGLGWRGKNSLLIQKQAGSWFFLGELFVDIPLPVDQKDPFEGCGKCNACITLCPTGAIIEPYVVDARKCISYLTIELQGAIPEQYRSLIGNRIYGCDDCQLVCPWNRYGQLTKEQDFMARTQLKDRSLIELFMWDEATFLKVTEGNPIRRIGHQRWLRNLAVGLGNADYDESIVEALEKRLEDASDLVKEHINWALKQQSHKQQQTQRKQARLIRIIEKGLPRDA

SEQ ID NO: 79833 - protein, 377 aa, Pseudoalteromonas arctica
  REGION 1..377: note = tr|A0A290S383|A0A290S383_9GAMM Epoxyqueuosine reductase OS=Pseudoalteromonas arctica A 37-1-2 OX=1117313; GN = queG PE=3 SV=1
MSNPTPDYEKLALQIKTWGQELGFSEVGITDIDLSKHEAQLQRWLDAGYHGSMDYMAAHGMKRARPAELVPGTQRVISVKMNYLPPDAGFAKTLKNKEKAYISRYALGRDYHKLMRNRLKKLGQKIEQEIGEYGFRPFVDSAPVLERQLAEKAGLGWRGKHSLLINQEAGSWFFLGELFIDLPLPIDVENTFEGCGKCVACITLCPTGAIVEPYVVDARKCISYLTIEHQGPIPEQYRTLLGNRIYGCDDCQLVCPWNRYGQITDENDFHPRTQLKNKDLLELFAWDEPTFLKNTEGSPIRRIGHERWLRNIAVGLGNAEFSPAIIHALQDKSQICSELVLEHIEWALAQQNDKQRLQIRKTARLIRIVEKGLPRDA

SEQ ID NO: 79834 - protein, 379 aa, Pseudoalteromonas atlantica
  REGION 1..379: note = tr|A0A510ZIK0|A0A510ZIK0_PSEAF Epoxyqueuosine reductase OS=Pseudoalteromonas atlantica OX=288 GN=queG; PE = 3 SV=1
MCVNNSTPNYQQLAKNIKAWGQELGFSEVGITDIDLSKHEAQLQRWLDAGYHGSMDYMAAHGMKRARPAELVPGTQRVISVKMNYLPPDASFAKTLKNTEKAYISRYALGRDYHKLMRNRLKKLGQKIEQEIGDYGFRPFVDSAPVLERQLAEKAGLGWRGKHSLLINQEAGSWFFLGELFVDLPLPIDNENTFEGCGKCVACITLCPTGAIVEPYVVDARKCISYLTIEHQGPIPEQYRALLGNRVYGCDDCQLVCPWNRYGQITDEQDFHPRTQLKNKDLLELFAWDEPTFLKNTEGSPIRRIGHERWLRNLAVGLGNADFSPSIINALESKHESSSQLVKEHIEWALEQQNNKQREQLRKTQRLIRIVEKGLPRDA

SEQ ID NO: 79835 - protein, 397 aa, Pseudoalteromonas atlantica
  REGION 1..397: note = tr|Q15NR6|Q15NR6_PSEA6 Epoxyqueuosine reductase; OS = Pseudoalteromonas atlantica (strain T6c / ATCC BAA-1087) OX=342610 GN=queG PE=3 SV=1
MSFAQYDLHQLAQNIKAWGEALGFQQVGIADIDLSTHEDKLQSWLDSGYHGQMNFMAEHGMKRARPAELLPGTLRVISVRMDYLPPDAKFAHTLKNKESAYISRYALGRDYHKLLRNRLKKLGEKIRTECTTANFRPFVDSAPVLEHALAEKAGIGWTGKHSLTLNQQGGSWFFLGELFIDIPLPVDAPVEEQCGSCNACITICPTQAIVAPYVVDAKRCISYLTIELKGAIPEAFRRALGNRIYGCDDCQLICPWNRYAKITNETDFHPRDVLQGRTLAELAMWDESTFLKNTEGSAIRRIGHERWQRNISIALGNAPYSTHTYEAITALAAHGTDLVKEHARWALNEQDLKKAQSISVVAVDDITPRDDSLLAPQEKRLNQRLIRSIEKGLARDA

SEQ ID NO: 79836 - protein, 377 aa, Pseudoalteromonas byunsanensis
  REGION 1..377: note = tr|A0A1S1NDT7|A0A1S1NDT7_9GAMM Epoxyqueuosine reductase OS=Pseudoalteromonas byunsanensis OX=327939; GN = queG PE=3 SV=1
MTTDSINYIELAEKIKQWGKELGFADVGITDIDLSAHESQLQRWLDHGYHGEMEYMAAHGMKRARPNELVPGTQRVISVRMHYLPPDASFAKALANKETAYISRYALGRDYHKVMRNRLKQLGQKISVEVEQLGYRPFVDSAPILERQLAEKAGLGWRGKNSLLLQKQAGSWFFLGELFVDIPLPIDQKDEFEGCGKCNACITLCPTGAIVEPYVVDARKCISYLTIELQGAIPVQYRSLIGNRVYGCDDCQLVCPWNRYGQLTKEQDFMARPQLKDRTLLELFSWNEETFLKATEGSPIRRIGHQRWLRNLAVGLGNADYDECIIDALEKRLEGASDLVKEHILWALEQQNNKQQQAERKQARLIRIIEKGMPRDA

SEQ ID NO: 79837 - protein, 379 aa, Pseudoalteromonas carrageenovora
  REGION 1..379: note = tr|A0A2K4X6F8|A0A2K4X6F8_PSEVC Epoxyqueuosine reductase OS=Pseudoalteromonas carrageenovora IAM 12662; OX = 1314868 GN=yjeS PE=3 SV=1
MCVSNPTPNYEQLAHQIKVWGQELGFSEVGITDIDLSKHEAQLQRWLDAGYHGSMDYMAAHGMKRARPAELVPGTQRVISVKMNYLPPDASFAKTLKNTEKAYISRYALGRDYHKLMRNRLKKLGQKIEQEIGAYGFRPFVDSAPVLERQLAEKAGLGWRGKHSLLINQEAGSWFFLGELFVDLPLPIDDENTFEGCGKCVACITLCPTGAIVEPYVVDARKCISYLTIEHQGAIPQQYRALLGNRIYGCDDCQLVCPWNRYGKITDEQDFHPRTQLKDKDLLELFAWDEATFLKNTEGSPIRRIGHERWLRNLAVGLGNADFSPKIVFALEDKALKCSELVLEHINWALTQQNDKQRVQLRKTLRLIRIVEKGLPRDA

SEQ ID NO: 79838 - protein, 377 aa, Pseudoalteromonas citrea
  REGION 1..377: note = tr|U1KTV1|U1KTV1_9GAMM Epoxyqueuosine reductase; OS = Pseudoalteromonas citrea DSM 8771 OX=1117314 GN=queG; PE = 3 SV=1
MTITHIDYTELAKKIKQWGHELGFAEVGITDIDLSEHEAQLQRWLDKGYHGEMDYMAAHGMKRARPAELVPGTQRVISVKMNYLPPDASFARALGNKQTAYISRYALGRDYHKVLRNRLKKLGQRIELEVEQLGYRPFVDSAPVLERQLAEKAGLGWRGKNSLLIHKQAGSWFFLGELFVSIPLPIDAPNEEEGCGKCNACITLCPTGAIVEPYVVDARKCISYLTIELQGAIPEQYRPLLGNRIYGCDDCQLVCPWNRFGQLTDELDFHPRQQIKDQDLMTLFAWDERTFLKNTEGSPIRRIGHERWLRNIAVGLGNAHYDPSIIEALKARLNSASPLVKEHIEWALTQQHDKQVNTERKKARLIRIIEKGLPRDA

SEQ ID NO: 79839 - protein, 380 aa, Pseudoalteromonas denitrificans
  REGION 1..380: note = tr|A0A1I1JZ72|A0A1I1JZ72_9GAMM Epoxyqueuosine reductase OS=Pseudoalteromonas denitrificans DSM 6059; OX = 1123010 GN=queG PE=3 SV=1
MKSRITDYSLLSDKIKQWGLELGFAQVGIADIDLSQHEAQFQRWLDNNYHGEMEYMATHGMMRARPDELVPGTKRVISVRMNYLPPDASFAKNLKSNQKAYISRYALGRDYHKMMRNKLKKLGQKIEQELDIDYQEKLSFRPFVDSAPVLERQLADKAGLGWTGKHSLIINKEAGSWFFLGELFVDIPLPVDKPVEEQCGSCVACIKLCPTNAIVEPYVVDAKRCISYLTIELKGAIPEEFRPLLGNRIYGCDDCQLICPWNRYGQITDEKDFHPRTQLKDKNLIELFLWDEATFLKNTEGSPIRRIGHERWLRNISVALGNAAWSQAIIDVLQQRLAGVSELVEVHILWALEQQQKKKLTNKKTQRLIKAIEKGLPRDA

SEQ ID NO: 79840 - protein, 377 aa, Pseudoalteromonas distincta
  REGION 1..377: note = tr|F3BEP6|F3BEP6_9GAMM Epoxyqueuosine reductase; OS = Pseudoalteromonas distincta OX=77608 GN=queG PE=3 SV=1
MSNPTPDYEKLALQIKTWGQELGFSEVGITDIDLSKHEAQLQRWLDAGYHGSMDYMAAHGMKRARPAELVPGTQRVISVKMNYLPPDAGFAKTLKNKEKAYISRYALGRDYHKLMRNRLKKLGQKIEQEVGEYGFRPFVDSAPVLERQLAEKAGLGWRGKHSLLINQEAGSWFFLGELFIDLPLPIDAENTFEGCGKCVACITLCPTGAIVEPYVVDARKCISYLTIEHQGPIPEQYRTLLGNRVYGCDDCQLVCPWNRYGQITDENDFHPRTQLKDKDLLELFAWDEPTFLKNTEGSPIRRIGHERWLRNLAVGLGNAEFSPAIINALQGKSQICSELVLEHIEWALAQQNDKQRLQIRKTARLIRIVEKGLPRDA

SEQ ID NO: 79841 - protein, 377 aa, Pseudoalteromonas distincta
  REGION 1..377: note = tr|A0A5B0UN68|A0A5B0UN68_9GAMM Epoxyqueuosine reductase OS=Pseudoalteromonas distincta OX=77608 GN=queG; PE = 3 SV=1
MSNPTPDYEKLALQIKTWGQELGFSEVGITDIDLSKHEAQLQRWLDAGYHGSMDYMAAHGMKRARPAELVPGTQRVISVKMNYLPPDAGFAKTLKNKEKAYISRYALGRDYHKLMRNRLKKLGQKIEQEIGEYGFRPFVDSAPVLERQLAEKAGLGWRGKHSLLINQEAGSWFFLGELFIDLPLPIDAENTFEGCGKCVACITLCPTGAIVEPYVVDARKCISYLTIEHQGPIPEQYRTLLGNRVYGCDDCQLVCPWNRYGQITDENDFHPRTQLKDKDLLELFAWDEPTFLKNTEGSPIRRIGHERWLRNLAVGLGNAEFSPAIINALQDKSQICSELVLEHIEWALAQQKDKQRLQIRKTARLIRIVEKGLPRDA

SEQ ID NO: 79842 - protein, 377 aa, Pseudoalteromonas elyakovii
  REGION 1..377: note = tr|A0A558HSX4|A0A558HSX4_9GAMM Epoxyqueuosine reductase OS=Pseudoalteromonas elyakovii OX=81037 GN=queG; PE = 3 SV=1
MSNPTPDYEKLALQIKTWGQELGFSEVGITDIDLSKHEAQLQRWLDAGYHGSMDYMAAHGMKRARPAELVPGTQRVISVKMNYLPPDAGFAKTLKNKEKAYISRYALGRDYHKLMRNRLKKLGQKIEQEIGEYGFRPFVDSAPVLERQLAEKAGLGWRGKHSLLINQEAGSWFFLGELFIDLPLPIDAENTFEGCGKCVACITLCPTGAIVEPYVVDARKCISYLTIEHQGPIPEQYRTLLGNRVYGCDDCQLVCPWNRYGQITDENDFHPRTQLKDKDLLELFAWDEPKFLKNTEGSPIRRIGHERWLRNLAVGLGNAEFSPAIINALQDKSQICSELVLEHIEWALAQQNDKQRLQIRKTARLIRIVEKGLPRDA

SEQ ID NO: 79843 - protein, 377 aa, Pseudoalteromonas espejiana
  REGION 1..377: note = tr|A0A510XS65|A0A510XS65_9GAMM Epoxyqueuosine reductase OS=Pseudoalteromonas espejiana OX=28107 GN=queG; PE = 3 SV=1
MSNPTPNYKQLAQQIKTWGQELGFSEVGITDIDLSKHEAQLQRWLDAGYHGSMDYMAAHGMKRARPAELVPGTQRVISVKMNYLPPDASFAKTLKNTEQAYISRYALGRDYHKLMRNRLKKLGQKIEQEIGNYGFRPFVDSAPVLERQLAEKAGLGWRGKHSLLINQEAGSWFFLGELFVDLPLPIDNENTFEGCGKCVACITLCPTGAIVEPYVVDARKCISYLTIEHQGPIPEQYRTLLGNRIYGCDDCQLVCPWNRYGQITDEQDFHPRTQLKNKDLLELFAWDEATFLKNTEGSPIRRIGHERWLRNIAIGLGNADFSPNIISALEDKRSNSSELVIEHIDWALEQQNDKQRKQLRKTQRLIRIVEKGLPRDA

SEQ ID NO: 79844 - protein, 377 aa, unidentified
  source 1..377: note = Pseudoalteromonas fuliginea
  REGION 1..377: note = tr|A0A063KN27|A0A063KN27_9GAMM Epoxyqueuosine reductase OS=Pseudoalteromonas fuliginea OX=1872678; GN = queG PE=3 SV=1
MSNPTPDYEKLALQIKTWGQELGFSEVGITDIDLSKHEAQLQRWLDAGFHGSMDYMASHGMKRARPAELVPGTQRVISVKMNYLPPDAGFAKTLKNKEKAYISRYALGRDYHKLMRNRLKKLGQKIEQEIGEYGFRPFVDSAPVLERQLAEKAGLGWRGKHSLLINQEAGSWFFLGELFIDLPLPIDAENTFEGCGKCVACITLCPTGAIVEPYVVDARKCISYLTIEHQGPIPEQYRTLLGNRIYGCDDCQLVCPWNRYGQITDENDFHPRTQLKDKDLLELFAWDEATFLKNTEGSPIRRIGHERWLRNLAIGLGNAQFSPAIIYALEDKSQICSELVLEHIEWALSQQNDKQRVALRKTARLIRIVEKGLPRDA

SEQ ID NO: 79845 - protein, 377 aa, unidentified
  source 1..377: note = Pseudoalteromonas fuliginea
  REGION 1..377: note = tr|A0A5B0UBW7|A0A5B0UBW7_9GAMM Epoxyqueuosine reductase OS=Pseudoalteromonas fuliginea OX=1872678; GN = queG PE=3 SV=1
MSNPTPDYEKLALQIKTWGQELGFSEVGITDIDLSKHEAQLQRWLDAGFHGSMDYMASHGMKRARPAELVPGTQRVISVKMNYLPPDAGFAKTLKNKEKAYISRYALGRDYHKLMRNRLKKLGQKIEQEIGEYGFRPFVDSAPVLERQLAEKAGLGWRGKHSLLINQEAGSWFFLGELFIDLPLPIDAENTFEGCGKCVACITLCPTGAIVEPYVVDARKCISYLTIEHQGPIPEQYRTLLGNRIYGCDDCQLVCPWNRYGQITDENDFHPRTQLKDKDLLELFAWDEATFLKNTEGSPIRRIGHERWLRNLAIGLGNAQFSPAIIYALEDKSQICSELVLEHIKWALSQQNDKQRVTLRKTARLIRIVEKGLPRDA

SEQ ID NO: 79846 - protein, 377 aa, Pseudoalteromonas haloplanktis
  REGION 1..377: note = tr|Q3IFX3|Q3IFX3_PSEHT Epoxyqueuosine reductase; OS = Pseudoalteromonas haloplanktis (strain TAC 125); OX = 326442 GN=queG PE=3 SV=1
MSDAVPDYKNLAQQIKAWGQELGFSEVGITDIDLSKHETQLQRWLDAGYHGNMDYMAAHGMKRARPAELVPGTQRVISVKMNYLPPDAGFAKTLKNSEKAYISRYALGRDYHKLMRNRLKKLGQKIELEIGEYGFRPFVDSAPVLERQLAEKAGLGWRGKHSLLINKEAGSWFFLGELFVDLPLPIDAENTFEGCGKCVACITLCPTGAIVEPYVVDARKCISYLTIELQGPIPEQYRTLLGNRIYGCDDCQLVCPWNRYGQLTDENDFHPRTQLKDKDLLELFAWDEATFLKNTEGSPIRRIGHERWLRNLAVGLGNAEFSPSIIHALEDKSLACSELVLEHINWALQQQRNKQGTILRKTARLIRIVEKGLPRDA

SEQ ID NO: 79847 - protein, 377 aa, Pseudoalteromonas issachenkonii
  REGION 1..377: note = tr|A0A290SBP1|A0A290SBP1_9GAMM Epoxyqueuosine reductase OS=Pseudoalteromonas issachenkonii OX=152297; GN = queG PE=3 SV=1
MSNPTPDYEKLALQIKTWGQELGFSEVGITDIDLSKHEAQLQRWLDAGYHGSMDYMAAHGMKRARPAELVPGTQRVISVKMNYLPPDAGFAKTLKNKEKAYISRYALGRDYHKLMRNRLKKLGQKIEQEVGEYGFRPFVDSAPVLERQLAEKAGLGWRGKHSLLINQEAGSWFFLGELFIDLPLPIDAENTFEGCGKCVACITLCPTGAIVEPYVVDARKCISYLTIEHQGPIPEQYRSLLGNRVYGCDDCQLVCPWNRYGQITDENDFHPRTQLKDKDLLELFAWDEPTFLKNTEGSPIRRIGHERWLRNLAVGLGNAEFSPAIINALQDKSQICSELVLEHIEWALAQQNDKQRLQIRKTARLIRIVEKGLPRDA

SEQ ID NO: 79848 - protein, 377 aa, Pseudoalteromonas lipolytica
  REGION 1..377: note = tr|A0A0P7DS41|A0A0P7DS41_9GAMM Epoxyqueuosine reductase OS=Pseudoalteromonas lipolytica OX=570156; GN = queG PE=3 SV=1
MTTPAIDYEHLALQIKQWGKDLGFAEVGITDIDLTKHEAQLQRWLDLGYHGEMEYMAAHGMKRARPAELVLGTQRVISVKMNYLPPDASFAKNLKQTDKAYISRYALGRDYHKLIRNRLKKLGQQIEQHIGQLGFRPFVDSAPVLERQLAEKAGLGWRGKNSLLINKEAGSWFFLGELFVDIPLPIDEENSFEGCGKCVACMTLCPTGAIVEPYVVDARKCISYLTIELQGAIPEEYRPLLGNRVYGCDDCQLVCPWNRYGQLTDEADFHPRKQLKDQDLLTLFAWDEATFLKNTEGSPIRRIGHERWLRNLAVGLGNADYNEQIIEALEQRLTTATALVAEHIEWALDQQKNKRQLKLRKTARLIRIVEKGLPRDA

SEQ ID NO: 79849 - protein, 383 aa, Pseudoalteromonas lipolytica
  REGION 1..383: note = tr|Z5XPH3|Z5XPH3_9GAMM Epoxyqueuosine reductase; OS = Pseudoalteromonas lipolytica SCSIO 04301 OX=1452721; GN = queG PE=3 SV=1
MATFLFTVTTPIDYQQLAQQIKQWGKDLGFAEVGITDIDLTQHEAQLQRWLDLGYHGDMEYMAAHGMKRARPAELVPGTQRVISVKMNYLPPDASFAKNLKQTEKAYISRYALGRDYHKLIRNRLKKLGQKIEQQVGQLGFRPFVDSAPVLERQLAEKAGLGWRGKHSLLINKEAGSWFFLGELFVDIPLPIDNENTFEGCGKCVACMTLCPTGAIVEPYVVDARKCISYLTIELQGPIPEEYRSLLGNRVYGCDDCQLVCPWNRYGQITDEADFHPRTQLKDQDLLTLFAWDEATFLKNTEGSPIRRIGHERWQRNLAVGLGNADYSDTIIIALKKALQSATPLVAEHIEWALSQQQNKRQLKLRKTARLIRIVEKGLPRDA

SEQ ID NO: 79850 - protein, 389 aa, Pseudoalteromonas luteoviolacea
  REGION 1..389: note = tr|A0A1C0TQ58|A0A1C0TQ58_9GAMM Epoxyqueuosine reductase OS=Pseudoalteromonas luteoviolacea OX=43657; GN = queG PE=3 SV=1
MCVLTLQNRHSVDKARPTINYTELAEKIKYWGKELGFAEVGISDIDLSEHENQLQRWLDLGYHGEMEYMAAHGMKRARPAELVPGTKSIVSVKMNYLPPDASFARALKNNSTAYISRYALGRDYHKVLRNRLKKLGQRIEQEVGQYGFRPFVDSAPVLERQIAEKAGLGWRGKNSLLIHKQAGSWFFLGELFVDLPLPADSNKVEEGCGKCNACISLCPTGAIVEPYVVDARRCISYLTIELQGPIPEEFRSLLGNRIYGCDDCQLVCPWNRFGQLTDEADFHPRKTIKDREMLELFAWDESTFLKNTEGSPIRRIGHERWLRNLAVGLGNADFDENIVLALSQKLRSATPLVAEHIQWALAQQKQKQQDERKKARLIRIIEKGLPRDA

SEQ ID NO: 79851 - protein, 378 aa, Pseudoalteromonas luteoviolacea
  REGION 1..378: note = tr|A0A167NXT5|A0A167NXT5_9GAMM Epoxyqueuosine reductase OS=Pseudoalteromonas luteoviolacea S4060-1; OX = 1365257 GN=queG PE=3 SV=1
MDKARPTINYTELAEKIKYWGKELGFAEVGISDIDLSEHENQLQRWLDLGYHGEMEYMAAHGMKRARPAELVPGTKSIVSVKMNYLPPDASFARALKNSTTAYISRYALGRDYHKVLRNRLKKLGQRIEQEVGQYGFRPFVDSAPVLERQIAEKAGLGWRGKNSLLIHKQAGSWFFLGELFVDLPLPADDIKVEEGCGKCNACISLCPTGAIVEPYVVDARRCISYLTIELQGAIPEEFRPLLGNRIYGCDDCQLVCPWNRFGQLTEEADFHPRKTIKDREMLELFAWDESTFLKNTEGSPIRRIGHERWLRNLAVGLGNADFNDNIIRALSDKLQSASPLVAEHIQWAITQQKQKQQDQRKKARLIRIVEKGLPRDA

SEQ ID NO: 79852 - protein, 376 aa, Pseudoalteromonas marina
  REGION 1..376: note = tr|U1K4A2|U1K4A2_9GAMM Epoxyqueuosine reductase; OS = Pseudoalteromonas marina DSM 17587 OX=1117316 GN=queG; PE = 3 SV=1
MSNLTPDYPKLAQQIKAWGKELGFSEVGITDIDLSKHEQQLQRWLDAGFHGSMDYMAAHGMKRARPDELIPGTQRVISVKMNYLPPDAGFAKTLKNKQKAYISRYALGRDYHKLIRNRLKKLGQKIEQEVGEYGFRPFVDSAPVLERQLAEKAGLGWRGKHSLLINKEAGSWFFLGELFIDLPLPIDNENTFEGCGKCVACITLCPTGAIVEPYVVDARKCISYLTIEHQGPIPEQYRALLGNRVYGCDDCQLVCPWNRYGQITDERDFHPRTQLKDKDLLELFSWDETTFLKNTEGSPIRRIGHERWLRNLAVGLGNANFDPGIVSALEQKIDGCSDLVKEHIQWALEQQNNKQPSLRKTQRLIRIVEKGLPRDA

SEQ ID NO: 79853 - protein, 377 aa, unidentified
  source 1..377: note = Pseudoalteromonas neustonica
  REGION 1..377: note = tr|A0A558IRC9|A0A558IRC9_9GAMM Epoxyqueuosine reductase OS=Pseudoalteromonas neustonica OX=1840331; GN = queG PE=3 SV=1
MSSSISDHTQLALDIKQWGKELGFAEVGITDIDLSKHEAQLQRWLDLGYHGDMEYMAAHGMKRARPAELVPGTVRVISVKMNYLPPDASFAKTLKNTDKAYISRYALGRDYHKLMRNRLKKLGQKIELQIGQLGYRPFVDSAPVLERQLAEKAGLGWRGKHSLLINKEAGSWFFLGELFVDIPLPIDKPNEFEGCGKCVACITLCPTGAIVEPYVVDARKCISYLTIELQGPIPEQYRSLLGNRVYGCDDCQLVCPWNRYGQITDEADFHPRTQLKDKDLLDLFSWDEATFLKNTEGSPIRRIGHQRWLRNIAVGLGNAQFSQSIVDALSASYDQSTELVKEHIEWALKQQHSKQDKLLRKTSRLIRIVEKGLPRDA

SEQ ID NO: 79854 - protein, 379 aa, Pseudoalteromonas nigrifaciens
  REGION 1..379: note = tr|A0A379H7M3|A0A379H7M3_9GAMM Epoxyqueuosine reductase OS=Pseudoalteromonas nigrifaciens OX=28109; GN = queG PE=3 SV=1
MHVSDAVPDYKNLAQQIKAWGQELGFSEVGITDIDLSKHETQLQRWLDAGYHGNMDYMAAHGMKRARPAELVPGTQRVISVKMNYLPPDAGFAKTLKNSEKAYISRYALGRDYHKLMRNRLKKLGQKIELEIGEYGFRPFVDSAPVLERQLAEKAGLGWRGKHSLLINKEAGSWFFLGELFVDLPLPIDAENTFEGCGKCVACITLCPTGAIVEPYVVDARKCISYLTIELQGPIPEQYRTLLGNRIYGCDDCQLVCPWNRYGQLTDENDFHPRTQLKDKDLLELFAWDEATFLKNTEGSPIRRIGHERWLRNLAVGLGNAEFSPSIIHALEDKSLACSELVLEHINWALQQQRNKQGTILRKTARLIRIVEKGLPRDA

SEQ ID NO: 79855 - protein, 377 aa, Pseudoalteromonas peptidolytica
  REGION 1..377: note = tr|A0A510U8C3|A0A510U8C3_9GAMM Epoxyqueuosine reductase OS=Pseudoalteromonas peptidolytica OX=61150; GN = yjeS PE=3 SV=1
MTTNNINYSELAEQIKQWGQALGFAEVGITDIDLSQHEAQLQRWLDAGYHGEMAYMAAHGMKRARPQELVPGTQRIISVKMNYLPPDASFAKALGNKTTAYISRYALGRDYHKVMRNKLKQLGKMIEQQVGSLGFRPFVDSAPVLERQIAQKAGLGWQGKNSLVINKQAGSWFFLGELFVDIPLPIDKPHEDEGCGRCTACLTLCPTGAIVAPYVVDARRCISYLTIELQGAIPEQFRAKIGNRVYGCDDCQLVCPWNRYGQLTQEDDFLPRQHLKDKDLLTLFAWSEETFLKNTEGSPIRRIGHERWLRNLAVGLGNAPYNEEIIRALEDKRQSTTALVIEHIDWALQQQRDKCAQSTRKNERLIRIIEKGLPRDA

SEQ ID NO: 79856 - protein, 377 aa, Pseudoalteromonas phenolica
  REGION 1..377: note = tr|A0A4Q7IS28|A0A4Q7IS28_9GAMM Epoxyqueuosine reductase OS=Pseudoalteromonas phenolica OX=161398 GN=queG; PE = 3 SV=1
MTATYIDYIELAAKIKQWGKEFGFAEVGITDIDLSEHEAQLQRWLDNGYHGEMSYMAAHGMKRARPAELVPGTQRIISVKMNYLPPEASFAKALANKTTAYISRYALGRDYHKVIRNKLKKLGQKIEQEVGQFGFRPFVDSAPVLERQLAEKAGLGWRGKNSLLIHKQAGSWFFLGELFVDLPLPTDEPNNEEGCGKCTACLTLCPTGAIVEPYVVDARKCISYLTIELQGPIPKQYRPLLGNRVYGCDDCQLVCPWNRFGQLTQEDDFTPRKNLKDQELLTLFNWTEETFLKNTEGSPIRRIGFERWQRNLAVGLGNAPFNQDIIDKLVLALPNSSELVQEHIEWALTQQRSKKEELDRKQARLIRIIEKGLPRDA

SEQ ID NO: 79857 - protein, 377 aa, Pseudoalteromonas phenolica
  REGION 1..377: note = tr|A0A0S2K5A9|A0A0S2K5A9_9GAMM Epoxyqueuosine reductase OS=Pseudoalteromonas phenolica OX=161398 GN=queG; PE = 3 SV=1
MTATKIDYIELAAKIKQWGKEFGFAEVGITDIDLSEHEAQLQRWLDNGYHGEMSYMAAHGMKRARPAELVPGTQRIISVKMNYLPPEASFAKALGNKETAYISRYALGRDYHKVIRNKLKKLGQKIEQEVGQFGFRPFVDSAPVLERQLAEKAGLGWRGKNSLLINKQAGSWFFLGELFVDLPLPIDESNKEEGCGKCTACLTLCPTGAIVEPYVVDARKCISYLTIELQGPIPEQYRPLLGNRVYGCDDCQLVCPWNRFGQLTQEDDFAPRKNLKDQELLTLFSWTEDTFLKNTEGSPIRRIGFERWQRNLAVGLGNAPFNQTIVDALESAFHQSSDLVKEHIEWALEQQRQKQCDEDRKQLRLIRIIEKGLPRDA

SEQ ID NO: 79858 - protein, 379 aa, unidentified
  source 1..379: note = Pseudoalteromonas piratica
  REGION 1..379: note = tr|A0A0A7EI19|A0A0A7EI19_9GAMM Epoxyqueuosine reductase OS=Pseudoalteromonas piratica OX=1348114 GN=queG; PE = 3 SV=1
MSTLNYPNLVAKIKLWAQELGFDQVSITDIDLSQHEAQLQRWLDAGYHGEMEYMAAHGMKRARPAELVPGTQRVISVRMNYLPPDASFAKDLKNKETAYISRYALGRDYHKLMRNRLKQLGKKLEQELEQYQLTLGFRPFVDSAPVLERQLAEKAGLGWTGKHTLILNQEAGSWFFLGELFVDLPLPVNEEIVEDKCGNCVACITSCPTGAIVEPYVVDARRCISYLTIEKQGVIPEEFRSLLGNRIYGCDDCQLVCPWNRYGQLTKEDDFHIRNQLKSQDLLTLFAWDEATFLKSTEGSAIRRIGIERWRRNIAVALGNAPYSEEVITSLEAAKHDASAMLLEHIEWALSQQQQKITVKDNKTQRLIRIVEKGLPRDA

SEQ ID NO: 79859 - protein, 377 aa, Pseudoalteromonas piscicida
  REGION 1..377: note = tr|A0A0F4PAT2|A0A0F4PAT2_PSEO7 Epoxyqueuosine reductase OS=Pseudoalteromonas piscicida OX=43662 GN=queG; PE = 3 SV=1
MTTDNINYSELAAQIKQWGQELGFAEVGITDIDLRDHEAQLQRWLDAGYHGEMAYMAAHGMKRARPAELVPGTQRIISVKMNYLPPDASFARALGNKTTAYISRYALGRDYHKVMRNKLKQLGQKIEQEVGMLGFRPFVDSAPVLERQIAEKAGLGWRGKNSLVINKQAGSWFFLGELFVDIPLPIDKPNQEEGCGRCTACLTLCPTGAIVEPYVVDARRCISYLTIELQGAIPEEFRAKMGNRIYGCDDCQLVCPWNRYGQITEEADFLPRTQLKDQQLLSLFAWDEATFLKNTEGSPIRRIGHERWLRNLAVGLGNAQYDEAIVIALEEKRQSATPLVIEHIDWALEQQRQKSDQHERKKARLIRIIEKGLPRDA

SEQ ID NO: 79860 - protein, 377 aa, Pseudoalteromonas piscicida
  REGION 1..377: note = tr|A0A290TWW0|A0A290TWW0_PSEO7 Epoxyqueuosine reductase OS=Pseudoalteromonas piscicida OX=43662 GN=queG; PE = 3 SV=1
MTTDNINYSELAAQIKQWGQELGFAEVGITDIDLREHEAQLQRWLDAGYHGEMAYMAAHGMKRARPAELVPGTQRIISVKMNYLPPDASFARALGNKTTAYISRYALGRDYHKVMRNKLKQLGQKIEQEVGTLGFRPFVDSAPVLERQIAEKAGLGWRGKNSLVINKQAGSWFFLGELFVDIPLPIDKPNQEEGCGRCTACLTLCPTGAIVEPYVVDARRCISYLTIELQGAIPEEFRAKMGNRIYGCDDCQLVCPWNRYGQITEEADFLPRTQLKDQQLLSLFAWDEATFLKNTEGSPIRRIGHERWLRNLAVGLGNAQYDEAIVIALEDKRQSATPLVIEHIDWALEQQRQKSDQHERKKARLIRIIEKGLPRDA

SEQ ID NO: 79861 - protein, 377 aa, unidentified
  source 1..377: note = Pseudoalteromonas porphyrae
  REGION 1..377: note = tr|A0A0N1ERI0|A0A0N1ERI0_9GAMM Epoxyqueuosine reductase OS=Pseudoalteromonas porphyrae OX=187330 GN=queG; PE = 3 SV=1
MTSQSPDYNELAQQIKLWGQELGFSEVGITDVDLSKHEAQLQRWLDLGYHGDMEYMAAHGMKRARPAELVPGTQRVISVKMNYLPPDASFAKNLKNTDKAYISRYALGRDYHKLMRNRIKKLGQKIEQHIGQFGYRPFVDSAPVLERQLAEKAGLGWQGKHSLLINKEAGSWFFLGELFVDIPLPIDKPNEIEGCGKCVACITLCPTGAIVEPYVVDARKCISYLTIELQGPIPEQYRPLLGNRIYGCDDCQLVCPWNRYGQITDEADFHPRTQLKDQDLVSLFSWDEVTFLKNTEGSPIRRIGHERWRRNIAVGLGNAQFNQAIIDILLITRETSSDLVKEHIDWALTQQKSKQDKLLRKTARLIRIVEKGLPRDA

SEQ ID NO: 79862 - protein, 377 aa, unidentified
  source 1..377: note = Pseudoalteromonas profundi
  REGION 1..377: note = tr|A0A3A3ER95|A0A3A3ER95_9GAMM Epoxyqueuosine reductase OS=Pseudoalteromonas profundi OX=1774956 GN=queG; PE = 3 SV=1
MTTPAIDYEQLALQIKQWGKDLGFAEVGITDIDLTKHEAQLQRWLDLGYHGEMEYMAAHGMKRARPAELVPGTQRVISVKMNYLPPDASFAKNLKQTDKAYISRYALGRDYHKLIRNRLKKLGQQIEQHIGQLGFRPFVDSAPVLERQLAEKAGLGWRGKHSLLINKEAGSWFFLGELFVDIPLPIDEENSFEGCGKCVACMTLCPTGAIVEPYVVDARKCISYLTIELQGAIPEEYRPLLGNRVYGCDDCQLVCPWNRYGQITDEADFHPRTQLKDQDLLALFVWDEATFLKNTEGSPIRRIGHERWLRNLAVGLGNADYNEQIIDALEQRLTTASALVAEHIEWALDQQKNKRQLKLRKTARLIRIVEKGLPRDA

SEQ ID NO: 79863 - protein, 382 aa, Pseudoalteromonas rubra
  REGION 1..382: note = tr|A0A4Q7EB65|A0A4Q7EB65_9GAMM Epoxyqueuosine reductase OS=Pseudoalteromonas rubra OX=43658 GN=queG PE=3; SV = 1
MTTTTHSSVDINYTELAQKIKLWGKELGFAEVGITDIDLSEHEAQLQRWLDNGYHGEMEYMAAHGMKRARPAELVPGTQRVISVKMNYLPPDASFARALKSKQTAYISRYALGRDYHKVIRNRLKKLGQRIEQEVGQFGFRPFVDSAPVLERQLAEKAGLGWRGKNSLLIHKQAGSWFFLGELFVDLPLPVDNNPQEEGCGKCNACMTLCPTGAIVEPYVVDARKCISYLTIELQGPIPEQYRPLLGNRVYGCDDCQLVCPWNRYGQLTDEQDFHPRKQLKDQELLTLFLWDEETFLKHTEGSPIRRIGHERWLRNLAVGLGNAQPDAQIIEALEARLASASELVREHINWALTQQRSKQAQQQRKQARLIRIIEKGLPRDA

SEQ ID NO: 79864 - protein, 382 aa, Pseudoalteromonas rubra
  REGION 1..382: note = tr|U1KLJ1|U1KLJ1_9GAMM Epoxyqueuosine reductase; OS = Pseudoalteromonas rubra DSM 6842 OX=1117318 GN=queG; PE = 3 SV=1
MTTTTHSSVDINYTELAQKIKLWGKELGFAEVGITDIDLSEHEAQLQRWLDNGYHGEMEYMAAHGMKRARPAELVPGTQRVISVKMNYLPPDASFARALSNKQTAYISRYALGRDYHKVIRNRLKKLGQRIEQDVGQFGFRPFVDSAPVLERQLAEKAGLGWRGKNSLLIHKQAGSWFFLGELFVDLPLPVDSNPQEEGCGKCNACITLCPTGAIVEPYVVDARKCISYLTIELQGPIPEQYRPLLGNRVYGCDDCQLVCPWNRYGQLTDEEDFHPRQQLKDQELLTLFQWDEATFLKNTEGSPIRRIGHERWLRNLAVGLGNAEPDEQIIQVLEARLESASDLVKEHIIWALAQQRAKHTEQQRKNARLIRIIEKGLPRDA

SEQ ID NO: 79865 - protein, 389 aa, Pseudoalteromonas ruthenica
  REGION 1..389: note = tr|A0A0F4Q231|A0A0F4Q231_9GAMM Epoxyqueuosine reductase OS=Pseudoalteromonas ruthenica OX=151081 GN=queG; PE = 3 SV=1
MPNNTINYPELAQQIKQWASELGFADAAICDIDLSAHEAQLQRWLELGYHGEMNFMAEHGTKRSRPDELVPGTQRVIALKMHYLPPDAGFARTLKNPQLAYISRYALGRDYHKLMRNRIKKLGQRIAQVAEGLGFRPFVDSAPVLERQLAAKAGLGFTGKHSLLIDKQAGSWFFLGELFVDIPLPVDDPDIRQATQGECGSCVACMTMCPTGAIVEPYVIDARKCISYLTIELKGAIPEQYRTAMGNRIYGCDDCQLICPWNRYGEITAESDFHARAQLKDQPLLTLFSWDEETFLTNTEGSPIRRIGHQRWLRNIAIALGNAPYDSAIVEALMARLNGASDLVAEHIHWALAQQQQKREALSVTVTAHTKKTQRLIRAVQKGLPRDAE

SEQ ID NO: 79866 - protein, 377 aa, Pseudoalteromonas sp.
  REGION 1..377: note = tr|A0A2D5T4X3|A0A2D5T4X3_PSEAS Epoxyqueuosine reductase OS=Pseudoalteromonas sp. OX=53249 GN=queG PE=3; SV = 1
MTATKIDYIELAAKIKQWGKEFGFAEVGITDIDLSEHEAQLQRWLDKGYHGEMSYMAAHGMKRARPAELVPGTQRIISVKMNYLPPEASFAKALANKDTAYISRYALGRDYHKVIRNKLKKLGQKIEQEVGQLGFRPFVDSAPVLERQLAEKAGLGWRGKNSLLINKQAGSWFFLGELFVDLPLPVDEPNNEEGCGKCTACLTLCPTGAIVEPYVVDARKCISYLTIELQGPIPEQYRPLLGNRVYGCDDCQLVCPWNRFGQLTSEDDFAPRKNLKDQELITLFNWNEETFLKNTEGSPIRRIGFERWQRNLAVGLGNAPFSAVIIETLEKAKSDSSELVKEHIEWALKQQRQKQNEIDRKQARLIRIIEKGLPRDA

SEQ ID NO: 79867 - protein, 377 aa, Pseudoalteromonas sp.
  REGION 1..377: note = tr|A0A3Q8X1H3|A0A3Q8X1H3_9GAMM Epoxyqueuosine reductase OS=Pseudoalteromonas sp. Xi13 OX=2490635 GN=queG; PE = 3 SV=1
MSNSTPNYQQLAKNIKAWGQELGFSEVGITDIDLSKHEAQLQRWLDAGYHGSMDYMAAHGMKRARPAELVPGTQRVISVKMNYLPPDASFAKTLKNTEKAYISRYALGRDYHKLMRNRLKKLGQKIEQEIGDYGFRPFVDSAPVLERQLAEKAGLGWRGKHSLLINQEAGSWFFLGELFVDLPLPIDNENTFEGCGKCVACITLCPTGAIVEPYVVDARKCISYLTIEHQGPIPEQYRALLGNRVYGCDDCQLVCPWNRYGQITDEQDFHPRTQLKNKDLLELFAWDEPTFLKNTEGSPIRRIGHERWLRNLAVGLGNADFSPSIINALESKHESSSQLVKEHIEWALEQQNNKQREQLRKTQRLIRIVEKGLPRDA

SEQ ID NO: 79868 - protein, 371 aa, Pseudoalteromonas spongiae
  REGION 1..371: note = tr|A0A290T0F7|A0A290T0F7_9GAMM Epoxyqueuosine reductase OS=Pseudoalteromonas spongiae UST010723-006; OX = 1117319 GN=queG PE=3 SV=1
MVEKIKLWAKELGFDQVSITDIDLSQHEAQLQRWLDAGYHGEMEYMAAHGMKRARPAELVPGTQRVISVRMNYLPPDASFAKDLKNKQTAYISRYALGRDYHKLMRNRLKQLGKKLEQELEQHQITLGFRPFVDSAPVLERQLAEKAGLGWTGKHTLILNQEAGSWFFLGELFVDLPLPVNEETVENKCGSCVACITSCPTGAIVEPYVVDARRCISYLTIEKQGAIPEEFRSLLGNRIYGCDDCQLVCPWNRYGQLTAENDFHIRKHLKSQDLLTLFAWDEATFLKNTEGSAIRRIGIERWRRNIAVALGNADANNDIINALERAKSDASEMLLEHIHWALAQQHNKTAQRDNKTKRLIRIIEKGLPRDA

SEQ ID NO: 79869 - protein, 377 aa, Pseudoalteromonas tetraodonis
  REGION 1..377: note = tr|A0A1E3WTY4|A0A1E3WTY4_9GAMM Epoxyqueuosine reductase OS=Pseudoalteromonas tetraodonis OX=43659; GN = queG PE=3 SV=1
MSDVKPNYEQLAQQIKLWGQQLGFSEVGITDIDLTKHEAQLQRWLDAGYHGSMDYMAAHGMKRARPSELVPGTQRVISVKMNYLPPDSGFAKNLKNTEKAYISRYALGRDYHKLMRNRLKQLGKKIEQQVGDYGFRPFVDSAPVLERQLAEKAGLGWRGKHSLLINKEAGSWFFLGELFVDLPLPIDDENTFEGCGKCVACITLCPTGAIVEPYVVDARKCISYLTIEHQGAIPEQYRTLMGNRIYGCDDCQLVCPWNRYGQITDEQDFHPRTQLKNKDLLALFAWDETTFLTNTEGSPIRRIGHERWLRNIAVGLGNADFSPAIIHALEDKRKTVSDMVNEHIEWALTQQHDKQRQKLRKTARLIRIVEKGLPRDA

SEQ ID NO: 79870 - protein, 379 aa, Pseudoalteromonas translucida
  REGION 1..379: note = tr|A0A0U2X254|A0A0U2X254_9GAMM Epoxyqueuosine reductase OS=Pseudoalteromonas translucida KMM 520; OX = 1315283 GN=queG PE=3 SV=1
MHVSDAVPDYKNLAQQIKVWGQELGFSEVGITDIDLSKHETQLQRWLDAGYHGNMDYMAAHGMKRARPAELVPGTQRVISVKMNYLPPDAGFAKTLKNSDKAYISRYALGRDYHKLMRNRLKKLGQKIELEIGEYGFRPFVDSAPVLERQLAEKAGLGWRGKHSLLINKEAGSWFFLGELFVDLPLPIDAENTFEGCGKCVACITLCPTGAIVEPYVVDARKCISYLTIELQGPIPEQYRTLLGNRVYGCDDCQLVCPWNRYGQLTDENDFHPRTQLKDKDLLELFAWDEATFLKNTEGSPIRRIGHERWLRNLAVGLGNAEFSPSIIHALEDKSLACSELVLEHINWALQQQRNKQGTILRKTARLIRIVEKGLPRDA

SEQ ID NO: 79871 - protein, 375 aa, Pseudoalteromonas tunicata
  REGION 1..375: note = tr|A4C8M0|A4C8M0_9GAMM Epoxyqueuosine reductase; OS = Pseudoalteromonas tunicata D2 OX=87626 GN=queG PE=3 SV=1
MTTATINYPELAIKIKQWGQELGFAEVAISDIDLTEHEAQLQRWLDLGFHGEMEYIAAHGMKRARPAELVPGTQRVICVRMDYLPPDASFAKTLQDPKKAYISRYALGRDYHKLIRTRLKKLGEKIELEVGQFGFRPFVDSAPVLERQLAQKAGLGWTGKHTLILNQHAGSWFFLGELFVDLPLPIDKPVIEQCGKCVACIKICPTNAIVEPYVVDARRCISYLTIELQGAIPIEFRPLIGNRVYGCDDCQLICPWNRYGQITAEDDFHARTQLKDKDLIELFLWDEATFLKNTEGSAIRRIGHERWLRNMAVGLGNASYDPSILAVLEDMKSKVSSLVLEHIEWAITQQLQKNSLDRKTQRLIIAIEKGLPRDA

SEQ ID NO: 79872 - protein, 408 aa, Pseudoalteromonas ulvae
  REGION 1..408: note = tr|A0A244CR47|A0A244CR47_9GAMM Epoxyqueuosine reductase OS=Pseudoalteromonas ulvae OX=107327 GN=queG; PE = 3 SV=1
MYRQLELHAAELVPLHRRFVVNYQCTFFSYGSSVTAPNINYPELALQIKQWGTELGFDQVAISDIDLSEHESQLKRWLALGYHGEMEYMAAHGMKRARPAELVPGTQRVICVRMNYLPPDASFAKNLKNTDKAYISRYALGRDYHKLMRNRLKKLGERIEQQVGQFGFRPFVDSAPVLERQLAEKSGLGWTGKHSLILNQEAGSWFFLGELFIDLPLPIDGPVEEKCGSCVACIKLCPTNAIVEPYVVDARRCISYLTIELQGAIPIEFRPLIGNRVYGCDDCQLICPWNRYGQLTAEDDFHARKQLKDKDLIELFSWDETTFLKNTEGSAIRRIGHQRWLRNLAVGLGNASFNEHIISTLKEANLNASPLVSEHIEWAISEQLRKREQNKKTQRLIKAIEKGLPRDA

SEQ ID NO: 79873 - protein, 316 aa, unidentified
  source 1..316: note = Pseudobacter ginsenosidimutans
  REGION 1..316: note = tr|A0A4Q7MFE0|A0A4Q7MFE0_9BACT Epoxyqueuosine reductase OS=Pseudobacter ginsenosidimutans OX=661488; GN = queG PE=3 SV=1
MQVPRSPMSPIEKNTLLIKQAASRLGFSYCGIAKAVPLDEDARRLEAWLNQGMQGNMKYMENHFELRVDPSRLVPGARSVITLLMNYYPAQAQQEETPKVSKYAFGKDYHEVIRAKLNQLLATMNQEIGAVTGRGFVDSAPVMERSWAQRSGLGWIGRNGNLINKQQGSFFFIATLIVDIPLLYDDPIAKDYCGTCRKCIDACPTGAIHENKVIDGSKCISYFTIELKEMMIPESMQGKFDNWMFGCDTCQDVCPWNRFSVSNTEPEFTPLPELLEFSLQDWQELTEESFKKIFRHSPLKRAKFEGIRRNLRFLQQ

SEQ ID NO: 79874 - protein, 353 aa, unidentified
  source 1..353: note = Pseudobacteriovorax antillogorgiicola
  REGION 1..353: note = tr|A0A1Y6B5S4|A0A1Y6B5S4_9PROT Epoxyqueuosine reductase OS=Pseudobacteriovorax antillogorgiicola; OX = 1513793 GN=SAMN06296036_101245 PE=4 SV=1
MAKLKDRNYFSELFAEQGLLLIGHVPLVGDDRHFSRFEQWLSRGHHAGMSFMENHRAIRRDPRLLQEGLQSSLVFGLNYYQGDRLHSSNTRVAQYARFQDYHKLLRKKAQKLLGQLSESIPQLEGRVTIDSAPLLERALASRSQSGFIGKNTCFILPREGSFYLLGELHLNQQLFPFDKPAVVDPQQRSEEGGCGTCKRCQVNCPTGALDEDYTLDAKLCLSYWTIEHRGLVPTKFWPWFAKYWYGCDICQLACPYNRKASINIQLPLKSQLADLDLFQVATMDQGFYEATFGGSPMTRAKRVGLQRNALIALFVTQDERLDSAIGMIERDNEQNGVLRDTIKQIRAELSCDR

SEQ ID NO: 79875 - protein, 399 aa, Pseudochrobactrum asaccharolyticum
  REGION 1..399: note = tr|A0A366DVB0|A0A366DVB0_9RHIZ Epoxyqueuosine reductase OS=Pseudochrobactrum asaccharolyticum OX=354351; GN = queG PE=3 SV=1
MATSISDRTPKKPLPKSDEPPAVRLKRFLTEEAAAVGFDVVAITTPDAIPEAPQRLRYFLDHGRHGSMEWLEETADRRSNPSELWHEVRSIVMLAMNYGPDHDPRTLQDKKDCGAISVYAQNRDYHDIIKGKLKHMASRFAARTGHEVKVFVDTAPVMEKPLAVSAGMGWQGKHTNMVSREYGSWLFLGSIFTTADLEPDHAGKDSCGRCRACLDACPTNAFPAPYQIDARRCISYLTIENKGPIPHEFRSMMGNRIYGCDDCLSACPWNKFAQVSREAKLQAREELKEPSLEQLLQLDDPAFRTLFSGSPVKRIGRDRFIRNVLIAAGNSDNPAYIPIIEQLLDDPVPVTRGAAVWALSRLASEAEFLRHKNQHLPLEQEAEVIEEWLHAATQSEKDQ

SEQ ID NO: 79876 - protein, 379 aa, unidentified
  source 1..379: note = Pseudocitrobacter faecalis
  REGION 1..379: note = tr|A0A366F7V2|A0A366F7V2_9ENTR Epoxyqueuosine reductase OS=Pseudocitrobacter faecalis OX=1398493 GN=queG; PE = 3 SV=1
MSQPLDLNQLAQQIKQWGTELGFQQVGITDTDLSASEPKLQAWLDKQYHGEMEWMARHGMMRARPHELLPGTLRVISVRMNYLPANAAFASTLKNPELGYISRYALGRDYHKLLRNRLKKLGELIQEQCVSLNFRPFVDSAPILERPLAEKAGIGWTGKHSLILSRDAGSFFFLGELLIDLPLPIDKPVVEECGRCVACMTICPTGAIVEPYTVDARRCISYLTIELEGAIPEEFRPLMGNRIYGCDDCQLICPWNRFSQLTDEADFSPRKALHAPELIELFAWDEARFLKLTEGSPIRRIGHLRWLRNIAVALGNAPWNKAVIEALETRRGEHPLLDEHIEWAIAQQIEKRNACVVEVQLPKKQRLVRVVEKGLPRDA

SEQ ID NO: 79877 - protein, 379 aa, unidentified
  source 1..379: note = Pseudocitrobacter sp.
  REGION 1..379: note = tr|A0A5B0K1I7|A0A5B0K1I7_9ENTR Epoxyqueuosine reductase OS=Pseudocitrobacter sp. 73 OX=2605731 GN=queG; PE = 3 SV=1
MSQPLDLNQLAQQIKQWGTELGFQQVGITDTDLSASEPKLQAWLDKQYHGEMEWMARHGMMRARPHELHPGTLRVISVRMNYLPANAAFASTLKNPDLGYISRYALGRDYHKLLRNRLKKLGEMIQEQCVSLNFRPFVDSAPILERPLAEKAGIGWTGKHSLILNRDAGSFFFLGELLIDLPLPIDEPVEEACGRCVACMTICPTGAIVEPYTVDARRCISYLTIELEGAIPEEFRPLMGNRIYGCDDCQLICPWNRFSQLTDEADFSPRKALHAPELIELFAWDEAWFLKVTEGSPIRRIGHLRWLRNIAVALGNAPWSEAVIQALETRRGEHPLLDEHIEWAIAQQIEKRNACVVEVQLPKKQRLVRVIEKGLPRDA

SEQ ID NO: 79878 - protein, 318 aa, unidentified
  source 1..318: note = Pseudoclostridium thermosuccinogenes
  REGION 1..318: note = tr|A0A2K2F9S3|A0A2K2F9S3_9FIRM tRNA epoxyqueuosine(34) reductase QueG OS=Pseudoclostridium thermosuccinogenes OX=84032 GN=queG PE=4 SV=1
MKDELMDFCRSLGIEYAGIAHPGPYHELEKIWSKRLAEGHYTGFEEMDISKRIDPRLTLEDAQSVIVCLFPYFTGLSAHANLSKSAFSIDYHIIIKKKLEQIGEFLSSRIDGFKYKAFVDNGPLVDRYMAYLAGLGYYGINGHIINDKFGSYVFIGYIINNHPFSQDQPMDRTCIKCGLCVKSCPGCAILGNFDINPLRCRSYITQKKDELTELEKDILTKHHLIYGCDICQDVCPHNRKVQHTGIEEFKDNLKYSIDYDELREISNREFMRRYRDRAFSWRGKKLLLRNFELIRNAKKDAAPQNPDGCQENMQRLLS

SEQ ID NO: 79879 - protein, 323 aa, unidentified
  source 1..323: note = Pseudoclostridium thermosuccinogenes
  REGION 1..323: note = tr|A0A2K2F3H4|A0A2K2F3H4_9FIRM 4Fe-4S ferredoxin-type domain-containing protein; OS = Pseudoclostridium thermosuccinogenes OX=84032; GN = CDQ84_07475 PE=4 SV=1
MGGMHLFSFKSNNGGKKKVESVCNSIKEEAMRYGYRLQLIDIRHLDDLEREIKTFQQIEELNGFQKWIVNELYDFHVPKLEFQVKSIIIMAVYHPMSTDVTFCYAGRNYEAKALVRAGLDRAREYLKEGLSRWGYHAKESYNLPMKRLAVHGGLAVYGRNNITYVEGLGSNVSYLAFFSDMPCEEDVWLELKVADLCAQCKCCIESCPTGAIREDRFLIDNQKCLSFFNESEGEFPDWLSKEVHHTLYDCLRCQEHCPLNASVVEDNIDGITFTEEETRMLLQGKGPEDFPKEFLNKVEKIDLFKWKNTLSRNMRAIMESKRM

SEQ ID NO: 79880 - protein, 236 aa, unidentified
  source 1..236: note = Pseudodesulfovibrio hydrargyri
  REGION 1..236: note = tr|A0A1J5NL37|A0A1J5NL37_9DELT Epoxyqueuosine reductase OS=Pseudodesulfovibrio hydrargyri OX=2125990; GN = queG_1 PE=4 SV=1
MNSEELKKFAVEAGATRARIADLDRLRGIETMPPDLLDGFRCAVSMAIALSDSIIETITDRPTPIYASHYSRVNALLDEAALRVSRYIEERGARAMPLPASQVLDAERNLSFLSHKAVAVAAGIGWQGKSLLTVSPDFGPRIRLVTVLTDADLVPDEPLRNRCGGCTKCTDACPAGAIKNVNTDSHYASRDEALHFERCLHHVRDVCASMENIKSSICGVCIKVCPWGAKKRAKAA

SEQ ID NO: 79881 - protein, 277 aa, unidentified
  source 1..277: note = Pseudodesulfovibrio hydrargyri
  REGION 1..277: note = tr|A0A1J5N5Q6|A0A1J5N5Q6_9DELT Epoxyqueuosine reductase OS=Pseudodesulfovibrio hydrargyri OX=2125990; GN = queG_2 PE=4 SV=1
MADWMADPGNNSLGPDLMLPAFDAPLLGCAAGDDPLFDFLRQDIGPDFYWTPARAFAQAFPENAPSGADLSVVSWVLPQTEHTRKAHGQNKEMPSVEWSRARHYGEKVNEALRRFVVGLFAEQGVDACAPALLPKWTRAESPRYGFASTWSERHTAHVCGLGTFGLSDGLITPRGKAIRVGSVVVRAHLTPTPRPYTRHNEWCLFHAGGKCRACMKRCPAGAITENGHDKVKCKTYIRSVTAPHVEANQLGFRVNSCGLCQVRVPCESRNPTVKRGG

SEQ ID NO: 79882 - protein, 318 aa, unidentified
  source 1..318: note = Pseudoflavitalea sp.
  REGION 1..318: note = tr|A0A3B7MY61|A0A3B7MY61_9BACT Epoxyqueuosine reductase OS=Pseudoflavitalea sp. 5GH32-13 OX=2315862; GN = queG PE=3 SV=1
MRTIEQHTTLIKTYAAQLGFDYCGIARAQRLDEDARRLESWLQQGMHGSMGYMENHFELRIDPTKLVPGAQSVITLLLNYYPAEQQDPDSLQVAKYAYGKDYHEVIREKLNRLLALIKLHIGEVQGRGFVDSAPVLERTWAQRSGLGWIGKNGNLLTKQGGSFFFIATLITDLPLRYDDPYAKDFCGTCTKCIDACPTDAILDNKVVDGSKCISYFTIELKDKLIPGEMKNKFDNWFFGCDTCQDVCPWNRFAQATQETEFSPIPELLHFTTAEWQSLTEDAFKKIFRHSPLKRSKFSGIQRNLTFVQNTFDGEGPGQ

SEQ ID NO: 79883 - protein, 278 aa, Pseudoflavonifractor capillosus
  REGION 1..278: note = tr|A6NR36|A6NR36_9FIRM Putative iron-sulfur cluster-binding protein OS=Pseudoflavonifractor capillosus ATCC 29799 OX=411467 GN=BACCAP_00660 PE=4 SV=1
MTPELDAAFAACGAAAWGGLTWSDALPHLTPQAVEKTLTLCPTPGAVLVAAFPYYAGDTPGNLSLYARGRDYHLVLTEKLNTVCDVLRQKYLSYSFLPGADNSPLPERQLAWACGMGLRGQNGLLILPPWGSYVFLGTILTDCPLEFSTSEPSNVCISCGKCAAACPGGALDGAGFQLSRCLSDISQKKGELSPEENALLSAQECLWGCDLCQRVCPYNAHPAITPISDFREDLISSLIPADLEGLTNRTFREKYGDRAFAWRGPAVLRRNLALKENT

SEQ ID NO: 79884 - protein, 356 aa, Pseudofulvimonas gallinarii
  REGION 1..356: note = tr|A0A4S3KUA5|A0A4S3KUA5_9GAMM Epoxyqueuosine reductase OS=Pseudofulvimonas gallinarii OX=634155 GN=queG; PE = 3 SV=1
MSAIDPATLKPAILQWGRELGFQAVGIAHIDLREDEAALQRWLDLYRHGDMEWMARHGLKRARPAELVPGTMSVVCARMDYLPADAAPMQETLDDPQRAYVSRYALGRDYHKLLRGRLQKLADRIADHIGPFGYRVFTDSAPVLEKPLARNAGLGWLGKHTNLLDSKTGSWFFLGELYTDLPLASDERATDHCGTCSRCIGACPTGAIVAPYELDARLCISYLTIELQGAIPESLRPLLGNRIYGCDDCQLVCPWNKFAQPTREADFAVRNGLDQATLVELFAWDEAEFLRRTEGSPIRRIGHERWLRNIAVALGNAKGTPEVIAALQARSTHPSALVREHVTWALARHAVTNAGY

SEQ ID NO: 79885 - protein, 377 aa, unidentified
  source 1..377: note = Pseudogracilibacillus auburnensis
  REGION 1..377: note = tr|A0A2V3W3Z5|A0A2V3W3Z5_9BACI Epoxyqueuosine reductase OS=Pseudogracilibacillus auburnensis OX=1494959; GN = DFR56_10643 PE=4 SV=1
MDVVALKKDIIAYSKEIGIDKIGFASADVFTELKERLIIQEKLNFASGFEKGTAEERTEPERLLSGAKSIISIALAYPSKIMDPPKSIKGARRGIFCRASWGIDYHHVLRDRLEKLAQYMQTNIPQFSYKSMVDTGELSDRAVAERAGIGFSGKNTTIITKEFGSFVYLGEMITNIPFIPDSPVEDSCGDCRICLDACPTGALVQGGQLNAKKCLAFQTQTKDFLPDEFRTKIGTRLYGCDTCQAVCPRNKGIDFHLHEEFEAEPEVAKPLLRPMLKISNREFREKFGHISGFWRGKNPLQRNAMIALAHFKDETAVNDLIDVMNNDVRPIIRGTAAWALGKIGTTEALIAIEEAIHKETDDRVREEMKKGLHFQEI

SEQ ID NO: 79886 - protein, 367 aa, unidentified
  source 1..367: note = Pseudogulbenkiania ferrooxidans
  REGION 1..367: note = tr|B9YZC8|B9YZC8_9NEIS Epoxyqueuosine reductase; OS = Pseudogulbenkiania ferrooxidans 2002 OX=279714 GN=queG; PE = 3 SV=1
MTEKSLQKPNYPELARQIKAWARELGFADARITRPQLPPEAEHTLLAWLAEGCHGEMEYMARHGVLRLRPAELVPGTLSVVSLRMHYWPGASRGADEVLADGERAYLSRYALGRDYHKVLRNRLQRLAERVQAEVGEFGHRVFTDSAPVAEVALAAQAGLGWRGKHTLLLNRRHGSLFFLGELFTDLPLPPDAAEEGHCGRCTRCLDVCPTGAIVEPYKVDARRCISYLTIELAGAIPPALRPLIGNRVYGCDDCQLACPWNRFAVPTEETDFAVRHGLDDVTLAELFGWSAADFASRMAGSPIYRIGYERWSRNLAVGLGNAPSSPAVLAALTARADDPSELVREHVQWALAQHAGRAAGGTVAAC

SEQ ID NO: 79887 - protein, 358 aa, unidentified
  source 1..358: note = Pseudogulbenkiania ferrooxidans
  REGION 1..358: note = tr|U1A847|U1A847_9NEIS Epoxyqueuosine reductase; OS = Pseudogulbenkiania ferrooxidans EGD-HP2 OX=1388764; GN = queG PE=3 SV=1
MTENPPQKPDYPELSRQIKAWAREAGFADARVTRAALPPEAEQRLEAWLAAGHHGEMDYMARHGAMRVRPAELVPGTLSVISLRMNYWPGGESAEQVLADPSRAYLSRYALGRDYHKVLRNRLQKLAERIEGAVGSFGYRVFTDSAPLAEVALASQAGLGWRGKHTLLLTKRQGSLFFLGEILTDLPLPPDEAEDGHCGRCTRCLDVCPTGAIIEPYTVDARRCISYLTIELKGPIPEPLRPLIGNRVYGCDDCQLFCPWNRFGALTAEADFAVRHGLDGASLVELFDWSADEFRERMAGSPIYRIGYHKWLSNLAVGLGNAPTTPEVVAALRRRLDFPDELVAEPVRWALARHGQSC

SEQ ID NO: 79888 - protein, 367 aa, Pseudogulbenkiania sp.
  REGION 1..367: note = tr|G2IZE8|G2IZE8_PSEUL Epoxyqueuosine reductase; OS = Pseudogulbenkiania sp. (strain NH8B) OX=748280 GN=queG; PE = 3 SV=1
MTEKSLQKPNYPELARQIKAWARELGFADARITRPQLPPEAEHTLLAWLAEGCHGEMEYMARHGVLRLRPAELVPGTLSVVSLRMHYWPGASRGADEVLADGERAYLSRYALGRDYHKVLRNRLQRLAERVQAEVGEFGHRVFTDSAPVAEVALAAQAGLGWRGKHTLLLNRRHGSLFFLGELFTDLPLPPDAAEEGHCGRCTRCLDVCPTGAIVEPYKVDARRCISYLTIELAGAIPPALRPLIGNRVYGCDDCQLACPWNRFAVPTEEADFAVRHGLDDVTLAELFGWSAADFASRMAGSPIYRIGYERWSRNLAVGLGNAPSSPAVLAALTARADDPSELVREHVQWALAQHAGRGAGGTVAAC

SEQ ID NO: 79889 - protein, 361 aa, Pseudogulbenkiania subflava
  REGION 1..361: note = tr|A0A1Y6BZK8|A0A1Y6BZK8_9NEIS Epoxyqueuosine reductase OS=Pseudogulbenkiania subflava DSM 22618; OX = 1123014 GN=queG PE=3 SV=1
MTEKSLQNPNYPELARQIKAWACELGFADARITRPQLPPEAEHTLLAWLAEGCHGEMEYMARHGVLRLRPAELVPGTLSVVSLRMHYWPGASRGADEVLADGERAYLSRYALGRDYHKVLRNRLQRLAERVQAEVGEFGHRVFTDSAPVAEVALASQAGLGWRGKHTLLLNRRHGSLFFLGELFTDLPLPADAAEEGHCGRCTRCLEVCPTGAIVEPYKVDARRCISYLTIELAGAIPPALRPLIGNRVYGCDDCQLACPWNRFAVPTEEADFNVRHGLDDVSLAELFGWSAADFASRMAGSPIYRIGYERWSRNLAVGLGNAPSSPAVLAALTARANDPSELVREHVQWALAQHASRAAQ

SEQ ID NO: 79890 - protein, 356 aa, unidentified
  source 1..356: note = Pseudohaliea rubra
  REGION 1..356: note = tr|A0A095XVM9|A0A095XVM9_9GAMM Epoxyqueuosine reductase OS=Pseudohaliea rubra DSM 19751 OX=1265313; GN = queG PE=3 SV=1
MTTTIASDNPAALAKRIRGWARELGFQQLGISDVDLAEHEGYLQKWLDAGYHGSMDFMAAHGTRRSRPEELVPGTCRVLSVRMDYLPPGDDPAATLDDGERAYIARYALGRDYHKVLRRRLARLARRIEAETGGGRYRAFVDSAPVLERAIAERAGLGWIAKNTMLINEQAGSWFFLGEIYTDLPLPADPPRTQKHCGSCRACLDICPTDAFPGPFELDARRCISYLTIEHKGSIDEALRPLMGNRVFGCDDCQLVCPWNKFAEATAEDDFRPRHGLDAPALAELFAWDEATFLERTAGSPIRRIGYERWLRNLAVGLGNAPGTAAVLAALEARREHPSALVREHVAWALRQHGAR

SEQ ID NO: 79891 - protein, 383 aa, unidentified
  source 1..383: note = Pseudohoeflea suaedae
  REGION 1..383: note = tr|A0A4V3A7M8|A0A4V3A7M8_9RHIZ Epoxyqueuosine reductase OS=Pseudohoeflea suaedae OX=877384 GN=queG PE=3; SV = 1
MPRTIDPARLNRFLAAEAARLGFSAHGVADPSRLTKTDSRLREFLALGRHGSMEWLADRADERANPRNLWPEVRSVVMLGMNYGPQGDPLELLGRKDRAAISVYARNRDYHDLIKGRLKEFAGRLVARFGGDVKVFVDTAPVMEKPLAELAGLGWQGKHTNLVSRDCGSWLFLGAIFSTLELPADMPEKDHCGSCRACLDICPTNAFPAAYQLDARRCISYLTIEAKEQVPHEFRRAMGNRIYGCDDCLAACPWNKFAGQTNEAKLAARHDLEAPPLAELLALDDASFRSFFSGSPIKRIGRDRFIRNVLIAAGNSGQHALVEPVRAHLSDPSPLVRGMAVWALSRLLPHHEFATLAEAAVNETEPEIAAEWRAGLEPTGRPQ

SEQ ID NO: 79892 - protein, 364 aa, unidentified
  source 1..364: note = Pseudohongiella acticola
  REGION 1..364: note = tr|A0A1E8CLM3|A0A1E8CLM3_9GAMM Epoxyqueuosine reductase OS=Pseudohongiella acticola OX=1524254 GN=queG; PE = 3 SV=1
MTADTHTLPPDQASALLPRIRELALALGFQQLAVTDIDLSAYRPHLDAWLARNFHGDMDYMSHHRDLRLHPESLHPGTIRVLSVRMDYSLSAEQSLTPLKNRERAYISRYARGRDYHKLIRKRLQKLADGITELAGPMGYRAFVDSAPVLERALAEKAGLGWIGKNTMLLNKKAGSWFFLGELFTDLPLPIDAPVTGHCGSCTACLDICPTQAFVGPNQLDARRCISYLTIELKGSIPEPLRAAIGNRVFGCDDCQLICPWNKFSQLTSETDFAPRHGLDNTDLSDLFMWSEETFLRNTEGSAIRRTGYEGWLRNLAVGLGNAPSTIPVLNALQSRQHHPSALVREHVAWALRQHALRADATKA

SEQ ID NO: 79893 - protein, 353 aa, unidentified
  source 1..353: note = Pseudohongiella sp.
  REGION 1..353: note = tr|A0A2D9DX27|A0A2D9DX27_9GAMM Epoxyqueuosine reductase OS=Pseudohongiella sp. OX=1979412 GN=queG PE=3; SV = 1
MISSEQSRLLLSQIRQWAAELGFQQLAVSDIDLTAYRPHLEAWLARNFHGEMDYMERHKDLRLAPDQLHPNTIRVLSVRMDYSFDREQTLTPMRDGRMAYISRYARGRDYHKLLRKRLQQLAEKISGEVGEFGYRAFVDSAPVLERALAEKGGLGWIGKNTMLLNRQAGSFFFLGELFTDLPLPKDEPVSAHCGSCTACLDLCPTKAFVGPYQLDARRCISYLTIELKGAIPEELRPLMGNRVFGCDDCQIVCPWNKFSRLSEESDFRPRHGLDSSELSELFLWTEAEFLARTAGSAIRRTGYEGWLRNLAVGLGNAPTSQKIIDALQSRAQYPSALVREHVEWALRRHGVTA

SEQ ID NO: 79894 - protein, 353 aa, unidentified
  source 1..353: note = Pseudohongiella sp.
  REGION 1..353: note = tr|A0A355V4B2|A0A355V4B2_9GAMM Epoxyqueuosine reductase OS=Pseudohongiella sp. OX=1979412 GN=queG PE=3; SV = 1
MISSEQSRLLLSQIRQWAAELGFQQLAVSDIDLTAYRPHLEAWLARNFHGEMDYMERHKDLRLAPDQLHPNTIRVLSVRMDYSFDKEQTLTPMRDGRMAYISRYARGRDYHKLLRKRLQQLAEKISGEVGEFGYRAFVDSAPVLERALAEKGGLGWIGKNTMLLNRQAGSFFFHGELFTDLPLPVDEPVSAHCGSCTACLDLCPTRAFVGPYQLDARRCISYLTIELKGAIPEELRPLMGNRVFGCDDCQIVCPWNKFSRLSEESDFSPRHGLDSSELSELFLWSEAEFLERTVGSAIRRTGYEGWLRNLAVGLGNAPTSPEIIDALQSRAQHPSALVRDHVEWALRQHGVTA

SEQ ID NO: 79895 - protein, 367 aa, unidentified
  source 1..367: note = Pseudohongiella spirulinae
  REGION 1..367: note = tr|A0A0S2K9Q9|A0A0S2K9Q9_9GAMM Epoxyqueuosine reductase OS=Pseudohongiella spirulinae OX=1249552 GN=queG; PE = 3 SV=1
MTPEQASTLLEQIRSWARELGFQQLAVADVDLSAYQPHLDAWLARNFHGEMDYMLRHRDLRLDPQSLHPGTIRVLSVRMDYSLDKDQSLAPLKNREQAYISRYARGRDYHKLIRKRLQQLAEKISEAAGPVGYRAFVDSAPVLERALAEKAGLGWIGKNTMLINRQAGSWFFLGELFTDLPLPLDEPVSAHCGSCTACLDLCPTGAFTGPNQLDGRRCISYLTIELKSSIPEELRPLIGNRVFGCDDCQLVCPWNKFSKLSGEGDFAPRHGLDNSLLSELFMWTEQEFMERTAGSAIRRTGYEGWLRNLAVGLGNAPSTIPVLQALRARVDHPSELVREHVSWALQQHGEGGEQGKANAAIPANKDN

SEQ ID NO: 79896 - protein, 398 aa, Pseudolabrys sp.
  REGION 1..398: note = tr|A0A371BDQ4|A0A371BDQ4_9RHIZ Epoxyqueuosine reductase OS=Pseudolabrys sp. GY_H OX=2292256 GN=queG PE=3; SV = 1
MAPVLPSAAERDAGRNSTGQALRRPGLLTRPAEIKAALIARAKERGFDIAGITRPDAVPEAKARLERFLADGAHGDMVWLETTAERRGSPLALWPDVRSVIMLGMNYGPDENPLGILQQRDRAGISVYAKGDDYHELIKARLKEIARWLVANAGGDVKVFVDTAAVMEKPLAAKAGLGWQGKHTNLVSRDYGSWLFLGAIFTTLELPADDAVNDSCGSCRACLDACPTAAFPEPYRLDARRCVSYLTIEHKGPIPRDLRALMGNRIYGCDDCLAVCPWNKFAQAGREAKLAARETLRAPKLADLARLDDAQFRVLFSKTSIKRTGRDRFVRNVLYAIGNSGDATLAIEAECLLGDASPLVRGAAVWALSRLKGREELKALKRDDEDAGVQEEWSAALS

SEQ ID NO: 79897 - protein, 365 aa, Pseudolabrys sp.
  REGION 1..365: note = tr|A0A0Q7TE52|A0A0Q7TE52_9RHIZ Epoxyqueuosine reductase OS=Pseudolabrys sp. Root1462 OX=1736466 GN=queG; PE = 3 SV=1
MKAALVARARERGFDVAGITRPDAVPEAKARLERFLADGAHGDMTWLETTAERRGSPLALWPDVRSVIMLGMNYGPDEDPRDILSSRDRAAISVYAKGDDYHDLIKARLKEIARWLVANAGGDVKVFVDTAAVMEKPLAAKAGLGWQGKHTNLVSRQFGSWLFLGAIFTTLDLPADDEVGDSCGSCRACLDACPTAAFPAPYRLDARRCISYLTIEHKGPIPRELRPALGNRIYGCDDCLAACPWNKFAQAGREAKLAARDVLRAPQLAELSRLDDAQFRALFSKTSIKRTGRDRFIRNVLYAIGNSGDVTLAPETARLLDDPSPLVRGAAVWSLSRLRTREALATMKRDDEDGLVRDEWDAALS

SEQ ID NO: 79898 - protein, 404 aa, Pseudolabrys taiwanensis
  REGION 1..404: note = tr|A0A346A4K0|A0A346A4K0_9RHIZ Epoxyqueuosine reductase OS=Pseudolabrys taiwanensis OX=331696 GN=queG; PE = 3 SV=1
MVRAGEVPPVVPSAAGRDPGRHSGVGDLRRSRLLTDPEAIRLALTGEARLLGFDCIGITRPDAVPEAKVRLERFIADGAYGDMTWMAETAARRASPLALWPEVRSVIMLGMNYGPDEDPLAVLKERTRAAISVYAQGDDYHDIIKKRLKEIARWLVRQAGGDVKVFVDTAAVMEKPLAASAGLGWQGKHTNLVSRQYGSWLFLGSIFTTLELPADGPMDGTCGSCRACLDVCPTAAFPAPYRLDARRCISYLTIEHKGPIPRDLRPLMGNRIYGCDDCLAVCPWNKFAQVGREAKLAARDALRAPGLAELSRLDDAQFRALFSKSPVKRIGRDRFVRNVLIAIGNSGDASLAVEAERLLGDESPLVRGAAVWALSQLVTREELEKLSRHDNDDDVKGEWAAAGL

SEQ ID NO: 79899 - protein, 359 aa, unidentified
  source 1..359: note = Pseudomonadaceae bacterium
  REGION 1..359: note = tr|A0A2D5CGV9|A0A2D5CGV9_9GAMM Epoxyqueuosine reductase OS=Pseudomonadaceae bacterium OX=1914538 GN=queG; PE = 3 SV=1
MNSSALDPVTLAQSIKDWGRELGFQQVGIASVDLGEHEAHLQRWLDAGYQGEMDYMAAHGSKRSHPEQLVPGTLRVITLRMDYLPGDTRMAEQLANPEKAYVSRYALGRDYHKLIRKRLQQLAERIQKEIGPFGFRAFVDSAPVLEKAIAENAGLGWIGKNTLVLNRKAGSYFFLGELFIDFELPIDPPHASEHCGRCTACLDICPTAAFVDPYVLDARKCISYLTIELKGAIPVELRAPIGNRVFGCDDCQMVCPWNRFAKATDKGDFKPRHDLDNAELAGLFMWTEDEFLSRTEGSPLRRTGYLNWLRNLAVGLGNAPSTIPVLEALKARREHPSELVREHVEWALEQHHQRAAITP

SEQ ID NO: 79900 - protein, 363 aa, unidentified
  source 1..363: note = Pseudomonadaceae bacterium
  REGION 1..363: note = tr|A0A3T0SN13|A0A3T0SN13_9GAMM Epoxyqueuosine reductase OS=Pseudomonadaceae bacterium SI-3 OX=2079806; GN = queG PE=3 SV=1
MSSTTLDPAALADSIKEWGRELGFQQVGITGVDLGEHEAHLERWLAAGYQGEMDYMAAHGSKRSHPEQLVPGTLRVISLRMDYLPGDTRMAEQLAQPEKAYVSRYALGRDYHKLIRKRLQQLAERIQHVIGPFGFRAFVDSAPVLEKAVAQQAGLGWIGKNTLVLNRKAGSWFFLGELFVDIALPVDEPTDRDHCGSCHACLDVCPTDAFVGERVLDARKCISYLTIELKGPIPVELRSKIGNRVFGCDDCQIVCPWNRFAKPTQQTDFQPRHSLDNAELATLFRWTEEEFLSRTEGSPLRRTGYQSWLRNLAVGLGNAPSSIPVLEALQARRDDPSELVREHVQWALAQHEQRPPALPHTKD

SEQ ID NO: 79901 - protein, 380 aa, unidentified
  source 1..380: note = Pseudomonadales bacterium
  REGION 1..380: note = tr|A0A2D6QM89|A0A2D6QM89_9GAMM Epoxyqueuosine reductase OS=Pseudomonadales bacterium OX=1891229 GN=queG; PE = 3 SV=1
MMRAWLGSLEVWHNYREACQPTPAAMTSQTPDYQQLAEQIRQLARELGFQQLGIGATELGEHEQHLQHWLDAGYHGEMEWMASHGSKRTRPNELVPGTQRVLSVRMDYLPTETEMAKRLANPDAAYISRYALGRDYHKLIRRRLQQLAERIEQLIGPFGYRAFVDSAPVMERALATRSGLGWIGKNTMLINRKAGSYFFLGELYTDLPLPIDAPQQTEHCGKCTACLTACPTGAFVGPHLLDARRCISYLTIELKGAIPEALRKPVGNRVFGCDDCQLVCPWNRFAKATEEADFTPRHNLDQASLVELFLWDEATFLKRTEGSPVRRIGHERWLRNLAIGLGNATSSINVIEALKLRQAHPSALVREHVDWALAQHGINT

SEQ ID NO: 79902 - protein, 354 aa, unidentified
  source 1..354: note = Pseudomonadales bacterium
  REGION 1..354: note = tr|A0A1G3F149|A0A1G3F149_9GAMM Epoxyqueuosine reductase OS=Pseudomonadales bacterium RIFCSPLOWO2_12_FULL_59_450 OX=1802008 GN=queG PE=3 SV=1
MPAITSDLPALAQSIKDWGRELGFQQVGISGLDLAEHEQHLQRWLDAGYHGEMEYMGAHGSKRSHPDELVPGTLRVVSLRMDYLPGDTQMAQLLAQPEKAYISRYALGRDYHKLIRKRVQQLADRIQAQIGPFGFRAFVDSAPVLEKAIAEQAGLGWIGKNTLVLNRKAGSYFFLSELFVDLPLPVDPPHATEHCGRCTACLDICPTNAFVGPYVLDARRCISYLTIELKSAIPEDLRPLIGNRVFGCDDCQIVCPWNRFARPTAESDFKPRHNLDNAELAELFMWDEDKFLSSTEGSPLRRAGYERWLRNLAVGLGNAPSSIPVLEALKARRDYPSELVREHVEWALEQHAAR

SEQ ID NO: 79903 - protein, 356 aa, Pseudomonas abietaniphila
  REGION 1..356: note = tr|A0A1G7XA81|A0A1G7XA81_9PSED Epoxyqueuosine reductase OS=Pseudomonas abietaniphila OX=89065 GN=queG; PE = 3 SV=1
MTAAGLNELAQSIKDWGRELGFQQVGISGLDLAEHEQHLERWLEAGYHGEMDYMAAHGSKRSHPDELVPGTLRVVSLRMDYLPGDTHMAQRLAEPEKAYVSRYALGRDYHKLIRKRVQQLAERIQQAIGPFGFRAFVDSAPVLEKAIAEQAGLGWIGKNTLVLNRKAGSYFFLSELFVDLPLPVDERHATEHCGRCTACLEICPTNAFAGPYVLDARKCISYLTIELKTAIPEALRSMIGNRVFGCDDCQIVCPWNRFARPTDQNDFKPRHGLDNAELATLFLWDETTFLSNTEGSPLRRAGYERWLRNLAVGLGNAPSSIPVIEALKARLDHPSEMVREHVEWALLQHERRGAII

SEQ ID NO: 79904 - protein, 355 aa, unidentified
  source 1..355: note = Pseudomonas abyssi
  REGION 1..355: note = tr|A0A2A3MLQ1|A0A2A3MLQ1_9PSED Epoxyqueuosine reductase OS=Pseudomonas abyssi OX=170540 GN=queG PE=3 SV=1
MTSQTPDYQQLAEQIRQLARELGFQQLGIGAAELGEHEQHLQHWLDAGYHGEMEWMASHGSKRTRPNELVPGTQRVLSVRMDYLPTETEMAKRLANPDAAYISRYALGRDYHKLIRRRLQQLAERIEQLIGPFGYRAFVDSAPVMERALATRSGLGWIGKNTMLINRKAGSYFFLGELYTDLPLPIDAPQQTEHCGKCTACLTACPTDAFVGPHLLDARRCISYLTIELKGAIPEALRKPMGNRVFGCDDCQLVCPWNRFAKATEEADFTPRHNLDQASLVELFRWDEATFLKRTEGSPVRRIGHERWLRNLAIGLGNATSSINVIEALKLRQTHPSALVREHVDWALAQHGINT

SEQ ID NO: 79905 - protein, 416 aa, unidentified
  source 1..416: note = Pseudomonas acidophila
  REGION 1..416: note = tr|A0A2A4F727|A0A2A4F727_9PSED Epoxyqueuosine reductase OS=Pseudomonas acidophila OX=1912599 GN=queG; PE = 3 SV=1
MNRSPQYPVADTPASDDDARAMRRFDEAALTALALRIKTWGRELGFGALGISDAELPDAESGLAAWLEAGYHGEMDYMAKHGMKRARPAELVAGTRRVITARIAYLPALTLTGAHAGKEAESDPLVASDAPDWRADEMARLADPSAAVVSIYARGRDYHKVMRQRLQQLAERIEAEIGAYGYRVFTDSAPVLEVAFAQNAGIGWRGKHTLLLQRDAGSLFFLGEIYVDLPLPTDASIDPDSAPETAGAHCGSCTRCIDACPTGAIVEPYKVDARRCISYLTIELKGSIPEDLRPLIGNRVYGCDDCQLVCPWNKFAQAAPVADFDVRHGLDRASLVDLFDWSASDFDTRMQGSAIRRIGYECWLRNLAVGMGNALRADAATLAGAARSAIVDALRRRADDPSPLVREHVQWALEAA

SEQ ID NO: 79906 - protein, 493 aa, Pseudomonas aeruginosa
  REGION 1..493: note = tr|A0A0A8RIV1|A0A0A8RIV1_PSEAI Epoxyqueuosine reductase OS=Pseudomonas aeruginosa OX=287 GN=queG PE=3; SV = 1
MRLRRVAGKPLRRRDRQHPHSPTRTLRQRRDQVAVAGIVAVPGEHRQRRGLRPTAAQGTPGGVGGALHEFEARRAGGDQARIEVAHLGGGIEGEWQVVVLEGHGHRIDSASGAQSGRIIPIPFRFPSSSLPPMTPQPLADNLSPPDPARLAQSIKDWGRELGFQQVGISDVELGEHEAHLQRWLEAGYHGEMDYMAAHGSKRSRPAELVPGTLRVISLRMDYLPGDTRMAQVLATPEKAYVSRYALGRDYHKLIRKRLQQLAERIQAEVGPFGFRAFVDSAPVLEKAIAEQAGLGWIGKNTLVLNRKAGSYFFLGELFVDMPLPVDPAMDSEHCGRCSACLDICPTAAFVGPYRLDARRCISYLTIEYKGAIPLELRPLIGNRVFGCDDCQIVCPWNRFARPTGQGDFQPRHSLDNAELAELFLWSEEEFLGRTEGSPLRRAGYERWLRNLAVGLGNAPSTIPVLEALKARRGFPSELVREHVEWALRRHGET

SEQ ID NO: 79907 - protein, 361 aa, Pseudomonas aeruginosa
  REGION 1..361: note = tr|A0A086BTM6|A0A086BTM6_PSEAI Epoxyqueuosine reductase OS=Pseudomonas aeruginosa VRFPA01 OX=1262663; GN = queG PE=3 SV=1
MTPQPLADRLSPPDPLRLAQSIKDWGRELGFQQVGIGDVDLGEHEGHLQRWLEAGYHGEMDYMAAHGSKRSRPAELVPGTLRVISLRMDYLPGDTRMAQVLAAPEKAYVSRYALGRDYHKLIRKRLQQLAERIQGEIGPFGFRAFVDSAPVLEKAIAEQAGLGWIGKNTLVLNRKAGSYFFLGELFVDVPLPVDPAMASEHCGRCSACLDICPTAAFVGPYRLDARRCISYLTIEYKGAIPLELRPLIGNRVFGCDDCQIVCPWNRFARPTGQGDFQPRHSLDNAGLAELFLWSEEEFLGRTEGSPLRRAGYERWLRNLAVGLGNAPSTIPVLEALKARREHPSELVREHVEWALRRHGET

SEQ ID NO: 79908 - protein, 353 aa, unidentified
  source 1..353: note = Pseudomonas aestusnigri
  REGION 1..353: note = tr|A0A1H5STZ1|A0A1H5STZ1_9PSED Epoxyqueuosine reductase OS=Pseudomonas aestusnigri OX=857252 GN=queG; PE = 3 SV=1
MPEDPDYQALANQIRVFAQDLGFQQLGISAPDIGEHEQWLQRWLDAGYQGEMDWMASHGSKRTRPPELVPGTQRVISVRMDYLPADAAMARRLASPDTAYISRYALGRDYHKLIRRRLQQLADRIQELIGPFGYRAFVDSAPVMERALASRSGLGWIGKNTMLINRKAGSYFFLGELYTDLPLPTDSPQQTEHCGKCTACLERCPTDAFVGPHVLDARRCISYLTIELKGAIPENLRRAMGNRVFGCDDCQLVCPWNRFAKPTGEPDFSPRHQLDQADLVELFSWDEATFLQRTEGSPIRRIGYERWLRNLAVGLGNATTSIPVVEALKRRRADTSELVREHVRWALEQHGAS

SEQ ID NO: 79909 - protein, 362 aa, Pseudomonas agarici
  REGION 1..362: note = tr|A0A0X1T5Q8|A0A0X1T5Q8_PSEAA Epoxyqueuosine reductase OS=Pseudomonas agarici OX=46677 GN=queG PE=3 SV=1
MPVNSVDLPALAQSIKQWGRELGFQQVGIAGVELGEHEQHLQRWLAAGYQGDMDYMGAHGSKRSHPDELVPGTLRVVSLRMDYLPGDTQMAQRLGQPETAYVSRYALGRDYHKLIRKRLQQLAERIQQVIGPFGYRAFVDSAPVLEKAIAEQAGLGWIGKNTLVLNRKAGSYFFLGELFLDLPLPVDAPHVTEHCGRCTACLDICPTAAFVGPYVLDARRCISYLTIELKTAIPEDLRPLIGNRVFGCDDCQIVCPWNRFARTSDEGDFKPRHSLDNAGLAELFLWDEETFLKNTEGSPLRRAGYERWLRNLAVGLGNAPSTIVVLEALNSRRDYPSELVREHVQWALHQHTERGTPSGVRR

SEQ ID NO: 79910 - protein, 357 aa, Pseudomonas alcaligenes
  REGION 1..357: note = tr|A0A1N6PB26|A0A1N6PB26_PSEAC Epoxyqueuosine reductase OS=Pseudomonas alcaligenes OX=43263 GN=queG PE=3; SV = 1
MSDSPPDLAQLAQSIKDWGRELGFQQVGITDVDLGEHEAHLQRWLDAGYQGEMDYMAAHGSKRSHPDELVPGTLRVVSLRMDYLPGDTRMAERLAQPEQAYVSRYALGRDYHKLVRKRLQQLAERIQAVIGPFGHRAFVDSAPVLEKAIAEKAGLGWIGKNTLVLNRKAGSWFFLGELFVDIPLPIDAPHASEHCGRCTACMDICPTAAFAGPYVLDARRCISYLTIELKGSIPEELRAPIGNRVFGCDDCQIVCPWNRFARPTEQGDFQPRHGLDSGGLVELFLWTEAEFLSRTEGSPLRRAGYERWLRNLAVGLGNAPSTIPVLEALRARREHPSELVREHVAWALARHHEKGPH

SEQ ID NO: 79911 - protein, 357 aa, Pseudomonas alcaligenes
  REGION 1..357: note = tr|U2Z7J4|U2Z7J4_PSEA4 Epoxyqueuosine reductase; OS = Pseudomonas alcaligenes (strain ATCC 14909 / DSM 50342 / JCM 20561 / NBRC 14159 / NCIMB 9945 / NCTC 10367 / 1577)OX=1215092 GN=queG PE=3 SV=1
MSDSPPDLAQLAQSIKDWGRELGFQQVGITDVDLGEHEAHLQRWLDAGYQGEMDYMAAHGSKRSHPDELVPGTLRVVSLRIDYLPGDTRMAERLAQPEQAYVSRYALGRDYHKLVRKRLQQLAERIQAVIGPFGHRAFVDSAPVLEKAIAEKAGLGWIGKNTLVLNRKAGSWFFLGELFVDIALPIDAPHASEHCGRCTACMDICPTAAFAGPYVLDARRCISYLTIELKGSIPEELRAPIGNRVFGCDDCQIVCPWNRFARPTEQADFQPRHGLDSGGLVELFLWTEAEFLSRTEGSPLRRAGYERWLRNLAVGLGNAPSTIPVLEALRARREHPSELVREHVAWALARHHEKGPH

SEQ ID NO: 79912 - protein, 354 aa, Pseudomonas alcaliphila
  REGION 1..354: note = tr|A0A1G6Y3B9|A0A1G6Y3B9_9PSED Epoxyqueuosine reductase OS=Pseudomonas alcaliphila OX=101564 GN=queG; PE = 3 SV=1
MSDQTLDLDALALSIKDWGRELGFQQVGITDVELGEHEAHLQRWLEAGYQGEMDYMAAHGSKRSHPDELVPGTLRVVSLRMDYLPGDTQMAQRLKEPQQAYVSRYALGRDYHKLIRKRLQQLAERIQQQIGPFGYRAFVDSAPVLEKAIAEKAGLGWIGKNTLVLNRKAGSYFFLGELFVDLPLPVDAPHGSEHCGRCSACMDICPTAAFAGPYVLDARRCISYLTIELKGSIPVELRAPIGNRVFGCDDCQIVCPWNRFARPTEQGDFQPRHGLDNSGLAELFLWTEEEFLSRTEGSPLRRAGYERWLRNLAVGLGNAPSTIPVLQALIARREHPSPLVREHVEWALERHSAL

SEQ ID NO: 79913 - protein, 354 aa, Pseudomonas alcaliphila
  REGION 1..354: note = tr|A0A1L7G6U0|A0A1L7G6U0_9PSED Epoxyqueuosine reductase OS=Pseudomonas alcaliphila JAB1 OX=741155; GN = queG PE=3 SV=1
MSDQTLDLNALALSIKDWGRELGFQQVGITDVELGEHEAHLQRWLAAGYQGEMEYMAAHGSKRSHPDELVPGTLRVVSLRMDYLPGNTQMAQRLKESEQAYVSRYALGRDYHKLIRKRLQQLAERIQQQIGPFGYRAFVDSAPVLEKAIAEKAGLGWIGKNTLVLNRKAGSYFFLGELFVDLPLPVDAPHASEHCGRCSACMDICPTAAFAGPYVLDARRCISYLTIELKGSIPEELRAPIGNRVFGCDDCQIVCPWNRFARPTEQGDFQPRHGLDNSGLAELFMWTEEEFLSRTEGSPLRRAGYERWLRNLAVGLGNAPSTIPVLQALQARREHPSELVREHVAWALERHGAL

SEQ ID NO: 79914 - protein, 356 aa, unidentified
  source 1..356: note = Pseudomonas alkylphenolica
  REGION 1..356: note = tr|A0A443ZYC0|A0A443ZYC0_9PSED Epoxyqueuosine reductase OS=Pseudomonas alkylphenolica OX=237609 GN=queG; PE = 3 SV=1
MPAIPDLPALAHSIKEWGNELGFAHVGIAGVDLAEHEQHLERWLQAGYHGEMDYMGAHGSKRSHPEQLVPGTLRVVSLRMDYLPGDTRMAQQLAQPEKAYISRYALGRDYHKLVRKRVQHLAERIQKEIGPFGFRAFVDSAPVLEKAIAEQAGLGWIGKNTLLLNRKAGSYFFLAELFVDLPLPVDPPQVSEHCGRCSACLDICPTQAFVGPYVLDARRCISYLTIELKSAIPEELRALIGNRVFGCDDCQIVCPWNRFAKPTAENDFKPRHALDSAGLAELFMWDEKTFLDSTEGSPLRRAGYERWLRNLAVGLGNAPSTIPVLEALKARVDYPSELVREHVEWALKQHAQRDSH

SEQ ID NO: 79915 - protein, 361 aa, unidentified
  source 1..361: note = Pseudomonas alkylphenolica
  REGION 1..361: note = tr|A0A077FFA7|A0A077FFA7_9PSED Epoxyqueuosine reductase OS=Pseudomonas alkylphenolica OX=237609 GN=queG; PE = 3 SV=1
MSAATPDIPALAQSIKDWGKELGFAHVGIAGVELGEHEQHLERWLQAGYHGEMDYMGAHGSKRSHPEQLVPGTLRVVSLRMDYLPGDTHMAQQLAQPEKAYISRYALGRDYHKLIRKRVQHLAERIQKEIGPFGFRAFVDSAPVLEKAIAEQAGLGWIGKNTLLLNRKAGSYFFLAELFVDLPLPVDPPQVSEHCGRCTACLDICPTQAFVGPYLLDARRCISYLTIELKSAIPEELRALIGNRVFGCDDCQIVCPWNRFARPTGESDFKPRHNLDSAGLAELFMWDEQTFLDSTEGSPLRRAGYERWLRNLAVGLGNAPSTIQVLEALKARQDHPSELVREHVEWALGQHSSRGKPAPTR

SEQ ID NO: 79916 - protein, 392 aa, Pseudomonas amygdali
  REGION 1..392: note = tr|A0A0P9IY84|A0A0P9IY84_PSEA0 Epoxyqueuosine reductase OS=Pseudomonas amygdali OX=47877 GN=queG PE=3; SV = 1
MRFRVEHASIGSDVWQNYTHLGPGFSLRMSAITAVLPTSDDLAALAVSIKAWGRELGFQEVGISGLDLAEHEQHLQRWLDAGYHGEMDYMAAHGSKRSHPDELVPGTLRVVSLRMDYLPGDTEMAQRLTEPEKAYVSRYALGRDYHKLIRKRLQQLAERIQQAIGPFGFRAFVDSAPVLEKAIAEQAGLGWIGKNTLVLNRKAGSFFFLGELFVDIPLPVDAPHATEHCGRCTACLDICPTAAFVGPYVLDARRCISYLTIELKTAIPEELRPLIGNRVFGCDDCQIVCPWNRFARPTDQSDFQPRHNLDNAGLAELFLWDEDKFLSSTEGSPLRRAGYERWLRNLAVGLGNAPSTIPVIEALHARRDYPSELVREHVEWALQRHGVADAGG

SEQ ID NO: 79917 - protein, 392 aa, Pseudomonas amygdali
  REGION 1..392: note = tr|A0A0Q0CGM3|A0A0Q0CGM3_PSEA0 Epoxyqueuosine reductase OS=Pseudomonas amygdali pv. ulmi OX=251720; GN = queG PE=3 SV=1
MRFRVEHASIGSDVWQNYTHLGPGFSLRMSAITAALPTRDDLAALSLSIKAWGRELGFQEVGISGLDLAEHEQHLQRWLDAGYHGEMDYMAAHGSKRSHPDELVPGTLRVVSLRMDYLPGDTKMAQRLTEPEKAYVSRYALGRDYHKLIRKRLQQLAERIQQAIGPFGFRAFVDSAPVLEKAIAEQAGLGWIGKNTLVLNRKAGSFFFLGELFVDIPLPVDAPHATEHCGRCTACLDICPTAAFVGPYVLDARRCISYLTIELKTAIPEELRPLIGNRVFGCDDCQIVCPWNRFARPTDQSDFQPRHNLDNAGLAELFLWDEDKFLSSTEGSPLRRAGYERWLRNLAVGLGNAPSTIPVIEALQARRDYPSELVREHVEWALQRHGVADAGG

SEQ ID NO: 79918 - protein, 353 aa, Pseudomonas anguilliseptica
  REGION 1..353: note = tr|A0A1H4RXM0|A0A1H4RXM0_PSEAG Epoxyqueuosine reductase OS=Pseudomonas anguilliseptica OX=53406 GN=queG; PE = 3 SV=1
MNTDTLDLIALAQSIKDWGRELGFQQVGIVDVQLGEHEAHLQRWLDAGYQGEMDYMAAHGSKRSHPDELVPGTLRVVSLRMDYLPGDTQMAQRLAQPEKAYVSRYALGRDYHKLIRKRLQQLAERIQQQIGPLGFRAFVDSAPVLEKAIAEQAGLGWIGKNTLVLNRKAGSYFFLGELFVDLPLPVDPPHASGHCGRCTACMDICPTAAFVGPYVLDARRCISYLTIELKGSIPEELRAPIGNRVFGCDDCQMVCPWNRFAKPTEQSDFQPRHSLDNAELAELFGWSEEEFLSRTEGSPLRRAGYERWLRNLAVGLGNAPSSIPVLEALKARREHPSELVREHVEWALARHGL

SEQ ID NO: 79919 - protein, 354 aa, Pseudomonas antarctica
  REGION 1..354: note = tr|A0A1G9UT18|A0A1G9UT18_9PSED Epoxyqueuosine reductase OS=Pseudomonas antarctica OX=219572 GN=queG PE=3; SV = 1
MPAITTDLPALAQSIKDWGRELGFQQVGISGLDLAEHEQHLQRWLDAGYHGEMDYMAAHGSKRSHPDELVPGTLRVVSLRMDYLPGDTQMAQLLAKPEKAYISRYALGRDYHKLIRKRVQQLADRIQAQIGPFGFRAFVDSAPVLEKAIAEQAGLGWIGKNTLVLNRKAGSYFFLSELFVDLPLPVDAPHSTEHCGRCTACLDICPTNAFVGPYVLDARRCISYLTIELKTAIPEDLRPLIGNRVFGCDDCQIVCPWNRFARTTHEGDFKPRHNLDNAELAELFMWDEDKFLSSTEGSPLRRAGYERWLRNLAVGLGNAPSSIPVLEALKARRDYPSELVREHVEWALNQHAAR

SEQ ID NO: 79920 - protein, 354 aa, Pseudomonas antarctica
  REGION 1..354: note = tr|A0A172YUX5|A0A172YUX5_9PSED Epoxyqueuosine reductase OS=Pseudomonas antarctica OX=219572 GN=queG PE=3; SV = 1
MPAITTDLPALAQSIKDWGRELGFQQVGISGLDLAEHEQHLQRWLDAGYHGEMEYMGAHGSKRSHPDELVPGTLRVVSLRMDYLPGDTQMAQLLAKPEKAYISRYALGRDYHKLIRKRVQQLADRIQAQIGPFGFRAFVDSAPVLEKAIAEQAGLGWIGKNTLVLNRKAGSYFFLSELFVDLPLPVDAPHTTEHCGRCTACLDICPTNAFVGPYVLDARRCISYLTIELKSAIPEDLRPLIGNRVFGCDDCQIVCPWNRFARATDEGDFKPRHNLDNAELAELFMWDEDKFLSSTEGSPLRRAGYERWLRNLAVGLGNAPSSIPVLEALKARRDYPSDLVREHVEWALNQHATR

SEQ ID NO: 79921 - protein, 356 aa, Pseudomonas argentinensis
  REGION 1..356: note = tr|A0A1I3IDB7|A0A1I3IDB7_9PSED Epoxyqueuosine reductase OS=Pseudomonas argentinensis OX=289370 GN=queG; PE = 3 SV=1
MTDATLDLASLAQSIKDWGRELGFQQVGISGLELGEHEAHLQRWLDAGYQGEMDYMAAHGRKRSHPDELVPGTLRVVSLRMDYLPGETQMARRLQEPEKAYVSRYALGRDYHKLIRKRLQQLAERIQQAIGPFGYRAFVDSAPVLEKAIAEQSGLGWIGKNTLVLNRKAGSYFFLGELFVDIPLPEDAPHASEHCGRCSACLDICPTTAFVGPYVLDARRCISYLTIELKGPIPEELRAPIGNRVFGCDDCQMVCPWNRFAKATEQSDFQPRHGLDNAELAELFRWSEEDFLSRTEGSPLRRAGYERWLRNLAVGLGNAPSSIPVLEALQARREYPSALVREHVEWALAQHAQRQG

SEQ ID NO: 79922 - protein, 353 aa, Pseudomonas arsenicoxydans
  REGION 1..353: note = tr|A0A4P6G0Z5|A0A4P6G0Z5_9PSED Epoxyqueuosine reductase OS=Pseudomonas arsenicoxydans OX=702115 GN=queG; PE = 3 SV=1
MPAINTDLPALAQSIKDWGRELGFQQVGISGLDLAEHEQHLERWLAAGYHGEMDYMGAHGSKRSHPEELVPGTLRVVSLRMDYLPGDTEMAKRLTQPEKAYVSRYALGRDYHKLIRKRVQQLAEKIQAVIGPFGYRAFVDSAPVLEKAIAEQAGLGWIGKNTLVLNRKAGSYFFLAELFVDLPLPVDPPHGTEHCGRCTACLDICPTNAFVGPYVLDARRCISYLTIELKSAIPEDLRPLIGNRVFGCDDCQIVCPWNRFARPSGESDFKPRHNLDNAELAELFMWDEEKFLSSTEGSPLRRAGYERWLRNLAVGLGNAPSSIPVLEALKARRDHPSELVREHVEWALKQHGL

SEQ ID NO: 79923 - protein, 354 aa, Pseudomonas arsenicoxydans
  REGION 1..354: note = tr|A0A1H0BVK3|A0A1H0BVK3_9PSED Epoxyqueuosine reductase OS=Pseudomonas arsenicoxydans OX=702115 GN=queG; PE = 3 SV=1
MPAINTDLPALAQSIKDWGRELGFQQVGISGLDLAEHEQHLERWLAAGYHGEMDYMGAHGSKRSHPEELVPGTLRVVSLRMDYLPGDTEMAKRLTQPAKAYVSRYALGRDYHKLIRKRVQQLAEKIQAVIGPFGYRAFVDSAPVLEKAIAEQAGLGWIGKNTLVLNRKAGSYFFLAELFVDLPLPVDPPHGTEHCGRCTACLDICPTNAFVGPYVLDARRCISYLTIELKSAIPEDLRPLIGNRVFGCDDCQIVCPWNRFARPSGESDFKPRHNLDNAELAELFMWDEDKFLSSTEGSPLRRAGYERWLRNLAVGLGNAPSSIPVLEALKARRDYPSELVREHVEWALKQHGLL

SEQ ID NO: 79924 - protein, 362 aa, Pseudomonas asplenii
  REGION 1..362: note = tr|A0A438LAF1|A0A438LAF1_9PSED Epoxyqueuosine reductase OS=Pseudomonas asplenii OX=53407 GN=queG PE=3; SV = 1
MPVISVDLPALAQSIKEWGRELGFQQVGIAGLELGEHEQHLQRWLDAGYHGDMEYMGAHGSKRSHPDELVPGTLRVVSLRMDYLPGDTQMAQRLGQPEKAYVSRYALGRDYHKLIRKRLQQLAERIQQVIGPFGYRAFVDSAPVLEKAIAEQAGLGWIGKNTLVLNRKAGSYFFLGELFVDLPLPVDAPHATEHCGRCTACMDICPTAAFVGPYVLDARRCISYLTIELKTAIPEELRPLIGNRVFGCDDCQMVCPWNRFARPSDEGDFKPRHSLDNAGLAELFLWDEETFLKNTEGSPLRRAGYERWLRNLAVGLGNAPSTIPVLEALNTRLDYPSELVQEHVQWALRQHAERSALRPAPL

SEQ ID NO: 79925 - protein, 359 aa, Pseudomonas asplenii
  REGION 1..359: note = tr|A0A2J7V0V7|A0A2J7V0V7_9PSED Epoxyqueuosine reductase OS=Pseudomonas asplenii OX=53407 GN=queG PE=3; SV = 1
MSAITTDLPALAQSIKDWGRELGFQQVGISGLDLAEHEQHLARWLEAGYHGEMDYMGAHGSKRSHPEELVPGTLRVVSLRMDYLPGDTQMAQMLAQPEKAYVSRYALGRDYHKLIRKRVQQLADKIQAQIGPFGFRAFVDSAPVLEKAIAEQAGLGWIGKNTLVLNRKAGSYFFLSELFVDLPLPVDEPHSSEHCGRCTACLDICPTNAFVGPYVLDARRCISYLTIELKNAIPEDLRPLIGNRVFGCDDCQIVCPWNRFAKPSGESDFKPRHNLDNAELAELFMWDEDKFLSSTEGSPLRRAGYERWLRNLAVGLGNAPSSIPVLEALKARRDYPSALVQEHVEWALKQHAQRQGASL

SEQ ID NO: 79926 - protein, 359 aa, unidentified
  source 1..359: note = Pseudomonas asturiensis
  REGION 1..359: note = tr|A0A1M7NYB0|A0A1M7NYB0_9PSED Epoxyqueuosine reductase OS=Pseudomonas asturiensis OX=1190415 GN=queG; PE = 3 SV=1
MSAITAERLTCDDLVTLAQSIKAWGRELGFQEVGIAGLDLAEHEQHLQRWLDAGYHGEMDYMAAHGSKRSHPDELVPGTLRVVSLRMDYLPGDTHMAQRLSEPEQAYVSRYALGRDYHKLIRKRLQQLAERIQKAIGPFGFRAFVDSAPVLEKAIAEQAGLGWIGKNTLVLNRKAGSFFFLGELFVDIPLPVDPPHATEHCGRCTACLDICPTAAFVGPYVLDARRCISYLTIELKTAIPEELRPLIGNRVFGCDDCQIVCPWNRFARPTDQSDFQPRHNLDNAGLAELFLWDEATFLSNTEGSPLRRAGYERWLRNLAVGLGNAPSTIAVIEALEARREYPSDMVREHVEWALGRHGR

SEQ ID NO: 79927 - protein, 364 aa, Pseudomonas avellanae
  REGION 1..364: note = tr|A0A2S3TIA0|A0A2S3TIA0_9PSED Epoxyqueuosine reductase OS=Pseudomonas avellanae OX=46257 GN=queG PE=3; SV = 1
MSAITAALPTLDDLAALTLSIKAWGRELGFQEVGISGLDLAEHEQHLQRWLDAGYHGEMDYMAAHGSKRSHPDELVPGTLRVVSLRMDYLPGDTEMAQRLTEPEKAYVSRYALGRDYHKLIRKRLQQLAERIQQAIGPFGFRAFVDSAPVLEKAIAEQAGLGWIGKNTLVLNRKAGSFFFLGELFVDIPLPVDASHATEHCGRCTACLDICPTAAFVGPYVLDARRCISYLTIELKTAIPEELRPLIGNRVFGCDDCQIVCPWNRFARPTDQSDFQPRHNLDNAGLAELFLWDEDKFLSSTEGSPLRRAGYERWLRNLAVGLGNAPSTIPVIEALQARRDYPSELVREHVEWALGRHGVAGAEG

SEQ ID NO: 79928 - protein, 362 aa, Pseudomonas avellanae
  REGION 1..362: note = tr|A0A3M5SU74|A0A3M5SU74_9PSED Epoxyqueuosine reductase OS=Pseudomonas avellanae OX=46257 GN=queG PE=3; SV = 1
MSAITAALPTLDDLAALTLSIKAWGRELGFQEVGISGLDLAEHEQHLQRWLDAGYHGEMDYMAAHGSKRSHPDELVPGTLRVVSLRMDYLPGDTEMAQRLTEPEKAYVSRYALGRDYHKLIRKRLQQLAERIQQAIGPFGFRAFVDSAPVLEKAIAEQAGLGWIGKNTLVLNRKAGSFFFLGELFVDIPLPVDAPHATEHCGRCTACLDICPTAAFVGPYVLDARRCISYLTIELKTAIPEELRPLIGNRVFGCDDCQIVCPWNRFARPTDQSDFQPRHNLDNAGLAELFLWDEDKFLSSTEGSPLRRAGYERWLRNLAVGLGNAPSTIPVIEALQARRDYPSELVREHVEWALQRHGVATF

SEQ ID NO: 79929 - protein, 354 aa, Pseudomonas azotoformans
  REGION 1..354: note = tr|A0A4Q0HZX6|A0A4Q0HZX6_PSEAZ Epoxyqueuosine reductase OS=Pseudomonas azotoformans OX=47878 GN=queG; PE = 3 SV=1
MPAITSDLPALAQSIKDWGRELGFQQVGISGLDLAEHEQHLQRWLDAGYHGEMEYMGAHGSKRSHPEELVPGTLRVVSLRMDYLPGDTQMAQLLAQPEKAYISRYALGRDYHKLIRKRVQQLADRIQAQIGPFGFRAFVDSAPVLEKAIAEQAGLGWIGKNTLVLNRKAGSYFFLSELFVDLPLPVDPPHTTEHCGRCTACLDICPTNAFVGPYVLDARRCISYLTIELKSAIPEDLRPLIGNRVFGCDDCQIVCPWNRFARPTAESDFKPRHNLDNAELAELFMWDEDKFLSSTEGSPLRRAGYERWLRNLAVGLGNAPSSIPVLEALKARRDYPSELVREHVEWALEQHAAR

SEQ ID NO: 79930 - protein, 354 aa, Pseudomonas azotoformans
  REGION 1..354: note = tr|A0A1V2JEZ8|A0A1V2JEZ8_PSEAZ Epoxyqueuosine reductase OS=Pseudomonas azotoformans OX=47878 GN=queG; PE = 3 SV=1
MPAITTDLPALAQSIKDWGRELGFQQVGISGLDLAEHEQHLQRWLDAGYHGEMDYMGAHGSKRSHPEELVPGTLRVVSLRMDYLPGDTQMAQLLAKPEKAYISRYALGRDYHKLIRKRVQQLADRIQAQIGPFGFRAFVDSAPVLEKAIAEKAGLGWIGKNTLVLNRKAGSYFFLSELFVDLPLPVDEPHSTEHCGRCTACLDICPTNAFVGPYVLDARRCISYLTIELKNAIPEDLRPLIGNRVFGCDDCQIVCPWNRFARATTESDFKPRHNLDNAELAELFMWDEDKFLSSTEGSPLRRAGYERWLRNLAVGLGNAPSSIPVLEALKARREYPSELVREHVEWALNQHANR

SEQ ID NO: 79931 - protein, 359 aa, Pseudomonas baetica
  REGION 1..359: note = tr|A0A2N0DPA7|A0A2N0DPA7_9PSED Epoxyqueuosine reductase OS=Pseudomonas baetica OX=674054 GN=queG PE=3; SV = 1
MSAITTDLPALAQSIKDWGRELGFQQVGISGLDLAEHEQHLERWLAAGYHGEMDYMGAHGSKRSHPDELVPGTLRVVSLRMDYLPGDTEMAKRLAEPEKAYVSRYALGRDYHKLIRKRVQQLADRIQAEIGPFGFRAFVDSAPVLEKAIAEQAGLGWIGKNTLVLNRKAGSYFFLSELFVDLPLPVDEPHSTEHCGRCTACLDICPTNAFVGPYVLDARRCISYLTIELKNAIPEDLRPLIGNRVFGCDDCQIVCPWNRFARPTGESDFKPRHNLDNAELAELFLWDEDKFLSSTEGSPLRRAGYERWLRNLAVGLGNAPSSIPVLEALKARRDYPSELVREHVEWALKQHAERQGASL

SEQ ID NO: 79932 - protein, 356 aa, Pseudomonas balearica
  REGION 1..356: note = tr|A0A1G9WUL5|A0A1G9WUL5_9PSED Epoxyqueuosine reductase OS=Pseudomonas balearica DSM 6083 OX=1123016; GN = queG PE=3 SV=1
MSSSALDPIALADSIKEWGCELGFQQVGITGIDLGEHERHLQAWLAAGYQGEMDYMAAHGSKRSRPDELVPGTLRVISLRMDYLPGDTRMSQQLADPEKAYVSRYALGRDYHKLIRKRIQQLAERIQQVVGPFGFRAFVDSAPVLEKAAGQQAGLGWIGKNTLLLNRKAGSWFFLGELFVDIALPVDEPVTRDHCGSCHACLDICPTEAFVGERLLDARRCISYLTIELKGPIPLELRGKIGNRVFGCDDCQIVCPWNRFARPTEQGDFQPRHSLDNAELATLFRWTEEEFLSRTEGSPLRRAGYERWLRNLAVGLGNAPSSIPVLEALEARRDDPSELVREHVEWALTQHAKRAG

SEQ ID NO: 79933 - protein, 365 aa, unidentified
  source 1..365: note = Pseudomonas batumici
  REGION 1..365: note = tr|A0A0C2EHL0|A0A0C2EHL0_9PSED Epoxyqueuosine reductase OS=Pseudomonas batumici OX=226910 GN=queG PE=3; SV = 1
MPVNSVDLPALARSIKEWGRELGFQQVGIAGLELGEHERHLQRWLDAGYHGDMDYMGAHGSKRSHPDELVPGTLRVVSLRMDYLPGDTQMAQRLGQPEKAYVSRYALGRDYHKLIRKRLQQLAERIQQVIGPFGYRAFVDSAPVLEKAIAEQAGLGWIGKNTLVLNRKAGSYFFLGELFVDLPLPVDAPHATEHCGRCTACMDICPTAAFVGPYVLDARRCISYLTIELKTAIPEELRPLIGNRVFGCDDCQIVCPWNRFARPSDEGDFKPRHSLDNAGLAELFLWDEETFLKNTEGSPLRRAGYERWLRNLAVGLGNAPSTIPVLEALNIRRDHPSELVREHVLWALRQHAERGARTACVEPPR

SEQ ID NO: 79934 - protein, 357 aa, Pseudomonas bauzanensis
  REGION 1..357: note = tr|A0A031MDG2|A0A031MDG2_9PSED Epoxyqueuosine reductase OS=Pseudomonas bauzanensis OX=653930 GN=queG; PE = 3 SV=1
MPDTAPDYVQLAAQIREIAAELGFQQLGISDPDIGAHEQRLQQWLDAGYHGEMEWMASHGSKRTRPEELVPGTRRVISVRMDYLPTDTGMAKRLADRDAAYISRYALGRDYHKLIRRRLQQLAERIQNLIGPFGFRAFVDSAPVMERALATRSGLGWIGKNTMLLNRKAGSFFFLGELYTDLPLPTDEPYEQDHCGSCSACLSKCPTDAFVGAHVLDARRCISYLTIELKGAIPEELRPQMGNRVFGCDDCQLVCPWNKFAKPTNEQDFSPRHQLDQADLISLFRWDEEQFLKNTEGSPLRRIGHERWLRNLAVGLGNAHTSIPVVEALRSRLDHPSELVREHVRWALTRHGTSPES

SEQ ID NO: 79935 - protein, 356 aa, Pseudomonas benzenivorans
  REGION 1..356: note = tr|A0A1G7VCE5|A0A1G7VCE5_9PSED Epoxyqueuosine reductase OS=Pseudomonas benzenivorans OX=556533 GN=queG; PE = 3 SV=1
MTPNLDLVALAQSIKDWGRELGFQQVGIAGLALTEHEAHLQRWLEAGYQGEMDYMAAHGSKRSHPEQLVPGTLRVVSLRMDYLPGDTQMARRLGQPEKAYVSRYALGRDYHKLIRKRLQQLAERIQQAIGPFGYRAFVDSAPVLEKAIAEQAGLGWIGKNTLVLNRKAGSYFFLGELFVDLPLPVDAAHASEHCGRCTACLEICPTAAFVGPYVLDARRCISYLTIELKGPIPEELRAPIGNRVFGCDDCQMVCPWNRFARPTTQGDFQPRHQLDNAELAELFRWSEEEFLSRTEGSPLRRAGYERWLRNLAVGLGNAPSSIPVLEALEARREHPSALVREHVEWALAQHHSRRPE

SEQ ID NO: 79936 - protein, 357 aa, Pseudomonas borbori
  REGION 1..357: note = tr|A0A1I5S774|A0A1I5S774_9PSED Epoxyqueuosine reductase OS=Pseudomonas borbori OX=289003 GN=queG PE=3; SV = 1
MTTVALDLAALAQSIKEWGRELGFQQVGIAGLDLSEHEAHLQRWLDAGYQGEMDYMAAHGSKRSHPEQLVPGTLRVVSLRMDYLPGDTQMAQRLGEPEKAYVSRYALGRDYHKLIRKRLQQLAERIQQQIGPFGYRAFVDSAPVLEKAIAKQAGLGWIGKHTLVLNRGAGSYFFLGELFVDLPLPVDAPHASEHCGRCSACLDICPTGAFVGPYVLDARRCISYLTIELKGAIPEELRAPIGNRVFGCDDCQLVCPWNRFARPTEQGDFQPRHQLDNAELAALFRWSEEEFLSRTEGSPLRRAGYERWLRNLAVGLGNAPSSIPVLEALQARREHPSALVREHVEWALARHAERGAS

SEQ ID NO: 79937 - protein, 354 aa, Pseudomonas brassicacearum
  REGION 1..354: note = tr|A0A423GUH3|A0A423GUH3_9PSED Epoxyqueuosine reductase OS=Pseudomonas brassicacearum OX=930166 GN=queG; PE = 3 SV=1
MPAITTDLPALAQSIKDWGRELGFQQVGISGLNLAEHEQHLERWLEAGYHGEMDYMGAHGSKRSHPEELVPGTLRVVSLRMDYLPGDTEMAKRLGQPEKAYVSRYALGRDYHKLIRKRVQQLAEKIQQVIGPFGYRAFVDSAPVLEKAIAEQAGLGWIGKNTLVLNRKAGSYFFLSELFVDLPLPVDPPHSTEHCGRCTACLDICPTKAFVGPYVLDARRCISYLTIELKTAIPEDLRPLIGNRVFGCDDCQIVCPWNRFARPSGESDFKPRHNLDNAELAELFMWDEDKFLSSTEGSPLRRAGYERWLRNLAVGLGNAPSTIPVLEALKARADYPSELVREHVQWALKQHGLS

SEQ ID NO: 79938 - protein, 359 aa, Pseudomonas brassicacearum
  REGION 1..359: note = tr|F2KBI1|F2KBI1_PSEBN Epoxyqueuosine reductase; OS = Pseudomonas brassicacearum (strain NFM421) OX=994484; GN = queG PE=3 SV=1
MPAIPTDLPALAQSIKEWGRELGFQQVGISGLDLAEHEQHLQRWLDAGYHGEMDYMGAHGSKRSHPEELVPGTLRVVSLRMDYLSGDTHMAQMLGQPEKAYVSRYALGRDYHKLIRKRVQQLAEKIQAVIGPFGYRAFVDSAPVLEKAIAEQAGLGWIGKNTLVLNRKAGSYFFLSELFVDLPLPVDPPHASEHCGKCTACLDICPTNAFVGPYVLDARRCISYLTIELKSAIPEELRPLIGNRVFGCDDCQIVCPWNRFARPSGESDFKPRHNLDNAGLAELFMWDETTFLSSTEGSPLRRAGYERWLRNLAVGLGNAPSTIPVLQALEARRDYPSELVREHVEWALRQHAERQASSL

SEQ ID NO: 79939 - protein, 359 aa, Pseudomonas brenneri
  REGION 1..359: note = tr|A0A4R6ZCL4|A0A4R6ZCL4_9PSED Epoxyqueuosine reductase OS=Pseudomonas brenneri OX=129817 GN=queG PE=3; SV = 1
MPAITTDLPALAQSIKDWGRELGFQQVGISGLDLAEHEQHLQRWLDAGYHGEMDYMGAHGSKRSHPDELVPGTLRVVSLRMDYLPGDTQMAQLLAQPEKAYISRYALGRDYHKLIRKRVQQLADRIQAQIGPFGFRAFVDSAPVLEKAIAEKAGLGWIGKNTLVLNRKAGSYFFLSELFVDLPLPIDPPHSTEHCGRCTACLDICPTNAFVGPYVLDARRCISYLTIELKSAIPEDLRPLIGNRVFGCDDCQIVCPWNRFARPSGESDFKPRHNLDNAELAELFMWDEDKFLSSTEGSPLRRAGYERWLRNLAVGLGNAPSSIPVLEALKARRDYPSELVREHVEWALNQHAIRQCSSL

SEQ ID NO: 79940 - protein, 359 aa, Pseudomonas brenneri
  REGION 1..359: note = tr|A0A5B2UTR9|A0A5B2UTR9_9PSED Epoxyqueuosine reductase OS=Pseudomonas brenneri OX=129817 GN=queG PE=3; SV = 1
MPAITTDLPALAQSIKDWGRELGFQQVGISGLDLAEHEQHLQRWLDAGYHGEMDYMGAHGSKRSHPDELVPGTLRVVSLRMDYLPGDTQMAQLLAQPEKAYISRYALGRDYHKLIRKRVQQLADRIQAQIGPFGFRAFVDSAPVLEKAIAEQAGLGWIGKNTLVLNRKAGSYFFLSELFVDLPLPVDPPHTTEHCGRCTACLDICPTNAFVGPYVLDARRCISYLTIELKSAIPEDLRPLIGNRVFGCDDCQIVCPWNRFARPSGESDFKPRHNLDNAELAALFMWDEDKFLSSTEGSPLRRAGYERWLRNLAVGLGNAPSSIPVLEALKARRDYPSELVREHVEWALNQHATRQCSSL

SEQ ID NO: 79941 - protein, 354 aa, unidentified
  source 1..354: note = Pseudomonas canadensis
  REGION 1..354: note = tr|A0A423FKG1|A0A423FKG1_9PSED Epoxyqueuosine reductase OS=Pseudomonas canadensis OX=915099 GN=queG PE=3; SV = 1
MPAITSDLPALAQSIKDWGRELGFQQVGISGLDLAEHEQHLQRWLDAGYHGEMDYMGAHGSKRSHPDELVPGTLRVVSLRMDYLPGDTQMAQLLAKPEKAYISRYALGRDYHKLIRKRVQQLADRIQAQIGPFGFRAFVDSAPVLEKAIAEKAGLGWIGKNTLVLNRKAGSYFFLSELFVDLPLPIDAPHSTEHCGRCTACLDICPTNAFVGPYVLDARRCISYLTIELKNAIPEELRPLIGNRVFGCDDCQIVCPWNRFARPTAESDFKPRHNLDNAELAELFMWDEDKFLSSTEGSPLRRAGYERWLRNLAVGLGNAPSSIPVLEALKARRDYPSELVREHVEWALNQHATR

SEQ ID NO: 79942 - protein, 381 aa, Pseudomonas cannabina
  REGION 1..381: note = tr|A0A3M3LYC7|A0A3M3LYC7_PSECA Epoxyqueuosine reductase OS=Pseudomonas cannabina OX=86840 GN=queG PE=3; SV = 1
MGSDVWQNYTHLGPGFSLRMSAITVERPTSDDLATLALSIKAWGRELGFQDVGISGLDLAEHEQHLQRWLDSGYHGEMDYMAAHGSKRSHPDELVPGTLRVVSLRMDYLPGDSEMAQRLTESEKAYVSRYALGRDYHKLIRKRLQQLAERIQQAIGPFGFRAFVDSAPVLEKAIAEQAGLGWIGKNTLVLNRKAGSFFFLGELFVDIPLPVDAPHATEHCGRCTACLDICPTAAFVGPYVLDARRCISYLTIELKTAIPEELRPLIGNRVFGCDDCQIVCPWNRFARPTDQRDFQPRHNLDNAGLAELFLWDEDTFLGNTEGSPLRRAGYERWLRNLAVGLGNAPSTIPVIEALQARRDYPSELVKEHVEWALRRHGVATL

SEQ ID NO: 79943 - protein, 392 aa, Pseudomonas cannabina
  REGION 1..392: note = tr|A0A3M3R303|A0A3M3R303_PSECA Epoxyqueuosine reductase OS=Pseudomonas cannabina OX=86840 GN=queG PE=3; SV = 1
MRFSVEHASMGSDVWQNYTHLGPGFSLRMSAITAERPTSDDLATLALSIKAWGRELGFQDVGISGLDLAEHEQHLQRWLDAGYHGEMDYMAAHGSKRSHPDELVPGTLRVVSLRMDYLPGDSEMAQRLTESEKAYVSRYALGRDYHKLIRKRLQQLAERIQQAIGPFGFRAFVDSAPVLEKAIAEQAGLGWIGKNTLVLNRKAGSFFFLGELFVDIPLPVDAPHATEHCGRCTACLDICPTAAFVGPYVLDARRCISYLTIELKTAIPEELRPLIGNRVFGCDDCQIVCPWNRFARPTDQRDFQPRHNLDNAGLAELFLWDEDTFLGNTEGSPLRRAGYERWLRNLAVGLGNAPSTIPVIEALQARRDYPSELVKEHVEWALRRHGVADVER

SEQ ID NO: 79944 - protein, 354 aa, unidentified
  source 1..354: note = Pseudomonas capeferrum
  REGION 1..354: note = tr|A0A084C7W4|A0A084C7W4_9PSED Epoxyqueuosine reductase OS=Pseudomonas capeferrum OX=1495066 GN=queG; PE = 3 SV=1
MSACTLDLAALAQSIKNWGRELGFAHVGIAGVDLGEHEQHLQRWLDAGYQGEMEYLAAHDGKRAHPDQLIPGTVRVVSLRMDYLPGDTQMAQRLAQPEKAYVSRYALGRDYHKLVRKRVQHLADRIQEDIGPFGYRAFVDSAPVLEKAIAEQAGLGWIGKNTLLLNRKAGSYFFLAELFVDLPLPVDEAHTSEHCGRCQACLDICPTQAFVGPYVLDARRCISYLTIELKGAIPVELRSMMGNRVFGCDDCQIVCPWNRFARPTQESDFQPRHGLENAELAEMFLWDEKTFLRKTEGGPLRRAGYERWLRNLAVGLGNAPSTIPVLEALKARRDDPSALVREHVEWALARHGQV

SEQ ID NO: 79945 - protein, 381 aa, Pseudomonas caricapapayae
  REGION 1..381: note = tr|A0A3M6F334|A0A3M6F334_9PSED Epoxyqueuosine reductase OS=Pseudomonas caricapapayae OX=46678 GN=queG; PE = 3 SV=1
MGSDVWQNYTHLGPGFSLRMSAITAVLPTSDDLAALALSIKAWGRELGFQEVGISGLDLTEHEQHLQRWLEAGYHGEMDYMAAHGSKRSHPDELVPGTLRVVSLRMDYLPGDTKMAERLTEPEKAYVSRYALGRDYHKLIRKRLQQLAERIQQAIGPFGFRAFVDSAPVLEKAIAEQAGLGWIGKNTLVLNRKAGSFFFLGELFVDIPLPVDAPHATEHCGRCTACLDICPTAAFVGPYVLDARRCISYLTIELKTAIPEELRPLIGNRVFGCDDCQIVCPWNRFARPTEQSDFQPRHNLDNAGLAELFLWDEEKFLGSTEGSPLRRAGYERWLRNLAVGLGNAPSTIPVIEALQTRRDYPSELVREHVEWALRRHGVAPL

SEQ ID NO: 79946 - protein, 381 aa, Pseudomonas caricapapayae
  REGION 1..381: note = tr|A0A0P9MDY5|A0A0P9MDY5_9PSED Epoxyqueuosine reductase OS=Pseudomonas caricapapayae OX=46678 GN=queG; PE = 3 SV=1
MGSDVWQNYTHLGPGFSLRMSAITAVLPTSDDLAALALSIKAWGRELGFQEVGISGLDLAEHEQHLQRWLEAGYHGEMDYMAAHGSKRSHPDELVPGTLRVVSLRMDYLPGDTKMAERLTEPEKAYVSRYALGRDYHKLIRKRLQQLAERIQQAIGPFGFRAFVDSAPVLEKAIAEQAGLGWIGKNTLVLNRKAGSFFFLGELFVDIPLPVDAPHATEHCGRCTACLDICPTAAFVGPYVLDARRCISYLTIELKTAIPEELRPLIGNRVFGCDDCQIVCPWNRFARPTEQSDFQPRHNLDNAGLAELFLWDEEKFLGSTEGSPLRRAGYERWLRNLAVGLGNAPSTIPVIEALQTRRDYPSELVREHVEWALRRHGVAPL

SEQ ID NO: 79947 - protein, 361 aa, unidentified
  source 1..361: note = Pseudomonas caspiana
  REGION 1..361: note = tr|A0A1Y3P7I1|A0A1Y3P7I1_9PSED Epoxyqueuosine reductase OS=Pseudomonas caspiana OX=1451454 GN=queG PE=3; SV = 1
MPVITVDSPNTVDLVTLAQSIKEWGRELGFQQVGIAGLDLAEHEQHLERWLEAGYHGEMDYMAAHGSKRSHPEELVPGTLRVVSLRMDYLPGDTEMTQRLTEPEKAYVSRYALGRDYHKLIRKRVQQLAERIQQAIGPFGYRAFVDSAPVLEKAIAEKAGIGWIGKNTLVLNRKAGSFFFLSELFVDLPLPVDAPHATEHCGRCTACLDICPTAAFVGPYVLDARRCISYLTIELKTAIPEELRPLIGNRVFGCDDCQIVCPWNRFARPTDQSDFQPRHNLDNAGLAELFMWDEDKFLSNTEGSPLRRAGYERWLRNLAVGLGNAPSTIPVLEALEARREYPSELVREHVEWALRQHQHRG

SEQ ID NO: 79948 - protein, 354 aa, unidentified
  source 1..354: note = Pseudomonas caspiana
  REGION 1..354: note = tr|A0A502IYY0|A0A502IYY0_9PSED Epoxyqueuosine reductase OS=Pseudomonas caspiana OX=1451454 GN=queG PE=3; SV = 1
MPAITTDLPALAQSIKDWGRELGFQQVGISGLDLAEHEQHLERWLAAGYHGEMDYMGAHGSKRSHPEELVPGTLRVVSLRMDYLPGDTEMAKRLAQPAKAYVSRYALGRDYHKLIRKRVQQLADKIQAEIGPFGFRAFVDSAPVLEKAIAEQAGLGWIGKNTLVLNRKAGSYFFLSELFVDLPLPVDPPHATEHCGRCTACLDICPTNAFVGPYVLDARRCISYLTIELKSAIPEDLRPLIGNRVFGCDDCQIVCPWNRFARPSGESDFKPRHNLDNAELAELFMWDEEKFLSSTEGSPLRRAGYERWLRNLAVGLGNAPSSIPVLEALKARRDYPSELVREHVQWALKQHGLL

SEQ ID NO: 79949 - protein, 354 aa, Pseudomonas cedrina
  REGION 1..354: note = tr|A0A2S9E5H5|A0A2S9E5H5_PSECE Epoxyqueuosine reductase OS=Pseudomonas cedrina OX=651740 GN=queG PE=3; SV = 1
MPAITSDLPALAQSIKDWGRELGFQQVGISGLDLAEHEQHLQRWLDAGYHGEMEYMGAHGSKRSHPEELVPGTLRVVSLRMDYLPGDTQMAQLLAQPEKAYISRYALGRDYHKLIRKRVQQLADRIQAQIGPFGFRAFVDSAPVLEKAIAEQAGLGWIGKNTLVLNRKAGSYFFLSELFVDLPLPVDPPHATEHCGRCTACLDICPTNAFVGPYVLDARRCISYLTIELKSAIPEDLRPLIGNRVFGCDDCQIVCPWNRFARPTAESDFKPRHNLDNAELAELFMWDEDKFLSSTEGSPLRRAGYERWLRNLAVGLGNAPSSIPVLEALKARRDYPSELVREHVEWALEQHAVR

SEQ ID NO: 79950 - protein, 355 aa, Pseudomonas cedrina
  REGION 1..355: note = tr|A0A1V2KAN7|A0A1V2KAN7_PSECE Epoxyqueuosine reductase OS=Pseudomonas cedrina subsp. cedrina OX=76762; GN = queG PE=3 SV=1
MPAITTDLPALAQSIKDWGRELGFQQVGISGLDLAEHEQHLQRWLDAGYHGEMDYMGAHGSKRSHPDELVPGTLRVVSLRMDYLPGDTHMAQRLAQPEKAYISRYALGRDYHKLIRKRVQQLADRIQAQIGPFGFRAFVDSAPVLEKAIAEQAGLGWIGKNTLVLNRKAGSYFFLSELFVDLPLPVDPPHGTEHCGRCTACLDICPTNAFVGPYVLDARRCISYLTIELKSAIPEDLRPLIGNRVFGCDDCQIVCPWNRFARSTAEGDFKPRHNLDNAQLAELFMWDEDKFLSSTEGSPLRRAGFERWLRNLAVGLGNAPSSIPVLEALKARRDYPSELVREHVEWALKQHAERQ

SEQ ID NO: 79951 - protein, 381 aa, unidentified
  source 1..381: note = Pseudomonas cerasi
  REGION 1..381: note = tr|A0A193SV66|A0A193SV66_9PSED Epoxyqueuosine reductase OS=Pseudomonas cerasi OX=1583341 GN=queG PE=3; SV = 1
MGSDVWQNYTHLGPGFSLRMSAITAVLPSSDDLAALAVSIKAWGRELGFQEVGISGLDLAEHEQHLQRWLDAGYHGEMDYMAAHGSKRSHPAELVPGTLRVVSLRMDYLPGDTEMAQRLTEPEKAYVSRYALGRDYHKLIRKRLQQLAERIQQAVGPFGFRAFVDSAPVLEKAIAEQAGLGWIGKNTLVLNRKAGSFFFLGELFVDIPLPVDAPHATEHCGRCTACLDICPTAAFIGPYVLDARRCISYLTIELKTAIPEELRPLIGNRVFGCDDCQIVCPWNRFARPTEQSDFQPRHNLDNAGLAELFLWDEEKFLGSTEGSPLRRAGYERWLRNLAVGLGNAPSTIPVIEALHARRDYPSELVREHVEWALQRHGVAPL

SEQ ID NO: 79952 - protein, 376 aa, unidentified
  source 1..376: note = Pseudomonas chengduensis
  REGION 1..376: note = tr|A0A1G6JUV2|A0A1G6JUV2_9PSED Epoxyqueuosine reductase OS=Pseudomonas chengduensis OX=489632 GN=queG; PE = 3 SV=1
MHGSLTTDVWQNYTYVHRLRPPMSDQTLDLNALALSIKDWGRELGFQQVGITDVELGEHEAHLQRWLAAGYQGEMEYMAAHGSKRSHPDELVPGTLRVVSLRMDYLPGDTQMAQRLKESEQAYVSRYALGRDYHKLIRKRLQQLAERIQQQIGPFGYRAFVDSAPVLEKAIAEKAGLGWIGKNTLVLNRKAGSYFFLGELFVDLPLPVDAPHASEHCGRCTACMDICPTAAFAGPYVLDARRCISYLTIELKGSIPEELRAPIGNRVFGCDDCQIVCPWNRFARPTEQGDFQPRHGLDNSGLAELFMWTEEEFLSRTEGSPLRRAGYERWLRNLAVGLGNAPSTIPVLQALQARREHPSELVREHVEWALARHGAL

SEQ ID NO: 79953 - protein, 357 aa, unidentified
  source 1..357: note = Pseudomonas chloritidismutans
  REGION 1..357: note = tr|V4QI89|V4QI89_PSECO Epoxyqueuosine reductase; OS = Pseudomonas chloritidismutans AW-1 OX=1263865 GN=queG; PE = 3 SV=1
MSSLSLDPAALAQSIKEWGRELGFQQVGITDVDLGEHEAHLEAWLAAGYQGEMDYMAAHGSKRSRPDELVPGTLRVISLRMDYLPGDTRMTQQLASPEKAYVSRYALGRDYHKLIRKRIQQLAERIQQMVGPFGFRAFVDSAPVLEKAAGQQAGLGWIGKNTLLLNRKAGSWFFLGELFVDIALPVDEPTTRDHCGSCHACLDVCPTDAFVGERLLDARRCISYLTIELKGAIPVELRDKIGNRVFGCDDCQIVCPWNRFARPTEQSDFQPRHSLDNAELATLFRWTEEEFLSRTEGSPLRRAGYQRWLRNLAVGLGNAPSSIPVLEALQARRDDPSELVREHVEWALAQHAQRQPD

SEQ ID NO: 79954 - protein, 359 aa, Pseudomonas chlororaphis
  REGION 1..359: note = tr|A0A423DIH5|A0A423DIH5_9PSED Epoxyqueuosine reductase OS=Pseudomonas chlororaphis OX=587753 GN=queG; PE = 3 SV=1
MPAITTDLPALAQSIKDWGRELGFQQVGISGLDLAEHEQHLERWLAAGYHGEMEYMGAHGSKRSHPDQLVPGTLRVVSLRMDYLPGDTQMAQRLAQPEKAYVSRYALGRDYHKLIRKRVQQLAERIQQAIGPFGYRAFVDSAPVLEKAIAEQAGLGWIGKNTLVLNRKAGSYFFLSELFVDLPLPVDAPHATEHCGRCTACLDICPTNAFVGPYVLDARRCISYLTIELKSAIPEDLRSLIGNRVFGCDDCQIVCPWNRFARPSGESDFKPRHNLDNAELAELFLWDEDTFLSSTEGSPLRRAGYERWLRNLAVGLGNAPSSIPVLEALKARQDHPSELVREHVQWALAQHASRQCSSL

SEQ ID NO: 79955 - protein, 359 aa, Pseudomonas chlororaphis
  REGION 1..359: note = tr|A0A3G7BC24|A0A3G7BC24_9PSED Epoxyqueuosine reductase OS=Pseudomonas chlororaphis subsp. piscium; OX = 1513890 GN=queG PE=3 SV=1
MPAITTDLPALAQSIKDWGRELGFQQVGISGLDLAEHEQHLERWLEAGYHGEMDYMGAHGSKRSHPDELVPGTLRVVSLRMDYLPGDTQMAQRLAQPEKAYVSRYALGRDYHKLIRKRVQQLAERIQKEIGPFGYRAFVDSAPVLEKAIAEQAGLGWIGKNTLVLNRKAGSYFFLSELFVDLPLPVDEPHASEHCGRCTACLDICPTNAFVGPYVLDARRCISYLTIELKNAIPEDLRPLIGNRVFGCDDCQIVCPWNRFARPSGEGDFKPRHNLDNAELAELFMWDEDKFLSSTEGSPLRRAGYERWLRNLAVGLGNAPSSIPVLEALKARRDYPSELVREHVEWALKQHANRHCSSL

SEQ ID NO: 79956 - protein, 359 aa, Pseudomonas cichorii
  REGION 1..359: note = tr|A0A3M4WA68|A0A3M4WA68_PSECI Epoxyqueuosine reductase OS=Pseudomonas cichorii OX=36746 GN=queG PE=3; SV = 1
MPAITAELPTSDDLISLAQSIKEWGRELGFQQVGISGLDLAEHEQHLERWLEAGYHGEMDYMAAHGSKRSHPDELVPGTLRVVSLRMDYLPGDTEMAQRLTEPEKAYVSRYALGRDYHKLVRKRVQQLAERIQQSIGPFGFRAFVDSAPVLEKAIAEQAGLGWIGKNTLVLNRKAGSFFFLGELFVDLPLPVDAPHATEHCGRCTACLDICPTAAFVGPYVLDARRCISYLTIELKTSIPEELRSLIGNRVFGCDDCQIVCPWNRFARPTSQSDFQPRHNLDNAGLAELFMWNEEKFLSSTEGSPLRRAGYERWLRNLAVGLGNAPSTIPVLQALEARRDHPSEMVREHVEWALKQHAL

SEQ ID NO: 79957 - protein, 364 aa, Pseudomonas cichorii
  REGION 1..364: note = tr|A0A3M3T5A6|A0A3M3T5A6_PSECI Epoxyqueuosine reductase OS=Pseudomonas cichorii OX=36746 GN=queG PE=3; SV = 1
MPAITAELPTSDDLTSLAQSIKEWGRELGFQQVGISGLDLAEHEQHLERWLKAGYHGEMDYMAAHGSKRSHPDELVPGTLRVVSLRMDYLPGDTEMAQRLTEPEKAYVSRYALGRDYHKLVRKRVQQLAERIQQAIGPFGFRAFVDSAPVLEKAIAEQAGLGWIGKNTLVLNRKAGSFFFLGELFVDLPLPVDAPHATEHCGRCTACLDICPTAAFVGPYVLDARRCISYLTIELKTAIPEELRPLIGNRVFGCDDCQIVCPWNRFARPTEQNDFQPRHNLDNAGLAELFMWDEEKFLSSTEGSPLRRAGYERWLRNLAVGLGNAPSTIPVLQALEARRDYPSEMVREHVEWAIGRHQAASGKL

SEQ ID NO: 79958 - protein, 362 aa, Pseudomonas citronellolis
  REGION 1..362: note = tr|A0A1A9KJU6|A0A1A9KJU6_9PSED Epoxyqueuosine reductase OS=Pseudomonas citronellolis OX=53408 GN=queG; PE = 3 SV=1
MHDSTPDYSAIAERIKAWGRELGFQQVGIGGLDLASHGEHLQRWLAAGYHGEMDYMGAHGSKRWRPDELVPGTLRVVSLRMDYLPGDTRMAQRLAEPEKAYVSRYALGRDYHKLVRKRLQQLAERIQQEVGPFGYRAFVDSAPVLEKAIGEQAGLGWIGKNTLLLNRKAGSYFFLGELFTDLPLPLDEPHGSEHCGRCSACLDICPTNAFVGPYVLDARRCISYLTIELKGPIPEELRAPMGNRVFGCDDCQIVCPWNRFARPSEQGDFQPRHGLDNAELAELFLWSEEEFLSRTEGSPLRRAGYERWLRNLAVGLGNAPSSIPVIEALKARREFPSELVREHVEWALRRHGIAPTPSGNAP

SEQ ID NO: 79959 - protein, 355 aa, Pseudomonas citronellolis
  REGION 1..355: note = tr|A0A4Z0IUA9|A0A4Z0IUA9_9PSED Epoxyqueuosine reductase OS=Pseudomonas citronellolis OX=53408 GN=queG; PE = 3 SV=1
MHDSTSDYSAIAERIKAWGRELGFQQVGIGGLDLASHGEHLQRWLAAGYHGEMDYMGAHGSKRWRPDELVPGTLRVVSLRMDYLPGDTRMAQRLAEPEKAYVSRYALGRDYHKLVRKRLQQLAERIQQEVGPFGYRAFVDSAPVLEKAIGEQAGLGWIGKNTLLLNRKAGSYFFLGELFTDLPLPLDDPHGSEHCGRCSACLDICPTNAFVGPYVLDARRCISYLTIELKGPIPEELRAPMGNRVFGCDDCQIVCPWNRFARPSEQGDFQPRHGLDNAELAELFLWSEEEFLSRTEGSPLRRAGYERWLRNLAVGLGNAPSSIPVIEALKARREFPSELVREHVAWALRRHGVER

SEQ ID NO: 79960 - protein, 356 aa, unidentified
  source 1..356: note = Pseudomonas coleopterorum
  REGION 1..356: note = tr|A0A1H5DJP8|A0A1H5DJP8_9PSED Epoxyqueuosine reductase OS=Pseudomonas coleopterorum OX=1605838 GN=queG; PE = 3 SV=1
MSAPTIDLPALALSIKQWGRELGFQQVGIAGLDLAEHEQHLQRWLEAGYHGEMDYMAAHGSKRSHPEQLVPGTLRVVSLRMDYLPGDTHMAQRLAEPEKAYVSRYALGRDYHKLIRKRVQHLAERIQQDIGPFGFRAFVDSAPVLEKAIAQEAGLGWIGKNTLVLNRKAGSYFFLAELFVDLPLPVDEAHASEHCGRCTACLEICPTAAFVGPYVLDARRCISYLTIELKGPIPTELRPLIGNRVFGCDDCQIVCPWNRFARPSGEGDFQPRHQLDNAELAQLFLWDEEHFLSSTEGSPLRRAGYERFLRNLAVGLGNAPSSIPVLEALKTRREDPSELVREHVEWALAAHAQRSS

SEQ ID NO: 79961 - protein, 376 aa, Pseudomonas composti
  REGION 1..376: note = tr|A0A1I5JI47|A0A1I5JI47_9PSED Epoxyqueuosine reductase OS=Pseudomonas composti OX=658457 GN=queG PE=3; SV = 1
MHDSLTTDVWQNYTHVHRLRPPMSDQTLDLNALALSIKDWGRELGFQQVGITDVELGEHEAHLQRWLDAGYQGEMDYMAAHGSKRSHPDELVPGTLRVVSLRMDYLPGDTQMAQRLKEPEQAYVSRYALGRDYHKLIRKRLQQLAERIQQQIGPFGYRAFVDSAPVLEKAIAEKAGLGWIGKNTLVLNRKAGSYFFLGELFVDLPLPVDAAHASEHCGRCSACMDICPTAAFAGPYVLDARRCISYLTIELKGSIPVELRAPIGNRVFGCDDCQIVCPWNRFARPTEQGDFQPRHGLDNSGLAELFLWTEEEFLSRTEGSPLRRAGYERWLRNLAVGLGNAPSTIPVLLALQARREHPSELVREHVEWALERHGAL

SEQ ID NO: 79962 - protein, 390 aa, Pseudomonas congelans
  REGION 1..390: note = tr|A0A0P9LVP6|A0A0P9LVP6_9PSED Epoxyqueuosine reductase OS=Pseudomonas congelans OX=200452 GN=queG PE=3; SV = 1
MRFSVEHASMGSDVWQNYTHLGPGFSLRMSAITAVLPTSDDLAALAVSIKAWGRELGFQEVGISGLDLAEHEQHLQRWLDAGYHGEMDYMAAHGSKRSHPDELVPGTLRVVSLRMDYLPGDTEMAQRLTEPEKAYVSRYALGRDYHKLIRKRLQQLAERIQQAIGPFGFRAFVDSAPVLEKAIAEQAGLGWIGKNTLVLNRKAGSFFFLGELFVDIPLPVDAPHATEHCGRCTACLDICPTAAFIGPYVLDARRCISYLTIELKTAIPEELRPLIGNRVFGCDDCQIVCPWNRFARPTEQSDFQPRHNLDNAGLAELFLWDEEKFLGSTEGSPLRRAGYERWLRNLAVGLGNAPSTIPVIEALQARRDYPSELVREHVEWALQRHGVAPL

SEQ ID NO: 79963 - protein, 362 aa, unidentified
  source 1..362: note = Pseudomonas coronafaciens
  REGION 1..362: note = tr|A0A3M4BPZ9|A0A3M4BPZ9_9PSED Epoxyqueuosine reductase OS=Pseudomonas coronafaciens pv. atropurpurea; OX = 129135 GN=queG PE=3 SV=1
MSAITAVLPTSDDLAALALSIKAWGRELGFQEVGISGLDLAEHEQHLQRWLDEGYHGEMDYMAAHGSKRSHPDELVPGTLRVVSLRMDYLPGDSEMAQRLAEPEKAYVSRYALGRDYHKLIRKRLQQLAERIQQAIGPFGFRAFVDSAPVLEKAIAQQAGLGWIGKNTLVLNRKAGSFFFLGELFVDIPLPVDAPHATEHCGRCTACLDICPTAAFVGPYVLDARRCISYLTIELKTAIPEELRPLIGNRVFGCDDCQIACPWNRFARPTDQRDFQPRHNLDNAGLAELFLWDEETFLANTEGSPLRRAGYERWLRNLAVGLGNAPSTIPVIEALQAKRDYPSELVREHVEWALQRHGLAPL

SEQ ID NO: 79964 - protein, 390 aa, unidentified
  source 1..390: note = Pseudomonas coronafaciens
  REGION 1..390: note = tr|A0A0Q0FX31|A0A0Q0FX31_9PSED Epoxyqueuosine reductase OS=Pseudomonas coronafaciens pv. zizaniae; OX = 251700 GN=queG PE=3 SV=1
MRFSVEHASIGSDVWQNYTHLGPGFSLRMSAITAVLPTSDDLAALALSIKAWGRELGFQEVGISGLDLAEHEQHLQRWLDEGYHGEMDYMAAHGSKRSHPDELVPGTLRVVSLRMDYLPGDSEMAQRLAEPEKAYVSRYALGRDYHKLIRKRLQQLAERIQQAIGPFGFRAFVDSAPVLEKAIAQQAGLGWIGKNTLVLNRKAGSFFFLGELFVDIPLPVDAPHATEHCGRCTACLDICPTAAFVGPYVLDARRCISYLTIELKTAIPEELRPLIGNRVFGCDDCQIACPWNRFARPTDQRDFQPRHNLDNAGLAELFLWDEETFLANTEGSPLRRAGYERWLRNLAVGLGNAPSTIPVIEALQAKRDYPSELVREHVEWALQRHGLAPL

SEQ ID NO: 79965 - protein, 359 aa, Pseudomonas corrugata
  REGION 1..359: note = tr|A0A3M3F199|A0A3M3F199_9PSED Epoxyqueuosine reductase OS=Pseudomonas corrugata OX=47879 GN=queG PE=3; SV = 1
MPAIPTDLPALAQSIKDWGRELGFQQVGISGLDLGEHEQHLQRWLDAGYHGEMEYMGAHGSKRSHPEELVPGTLRVVSLRMDYLPGDTHMAQMLGQPEKAYISRYALGRDYHKLIRKRVQQLAEKIQAVIGPFGYRAFVDSAPVLEKAIAEQAGLGWIGKNTLVLNRKAGSYFFLSELFVDLPLPVDPPHTSEHCGKCTACLDICPTNAFIGPYVLDARRCISYLTIELKSAIPEELRPLIGNRVFGCDDCQIVCPWNRFARPSGENDFKPRHNLDNAGLAELFLWDEETFLKSTEGSPLRRAGYERWLRNLAVGLGNAPSTIPVIQALEARRDYPSELVREHVEWALRQHAQRQTSSL

SEQ ID NO: 79966 - protein, 354 aa, Pseudomonas costantinii
  REGION 1..354: note = tr|A0A1S2V9M0|A0A1S2V9M0_9PSED Epoxyqueuosine reductase OS=Pseudomonas costantinii OX=168469 GN=queG; PE = 3 SV=1
MPAITTDLPALAQSIKDWGRELGFQQVGISGLDLAEHEQHLQRWLDAGYHGEMEYMGAHGSKRSHPDELVPGTLRVVSLRMDYLPGDTHMAQLLAKPEKAYISRYALGRDYHKLIRKRVQQLADRIQAQIGPFGFRAFVDSAPVLEKAIAEQAGLGWIGKNTLVLNRKAGSYFFLSELFVDLPLPVDAPHSTEHCGRCTACLDICPTNAFVGPYVLDARRCISYLTIELKSAIPEDLRPLIGNRVFGCDDCQIVCPWNRFARATDEGDFKPRHNLDNAELAELFMWDEDKFLSSTEGSPLRRAGYERWLRNLAVGLGNAPSSIPVLEALKARRDYPSELVREHVEWALNQHATR

SEQ ID NO: 79967 - protein, 364 aa, Pseudomonas cremoricolorata
  REGION 1..364: note = tr|A0A089WG79|A0A089WG79_9PSED Epoxyqueuosine reductase OS=Pseudomonas cremoricolorata OX=157783 GN=queG; PE = 3 SV=1
MSACLPDLPTLTQSIKDWGRELGFAHVGIAGIELGEHEQHLQRWLDAGYHGELEYMAAHGSKRSRPAELIPGTLRVISLRMDYLPGDTQMAKRLAQPEKAYISRYALGRDYHKLVRKRVQHLAERIQQAIGPFGYRAFVDSAPVLEKAIAQQAGLGWIGKNTLLLNRKAGSYFFLAELFVDLPLPVDEAQASEHCGRCQACLDVCPTQAFVGPYLMDARRCISYLTIELKNAIPVELRGLIGNRVFGCDDCQIVCPWNRFAKPTEEADFMPRHGLDNAELAELFLWDEARFLSLSEGSPLRRAGYERWLRNLAVGLGNAPSTIPVLEALKARREHPSELVREHVEWALAEHQRRSGGESPGTCS

SEQ ID NO: 79968 - protein, 363 aa, Pseudomonas cuatrocienegasensis
  REGION 1..363: note = tr|A0A1H9J8S3|A0A1H9J8S3_9PSED Epoxyqueuosine reductase OS=Pseudomonas cuatrocienegasensis OX=543360; GN = queG PE=3 SV=1
MPTPIPDLAHLAQSIKDWGRELGFQQVGIADVSLGEHEAHLQRWLDAGYQGEMDYMGAHGSKRSHPDELVPGTLRVVSLRMDYLPGDTQMAERLAAPEQAYVSRYALGRDYHKLIRKRLQQLAERIQAAIGPFGYRAFVDSAPVLEKAIAEQAGLGWIGKNTLVLNRKAGSYFFLGELFVDLALPVDPPHATEHCGRCTACLDICPTAAFVSPYVLDARRCISYLTIELKGPIPLELRAPIGNRVFGCDDCQMVCPWNRFARPTEQADFQPRHGLDNSSLAELFLWSETEFLARTEGSPLRRAGYERWLRNLAVGLGNAPSTIPVLEALNARRLHPSELVREHVSWALAQHAQRGAQTAALTP

SEQ ID NO: 79969 - protein, 355 aa, unidentified
  source 1..355: note = Pseudomonas daroniae
  REGION 1..355: note = tr|A0A4V6MX55|A0A4V6MX55_9PSED Epoxyqueuosine reductase OS=Pseudomonas daroniae OX=2487519 GN=queG PE=3; SV = 1
MTDATLDLTSLAQSIKDWGRELGFQQVGISGLELGEHEAHLQRWLDAGYQGEMDYMAAHGRKRSHPDELVPGTLRVVSLRMDYLPGDTQMAQRLQEPEKAYVSRYALGRDYHKLIRKRLQQLAERIQQAIGPFGYRAFVDSAPVLEKAIAEQSGLGWIGKNTLVLNRKAGSYFFLGELFVDIPLPEDAPHASEHCGRCSACLDVCPTAAFVGPYVLDARRCISYLTIELKGPIPEELRAPIGNRVFGCDDCQMVCPWNRFAKATEQSDFQPRHSLDNAELAELFRWSEEEFLSRTEGSPLRRAGYERWLRNLAVGLGNAPSSIPVLEALEARREHPSELVREHVQWALEQHARRA

SEQ ID NO: 79970 - protein, 367 aa, Pseudomonas deceptionensis
  REGION 1..367: note = tr|A0A0J6GC68|A0A0J6GC68_PSEDM Epoxyqueuosine reductase OS=Pseudomonas deceptionensis OX=882211 GN=queG; PE = 3 SV=1
MPAITADLPALAQSIKEWGRELGFQQVAIAGLDLGEHEHHLQRWLDAGYHGDMEYMGAHGSKRSHPEELVPGTLRVVSLRMDYLPGDTHMAQLLAQPEKAYISRYALGRDYHKLIRKRVQQLADRIQADIGPFGFRAFVDSAPVLEKAIAQQAGLGWIGKNTLVLNRKAGSYFFLSELFVDIPLPVDPPHETEHCGRCTACLDICPTNAFVGPYVLDARRCISYLTIELKTAIPEELRSMIGNRVFGCDDCQIVCPWNRFARTTTEGDFKPRHNLDNAGLAELFMWDEDKFLSSTEGSPLRRAGYERWLRNLAVGLGNAPSTIPVLEALKARREYPSELVQEHVEWALEQHANRLPSPQPSPGGSGS

SEQ ID NO: 79971 - protein, 355 aa, Pseudomonas delhiensis
  REGION 1..355: note = tr|A0A239EXW1|A0A239EXW1_9PSED Epoxyqueuosine reductase OS=Pseudomonas delhiensis OX=366289 GN=queG PE=3; SV = 1
MHDSTSDYSTIAERIKAWGRELGFQQVGIGGLDLESHGEHLQRWLAAGYQGEMDYMGAHGSKRWRPDELVPGTLRVVSLRMDYLPGDTRMAQRLAEPEKAYVSRYALGRDYHKLVRKRLQQLAERIQAEVGPFGYRAFVDSAPVLEKAIGEQAGLGWIGKNTLLLNRKAGSYFFLGELFTDLPLPLDEPHGSEHCGRCSACLDICPTNAFVGPYVLDARRCISYLTIELKGPIPEELRAPMGNRVFGCDDCQIVCPWNRFARPTEQGDFQPRHGLDNAGLAELFLWSEEEFLSRTEGSPLRRAGYERWLRNLAVGLGNAPTSIPVVEALKARREFPSELVREHVEWALRRHGVER

SEQ ID NO: 79972 - protein, 353 aa, unidentified
  source 1..353: note = Pseudomonas denitrificans
  REGION 1..353: note = tr|A0A5J6R7G7|A0A5J6R7G7_PSEDE tRNA epoxyqueuosine(34) reductase QueG OS=Pseudomonas denitrificans OX=43306 GN=queG PE=4 SV=1
MHDSTLDYADLALSIKDWGRELGFQQVGISGLDLEAHGEHLQRWLEAGYHGEMDYMGAHGSKRWRPDELVPGTLRVVSLRMDYLPGDTRMAQVLGDPQKAYVSRYALGRDYHKLIRKRLQQLAERIQQRVGPFGFRAFVDSAPVLEKAIAEQSGLGWIGKNTLVLNRKAGSYFFLGELFTDLPLPVDQPHGTEHCGRCSACMDICPTAAFVAPYVLDARRCISYLTIELKGPIPEDLRPLIGNRVFGCDDCQMVCPWNRFARATDQGDFQPRHSLDNAALAELFLWTEEEFLSRTEGSPLRRAGYERWLRNLAVGLGNAPSTIPVIEALRARREFPSELVREHVEWALRRHGL

SEQ ID NO: 79973 - protein, 357 aa, unidentified
  source 1..357: note = Pseudomonas donghuensis
  REGION 1..357: note = tr|A0A2M9VI59|A0A2M9VI59_9PSED Epoxyqueuosine reductase OS=Pseudomonas donghuensis OX=1163398 GN=queG; PE = 3 SV=1
MSASAPDLPTLAQSIKDWGRELGFAHVGIAGVDLGEHEKHLERWLEAGYHGEMDYMGAHGSKRSHPDELVPGTLRVVSLRMDYLPGDTRMAQQLAQPEKAYISRYALGRDYHKLVRKRVQHLAERIQKEIGPFGFRAFVDSAPVLEKAIAEQAGLGWIGKNTLLLNRKAGSYFFLAELFVDMPLPVDPPHASEHCGRCSACLDICPTQAFVGPYVLDARRCISYLTIELKSAIPEELRPLIGNRVFGCDDCQIVCPWNRFARPSGESDFKPRHNLDSAGLAELFMWDEQTFLDSTEGSPLRRAGYERWLRNLAVGLGNAPSTIQVLEALKARREYPSELVREHVEWALGQHAERQAG

SEQ ID NO: 79974 - protein, 355 aa, unidentified
  source 1..355: note = Pseudomonas dryadis
  REGION 1..355: note = tr|A0A4Q9QWC0|A0A4Q9QWC0_9PSED Epoxyqueuosine reductase OS=Pseudomonas dryadis OX=2487520 GN=queG PE=3; SV = 1
MSHVALDLASLAQSIKDWGRELGFQQVGIAGLELGEHEAHLQRWLDAGYQGEMDYMAAHGRKRSHPDELVPGTLRVVSLRMDYLPGDTQMAQRLGEPEKAYVSRYALGRDYHKLIRKRLQQLAERIQQVIGPFGYRAFVDSAPVLEKAIAEQAGLGWIGKNTLVLNRKAGSYFFLGELFVDIPLPEDPPHGSEHCGRCSACLDICPTAAFVGPYVLDARRCISYLTIELKGSIPEELRAPIGNRVFGCDDCQMVCPWNRFARPSEQHDFQPRHSLDNAELAQLFRWSEDEFLSRTEGSPLRRAGYERWLRNLAVGLGNAPSSIPVLEALNARRDHPSALVREHVEWALGRHGVVS

SEQ ID NO: 79975 - protein, 358 aa, Pseudomonas duriflava
  REGION 1..358: note = tr|A0A562Q6Q5|A0A562Q6Q5_9PSED Epoxyqueuosine reductase OS=Pseudomonas duriflava OX=459528 GN=queG PE=3; SV = 1
MSLPTLDLDTLAQTIKDWGRELGFQQTGITGVDLADHEAYLERWLAAGYHGEMDYMAAHGRKRSRPDELVPGTLRIVSLRMDYLPGDTEMARRLAEPTGAYVSRYALGRDYHKLIRKRLQQLAERIQATIGPFGYRAFVDSAPVLEKALAEKAGLGWIGKNTLVLNRKAGSYFFLGELFTDLPLPVDAPHAGNHCGRCSACMDICPTAAFVAPYVLDARRCISYLTIELKGSIPEELRPLIGNRVFGCDDCQIVCPWNRFAKPTTQPDFQPRHNLDNSDLVSLFRWTEAEFLSRTEGSPLRRAGYERWLRNLAVALGNAPTSIPVVEALKLHRAHPSPLVREHVEWALGRHGETASIA

SEQ ID NO: 79976 - protein, 354 aa, unidentified
  source 1..354: note = Pseudomonas entomophila
  REGION 1..354: note = tr|A0A3S8UR76|A0A3S8UR76_9PSED Epoxyqueuosine reductase OS=Pseudomonas entomophila OX=312306 GN=queG; PE = 3 SV=1
MPATLPDINTLAQSIKDWGQELGFAHVGIAGVDLGEHEQHLQRWLAAGYQGEMEYMGEHGTKRSRPAELIPGTLRVISLRMDYLPGDTQMAQRLAQPEKAYIARYALGRDYHKLVRKRVQHFADRIQEAIGPFGYRAFVDSAPVLEKALAQEAGLGWIGKNTLLLNRKAGSYFFLAELFVDLPLPIDGVQGSDHCGRCQACLDICPTQAFVGPYQLDARRCISYLTIELRHAIPVELRPLIGNRVFGCDDCQLVCPWNRFAKTTTEDDFMPRRGLDNVELAELFLWDEKRFLGSTEGSPLRRAGYERFSRNLAVGLGNAPTTIPVVEALKARRNDPSALVREHVEWALGRHGVL

SEQ ID NO: 79977 - protein, 354 aa, unidentified
  source 1..354: note = Pseudomonas entomophila
  REGION 1..354: note = tr|Q1I443|Q1I443_PSEE4 Epoxyqueuosine reductase; OS = Pseudomonas entomophila (strain L48) OX=384676 GN=queG; PE = 3 SV=1
MPANTPDIATLAQSIKDWGLELGFAHVGIAGVDLGEHEQHLQRWLAAGYNGEMEYMGDHGHKRSRPAELIPGTLRVISLRMDYLPGDTQMAKRLAEPEKAYISRYALGRDYHKLVRKRVQHFADRIQEAIGPFGYRAFVDSAPVLEKALAQEAGLGWIGKNTLLLNRKAGSYFFLAELFVDLPLPIDGIQGSDHCGRCQACLDICPTQAFVGPYQLDARRCISYLTIELRHAIPVELRPLIGNRVFGCDDCQIVCPWNRFAKTTTEDDFMPRRGLDNIELAELFLWDEPRFLARTEGSPLRRAGYERFLRNLAVGLGNAPSTIPVLEALNARRDDPSDLVREHVEWALARHGAL

SEQ ID NO: 79978 - protein, 360 aa, Pseudomonas extremaustralis
  REGION 1..360: note = tr|A0A5C5QMV2|A0A5C5QMV2_9PSED Epoxyqueuosine reductase OS=Pseudomonas extremaustralis OX=359110 GN=queG; PE = 3 SV=1
MPAITSDLPALAQSIKDWGRELGFQQVGISGLDLAEHEQHLQRWLDAGYHGEMDYMGAHGSKRSHPDELVPGTLRVVSLRMDYLPGDTQMAQLLAKPEKAYISRYALGRDYHKLIRKRVQQLADRIQAQIGPFGFRAFVDSAPVLEKAIAEQAGLGWIGKNTLVLNRKAGSYFFLSELFVDLPLPVDPPHSTEHCGRCTACLDICPTNAFVGPYILDARRCISYLTIELKSAIPEDLRPLIGNRVFGCDDCQIVCPWNRFARPSGEGDFQPRHNLDNAELAELFMWDEDKFLSSTEGSPLRRAGYERWLRNLAVGLGNAPSSIVVLEALKARRDYPSELVREHVEWALEQHAARQCTSSL

SEQ ID NO: 79979 - protein, 354 aa, Pseudomonas extremorientalis
  REGION 1..354: note = tr|A0A1H0U6R8|A0A1H0U6R8_9PSED Epoxyqueuosine reductase OS=Pseudomonas extremorientalis OX=169669; GN = queG PE=3 SV=1
MPAITTDLPALAQSIKDWGRELGFQQVGISGLDLAEHEQHLQRWLDAGYHGEMDYMGAHGSKRSHPDELVPGTLRVVSLRMDYLPGDTQMAQLLAKPEKAYISRYALGRDYHKLIRKRVQQLADRIQAQIGPFGFRAFVDSAPVLEKAIAEKAGLGWIGKNTLVLNRKAGSYFFLSELFVDLPLPIDAPHSTEHCGRCTACLDICPTNAFVGPYVLDARRCISYLTIELKTAIPEDLRPLIGNRVFGCDDCQIVCPWNRFARATAEVDFKPRHNLDNAELAELFMWDEDKFLSSTEGSPLRRAGYERWLRNLAVGLGNAPSSIPVLEALKARREYPSELVREHVEWALNQHANR

SEQ ID NO: 79980 - protein, 392 aa, Pseudomonas ficuserectae
  REGION 1..392: note = tr|A0A3M5CKS5|A0A3M5CKS5_9PSED Epoxyqueuosine reductase OS=Pseudomonas ficuserectae OX=53410 GN=queG; PE = 3 SV=1
MRFRVEHASIGSDVWQNYTHLGPGFSLRMSAITAVLPTSDDLATLAVSIKAWGRELGFQEVGISGLDLAEHEQHLQRWLDAGYHGEMDYMAAHGSKRSHPDELVPGTLRVVSLRMDYLPGDTEMAQRLTEPEKAYVSRYALGRDYHKLIRKRLQQLAERIQQVIGPFGFRAFVDSAPVLEKAIAEQAGLGWIGKNTLVLNRKAGSFFFLGELFVDIPLPVDAPHATEHCGRCTACLDICPTAAFVGPYVLDARRCISYLTIELKTAIPEELRPLIGNRVFGCDDCQIVCPWNRFARPTDQSDFQPRHNLDNAGLAELFLWDEDKFLSSTEGSPLRRAGYERWLRNLAVGLGNAPSTIPVIEALHARRDYPSELVREHVEWALQRHGVADAEG

SEQ ID NO: 79981 - protein, 364 aa, Pseudomonas ficuserectae
  REGION 1..364: note = tr|A0A0N8RGW1|A0A0N8RGW1_9PSED Epoxyqueuosine reductase OS=Pseudomonas ficuserectae OX=53410 GN=queG; PE = 3 SV=1
MSAITAVLPTSDDLATLAVSIKAWGRELGFQEVGISGLDLAEHEQHLQRWLDAGYHGEMDYMAAHGSKRSHPDELVPGTLRVVSLRMDYLPGDTEMAQRLTEPEKAYVSRYALGRDYHKLIRKRLQQLAERIQQVIGPFGFRAFVDSAPVLEKAIAEQAGLGWIGKNTLVLNRKAGSFFFLGELFVDIPLPVDAPHATEHCGRCTACLDICPTAAFVGPYVLDARRCISYLTIELKTAIPEELRPLIGNRVFGCDDCQIVCPWNRFARPTDQSDFQPRHNLDNAGLAELFLWDEDKFLSSTEGSPLRRAGYERWLRNLAVGLGNAPSTIPVIEALHARRDYPSELVREHVEWALQRHGVADAEG

SEQ ID NO: 79982 - protein, 355 aa, Pseudomonas flavescens
  REGION 1..355: note = tr|A0A1G8LLV8|A0A1G8LLV8_9PSED Epoxyqueuosine reductase OS=Pseudomonas flavescens OX=29435 GN=queG PE=3; SV = 1
MTDAPLDLTSLAQSIKDWGRELGFQQVGISGLELGEHEAHLQRWLEAGYQGEMDYMAAHGRKRSHPDELVPGTLRVVSLRMDYLPSDTQMAQRLQEPEKAYVSRYALGRDYHKLIRKRLQQLAERIQQTIGPFGYRAFVDSAPVLEKAIAEQSGLGWIGKNTLVLNRKAGSYFFLGELFVDIPLPEDAPHGSEHCGRCSACLDVCPTAAFVGPYVLDARRCISYLTIELKGPIPEDLRAPIGNRVFGCDDCQMVCPWNRFAKATEQGDFQPRHSLDNAELAELFRWSEEEFLSRTEGSPLRRAGYERWLRNLAVGLGNAPSSIPVLEALQARREYPSELVREHVQWALEQHARRA

SEQ ID NO: 79983 - protein, 354 aa, unidentified
  source 1..354: note = Pseudomonas flexibilis
  REGION 1..354: note = tr|A0A0B3BYW7|A0A0B3BYW7_9PSED Epoxyqueuosine reductase OS=Pseudomonas flexibilis OX=706570 GN=queG PE=3; SV = 1
MSATFPDLDTLARSIKDWGRELGFQQVGIADVDLGTHEQYLQDWLAAGYQGEMDYMAAHGHKRSRPAELVEGTRRVISVRMDYLPGDTGMAERLADPEQAYVSRYALGRDYHKLVRKRLQQLAERIQGVVGPFGYRAFVDSAPVLEKAVAQQAGLGWIGKNTLLLNRQAGSWFFLGELFVDLPLPMDEPHNREHCGSCRACLDICPTGAFAGERLLDARRCISYLTIELKGAIPLELRPLIGNRVFGCDDCQLVCPWNRFARPTGESDFLPRHDLDNSQLAALFRWSEEEFLQRTEGSPLRRAGYQRWLRNLAVGLGNAPSTIAVIEALELRRDDPSELVREHVAWALARHGRG

SEQ ID NO: 79984 - protein, 354 aa, unidentified
  source 1..354: note = Pseudomonas flexibilis
  REGION 1..354: note = tr|A0A1N7BEL6|A0A1N7BEL6_9PSED Epoxyqueuosine reductase OS=Pseudomonas flexibilis OX=706570 GN=queG PE=3; SV = 1
MSATFPDLDTLARSIKDWGRELGFQQVGIADVDLGTHEQYLQDWLAAGYQGEMDYMAAHGHKRSRPAELVEGTRRVISVRMDYLPGDTGMAERLADPEQAYVSRYALGRDYHKLVRKRLQQLAERIQGVVGPFGYRAFVDSAPVLEKAVAQQAGLGWIGKNTLLLNRQAGSWFFLGELFVDLPLPMDEPHNREHCGSCRACLDICPTGAFAGERLLDARRCISYLTIELKGAIPLELRPLIGNRVFGCDDCQLVCPWNRFARPTGESDFLPRHGLDNSQLAALFRWSEEEFLQRTEGSPLRRAGYQRWLRNLAVGLGNAPSTIAVIEALELRRDDPSELVREHVAWALARHGRG

SEQ ID NO: 79985 - protein, 359 aa, unidentified
  source 1..359: note = Pseudomonas floridensis
  REGION 1..359: note = tr|A0A1X0NC25|A0A1X0NC25_9PSED Epoxyqueuosine reductase OS=Pseudomonas floridensis OX=1958950 GN=queG; PE = 3 SV=1
MSAITAEHPTSDDLVTLAQSIKAWGRELGFQEVGIAGLDLAEHEQHLQGWLDAGYHGEMDYMAAHGSKRSHPDELVPGTLRVVSLRMDYLPGDTEMARRLTEPEKAYVSRYALGRDYHKLIRKRLQQLAERIQQAIGPFGFRAFVDSAPVLEKAIAEQAGLGWIGKNTLVLNRKAGSFFFLGELFVDIPLPVDAPHATEHCGRCTACLDICPTAAFVGPYVLDARRCISYLTIELKTAIPEELRPLIGNRVFGCDDCQIVCPWNRFARPTDQSDFQPRHNLDNAGLAELFLWDEDTFLSRTEGSPLRRAGYERWLRNLAVGLGNAPSTIVVIEALEMRREYPSQMVREHVEWALSRHGR

SEQ ID NO: 79986 - protein, 359 aa, Pseudomonas fluorescens
  REGION 1..359: note = tr|A0A0F4TU00|A0A0F4TU00_PSEFL Epoxyqueuosine reductase OS=Pseudomonas fluorescens OX=294 GN=queG PE=3; SV = 1
MPAITTDLPALAQSIKDWGRELGFQQVGISGLDLAEHEQHLERWLEAGYHGEMDYMGAHGSKRSHPEELVPGTLRVVSLRMDYLAGDTQMAKVLAQPEKAYVSRYALGRDYHKLIRKRVQQLAEKIQAEIGPFGFRAFVDSAPVLEKAIAEQAGLGWIGKNTLVLNRKAGSYFFLAELFVDLPLPVDPPHATEHCGRCSACLDICPTNAFVGPYVLDARRCISYLTIELKGAIPEDLRPLIGNRVFGCDDCQIVCPWNRFARPSGESDFKPRHNLDNAGLAELFMWDEEKFLSSTEGSPLRRTGYENWLRNLAVGLGNAPSTIPVLEALKARREYPSELVREHVEWALRQHAERQATPL

SEQ ID NO: 79987 - protein, 393 aa, Pseudomonas fluorescens
  REGION 1..393: note = tr|E2XKE3|E2XKE3_PSEFL Epoxyqueuosine reductase; OS = Pseudomonas fluorescens WH6 OX=746360 GN=yjeS PE=3 SV=1
MAEQQRLNVSYWVFCLRHASSSSDVWQNYTHLTCGFPCLMPAITFDLPALAQSIKDWGRELGFQQVGISGLDLAEHEQHLQRWLDAGYHGEMDYMGAHGSKRSHPEELVPGTLRVVSLRMDYLPGDTHMAQLLAQPEKAYISRYALGRDYHKLIRKRVQQLADRIQAQIGPFGFRAFVDSAPVLEKAIAEQAGLGWIGKNTLVLNRKAGSYFFLSELFVDLPLPLDEPHRTEHCGRCTACLDICPTNAFVGPYVLDARRCISYLTIELKSAIPEDLRALIGNRVFGCDDCQIVCPWNRFARSTAEGDFKPRHNLDNAELAELFMWDEDKFLSSTEGSPLRRAGYERWLRNLAVGLGNAPSSIVVLEALKARRDYPSELVREHVEWALNQHATR

SEQ ID NO: 79988 - protein, 363 aa, unidentified
  source 1..363: note = Pseudomonas formosensis
  REGION 1..363: note = tr|A0A1I5ZYB1|A0A1I5ZYB1_9PSED Epoxyqueuosine reductase OS=Pseudomonas formosensis OX=1002526 GN=queG; PE = 3 SV=1
MSSPSHDHAALADRIRSIASELGFQQLGITDADIGEHEQHLQRWLEAGYHGEMEWMASHGTKRTRPAELVPGTCRVISVRMDYLPGDSRMAQRLADPDSAYVSRYALGRDYHKLMRRRLQQLAERIQALIGPFGYRAFVDSAPVMERALASRAGLGWIGKNTLLINPRAGSYFFLGELYTDLPLPVDAPFDQHHCGSCSACLSRCPTDAFVGPQVLDARRCISYLTIELKGAIPEELRAPMGNRVFGCDDCQLVCPWNKFASPAREPDFSPRHQLDQADLVSLFRWDEEEFLRNTEGSPIRRIGHERWLRNLAVGLGNARTSIPVIEALRSRLAHPSELVREHVIWALAQHGISPDGEGAAAG

SEQ ID NO: 79989 - protein, 358 aa, Pseudomonas fragi
  REGION 1..358: note = tr|A0A267AT91|A0A267AT91_PSEFR Epoxyqueuosine reductase OS=Pseudomonas fragi OX=296 GN=queG PE=3 SV=1
MPAITADLPALAQSIKEWGRELGFQQVAITGLDLGEHEHHLQRWLDAGYHGDMDYMAAHGSKRSHPEELVPGTLRVVSLRMDYLPGDTHMAQLLAQPEKAYVSRYALGRDYHKLIRKRVQQLADRIQKDIGPFGFRAFVDSAPVLEKAIAQQAGLGWIGKNTLVLNRKAGSYFFLSELFVDLPLPVDAPHETEHCGRCTACLDICPTNAFVGPYVLDARKCISYLTIELKTAIPEELRSMIGNRVFGCDDCQIVCPWNRFARTTAEGDFKPRHNLDNAGLAELFMWDEDKFLSSTEGSPLRRAGYERWLRNLAVGLGNAPSTIPVLEALNARRDYPSELVQEHVEWALKQHANRSPSP

SEQ ID NO: 79990 - protein, 355 aa, Pseudomonas fragi
  REGION 1..355: note = tr|A0A267D877|A0A267D877_PSEFR Epoxyqueuosine reductase OS=Pseudomonas fragi OX=296 GN=queG PE=3 SV=1
MPAITADLPALARSIKEWGRELGFQQVAIAGLDLGEHEHHLQRWLEAGYHGDMDYMAAHGSKRSHPQELVPGTVRVISLRMDYLPGDTHMAQLLAQPEKAYVSRYALGRDYHKLIRKRVQQLADRIQKDIGPFGFRAFVDSAPVLEKAIAQQAGLGWIGKNTLVLNRKAGSYFFLSELFVDLPLPVDAPHETEHCGRCTACLDICPTNAFVGPYVLDARKCISYLTIELKTAIPEELRSMIGNRVFGCDDCQIVCPWNRFARTTAEGDFKPRHNLDNAGLAELFMWDEDKFLSSTEGSPLRRAGYERWLRNLAVGLGNAPSTIPVLEALNARRDYPSELVREHVEWALTQHAKRA

SEQ ID NO: 79991 - protein, 362 aa, Pseudomonas frederiksbergensis
  REGION 1..362: note = tr|A0A423KS51|A0A423KS51_9PSED Epoxyqueuosine reductase OS=Pseudomonas frederiksbergensis OX=104087; GN = queG PE=3 SV=1
MPAITTDLPALAQSIKDWGRELGFQQVGISGLDLAEHEQHLERWLEAGYHGEMDYMAAHGSKRSHPEELVPGTLRVVSLRMDYLPGDTQMAQLLAQPEKAYVSRYALGRDYHKLIRKRVQQLADKIQAEIGPFGFRAFVDSAPVLEKAIAEKAGLGWIGKNTLVLNRKAGSYFFLSELFVDLPLPEDPPHSTEHCGRCTACLDICPTNAFVGPYVLDARRCISYLTIELKTAIPEDLRPLIGNRVFGCDDCQIVCPWNRFARPSGESDFKPRHNLDNAELAELFMWDEDKFLSSTEGSPLRRAGYERWLRNLAVGLGNAPSSIPVLEALKARREYPSELVREHVEWALKQHEQRADNAVSPF

SEQ ID NO: 79992 - protein, 354 aa, Pseudomonas frederiksbergensis
  REGION 1..354: note = tr|A0A2S8HS36|A0A2S8HS36_9PSED Epoxyqueuosine reductase OS=Pseudomonas frederiksbergensis OX=104087; GN = queG PE=3 SV=1
MPAITTDLPALAQSIKDWGRELGFQQVGISGLDLAEHEQHLERWLAAGYHGEMEYMGAHGSKRSHPEELVPGTLRVVSLRMDYLPGDTHMAQRLAQPEKAYVSRYALGRDYHKLIRKRVQQLAEKIQAVIGPFGYRAFVDSAPVLEKAIAEQAGLGWIGKNTLVLNRKAGSYFFLSELFVDLPLPVDPPHATEHCGRCTACLDICPTNAFVGPYVLDARRCISYLTIELKSAIPEDLRPLIGNRVFGCDDCQIVCPWNRFARPSGESDFKPRHNLDNAELAELFMWDEEKFLSSTEGSPLRRAGYERWLRNLAVGLGNAPSSIPVLEALKARRDYPSELVREHVEWALKQHGLA

SEQ ID NO: 79993 - protein, 354 aa, Pseudomonas fulva
  REGION 1..354: note = tr|A0A2V4J517|A0A2V4J517_9PSED Epoxyqueuosine reductase OS=Pseudomonas fulva OX=47880 GN=queG PE=3 SV=1
MSASPPDLDALAHNIKLWGQELGFAHVGIAGIDLGEHEHHLQRWLDAGYQGEMEYLGAHGSKRAHPEQLIPGTVRVVSLRMDYLPGDTQMAQRLAQPEKAYVSRYALGRDYHKLVRKRVQSLADRIQQAIGPFGYRAFVDSAPVLEKALAEQAGLGWIGKNTLLLNRKAGSYFFLAELFVDLPLPVDQATTSEHCGRCTACLDICPTQAFVGPYVLDARRCISYLTIELKGPIPVELRSMMGNRVFGCDDCQIVCPWNRFAKPSREQDFQPRHGLENAELAQMFLWDEPTFLRKTEGGPLRRAGYERWLRNLAVGLGNAPSTIPVIEALKARRDDASPLVREHVEWALARHGVA

SEQ ID NO: 79994 - protein, 356 aa, Pseudomonas fulva
  REGION 1..356: note = tr|F6AJX5|F6AJX5_PSEF1 Epoxyqueuosine reductase; OS = Pseudomonas fulva (strain 12-X) OX=743720 GN=queG PE=3; SV = 1
MTDAAPDLASLAQSIKDWGRELGFQQVGISGLELGEHEAHLQRWLDAGYQGEMDYMAAHGRKRSHPDELVPGTLRVVSLRMDYLPGDTQMAQRLQEPEKAYVSRYALGRDYHKLIRKRLQQLAERIQEAIGPFGYRAFVDSAPVLEKAIAEQSGLGWIGKNTLVLNRKAGSYFFLGELFVDIPLPEDAPHGSEHCGRCSACLDICPTAAFVGPYVLDARRCISYLTIELKGPIPEELRAPIGNRVFGCDDCQMVCPWNRFAKPTEQSDFQPRHSLDNAELAELFRWSEEEFLSRTEGSPLRRAGYERWLRNLAVGLGNAPSSIPVLEALEARREYPSELVREHVRWALEQHAQRQS

SEQ ID NO: 79995 - protein, 361 aa, unidentified
  source 1..361: note = Pseudomonas furukawaii
  REGION 1..361: note = tr|L8MKN6|L8MKN6_PSEFK Epoxyqueuosine reductase; OS = Pseudomonas furukawaii OX=1149133 GN=queG PE=3 SV=1
MTLSTHDLADLARAIKEWGRELGFQQVGISGVDLGEHEAHLQRWLDAGFQGEMDYMAAHGSKRSHPDELVPGTLRVISLRMDYLPGDTRMAQVLTQPEKAYVSRYALGRDYHKLIRKRLQHLAERIEKAIGPFSYRAFVDSAPVLEKAIAEQAGLGWIGKNTLVLNRKAGSYFFLGELFIDAPLPVDEPHGSEHCGRCTACLDICPTAAFTGPYQLDARRCISYLTIEYKGSIPEALRPQIGNRVFGCDDCQMVCPWNRFARPSGEGDFQPRHGLDNAELAELFRWSEEEFLSRTEGSPLRRAGYERWLRNLAVGLGNAPSSIPVLEALHLRREHPSALVREHVAWALARHQARAGDGITA

SEQ ID NO: 79996 - protein, 361 aa, Pseudomonas fuscovaginae
  REGION 1..361: note = tr|A0A0N0E5I6|A0A0N0E5I6_9PSED Epoxyqueuosine reductase OS=Pseudomonas fuscovaginae OX=50340 GN=queG; PE = 3 SV=1
MPVNSVDLPALAQSIKQWARELGFQQVGIAGLELGEHEQHLQRWLDAGYHGDMDYMGAHGSKRSHPDELVPGTLRVVSLRMDYLPGDTRMVQRLAEPEKAYVSRYALGRDYHKLIRKRLQQLAERIQQVIGPFGYRAFVDSAPVLEKAIAEQAGLGWIGKNTLVLNRKAGSYFFLGELFVDLPLPVDEPHATEHCGRCSACLDICPTAAFVGPYVLDARRCISYLTIELKTAIPEDLRPLIGNRVFGCDDCQVVCPWNRFARPTVESDFQPRHNLDNAGLAELFRWDEETFLKNTEGSPLRRAGYERWLRNLAVGLGNAPSTIAVLEALNSRRDYPSELVREHVQWALRQHAERADQAASL

SEQ ID NO: 79997 - protein, 358 aa, Pseudomonas fuscovaginae
  REGION 1..358: note = tr|A0A1H6P768|A0A1H6P768_9PSED Epoxyqueuosine reductase OS=Pseudomonas fuscovaginae OX=50340 GN=queG; PE = 3 SV=1
MPVNSVDLPALAHSIKQWARELGFQQVGIAGLELGEHEQHLQRWLDAGYHGDMDYMGAHGSKRSHPDELVPGTLRVVSLRMDYLPGDTQMVQRLAEPEKAYVSRYALGRDYHKLIRKRLQQLAERIQQVIGPFGYRAFVDSAPVLEKAIAEQAGLGWIGKNTLVLNRKAGSYFFLGELFVDLPLPVDEPHATEHCGRCTACMDICPTAAFVGPYVLDARRCISYLTIELKTAIPEELRPLIGNRVFGCDDCQVVCPWNRFARPSAENDFQPRHSLDNAGLAELFRWDEETFLKNTEGSPLRRAGYERWLRNLAVGLGNAPSTIAVLEALDSRRDYPSELVQEHVQWALRQHAERADPS

SEQ ID NO: 79998 - protein, 355 aa, unidentified
  source 1..355: note = Pseudomonas gallaeciensis
  REGION 1..355: note = tr|A0A395R8V4|A0A395R8V4_9PSED Epoxyqueuosine reductase OS=Pseudomonas gallaeciensis OX=857227 GN=queG; PE = 3 SV=1
MTSQTPDYQQLAEQIRQLARELGFQQLGIGATELGEHEQHLQHWLDAGYHGEMEWMASHGSKRTRPNELVPGTQRVLSVRMDYLPTETEMAKRLANPDAAYISRYALGRDYHKLIRRRLQQLAERIEQLIGPFGYRAFVDSAPVMERALATRSGLGWIGKNTMLINRKAGSYFFLGELYTDLPLPIDAPQQTEHCGKCTACLTACPTGAFVGPHLLDARRCISYLTIELKGAIPEALRKPVGNRVFGCDDCQLVCPWNRFAKATEEADFTPRHNLDQASLVELFRWDEATFLKRTEGSPVRRIGHERWLRNLAIGLGNATSSINVIEALKLRQAHPSALVREHVDWALAQHGINT

SEQ ID NO: 79999 - protein, 356 aa, unidentified
  source 1..356: note = [Pseudomonas] geniculata
  REGION 1..356: note = tr|A0A0L8AE82|A0A0L8AE82_9GAMM Epoxyqueuosine reductase OS=[Pseudomonas] geniculata N1 OX=1167641; GN = queG PE=3 SV=1
MSPAPTPVDPAQAVQRIRELARAHGFQRCGIAGIELGEDEAHLADWLGQGLYGTMDWMARHGTLRARPAELLPGTVRVISVGMDYSHKDDTEAWATLADPGRAYVARYALGRDYHKLMRNRLQKLATQINDEVAPLGYRVFVDSAPVLERALARNAGLGWIGKHTCLIDRHGGSWFFIGEIYIDIPLPIDAPATAHCGTCTRCIDVCPTQAITGPQRLDARRCISYLTIEHDGAIPEDMRPLIGNRIYGCDDCQLVCPWNKFAKRTDEADFRARNNLDTARLDQLFAWDEAEFLRRTEGSPIRRSGHERWLRNIAVALGNAPSSAEALAALQTRVDDPSPLVREHVQWGLGQHTAR

SEQ ID NO: 80000 - protein, 354 aa, Pseudomonas gessardii
  REGION 1..354: note = tr|A0A1V2JPZ6|A0A1V2JPZ6_9PSED Epoxyqueuosine reductase OS=Pseudomonas gessardii OX=78544 GN=queG PE=3; SV = 1
MPAITTDLPALAQSIKDWGRELGFQQVGISGLDLAEHEQHLQRWLDAGYHGEMDYMGAHGSKRSHPDELVPGTLRVVSLRMDYLPGDTHMAQRLAQPEKAYISRYALGRDYHKLIRKRVQQLADRIQAQIGPFGFRAFVDSAPVLEKAIAEQAGLGWIGKNTLVLNRKAGSYFFLSELFVDLPLPVDPPHSTEHCGRCTACLDICPTNAFVGPYVLDARRCISYLTIELKSAIPEDLRPLIGNRVFGCDDCQIVCPWNRFARPSAESDFKPRHNLDNAELAELFMWDEDKFLSSTEGSPLRRAGYERWLRNLAVGLGNAPSSIPVLEALKARRDYPSELVREHVEWALNQHATR

SEQ ID NO: 80001 - protein, 357 aa, unidentified
  source 1..357: note = Pseudomonas gingeri
  REGION 1..357: note = tr|A0A2K1F769|A0A2K1F769_9PSED Epoxyqueuosine reductase OS=Pseudomonas gingeri NCPPB 3146 = LMG 5327; OX = 707248 GN=queG PE=3 SV=1
MPVNSVDLPALAQSIKEWGRELGFQQVGIAGVELGEHEQHLQRWLDAGYHGDMDYMGAHGSKRSHPDELVPGTLRVVSLRMDYLPGDTQMAQRLGQPEKAYVSRYALGRDYHKLIRKRLQQLAERIQQVIGPFGYRAFVDSAPVLEKAIAEQAGLGWIGKNTLVLNRKAGSYFFLGELFVDLPLPVDAPHATEHCGRCTACMDICPTAAFVGPYVLDARRCISYLTIELKTAIPEDLRPLIGNRVFGCDDCQIVCPWNRFARASDESDFKPRHSLDNAGLAELFLWDEETFLKNTEGSPLRRAGYERWLRNLAVGLGNAPSTIVVLEALNARLDYPSELVREHVQWALHQHAGRNAP

SEQ ID NO: 80002 - protein, 372 aa, Pseudomonas graminis
  REGION 1..372: note = tr|A0A4R7VPL2|A0A4R7VPL2_9PSED Epoxyqueuosine reductase OS=Pseudomonas graminis OX=158627 GN=queG PE=3; SV = 1
MSAITVDPSTASTPLTADGLTDLAQSIKAWGRELGFQQVGISGLDLAEHEQHLERWLEAGYHGEMDYMAAHGSKRSHPDELVPGTLRVVSLRMDYLPGDTQMAQLLGQPEKAYVSRYALGRDYHKLIRKRVQQLAERIQQAIGPFGFRAFVDSAPVLEKAIAEQAGLGWIGKNTLVLNRKAGSYFFLSELFVDLPLPVDAPHVTEHCGRCTACLDVCPTNAFVGPYVLDARKCISYLTIELKTSIPEDLRALIGNRVFGCDDCQIVCPWNRFARPTDQTDFKPRHGLDNAELTTLFLWDETTFLSNTEGSPLRRAGYERWLRNLAVGLGNAPSTISVIEALKARREHPSEMVREHVQWALRQHEGRTAARIL

SEQ ID NO: 80003 - protein, 360 aa, Pseudomonas graminis
  REGION 1..360: note = tr|A0A1C2E8C8|A0A1C2E8C8_9PSED Epoxyqueuosine reductase OS=Pseudomonas graminis OX=158627 GN=queG PE=3; SV = 1
MPLTAAGLTDLAQSIKGWGRELGFQQVGISGLDLAEHEQHLERWLDAGYHGEMDYMAAHGSKRSHPDELVPGTLRVVSLRMDYLPGDTQMAQLLGQPEKAYVSRYALGRDYHKLIRKRVQQLAERIQQAIGPFGFRAFVDSAPVLEKAIAEQAGLGWIGKNTLVLNRKAGSYFFLSELFVDLPLPVDAPHATEHCGRCTACLDVCPTNAFVGPYVLDARKCISYLTIELKTSIPEDLRALIGNRVFGCDDCQIVCPWNRFARPTDQTDFKPRHGLDNAELTTLFLWDETTFLSNTEGSPLRRAGYERWLRNLAVGLGNAPSTIPVIEALKARREHPSEMVREHVEWALGQHEARAPGRLL

SEQ ID NO: 80004 - protein, 354 aa, Pseudomonas grimontii
  REGION 1..354: note = tr|A0A1H1CB21|A0A1H1CB21_9PSED Epoxyqueuosine reductase OS=Pseudomonas grimontii OX=129847 GN=queG PE=3; SV = 1
MPAITSDLPALAQSIKDWGRELGFQQVGISGLDLAEHEQHLQRWLDAGYHGEMEYMGAHGSKRSHPDELVPGTLRVVSLRMDYLPGDTQMALLLAKPEKAYISRYALGRDYHKLIRKRVQQLADRIQAQIGPFGFRAFVDSAPVLEKAIAEQAGLGWIGKNTLVLNRKAGSYFFLSELFVDLPLPVDPPHSTEHCGRCTACLDICPTNAFVGPYVLDARRCISYLTIELKSAIPEDLRPLIGNRVFGCDDCQIVCPWNRFARPTAESDFKPRHNLDNAELAELFMWDEDKFLSSTEGSPLRRAGYERWLRNLAVGLGNAPSSIPVLEALKARRDYPSELVREHVEWALNQHAAR

SEQ ID NO: 80005 - protein, 363 aa, unidentified
  source 1..363: note = Pseudomonas guangdongensis
  REGION 1..363: note = tr|A0A1H2E5D5|A0A1H2E5D5_9PSED Epoxyqueuosine reductase OS=Pseudomonas guangdongensis OX=1245526 GN=queG; PE = 3 SV=1
MPTSEIDLAALARTVKDWGRELGFQQVGIAGIELGEHEAHLHRWLAAGHHGEMDYMAAHGDKRSRPAELVPGTLRVISLRMDYLPGDTRMTEVLARPEKAYLSRYALGRDYHKLIRKRLQQLAERIQARIGPFGYRAFVDSAPVLEKALASQAGLGWIGKNTLLINKQAGSWFFLGELYVDLPLPVDAPHASEHCGRCQACLDICPTAAFVGPYQLDARRCISYLTIELKGSIPVELRPLIGNRVFGCDDCQLVCPWNRFARPTRQGDFQPRHGLDNAELASLLRWSEEEFLARTEGSPLRRAGYERWLRNLAVGLGNAPTSIAVLEALALRREHPSALVREHVEWALARHRDAARPDTALST

SEQ ID NO: 80006 - protein, 354 aa, unidentified
  source 1..354: note = Pseudomonas guariconensis
  REGION 1..354: note = tr|A0A1G6KE08|A0A1G6KE08_9PSED Epoxyqueuosine reductase OS=Pseudomonas guariconensis OX=1288410 GN=queG; PE = 3 SV=1
MSACLPDLNTLAQSIKDWGRELGFAHVGIADVALGEHEHHLQRWLEAGYQGEMDYMAAHGSKRSHPDELVPGTVRVVSLRMDYLPGDTRMAQMLAQPEKAYISRYALGRDYHKLVRKRVQHLAERIQQAIGPFGFRAFVDSAPVLEKAIAEQAGLGWIGKNTLLLNRKAGSYFFLAELFVDLPLPVDQAQTSEHCGRCQACLDICPTAAFVGPYVLDARRCISYLTIELKHAIPVELRPLIGNRVFGCDDCQIVCPWNRFARPTQENDFKPRHGLDNAELAALFLWDEATFLNNTEGSPLRRAGYERWLRNLAVGLGNAPTTIPVLEALRARREHPSALVREHVEWALAQHEDQ

SEQ ID NO: 80007 - protein, 354 aa, unidentified
  source 1..354: note = Pseudomonas guguanensis
  REGION 1..354: note = tr|A0A1H0NX85|A0A1H0NX85_9PSED Epoxyqueuosine reductase OS=Pseudomonas guguanensis OX=1198456 GN=queG; PE = 3 SV=1
MSDHPLDLDALALSIKDWGRELGFQQVGITDVELGEHEAHLKRWLAAGYQGEMDYMAAHGDKRSRPQELVPGTLRVVSLRMDYLPGDTQMAQRLSEPEQAYVSRYALGRDYHKLIRKRLQQLAERIQQQIGPFGYRAFVDSAPVLEKAIAEKAGLGWIGKNTLVLNRKAGSYFFLGELFVDLPLPVDAPHGSEHCGRCSACMDICPTAAFAGPYQLDARRCISYLTIELKGSIPVELRAPIGNRVFGCDDCQIVCPWNRFARATEQGDFQPRHGLDNSSLAELFMWTEEEFLSRTEGSPLRRAGYERWLRNLAVGLGNAPSTIPVLQALNARREHPSELVREHVAWALERHGAL

SEQ ID NO: 80008 - protein, 360 aa, Pseudomonas guineae
  REGION 1..360: note = tr|A0A1I3EK41|A0A1I3EK41_9PSED Epoxyqueuosine reductase OS=Pseudomonas guineae OX=425504 GN=queG PE=3; SV = 1
MNSDALDLVALAQSIKDWGRELGFQQIGIADVQLGEHEAHLQRWLDAGYQGEMDYMAAHGSKRSHPEQLVPGTLRVVSLRMDYLPGDTQMAKRLGQPEKAYVSRYALGRDYHKLIRKRLQQLAERIQQQIGPFGFRAFVDSAPVLEKAIAEQAGLGWIGKNTLVLNRKAGSYFFLGELFVDLPLPVDEPHSSEHCGRCTACMDICPTAAFVGPYVLDARRCISYLTIELKGPIPIDLRAPIGNRVFGCDDCQIVCPWNRFAKPSEQSDFQPRHNLDNAELAELFCWSEEEFLSRTEGSPLRRAGYERWLRNLAVGLGNAPSSIPVLEALIARREYPSALVREHVEWALDQHAQRDLTPQP

SEQ ID NO: 80009 - protein, 355 aa, unidentified
  source 1..355: note = Pseudomonas helleri
  REGION 1..355: note = tr|A0A0J6I9Z7|A0A0J6I9Z7_9PSED Epoxyqueuosine reductase OS=Pseudomonas helleri OX=1608996 GN=queG PE=3; SV = 1
MPAITADLPALAQSIKEWGRELGFQQVAIAGLDLGEHEQHLERWLAAGYHGDMEYMGAHGSKRSHPEELVPGTLRVVSLRMDYLPGDTHMAQLLAQPEKAYVSRYALGRDYHKLIRKRVQQLADRIQAEIGPFGFRAFVDSAPVLEKAIAQKAGLGWIGKNTLVLNRKAGSYFFLSELFVDIPLPEDEPHTTEHCGRCSACLDICPTKAFVGPYVLDARRCISYLTIELKTAIPEELRSMMGNRVFGCDDCQIVCPWNRFARSTLEGDFKPRHNLDNAELAELFMWDEDKFLSSTEGSPLRRAGYERWLRNLAVGLGNAPSTIPVLEALKARREYPSELVQEHVEWALKQHAERV

SEQ ID NO: 80010 - protein, 356 aa, unidentified
  source 1..356: note = Pseudomonas helmanticensis
  REGION 1..356: note = tr|A0A4R7VGS9|A0A4R7VGS9_9PSED Epoxyqueuosine reductase OS=Pseudomonas helmanticensis OX=1471381 GN=queG; PE = 3 SV=1
MSAITTDLPALAQSIKDWGRELGFQQVGISGLDLAEHEQHLARWLEAGYHGEMDYMGAHGSKRSHPEELVPGTLRVVSLRMDYLPGDTQMAQMLAQPEKAYVSRYALGRDYHKLIRKRVQQLADKIQAQIGPFGFRAFVDSAPVLEKAIAEKAGLGWIGKNTLVLNRKAGSYFFLSELFVDLPLPVDEPHSTEHCGRCTACLDICPTNAFVGPYLLDARRCISYLTIELKSAIPEDLRPLIGNRVFGCDDCQIVCPWNRFAKPSGESDFKPRHNLDNAELAELFLWDEEKFLSSTEGSPLRRAGYERWLRNLAVGLGNAPSTIPVLEALKARRDYPSELVREHVEWALQQHGHATR

SEQ ID NO: 80011 - protein, 354 aa, unidentified
  source 1..354: note = Pseudomonas hunanensis
  REGION 1..354: note = tr|A0A2I0CEK5|A0A2I0CEK5_9PSED Epoxyqueuosine reductase OS=Pseudomonas hunanensis OX=1247546 GN=queG; PE = 3 SV=1
MSASIPDLAQLAQSIKIWGQELGFAHVGIAGVDLGEHEHHLQRWLDAGYQGEMEYLGAHGSKRSHPDQLIPGTVRVVSLRMDYLPGDTQMAQRLAQPEKAYVSRYALGRDYHKLVRKRVQFLADRIQEAIGPFGYRAFVDSAPVLEKALAEQAGLGWIGKNTLLLNRKAGSYFFLAELFVDLPLPVDEATTSEHCGRCQACLDICPTQAFVGPYVLDARRCISYLTIELRGAIPVELRAKMGNRVFGCDDCQIVCPWNRFAKHSQEQDFQPRHGLENTDLAAMFLWDERTFLRKTEGGPLRRAGYERFLRNLAVGLGNAPSTIPVIEALKARRDDESELVREHVEWALARHGAQ

SEQ ID NO: 80012 - protein, 357 aa, unidentified
  source 1..357: note = Pseudomonas hussainii
  REGION 1..357: note = tr|A0A1H7Q7Y1|A0A1H7Q7Y1_9PSED Epoxyqueuosine reductase OS=Pseudomonas hussainii OX=1429083 GN=queG PE=3; SV = 1
MPDASIDFHALAQQIKDWGRELGFQQVGIAGIELGEHEAHLQTWLDAGYHGEMDYMASHGSKRSHPEELVPGTLRVVSLRMDYLPADTAMTQVLSQPEHAYISRYALGRDYHKLIRKRISQLAQQIQQHIGDFGYRAFVDSAPVLERALADQAGLGWIGKNTMLINRQAGSFFFLGELYTDLPLPVDTPYGKNHCGSCTACLDKCPTDAFVSANVLDATRCISYLTIELKGSIPEDLRPLMGNRVFGCDDCQLVCPWNRFARPTGQGDFQPRHDLDKAQLAGLFLWDEATFLTRTEGSPIRRAGYERWLRNLAVGLGNAPSSPEVIAALKARVDYPSELVQEHVRWALAQHARKALP

SEQ ID NO: 80013 - protein, 354 aa, Pseudomonas indica
  REGION 1..354: note = tr|A0A1G8SET9|A0A1G8SET9_9PSED Epoxyqueuosine reductase OS=Pseudomonas indica OX=137658 GN=queG PE=3 SV=1
MSTSLDDLAALARSIKEWGRELGFQQVGITDVGLAEHEAHLQRWLDAGYHGEMDYMAAHGTKRSRPAELVPGTLRVISLRMDYLPGDTLMAQRLAEPEKAYVSRYALGRDYHKLIRKRLQQLAERIQAAIGPLGYRAFVDSAPVLEKAIAEQAGLGWIGKNTLVLNRKAGSYFFLGELFVDVPLPVDAPHGSEHCGRCSACLDICPTAAFVGPYVLDARRCISYLTIELKGSIPEALRPLIGNRVFGCDDCQIVCPWNRFARPSAQGDFQPRHGLDNVELAALFLWSEEEFLSRTEGSPLRRAGYERWLRNLAVGLGNAPATIPVIEALRARREHPSELVREHVEWALARHGER

SEQ ID NO: 80014 - protein, 354 aa, unidentified
  source 1..354: note = Pseudomonas indoloxydans
  REGION 1..354: note = tr|A0A2T5PJ71|A0A2T5PJ71_9PSED Epoxyqueuosine reductase OS=Pseudomonas indoloxydans OX=404407 GN=queG; PE = 3 SV=1
MSDQTLDLNALALSIKDWGRELGFQQVGITDVELGEHEAHLQRWLAAGYQGEMDYMAAHGSKRSHPDELVPGTLRVVSLRMDYLPGDTQMAQRLNEPEQAYVSRYALGRDYHKLIRKRLQQLAERIQQQIGPFGYRAFVDSAPVLEKAIAEKAGLGWIGKNTLVLNRKAGSYFFLGELFVDLPLPVDVPHASEHCGRCSACMDICPTAAFAGPYALDARRCISYLTIELKGSIPEELRAPIGNRVFGCDDCQIVCPWNRFARPTEQGDFQPRHGLDNSGLAELFMWTEEEFLSRTEGSPLRRAGYERWLRNLAVGLGNAPSTIPVLQALQARREHPSALVREHVAWALERHGAL

SEQ ID NO: 80015 - protein, 358 aa, Pseudomonas japonica
  REGION 1..358: note = tr|A0A239AQK4|A0A239AQK4_9PSED Epoxyqueuosine reductase OS=Pseudomonas japonica OX=256466 GN=queG PE=3; SV = 1
MSASIDLPALVQSIKNWGRELGFAHVGIAGVDLAEHEQHLERWLAAGYHGEMDYMGAHGSKRSHPDELVPGTLRVVSLRMDYLPGDTQMAQRLAQPEKAYISRYALGRDYHKLVRKRVQHLAERIQKEIGPFGFRAFVDSAPVLEKAIAEQAGLGWIGKNTLLLNRKAGSYFFLSELFVDLPLPVDEPQASEHCGRCSACLDICPTKAFVGPYQLDARRCISYLTIELKNAIPEELRAMIGNRVFGCDDCQIVCPWNRFAKDTAENDFKPRHGLDNAGLAELFMWDEEHFLASTEGSPLRRAGYERWLRNLAVGLGNAPSTIVVLEALNARREHPSELVREHVEWALRQHAERQASPA

SEQ ID NO: 80016 - protein, 353 aa, Pseudomonas jessenii
  REGION 1..353: note = tr|A0A370SY90|A0A370SY90_9PSED Epoxyqueuosine reductase OS=Pseudomonas jessenii OX=77298 GN=queG PE=3; SV = 1
MSAITTDLPALAQSIKDWGRELGFQQVGISGLDLAEHEQHLQRWLEAGYHGEMDYMGAHGSKRSHPEELVPGTLRVVSLRMDYLPGDTEMAKRLAEPEKAYVSRYALGRDYHKLIRKRVQQLADKIQGEIGPFGFRAFVDSAPVLEKAIAEQAGLGWIGKNTLVLNRKAGSYFFLSELFVDIPLPVDEPHITEHCGRCTACLDICPTNAFVGPYVLDARRCISYLTIELKTAIPEELRPLIGNRVFGCDDCQIVCPWNRFARPSTESDFKPRHNLDNAGLAELFLWDEEKFLSSTEGSPLRRAGYERWLRNLAVGLGNAPSTIAVLEALKARRDYPSALVREHVEWALKQHSS

SEQ ID NO: 80017 - protein, 359 aa, Pseudomonas jessenii
  REGION 1..359: note = tr|A0A231G6M8|A0A231G6M8_9PSED Epoxyqueuosine reductase OS=Pseudomonas jessenii OX=77298 GN=queG PE=3; SV = 1
MPAITTDLPALAQSIKDWGRELGFQQVGISGLDLAEHEQHLERWLEAGYHGEMDYMGAHGSKRSHPEELVPGTLRVVSLRMDYLSGDTQMAKMLAQPEKAYVSRYALGRDYHKLIRKRVQHLAEKIQAQIGPFGYRAFVDSAPVLEKAIAEQAGLGWIGKNTLVLNRKAGSYFFLAELFVDLPLPVDPPHATEHCGRCSACLDICPTNAFVGPYVLDARRCISYLTIELKGAIPEDLRPLIGNRVFGCDDCQIVCPWNRFARPSGESDFKPRHNLDNAGLAELFMWDEEKFLSSTEGSPLRRTGYENWLRNLAVGLGNAPSTIPVLEALKARREHPSELVREHVAWALRQHAERQASSL

SEQ ID NO: 80018 - protein, 354 aa, Pseudomonas jinjuensis
  REGION 1..354: note = tr|A0A1H0N411|A0A1H0N411_9PSED Epoxyqueuosine reductase OS=Pseudomonas jinjuensis OX=198616 GN=queG PE=3; SV = 1
MHDSIPDFQQLAETIKTWGRELGFQQVGISGLDLEEHGAHLQRWLEAGYQGEMDYMGAHGSKRWRPDELVPGTLRVISLRMDYLPGDTRMAEVLAAPEKAYVSRYALGRDYHKLIRKRLQQLAERIQQEIGPFGYRAFVDSAPVLEKAIAEQAGLGWIGKNTLVLNRKAGSYFFLGELFTDLPLPVDPPHGSEHCGRCSACLDICPTAAFVAPYVLDARRCISYLTIELKGAIPEDLRPLIGNRVFGCDDCQMVCPWNRFARATDKGDFQPRHQLDNADLAALFLWSEEEFLSRTEGSPLRRAGYERWLRNLAVGLGNAPSSIPVIEALKARREFPSELVREHVEWALQRHGVV

SEQ ID NO: 80019 - protein, 354 aa, unidentified
  source 1..354: note = Pseudomonas kairouanensis
  REGION 1..354: note = tr|A0A4Z0AEJ9|A0A4Z0AEJ9_9PSED Epoxyqueuosine reductase OS=Pseudomonas kairouanensis OX=2293832 GN=queG; PE = 3 SV=1
MPAITSDLPALAQSIKDWGRELGFQQVGISGLNLAEHEQHLQRWLDAGYHGEMDYMGAHGSKRSHPDELVPGTLRVVSLRMDYLPGDTQMAQLLAQPKKAYISRYALGRDYHKLIRKRVQQLADRIQAQIGPFGFRAFVDSAPVLEKAIAEQAGLGWIGKNTLVLNRKAGSYFFLSELFVDLPLPVDEPHSTEHCGRCTACLDICPTNAFVGPYVLDARRCISYLTIELKNAIPEDLRPLIGNRVFGCDDCQIVCPWNRFARPTGESDFKPRHNLDNAELAELFMWDEDKFLSSTEGSPLRRAGYERWLRNLAVGLGNAPSSIPVLEALKARRDYPSELVREHVEWALNQHATR

SEQ ID NO: 80020 - protein, 359 aa, Pseudomonas kilonensis
  REGION 1..359: note = tr|A0A1H4WS46|A0A1H4WS46_9PSED Epoxyqueuosine reductase OS=Pseudomonas kilonensis OX=132476 GN=queG PE=3; SV = 1
MPAIPTDLPALAQSIKEWGRELGFQQVGISGLDLAEHEQHLQRWLDAGYHGEMDYMGAHGSKRSHPEELVPGTLRVVSLRMDYLSGDTHMAQMLGQPEKAYVSRYALGRDYHKLIRKRVQQLAEKIQAVIGPFGYRAFVDSAPVLEKAIAEQAGLGWIGKNTLVLNRKAGSYFFLSELFVDLPLPADPPHASEHCGKCTACLDICPTNAFVGPYVLDARRCISYLTIELKSAIPEELRPLIGNRVFGCDDCQIVCPWNRFARPSGESDFKPRHNLDNAGLAELFMWDEDKFLSSTEGSPLRRAGYERWLRNLAVGLGNAPSTIPVLQALEARRNYPSELVREHVEWALRQHAERQTSSL

SEQ ID NO: 80021 - protein, 359 aa, Pseudomonas kilonensis
  REGION 1..359: note = tr|A0A0F4XH46|A0A0F4XH46_9PSED Epoxyqueuosine reductase OS=Pseudomonas kilonensis OX=132476 GN=queG PE=3; SV = 1
MPAIPTDLPALAQSIKEWGRELGFQQVGISGLDLAEHEQHLQRWLDAGYHGEMDYMGAHGSKRSHPEELVPGTLRVVSLRMDYLSGDTHMAQMLGQPEKAYVSRYALGRDYHKLIRKRVQQLAEKIQAVIGPFGYRAFVDSAPVLEKAIAEQAGLGWIGKNTLVLNRKAGSYFFLSELFVDLPLPVDPPHASEHCGKCTACLDICPTNAFVGPYVLDARRCISYLTIELKSAIPEELRPLIGNRVFGCDDCQIVCPWNRFARPSGESDFKPRHNLDNAGLAELFMWDEATFLSSTEGSPLRRAGYERWLRNLAVGLGNAPSTIPVLQALEARRDYPSELVREHVEWALRQHAKRQTSSL

SEQ ID NO: 80022 - protein, 355 aa, Pseudomonas knackmussii
  REGION 1..355: note = tr|A0A024HPM9|A0A024HPM9_PSEKB Epoxyqueuosine reductase OS=Pseudomonas knackmussii (strain DSM 6978 / LMG 23759 / B13) OX=1301098 GN=queG PE=3 SV=1
MHDSNPDYSAIAERIKAWGRELGFQQVGISGLDLESHGEHLQRWLAAGYHGEMDYMGAHGSKRWRPEELVPGTLRVISLRMDYLPGDTQMAKVLGEPQKAYVSRYALGRDYHKLIRKRLQQLAERIQQEVGTFGYRAFVDSAPVLEKAVGEQAGLGWIGKNTLLLNRKAGSYFFLGELFTDLPLPVDEAHGTEHCGRCTACLDICPTNAFIGPYVLDARRCISYLTIELKGPIPEDLRAGMGNRVFGCDDCQMVCPWNRFARPTEQGDFQPRHGLDNAELAELFLWSEEEFLSRTEGSPLRRAGYERWLRNLAVGLGNAPSSIPVIEALKARREYPSELVREHVEWALRRHGVDL

SEQ ID NO: 80023 - protein, 357 aa, Pseudomonas koreensis
  REGION 1..357: note = tr|A0A4Q4L5P9|A0A4Q4L5P9_9PSED Epoxyqueuosine reductase OS=Pseudomonas koreensis OX=198620 GN=queG PE=3; SV = 1
MSAITTDLPALAQSIKDWGRELGFQQVGISGLNLAEHEQHLQRWLDAGYHGDMDYMGAHGSKRSHPDELVPGTLRVVSLRMDYLPGDTEMAKRLAEPEKAYVSRYALGRDYHKLIRKRVQQLADRIQAEIGPFGFRAFVDSAPVLEKAIAEQAGLGWIGKNTLVLNRKAGSYFFLSELFVDLPLPVDEPHSSEHCGRCTACLDICPTNAFVGPYVLDARRCISYLTIELKTAIPEELRPLIGNRVFGCDDCQIVCPWNRFAKASGEGDFKPRHNLDNAELAELFMWDEEKFLSSTEGSPLRRAGYERWLRNLAVGLGNAPSTIPVLEALKARRDYPSELVKEHVEWALEQHSRPSHP

SEQ ID NO: 80024 - protein, 357 aa, Pseudomonas koreensis
  REGION 1..357: note = tr|A0A4U3EY31|A0A4U3EY31_9PSED Epoxyqueuosine reductase OS=Pseudomonas koreensis OX=198620 GN=queG PE=3; SV = 1
MSAITTDLPALAQSIKDWGRELGFQQVGISGLDLAEHEQHLERWLEAGYHGEMDYMGAHGSKRSHPEELVPGTLRVVSLRMDYLPGDTQMAQMLAQPEKAYVSRYALGRDYHKLIRKRVQQLADKIQAQIGPFGFRAFVDSAPVLEKAIAEQAGLGWIGKNTLVLNRKAGSYFFLSELFVDLPLPVDEPHSTEHCGRCTACLDICPTNAFVGPYVLDARRCISYLTIELKSAIPEDLRPLIGNRVFGCDDCQIVCPWNRFAKPSGESDFKPRHNLDNAELAELFLWDEEKFLSSTEGSPLRRAGYERWLRNLAVGLGNAPSTIPVLEALKARRDYPSELVREHVEWALERHSRPSNP

SEQ ID NO: 80025 - protein, 359 aa, unidentified
  source 1..359: note = Pseudomonas kribbensis
  REGION 1..359: note = tr|A0A4Y8VTH0|A0A4Y8VTH0_9PSED Epoxyqueuosine reductase OS=Pseudomonas kribbensis OX=1628086 GN=queG; PE = 3 SV=1
MSAITTDLPALAQSIKDWGRELGFQQVGISGLDLAEHEQHLQRWLEAGYHGEMDYMGAHGSKRSHPEELVPGTLRVVSLRMDYLPGDTQMAQLLAKPEKAYISRYALGRDYHKLIRKRVQQLADKIQSEIGPFGFRAFVDSAPVLEKAIAEQAGLGWIGKNTLVLNRKAGSYFFLSELFVDLPLPVDEPHSTEHCGRCTACLDICPTNAFVGPYVLDARRCISYLTIELKNAIPEDLRPLIGNRVFGCDDCQICCPWNRFARPSGESDFKPRHSLDNAELAELFLWDEDKFLSSTEGSPLRRAGYERWLRNLAVGLGNAPSSIPVLEALKARREYPSELVREHVEWALKQHADRQCSSL

SEQ ID NO: 80026 - protein, 359 aa, unidentified
  source 1..359: note = Pseudomonas kribbensis
  REGION 1..359: note = tr|A0A345RJJ1|A0A345RJJ1_9PSED Epoxyqueuosine reductase OS=Pseudomonas kribbensis OX=1628086 GN=queG; PE = 3 SV=1
MSAITTDLPALAQSIKDWGRELGFQQVGISGLDLAEHEQHLQRWLEAGYHGEMDYMGAHGSKRSHPEELVPGTLRVVSLRMDYLPGDTQMAQLLAKPEKAYISRYALGRDYHKLIRKRVQQLADKIQSEIGPFGFRAFVDSAPVLEKAIAEQAGLGWIGKNTLVLNRKAGSYFFLSELFVDLPLPVDEPHSTEHCGRCTACLDICPTNAFVGPYVLDARRCISYLTIELKNAIPEDLRPLIGNRVFGCDDCQICCPWNRFARPSGESDFKPRHNLDNAELAELFLWDEDKFLSSTEGSPLRRAGYERWLRNLAVGLGNAPSSIPVLEALKARREYPSELVREHVEWALKQHADRQCSSL

SEQ ID NO: 80027 - protein, 357 aa, unidentified
  source 1..357: note = Pseudomonas kunmingensis
  REGION 1..357: note = tr|A0A2N8SEE5|A0A2N8SEE5_9PSED Epoxyqueuosine reductase OS=Pseudomonas kunmingensis OX=1211807 GN=queG; PE = 3 SV=1
MSSLSLDPAALAQSIKEWGRELGFQQVGITDVDLGEHEAHLDAWLAAGYQGEMDYMAAHGSKRSRPDELVPGTLRVISLRMDYLPGDTRMTQQLASPEKAYVSRYALGRDYHKLIRKRIQQLAERIQQMIGPFGFRAFVDSAPVLEKAAGQQAGLGWIGKNTLLLNRKAGSWFFLGELFVDIALPVDEPTTRDHCGSCHSCLDVCPTDAFVGERLLDARRCISYLTIELKGAIPVELRDKIGNRVFGCDDCQIVCPWNRFARPTEQSDFQPRHSLDNAELATLFRWTEEEFLSRTEGSPLRRAGYQRWLRNLAVGLGNAPSSIPVLEALQARRHDPSELVREHVEWALAQHAQRQPD

SEQ ID NO: 80028 - protein, 357 aa, unidentified
  source 1..357: note = Pseudomonas kunmingensis
  REGION 1..357: note = tr|A0A1I3UW70|A0A1I3UW70_9PSED Epoxyqueuosine reductase OS=Pseudomonas kunmingensis OX=1211807 GN=queG; PE = 3 SV=1
MSSLSLDPAALAQSIKEWGRELGFQQVGITDVDLGEHEAHLEAWLAAGYQGEMDYMAAHGSKRSRPDELVPGTLRVISLRMDYLPGDTRMTQQLASPEKAYVSRYALGRDYHKLIRKRIQQLAERIQQMVGPFGFRAFVDSAPVLEKAAGQQAGLGWIGKNTLLLNRKAGSWFFLGELFVDIALPVDEPATRDHCGSCHACLDVCPTDAFVGERLLDARRCISYLTIELKGAIPIELRDKIGNRVFGCDDCQIVCPWNRFARPTEQSDFQPRHSLDNAELATLFRWTEEEFLSRTEGSPLRRAGYQRWLRNLAVGLGNAPSSIPVLEALQARRDDPSELVREHVEWALAQHAQRQAD

SEQ ID NO: 80029 - protein, 354 aa, unidentified
  source 1..354: note = Pseudomonas kuykendallii
  REGION 1..354: note = tr|A0A2W5D9I8|A0A2W5D9I8_9PSED Epoxyqueuosine reductase OS=Pseudomonas kuykendallii OX=1007099 GN=queG; PE = 3 SV=1
MPSSPPDLALLAQSIKDWGRELGFQQVGIAGLDLSEHEAHLQRWLDAGYQGEMDYMAAHGTKRSRPDELVTGTLRVVSLRMDYLPGDTRMSQRLAEPQSAYVSRYALGRDYHKLIRKRLQQLAERIQAAIGPFGHRAFVDSAPVLEKAIAEQAGLGWIGKNTLVLNRKAGSWFFLGELFVDLPLPVDAPHASEHCGRCSACLDICPTGAFVGPYVLDARRCISYLTIELKGAIPEDLRGLIGNRVFGCDDCQIVCPWNRFARPTEQADFQPRHGLDNAELAELFRWSEEEFLSRTEGSPLRRAGYERWLRNLAVGLGNAPSTIAVIEALQARRDYPSELVREHVSWALQRHGQA

SEQ ID NO: 80030 - protein, 354 aa, unidentified
  source 1..354: note = Pseudomonas kuykendallii
  REGION 1..354: note = tr|A0A1H2R2F7|A0A1H2R2F7_9PSED Epoxyqueuosine reductase OS=Pseudomonas kuykendallii OX=1007099 GN=queG; PE = 3 SV=1
MPSSPPDLVLLAQSIKDWGRELGFQQVGIAGLDLREHEAHLQRWLDAGYQGEMDYMAAHGTKRSRPDELVPGTLRVVSLRMDYLPGDTRMSQRLAEAQSAYVSRYALGRDYHKLIRKRLQQLAERIQTVIGPFGHRAFVDSAPVLEKAIAEQAGLGWIGKNTLVLNRKAGSWFFLGELFVDLPLPVDAPHASEHCGRCSACLEICPTGAFVGPYVLDARRCISYLTIELKGAIPEDLRGLIGNRVFGCDDCQIVCPWNRFARPTEQADFQPRHGLDNAELAELFRWSEEEFLSRTEGSPLRRAGYERWLRNLAVGLGNAPSTIAVIEALQARRDYPSELVREHVSWALQRHGQA

SEQ ID NO: 80031 - protein, 354 aa, unidentified; identical to SEQ ID NO: 79929
  source 1..354: note = Pseudomonas lactis
  REGION 1..354: note = tr|A0A0R3CHF6|A0A0R3CHF6_9PSED Epoxyqueuosine reductase OS=Pseudomonas lactis OX=1615674 GN=queG PE=3; SV = 1

SEQ ID NO: 80032 - protein, 354 aa, unidentified
  source 1..354: note = Pseudomonas lactis
  REGION 1..354: note = tr|I4KA21|I4KA21_9PSED Epoxyqueuosine reductase; OS = Pseudomonas lactis OX=1615674 GN=queG PE=3 SV=1
MPAITSDLPALAQSIKDWGRELGFQQVGISGLDLAEHEQHLQRWLDAGYHGEMEYMGAHGSKRSHPDELVPGTLRVVSLRMDYLPGDTHMAQLLAQPEKAYISRYALGRDYHKLIRKRVQQLADRIQAQIGPFGFRAFVDSAPVLEKAIAEQAGLGWIGKNTLVLNRKAGSYFFLSELFVDLPLPVDPPHATEHCGRCTACLDICPTNAFVGPYVLDARRCISYLTIELKSAIPEDLRPLIGNRVFGCDDCQIVCPWNRFARPTAESDFKPRHNLDNAELAELFMWDEDKFLSSTEGSPLRRAGYERWLRNLAVGLGNAPSSIPVLEALKARRDYPSELVREHVEWALEQHAAR

SEQ ID NO: 80033 - protein, 354 aa, unidentified
  source 1..354: note = Pseudomonas laurylsulfatiphila
  REGION 1..354: note = tr|A0A2S6FD26|A0A2S6FD26_9PSED Epoxyqueuosine reductase OS=Pseudomonas laurylsulfatiphila OX=2011015; GN = queG PE=3 SV=1
MPAITTDLPALAQSIKDWGRELGFQQVGISGLDLGEHEQHLEHWLAAGYHGEMDYMGAHGSKRSHPEELVPGTLRVVSLRMDYLAGDTHMAKMLAQPEKAYVSRYALGRDYHKLIRKRVQQLADKIQAEIGPFGFRAFVDSAPVLEKAIAEQAGLGWIGKNTLVLNRKAGSYFFLAELFVDLPLPVDPPHATEHCGRCSACLDICPTNAFVGPYVLDARRCISYLTIELKGAIPQDLRPLIGNRVFGCDDCQIVCPWNRFARPSGENDFKPRHNLDNAELAELFMWDEEKFLSSTEGSPLRRTGYENWLRNLAVGLGNAPSTIPVLEALKARREHPSELVREHVEWALKQHGLV

SEQ ID NO: 80034 - protein, 359 aa, unidentified
  source 1..359: note = Pseudomonas laurylsulfativorans
  REGION 1..359: note = tr|A0A2S3VHR9|A0A2S3VHR9_9PSED Epoxyqueuosine reductase OS=Pseudomonas laurylsulfativorans OX=1943631; GN = queG PE=3 SV=1
MPAITTDLPALAQSIKDWGRELGFQQVGISGLDLGEHEQHLERWLAAGYHGEMDYMGAHGSKRSHPEELVPGTLRVVSLRMDYLSGDTQMAKMLAQPEKAYVSRYALGRDYHKLIRKRVQQLADKIQAEIGPFGFRAFVDSAPVLEKAIAEQAGLGWIGKNTLVLNRKAGSYFFLAELFVDLPLPVDPPHATEHCGRCSACLDICPTNAFVGPYVLDARRCISYLTIELKGAIPEDLRPLIGNRVFGCDDCQIVCPWNRFARPSGENDFKPRHNLDNAGLAELFMWDEEKFLSSTEGSPLRRTGYENWLRNLAVGLGNAPSTIPVLEALKARREHPSELVREHVEWALRQHAERQASSL

SEQ ID NO: 80035 - protein, 354 aa, Pseudomonas libanensis
  REGION 1..354: note = tr|A0A0R2YKL7|A0A0R2YKL7_9PSED Epoxyqueuosine reductase OS=Pseudomonas libanensis OX=75588 GN=queG PE=3; SV = 1
MPAITSDLPALAQSIKDWGRELGFQQVGISGLDLAEHEQHLQRWLDAGYHGEMDYMGAHGSKRSHPDELVPGTLRVVSLRMDYLPGDTQMAQLLAKPEKAYISRYALGRDYHKLIRKRVQQLADRIQAQIGPFGFRAFVDSAPVLEKAIAEQAGLGWIGKNTLVLNRKAGSYFFLSELFVDLPLPVDPPHATEHCGRCTACLDICPTNAFVGPYVLDARRCISYLTIELKSAIPEDLRPLIGNRVFGCDDCQIVCPWNRFARPTAESDFKPRHNLDNAELAELFMWDEDKFLSSTEGSPLRRAGYERWLRNLAVGLGNAPSSIPVLEALKARRDYPSELVREHVEWALNQHAAR

SEQ ID NO: 80036 - protein, 354 aa, Pseudomonas lini
  REGION 1..354: note = tr|A0A0J6H3T8|A0A0J6H3T8_9PSED Epoxyqueuosine reductase OS=Pseudomonas lini OX=163011 GN=queG PE=3 SV=1
MPAITTDLPALAQSIKDWGRELGFQQVGISGLDLAEHEQHLERWLEAGYHGEMEYMGAHGSKRSHPEELVPGTLRVVSLRMDYLPGDTEMAKRLAEPEKAYVSRYALGRDYHKLIRKRVQQLAEKIQAVIGPFGYRAFVDSAPVLEKAIAEQAGLGWIGKNTLVLNRKAGSYFFLSELFVDLPLPVDPPHATEHCGRCTACLDICPTNAFVGPYVLDARRCISYLTIELKSAIPEDLRPLIGNRVFGCDDCQIVCPWNRFARPSGESDFKPRHNLDNAELAELFMWDEDKFLSSTEGSPLRRAGYERWLRNLAVGLGNAPSSIPVLEALKARREHPSELVREHVEWALKQHGLA

SEQ ID NO: 80037 - protein, 354 aa, Pseudomonas lini
  REGION 1..354: note = tr|A0A423IJ31|A0A423IJ31_9PSED Epoxyqueuosine reductase OS=Pseudomonas lini OX=163011 GN=queG PE=3 SV=1
MPAINTDLPALAQSIKDWGRELGFQQVGISGLDLAEHEQHLERWLEAGYHGEMEYMGAHGSKRSHPEELVPGTLRVVSLRMDYLPGDTEMAKRLAEPEKAYVSRYALGRDYHKLIRKRVQQLAEKIQAVIGPFGYRAFVDSAPVLEKAIAEQAGLGWIGKNTLVLNRKAGSYFFLSELFVDLPLPVDPPHATEHCGRCTACLDICPTNAFVGPYVLDARRCISYLTIELKSAIPEDLRPLIGNRVFGCDDCQIVCPWNRFARPSGESDFKPRHNLDNAELAELFMWDEEKFLSSTEGSPLRRAGYERWLRNLAVGLGNAPSSIPVLEALKARRDYPSELVREHVEWALKQHGLL

SEQ ID NO: 80038 - protein, 354 aa, unidentified
  source 1..354: note = Pseudomonas linyingensis
  REGION 1..354: note = tr|A0A1H6RQT1|A0A1H6RQT1_9PSED Epoxyqueuosine reductase OS=Pseudomonas linyingensis OX=915471 GN=queG; PE = 3 SV=1
MSTTAPDLVALAQSIRDWGRELGFQQVGIAGIELDEHEAYLQRWLAAGHHGEMDYMAAHGHKRSRPGELVPGTLRVISLRMDYLPGDTRMTEVLASPDKAYVSRYALGRDYHKLIRKRLQQLAERIQTAVGPFGHRAFVDSAPVLEKALAQQAGLGWIGKNTLLLNKKAGSWFFLGELYVDLPLPVDAPHTSEHCGRCQACLDICPTAAFVGPQQLDARRCISYLTIEFKGPIPEELRPLIGNRVFGCDDCQLVCPWNRFARPTAQGDFQPRHNLDNSELAALFRWSEEEFLARTEGSPLRRAGYQRWLRNLAVGLGNAPSSIAVIEALRLRRDDPSELVREHVEWALARHGVA

SEQ ID NO: 80039 - protein, 357 aa, Pseudomonas litoralis
  REGION 1..357: note = tr|A0A1H1TPJ1|A0A1H1TPJ1_9PSED Epoxyqueuosine reductase OS=Pseudomonas litoralis OX=797277 GN=queG PE=3; SV = 1
MPDTNADYALLAAQIRDIAAELGFQQLGISAPDIGAHEQRLQQWLDAGYHGEMEWMASHGSKRTQPAELVPGTQRVISVRMDYLPPDTRMARRLADRDAAYISRYALGRDYHKLIRRRLQQLAERIQTLIGPFGFRAFVDSAPVMERALATRSGLGWIGKNTMLLNRKAGSFFFLGELYTDLPLPTDDAYEQEHCGSCTACLSKCPTDAFIGPHVLDARRCISYLTIELKGAIPGELRPLMGNRVFGCDDCQLVCPWNKFAKPTAERDFSPRHQLDQADLISLFRWDEEQYLKNTEGSPLRRIGHERWLRNLAIGLGNAHTSIPVIDALNSRLDHPSELVREHVQWALARHGAAVTL

SEQ ID NO: 80040 - protein, 354 aa, Pseudomonas lundensis
  REGION 1..354: note = tr|A0A2C8F4G6|A0A2C8F4G6_9PSED Epoxyqueuosine reductase OS=Pseudomonas lundensis OX=86185 GN=yjeS PE=3; SV = 1
MPANTVDLPALAQSIKEWGRELGFQQVAIAGLDLGEHEQHLERWLAAGYHGEMDYMGAHGSKRSHPEELVPGTLRVVSLRMDYLPGDTHMAHLLAQPEKAYVSRYALGRDYHKLIRKRVQQLADRIQAQIGPFGFRAFVDSAPVLEKAIAQKAGLGWIGKNTLVLNRKAGSYFFLSELFVDLALPEDEPHKTEHCGRCTACLDICPTNAFVGPYVLDARRCISYLTIELKSAIPVELRAMIGNRVFGCDDCQIVCPWNRFARTTAEGDFKPRHNLDNAELAQLFMWDEATFLSSTEGSPLRRAGYERFLRNLAVGLGNAPSTIPVLEALKARRDYPSALVQEHVQWALDQHAAR

SEQ ID NO: 80041 - protein, 354 aa, Pseudomonas lundensis
  REGION 1..354: note = tr|A0A266NF64|A0A266NF64_9PSED Epoxyqueuosine reductase OS=Pseudomonas lundensis OX=86185 GN=queG PE=3; SV = 1
MPAITVDLPALAQSIKEWGRELGFQHVAIAGLDLEEHEQHLERWLAAGYHGEMDYMGAHGSKRSHPEELVPGTLRVVSLRMDYLPGDTHMAQLLAQPEKAYVSRYALGRDYHKLIRKRVQQLADRIQAQIGPFGFRAFVDSAPVLEKAIAQKAGLGWIGKNTLILNRKAGSYFFLSELFVDLPLPEDAPHETEHCGRCTACLDICPTNAFVGPYVLDARRCISYLTIELKSAIPVELRAMIGNRVFGCDDCQIVCPWNRFARTTAEGDFKPRHNLDNAELAQLFMWDEDTFLSSTEGSPLRRAGYERWLRNLAVGLGNAPSTIPVLEALKARRDYPSALVQEHVQWALDQHAAR

SEQ ID NO: 80042 - protein, 354 aa, Pseudomonas lurida
  REGION 1..354: note = tr|A0A2R3HQ90|A0A2R3HQ90_9PSED Epoxyqueuosine reductase OS=Pseudomonas lurida OX=244566 GN=queG PE=3 SV=1
MPAITTDLPALAQSIKDWGRELGFQQVGISGLDLAEHEQHLQRWLDAGYHGEMEYMGAHGSKRSHPDELVPGTLRVVSLRMDYLPGDTQMAQLLAKPEKAYISRYALGRDYHKLIRKRVQQLADRIQAQIGPFGFRAFVDSAPVLEKAIAEKAGLGWIGKNTLVLNRKAGSYFFLSELFVDLPLPIDAPHSTEHCGRCTACLDICPTNAFVGPYVLDARRCISYLTIELKTAIPEDLRPLIGNRVFGCDDCQIVCPWNRFARATAESDFKPRHNLDNAELAELFMWDEDTFLSSTEGSPLRRAGYERWLRNLAVGLGNAPSSIPVLEALKARRDYPSELVREHVEWALNQHATR

SEQ ID NO: 80043 - protein, 354 aa, Pseudomonas lurida
  REGION 1..354: note = tr|A0A2A9D563|A0A2A9D563_9PSED Epoxyqueuosine reductase OS=Pseudomonas lurida OX=244566 GN=queG PE=3 SV=1
MPAITTDLPALAQSIKDWGRELGFQQVGISGLDLAEHEQHLQRWLDAGYHGEMEYMGAHGSKRSHPDELVPGTLRVVSLRMDYLPGDTQMAQLLAKPEKAYISRYALGRDYHKLIRKRVQQLADRIQAQIGPFGFRAFVDSAPVLEKAIAEKAGLGWIGKNTLVLNRKAGSYFFLSELFVDLPLPIDAPHSTEHCGRCTACLDICPTNAFVGPYVLDARRCISYLTIELKTAIPEDLRPLIGNRVFGCDDCQIVCPWNRFARATAESDFKPRHNLDNAELAELFMWDEETFLSSTEGSPLRRAGYERWLRNLAVGLGNAPSSIPVLEALKARRDYPSELVREHVEWALNQHATR

SEQ ID NO: 80044 - protein, 360 aa, Pseudomonas lutea
  REGION 1..360: note = tr|A0A098SVF6|A0A098SVF6_9PSED Epoxyqueuosine reductase OS=Pseudomonas lutea OX=243924 GN=queG PE=3 SV=1
MRLTAAELTDLAQSIKEWGRELGFQQVGISGLDLAEHERHLERWLEAGYHGEMDYMAAHGSKRSHPDELVPGTLRVVSLRMDYLPGDTQMAQLLGQREKAYVSRYALGRDYHKLIRKRVQQLAERVQQAIGPFGFRAFVDSAPVLEKAIAEQAGLGWIGKNTLVLNRKAGSYFFLSELFVDLPLPVDAPHATEHCGRCTACLDVCPTNAFVGPYVLDARKCISYLTIELKTSIPEDLRSLIGNRVFGCDDCQIVCPWNRFARPTDQSDFKPRHGLDNAELTTLFLWDETTFLSNTEGSPLRRAGYERWLRNLAVGLGNAPSTIPVIEALKARLGHPSEMVREHVEWALKQHEIKAAARIV

SEQ ID NO: 80045 - protein, 354 aa, Pseudomonas luteola
  REGION 1..354: note = tr|A0A3R8WJF1|A0A3R8WJF1_PSELU Epoxyqueuosine reductase OS=Pseudomonas luteola OX=47886 GN=queG PE=3 SV=1
MSSYALDLDTLAASIKEWGRELGFQQTGITGVALGDHEAYLERWLAAGYHGEMDYMAAHGQKRSRPDELVPGTLRIVSLRMDYLPGDTDMAKRLADPAHAYISRYALGRDYHKLIRKRLQQLAERIQATIGPFGYRAFVDSAPVLEKALAEKAGLGWIGKNTLVLNRKAGSYFFLGELFTDLPLPVDEPHPSNHCGRCSACMDICPTQAFVAPYVLDARRCISYLTIEFKGSIPEELRPLIGNRVFGCDDCQIVCPWNRFAKPTAQPDFQPRHNLDSSDLVTLFRWTEDEFLSRTEGSPLRRAGYERWLRNLAVALGNAPTSIPVVEALKAHQQHPSPLVREHVEWALGRHGYA

SEQ ID NO: 80046 - protein, 354 aa, Pseudomonas luteola
  REGION 1..354: note = tr|A0A2X2C1D0|A0A2X2C1D0_PSELU Epoxyqueuosine reductase OS=Pseudomonas luteola OX=47886 GN=queG PE=3 SV=1
MSSYALDLDTLAASIKEWGRELGFQQTGITGVALGDHEAYLERWLAAGYHGEMDYMAAHGQKRSRPDELVPGTLRIVSLRMDYLPGDTDMAKRLADPAHAYISRYALGRDYHKLIRKRLQQLAERIQAAIGPFGYRAFVDSAPVLEKALAEKAGLGWIGKNTLVLNRKAGSYFFLGELFTDLPLPVDEPHPSNHCGRCSACMDICPTQAFVAPYVLDARRCISYLTIEFKGSIPEELRPLIGNRVFGCDDCQIVCPWNRFAKPTAQPDFQPRHNLDNSDLVTLFRWTEDEFLSRTEGSPLRRAGYERWLRNLAVALGNAPTSIPVVEALKVHQQHPSPLVREHVEWALGRHGYA

SEQ ID NO: 80047 - protein, 359 aa, Pseudomonas mandelii
  REGION 1..359: note = tr|A0A255XMW6|A0A255XMW6_9PSED Epoxyqueuosine reductase OS=Pseudomonas mandelii OX=75612 GN=queG PE=3; SV = 1
MPAITTDLPALAQSIKDWGRELGFQQVGISGLDLAEHEQHLQRWLDAGYHGEMDYMGAHGSKRSHPEELVPGTLRVVSLRMDYLPGDTQMAQLLAQPEKAYVSRYALGRDYHKLIRKRVQHLAEKIQAVIGPFGYRAFVDSAPVLEKAIAEQAGLGWIGKNTLVLNRKAGSYFFLSELFVDLPLPVDPPHSTEHCGRCTACLDICPTNAFVGPYVLDARRCISYLTIELKSAIPEDLRPLIGNRVFGCDDCQIVCPWNRFARPSVESDFKPRHNLDNAELAELFMWDEDRFLSSTEGSPLRRAGYERWLRNLAVGLGNAPSSIPVLEALKARRDYPSELVREHVEWALKQHAERQASSL

SEQ ID NO: 80048 - protein, 362 aa, Pseudomonas mandelii
  REGION 1..362: note = tr|A0A059L7L5|A0A059L7L5_9PSED Epoxyqueuosine reductase OS=Pseudomonas mandelii PD30 OX=1419583 GN=queG; PE = 3 SV=1
MPAITTDLPTLAQSIKDWGRELGFQQVGISGLDLAEHEQHLERWLAAGYHGEMEYMGAHGSKRSHPEELVPGTLRVISLRMDYLPGDTEMAKRLAQPEKAYVSRYALGRDYHKLIRKRVQQLADKIQAEIGPFGFRAFVDSAPVLEKAIAEQAGLGWIGKNTLVLNRKAGSYFFLSELFVDLPLPVDPPHSTEHCGRCTACLDICPTNAFVGPYVLDARRCISYLTIELKSAIPEDLRPLIGNRVFGCDDCQIVCPWNRFARPSGESDFKPRHNLDNAELAELFMWDEEKFLSSTEGSPLRRAGYERWLRNLAVGLGNAPSSIPVLEALKARREHPSELVREHVEWALKQHEQRTGTLGTRP

SEQ ID NO: 80049 - protein, 354 aa, Pseudomonas marginalis
  REGION 1..354: note = tr|A0A5C5P8X8|A0A5C5P8X8_PSEMA Epoxyqueuosine reductase OS=Pseudomonas marginalis OX=298 GN=queG PE=3; SV = 1
MPAITSDLPALAQSIKDWGRELGFQQVGISGLDLAEHEQHLQRWLDAGYHGEMDYMGAHGSKRSHPDELVPGTLRVVSLRMDYLPGDTQMAQLLAKPEKAYISRYALGRDYHKLIRKRVQQLADRIQAQIGPFGFRAFVDSAPVLEKAIAEQAGLGWIGKNTLVLNRKAGSYFFLSELFVDLPLPVDPPHATEHCGRCTACLDICPTNAFVGPYVLDARRCISYLTIELKSAIPEDLRPLIGNRVFGCDDCQIVCPWNRFARPTAESDFTPRHNLDNAELAELFMWDEDKFLSSTEGSPLRRAGYERWLRNLAVGLGNAPSSIPVLEALKARRDYPSELVREHVEWALNQHASR

SEQ ID NO: 80050 - protein, 354 aa, Pseudomonas marginalis
  REGION 1..354: note = tr|A0A3M5PSW4|A0A3M5PSW4_PSEMA Epoxyqueuosine reductase OS=Pseudomonas marginalis pv. marginalis; OX = 97473 GN=queG PE=3 SV=1
MPAITSDLPALAQSIKDWGRELGFQQVGISGLDLAEHEQHLQRWLDAGYHGEMDYMGAHGSKRSHPEELVPGTLRVVSLRMDYLPGDTQMAQLLAQPEKAYISRYALGRDYHKLIRKRVQQLADRIQAQIGPFGFRAFVDSAPVLEKAIAEKAGLGWIGKNTLVLNRKAGSYFFLSELFVDLPLPVDKPHSTEHCGRCTACLDICPTNAFVGPYVLDARRCISYLTIELKSAIPEDLRPLIGNRVFGCDDCQIVCPWNRFARATTEGDFKPRHNLDNAELAELFMWDEDTFLSSTEGSPLRRAGYERWLRNLAVGLGNAPSSIPVLEALKARRDYPSELVREHVEWALNQHATR

SEQ ID NO: 80051 - protein, 359 aa, Pseudomonas marincola; identical to SEQ ID NO: 79899
  REGION 1..359: note = tr|A0A1I7AFW6|A0A1I7AFW6_9PSED Epoxyqueuosine reductase OS=Pseudomonas marincola OX=437900 GN=queG PE=3; SV = 1

SEQ ID NO: 80052 - protein, 359 aa, Pseudomonas mediterranea
  REGION 1..359: note = tr|A0A0A4HT67|A0A0A4HT67_9PSED Epoxyqueuosine reductase OS=Pseudomonas mediterranea CFBP 5447 OX=1348058; GN = queG PE=3 SV=1
MPAIPTDLPALAQSIKDWGRELGFQQVGISGLDLGEHEQHLQRWLDAGYHGEMDYMGAHGSKRSHPDELVPGTLRVVSLRMDYLPGDTHMAQMLGQPEKAYVSRYALGRDYHKLIRKRVQQLAEKIQAVIGPFGYRAFVDSAPVLEKAIAEQAGLGWIGKNTLVLNRKAGSYFFLSELFVDLPLPVDPPQASEHCGKCTACLDICPTNAFIGPYVLDARRCISYLTIELKSAIPEELRPLIGNRVFGCDDCQIVCPWNRFARPSGENDFKPRHNLDNAGLAELFLWDEDTFLKSSEGSPLRRAGYERWLRNLAVGLGNAPSTIPVLQALEARRDHPSELVREHVEWALRQHAQRQTSSL

SEQ ID NO: 80053 - protein, 364 aa, unidentified
  source 1..364: note = Pseudomonas meliae
  REGION 1..364: note = tr|A0A0P9VWN7|A0A0P9VWN7_9PSED Epoxyqueuosine reductase OS=Pseudomonas meliae OX=86176 GN=queG PE=3 SV=1
MSAITAVLPTSDDLAALAVSIKAWGRELGFQEVGISGLDLAEHEQHLQRWLDAGYHGEMDYMAAHGSKRSHPDELVPGTLRVVSLRMDYLPGDTEMAQRLTEPEKAYVSRYALGRDYHKLIRKRLQQLAERIQQAIGPFGFRAFVDSAPVLEKAIAEQAGLGWIGKNTLVLNRKAGSFFFLGELFVDIPLPVDAPHATEHCGRCTACLDICPTAAFVGPYVLDARRCISYLTIELKTAIPEELRPLIGNRVFGCDDCQIVCPWNRFARPTDQSDFQPRHNLDNAGLAELFLWDEDKFLSSTEGSPLRRAGYERWLRNLAVGLGNAPSTIPVIEALHARRDYPSELVREHVEWALQRHGVADAEG

SEQ ID NO: 80054 - protein, 354 aa, Pseudomonas mendocina
  REGION 1..354: note = tr|A0A2R3QL58|A0A2R3QL58_PSEME Epoxyqueuosine reductase OS=Pseudomonas mendocina OX=300 GN=queG PE=3 SV=1
MSDHALDLNALALSIKDWGRELGFQQVGIADVELGEHEAHLKRWLAAGYQGEMDYMAAHGDKRSRPQELVPGTLRVVSLRMDYLPGDTQMAQRLREPEQAYVSRYALGRDYHKLIRKRLQQLAERIQQQIGPFGYRAFVDSAPVLEKAIAEQAGLGWIGKNTLVLNRKAGSYFFLGELFVDLPLPVDAPHGSEHCGRCSACMDICPTAAFVGPYVLDARRCISYLTIELKGSIPEELRAPIGNRVFGCDDCQIVCPWNRFARPTEQGDFQPRHGLDNSGLAELFLWTEEEFLSRTEGSPLRRAGYERWLRNLAVGLGNAPSTIPVLEALRARREHPSALVREHVEWALDRHGAP

SEQ ID NO: 80055 - protein, 357 aa, Pseudomonas mendocina
  REGION 1..357: note = tr|A4XPY1|A4XPY1_PSEMY Epoxyqueuosine reductase; OS = Pseudomonas mendocina (strain ymp) OX=399739 GN=queG; PE = 3 SV=1
MSDHRLDLNALAQSIKDWGRELGFQQVGIADVTLGEHEAHLQRWLAAGYQGEMDYMAAHGSKRSHPDELVPGTLRVVSLRMDYLPGDTQMAKRLAEPEKAYVSRYALGRDYHKLIRKRLQQLAERVQQQIGPFGYRAFVDSAPVLEKAIAEKAGLGWIGKNTLVLNRKAGSYFFLGELFVDLPLPVDAAHGSEHCGRCTACMDICPTAAFVAPYVLDARRCISYLTIELKGSIPEELRAPIGNRVFGCDDCQIVCPWNRFARPTEQGDFQPRHGLDNTELAALFLWTEEEFLSRTEGSPLRRAGYERWLRNLAVGLGNAPSTIAVLEALKARREHPSELVREHVEWALGRHQQCGST

SEQ ID NO: 80056 - protein, 411 aa, unidentified
  source 1..411: note = [Pseudomonas] mesoacidophila
  REGION 1..411: note = tr|A0A2A4FDI9|A0A2A4FDI9_9BURK Epoxyqueuosine reductase OS=[Pseudomonas] mesoacidophila OX=265293; GN = queG PE=3 SV=1
MNRLPELAASETRSTQAERAAPCVLDDAALTALAARIRAWGRELGFGAIGISDTDLSEAEAGLAAWLEAGCHGEMDYMAKHGMKRARPAELVAGTRRVISARLAYLPAQTLAGDAPDDAHGARAPRDWRAREQARLDDPQAAVVSIYARGRDYHKVLRNRLQTLAERIEREIGAFGYRVFTDSAPVLEVELAQKAGVGWRGKHTLLLQRDAGSLFFLGEIYVDIPLPTDAQTAPDAAPETPGAHCGSCTRCIDACPTGAIVEPYRVDARRCISYLTIELKGSIPEPMRPLIGNRVYGCDDCQLVCPWNKFAQAAPVADFDVRHGLDRATLVELFGWSADEFDARMQGSAIRRIGHECWLRNLAVGLGNALRAPRERLAPAARDAIVAALRARADDPSPLVREHVEWALRAA

SEQ ID NO: 80057 - protein, 354 aa, Pseudomonas migulae
  REGION 1..354: note = tr|A0A1H5A1T0|A0A1H5A1T0_9PSED Epoxyqueuosine reductase OS=Pseudomonas migulae OX=78543 GN=queG PE=3 SV=1
MPAITTDLPALAQSIKDWGRELGFQQVGISGLDLAEHEQHLERWLAAGYHGEMDYMGAHGSKRSHPEELVPGTLRVVSLRMDYLPGDTEMAKRLAQPEKAYVSRYALGRDYHKLIRKRVQQLADKIQAEIGPFGFRAFVDSAPVLEKAIAEQAGLGWIGKNTLVLNRKAGSYFFLSELFVDLPLPVDPPHSTEHCGRCTACLDICPTNAFVGPYVLDARRCISYLTIELKSAIPEDLRPLIGNRVFGCDDCQIVCPWNRFARPSGESDFKPRHNLDNAELAELFMWDEDKFLSSTEGSPLRRAGYERWLRNLAVGLGNAPSSIPVLEALKARREYPSELVREHVEWALKRHGLA

SEQ ID NO: 80058 - protein, 356 aa, Pseudomonas mohnii
  REGION 1..356: note = tr|A0A1H4TBF1|A0A1H4TBF1_9PSED Epoxyqueuosine reductase OS=Pseudomonas mohnii OX=395600 GN=queG PE=3 SV=1
MPAITPDLPTLAQSIKDWGRELGFQQVGISGLDLGEHEQHLERWLDAGYHGEMDYMGAHGSKRSHPEELVPGTLRVVSLRMDYLAGDTQMAQMLAQPEKAYVSRYALGRDYHKLIRKRVQQLAEKIQAEIGPFGYRAFVDSAPVLEKAIAEQAGLGWIGKNTLVLNRKAGSYFFLAELFVDLPLPVDPPHATEHCGRCSACLDICPTNAFVGPYVLDARRCISYLTIELKGAIPEDLRPLIGNRVFGCDDCQIVCPWNRFARPSGESDFKPRHNLDNAELANLFMWDEDKFLNSTEGSPLRRTGYENWLRNLAVGLGNAPSTIPVLEALKARREYPSELVREHVEWALRQHSARQA

SEQ ID NO: 80059 - protein, 354 aa, Pseudomonas monteilii
  REGION 1..354: note = tr|A0A3G2HN75|A0A3G2HN75_9PSED Epoxyqueuosine reductase OS=Pseudomonas monteilii OX=76759 GN=queG PE=3; SV = 1
MSVCTPDLAQLAQSIKIWGQELGFAHVGIAGVDLGEHEHHLQRWLDAGYQGEMEYLGAHGSKRSHPDQLIPGTVRVVSLRMDYLSGDTQMAQRLAQPEKAYISRYALGRDYHKLVRKRVQFLADRIQEAIGPFGYRAFVDSAPVLEKALAEQAGLGWIGKNTLLLNRKAGSYFFLAELFVDLPIPVDEATTSEHCGRCQACLDICPTQAFVGPYVLDARRCISYLTIELRGAIPVELRAKMGNRVFGCDDCQIVCPWNRFAKHSQEQDFQPRHGLENAELAEMFLWDERTFLRKTEGGPLRRAGYERFLRNLAVGLGNAPSTIPVIEALKARRDDESELVREHVEWALARHGIQ

SEQ ID NO: 80060 - protein, 354 aa, Pseudomonas monteilii
  REGION 1..354: note = tr|V9V5H5|V9V5H5_9PSED Epoxyqueuosine reductase; OS = Pseudomonas monteilii SB3101 OX=1435058 GN=queG PE=3; SV = 1
MSVCTPDLAQLAQSIKIWGQELGFAHVGIAGVDLGEHEHHLQRWLDAGYQGEMDYLDAHGSKRAHPEQLIPGTVRVVSLRMDYLPGDTQMAQRLAQPEKAYVSRYALGRDYHKLVRKRVQFLADRIQEAIGPFGYRAFVDSAPVLEKALAEQAGLGWIGKNTLLLNRKAGSYFFLAELFVDLPLPVDEATTSEHCGRCQACLDICPTQAFVGPYVLDARRCISYLTIELRGPIPVELRSKMGNRVFGCDDCQIVCPWNRFARHSQEQDFQPRHGLENAELAEMFLWDERTFLRKTEGGPLRRAGYERWLRNLAVGLGNAPSTIPVIEALKARREDASELVREHVEWALAQHGIS

SEQ ID NO: 80061 - protein, 354 aa, Pseudomonas moorei
  REGION 1..354: note = tr|A0A1H1J8R5|A0A1H1J8R5_9PSED Epoxyqueuosine reductase OS=Pseudomonas moorei OX=395599 GN=queG PE=3 SV=1
MPAITTDLPALAQSIKDWGRELGFQQVGISGLDLGEHEQHLERWLEAGYHGEMDYMGAHGSKRSHPEELVPGTLRVVSLRMDYLAGDTQMAQMLAQPEKAYVSRYALGRDYHKLIRKRVQQLAERIQAEIGPFGFRAFVDSAPVLEKAIAEQAGLGWIGKNTLVLNRKAGSYFFLAELFVDLPLPVDPPHATEHCGRCSACLDICPTNAFVGPYVLDARRCISYLTIELKGAIPEDLRPLIGNRVFGCDDCQIVCPWNRFARPSGESDFKPRHNLDNAQLADLFMWDEDKFLSSTEGSPLRRTGYENWLRNLAVGLGNAPSTIPVLEALKARRDHPSELVREHVEWALKQHGLL

SEQ ID NO: 80062 - protein, 356 aa, Pseudomonas moorei
  REGION 1..356: note = tr|A0A4Q7HAC9|A0A4Q7HAC9_9PSED Epoxyqueuosine reductase OS=Pseudomonas moorei OX=395599 GN=queG PE=3 SV=1
MPAITPDLPTLAQSIKDWGRELGFQQVGISGLDLGEHEQHLERWLDAGYHGEMDYMGAHGSKRSHPEELVPGTLRVVSLRMDYLAGDTQMAQMLAQPEKAYVSRYALGRDYHKLIRKRVQQLAEKIQAEIGPFGYRAFVDSAPVLEKAIAEQAGLGWIGKNTLVLNRKAGSYFFLAELFVDLPLPVDPPHATEHCGRCSACLDICPTNAFVGPYVLDARRCISYLTIELKGAIPEDLRPLIGNRVFGCDDCQIVCPWNRFARPSDESDFKPRHSLDNAELAELFMWDEDKFLSNTEGSPLRRAGYQSWLRNLAVGLGNAPSTIPVLEALKARREYPSELVREHVEWALKQHTDRLE

SEQ ID NO: 80063 - protein, 366 aa, Pseudomonas moraviensis
  REGION 1..366: note = tr|A0A1Q3IA82|A0A1Q3IA82_9PSED Epoxyqueuosine reductase OS=Pseudomonas moraviensis OX=321662 GN=queG; PE = 3 SV=1
MSAITTDLPALAQSIKDWGRELGFQQVGISGLDLAEHEQHLQRWLDAGYHGEMDYMGAHGSKRSHPDELVPGTLRVVSLRMDYLPGDTEMAKRLAEPEKAYVSRYALGRDYHKLIRKRVQQLADRIQAEIGPFGFRAFVDSAPVLEKAIAEQAGLGWIGKNTLVLNRKAGSYFFLSELFVDLPLPVDEPHSSEHCGRCTACLDICPTNAFVGPYVLDARRCISYLTIELKTAIPEELRPLIGNRVFGCDDCQIVCPWNRFARPTGENDFKPRHNLDNAQLAELFLWDEEKFLSSTEGSPLRRAGYERWLRNLAVGLGNAPSTIPVLEALKARRDYPSELVREHVEWALERHARRELAKPASAMFKS

SEQ ID NO: 80064 - protein, 366 aa, Pseudomonas moraviensis
  REGION 1..366: note = tr|V8REB6|V8REB6_9PSED Epoxyqueuosine reductase; OS = Pseudomonas moraviensis R28-S OX=1395516 GN=queG PE=3; SV = 1
MSAITTDLPALAQSIKDWGRELGFQQVGISGLDLAEHEQHLQRWLEAGYHGEMDYMGAHGSKRSHPDELVPGTLRVVSLRMDYLPGDTEMAKRLAEPEKAYVSRYALGRDYHKLIRKRVQQLADRIQAEIGPFGFRAFVDSAPVLEKAIAEQAGLGWIGKNTLVLNRKAGSYFFLSELFVDLPLPVDDPHSTEHCGRCTACLDICPTNAFVGPYVLDARRCISYLTIELKTAIPEELRALIGNRVFGCDDCQIVCPWNRFARPTGESDFKPRHNLDNAELAELFMWDEEKFLSSTEGSPLRRAGYERWLRNLAVGLGNAPSSIPVLEALKARRDYPSELVREHVEWALEQHAHRALAEPATALFKS

SEQ ID NO: 80065 - protein, 354 aa, Pseudomonas mosselii
  REGION 1..354: note = tr|A0A1X1NV64|A0A1X1NV64_9PSED Epoxyqueuosine reductase OS=Pseudomonas mosselii OX=78327 GN=queG PE=3; SV = 1
MSANLPDIATLAQSIKDWGRELGFAHVGIAGVDLGEHEQHLQRWLAAGYNGEMEYMGDHGHKRSRPAELIPGTLRVISLRMDYLPGDTQMAKRLAEPEKAYISRYALGRDYHKLVRKRVQHFADRIQEAIGPFGYRAFVDSAPVLEKALAQEAGLGWIGKNTLLLNRKAGSYFFLAELFVDLPLPIDGVQGSDHCGRCQACLDICPTQAFVGPYQLDARRCISYLTIELRGAIPLELRPLIGNRVFGCDDCQIVCPWNRFAKTSTEDDFMPRRGLDNIELAELFLWDEKRFLGCTEGSPLRRAGYERFLRNLAVGLGNAPSTIPVLEALNARRDDPSELVREHVEWALARHDAL

SEQ ID NO: 80066 - protein, 354 aa, Pseudomonas mosselii
  REGION 1..354: note = tr|A0A290H0E7|A0A290H0E7_9PSED Epoxyqueuosine reductase OS=Pseudomonas mosselii OX=78327 GN=queG PE=3; SV = 1
MSANLPDIATLAQSIKDWGRELGFAHVGIAGVDLGEHEQHLQRWLAAGYNGEMEYMGDHGHKRSRPAELIPGTLRVISLRMDYLPGDTQMAKRLAEPEKAYISRYALGRDYHKLVRKRVQHFADRIQEAIGPFGYRAFVDSAPVLEKALAQEAGLGWIGKNTLLLNRKAGSYFFLAELFVDLPLPIDGVQGSDHCGRCQACLDICPTQAFVGAYQLDARRCISYLTIELRGAIPLELRPLIGNRVFGCDDCQIVCPWNRFAKTTTEDDFMPRRGLDNIELAELFLWDEKRFLGCTEGSPLRRAGYERFLRNLAVGLGNAPSTIPVLEALNARRDDPSELVREHVEWALARHDAL

SEQ ID NO: 80067 - protein, 359 aa, Pseudomonas mucidolens
  REGION 1..359: note = tr|A0A1H2NLS7|A0A1H2NLS7_9PSED Epoxyqueuosine reductase OS=Pseudomonas mucidolens OX=46679 GN=queG PE=3; SV = 1
MPAITTDLPALAQSIKDWGRELGFQQVGISGLDLAEHEQHLQRWLDAGYHGQMDYMGAHGSKRSHPEELVPGTLRVVSLRMDYLPGDTHMAHLLAQPEKAYISRYALGRDYHKLIRKRVQQLAERIQAHIGPFGFRAFVDSAPVLEKAIAEQAGLGWIGKNTLVLNRKAGSYFFLSELFVDLPLPVDPPHTSEHCGRCTACLDICPTNAFVGAYVLDARRCISYLTIELKSAIPEDLRPLIGNRVFGCDDCQIVCPWNRFARPSGEGDFQPRHNLDNAGLAELFMWDEDKFLSSTEGSPLRRAGYERWLRNLAVGLGNAPSSIVVLEALKARRDYPSELVREHVEWALKQHAERQCSSL

SEQ ID NO: 80068 - protein, 354 aa, unidentified
  source 1..354: note = Pseudomonas nabeulensis
  REGION 1..354: note = tr|A0A4Z0B6U9|A0A4Z0B6U9_9PSED Epoxyqueuosine reductase OS=Pseudomonas nabeulensis OX=2293833 GN=queG; PE = 3 SV=1
MSAITSDLPALAQSIKDWGRELGFQQVGISGLDLGEHEQHLQRWLDAGYHGEMEYMGAHGSKRSHPDELVPGTLRVVSLRMDYLPGDTQMAQLLAKPEKAYISRYALGRDYHKLIRKRVQQLADRIQAQIGPFGFRAFVDSAPVLEKAIAEKAGLGWIGKNTLVLNRKAGSYFFLSELFVDLPLPVDDPHSTEHCGRCTACLDICPTNAFVGPYVLDARRCISYLTIELKNAIPEDLRPLIGNRVFGCDDCQIVCPWNRFARSTGESDFKPRHNLDNAELAELFMWDEDKFLSSTEGSPLRRAGYERWLRNLAVGLGNAPSSIPVLEALKARRDYPSELVREHVEWALNQHATR

SEQ ID NO: 80069 - protein, 378 aa, Pseudomonas nitroreducens
  REGION 1..378: note = tr|A0A239LUU5|A0A239LUU5_9PSED Epoxyqueuosine reductase OS=Pseudomonas nitroreducens OX=46680 GN=queG; PE = 3 SV=1
MAYGRADAGQVWQNYTHPDFGFPPSMHDSTLDYADLARSIKDWGRELGFQQVGISGLDLEEHGTHLQRWLDAGYHGEMDYMGAHGSKRWRPDELVPGTLRVVSLRMDYLPGDTRMAQVLGDPERAYVSRYALGRDYHKLIRKRLQQLAERIQQQVGPFGFRAFVDSAPVLEKAIAEQSGLGWVGKNTLVLNRKAGSYFFLGELFTDLPLPVDEPHGTEHCGRCSACMDICPTAAFVAPYVLDARRCISYLTIELKGPIPEDLRPLIGNRVFGCDDCQMVCPWNRFARATDLGDFQPRHSLDNAALAELFLWTEEEFLSRTEGSPLRRAGYERWLRNLAVGLGNAPSTIPVIEALRARQEFPSELVREHVAWALGRHCA

SEQ ID NO: 80070 - protein, 353 aa, Pseudomonas nitroreducens
  REGION 1..353: note = tr|A0A246FFJ5|A0A246FFJ5_9PSED Epoxyqueuosine reductase OS=Pseudomonas nitroreducens OX=46680 GN=queG; PE = 3 SV=1
MHDSTLDYADLALSIKEWGRELGFQQVGISGLDLEAHGEHLQRWLEAGYHGEMDYMGAHGSKRWRPDELVPGTLRVVSLRMDYLPGDTRMAQVLADPQKAYISRYALGRDYHKLIRKRLQQLAERIQQQIGPFGFRAFVDSAPVLEKAIAEQSGLGWIGKNTLVLNRKAGSYFFLGELFTDLPLPVDEPHGTEHCGRCSACMDICPTAAFVAPYVLDARRCISYLTIELKGSIPEELRPLIGNRVFGCDDCQMVCPWNRFARATDQGDFQPRHSLDNAALAELFLWTEEEFLSRTEGSPLRRAGYERWLRNLAVGLGNAPSTIPVIEALRARREFPSELVREHVTWALHRHGA

SEQ ID NO: 80071 - protein, 353 aa, unidentified
  source 1..353: note = Pseudomonas oceani
  REGION 1..353: note = tr|A0A2P4EXV7|A0A2P4EXV7_9PSED Epoxyqueuosine reductase OS=Pseudomonas oceani OX=1708783 GN=queG PE=3; SV = 1
MPDTANYQAIADQIRALAGELGFQQLGIAAPDIGDHEEWLQRWLAAGYHGEMEWMASHGTKRTRPAELVPGTQRVISVRMDYLPADSAMTKRLANRDSAYISRYALGRDYHKLIRRRLQQLADRIQNLIGPFGYRAFVDSAPVMERALATRSGLGWIGKNTMLINRKAGSYFFLGELYTDLPLPLDKPQQTEHCGKCTACLERCPTDAFVGPHLLDARRCISYLTIELKGAIPEQLRPLMGNRVFGCDDCQLVCPWNRFAKATTESDFSPRHQLDQADLVELFSWDEDTFLQRTEGSPIRRIGHERWLRNLAVGLGNATTSIPVIETLKRRRNDPSELVREHVAWALRQHGVA

SEQ ID NO: 80072 - protein, 376 aa, Pseudomonas oleovorans
  REGION 1..376: note = tr|A0A379JTM2|A0A379JTM2_PSEOL Epoxyqueuosine reductase OS=Pseudomonas oleovorans OX=301 GN=queG PE=3; SV = 1
MHGSLTTDVWQNYTYVHRLRPPMSDQTLDLNALALSIKDWGRELGFQQVGITDVELGEHEAHLQRWLAAGYQGEMDYMAAHGSKRSHPDELVPGTLRVVSLRMDYLPGDTQMAQRLNEPEQAYVSRYALGRDYHKLIRKRLQQLAERIQQQIGPFGYRAFVDSAPVLEKAIAEKAGLGWIGKNTLVLNRKAGSYFFLGELFVDLPLPVDAPHSSEHCGRCSACMDICPTAAFAGPYVLDARRCISYLTIELKGSIPEELRAPIGNRVFGCDDCQIVCPWNRFARPTEQGDFQPRHGLDNSGLAELFMWTEEEFLSRTEGSPLRRAGYERWLRNLAVGLGNAPSTIPVLQALQARREHPSALVREHVAWALERHGAL

SEQ ID NO: 80073 - protein, 354 aa, Pseudomonas oleovorans
  REGION 1..354: note = tr|A0A397NGC1|A0A397NGC1_PSEOL Epoxyqueuosine reductase OS=Pseudomonas oleovorans OX=301 GN=queG PE=3; SV = 1
MSDHALDLNALALSIKDWGRELGFQQVGIADVELGEHETHLKRWLAAGYQGEMDYMAAHGDKRSRPQELVPGTLRVVSLRMDYLPGDTQMAQRLREPEQAYVSRYALGRDYHKLIRKRLQQLAERIQQQIGSFGYRAFVDSAPVLEKAIAEQAGLGWIGKNTLVLNRKAGSYFFLGELFVDLPLPVDAAHGTEHCGRCSACMDICPTAAFVGPYVLDARRCISYLTIELKGPIPEELRAPIGNRVFGCDDCQIVCPWNRFARPTEQGDFQPRHGLDNSGLAELFLWTEEEFLSRTEGSPLRRAGYERWLRNLAVGLGNAPSTIPVVEALQARREHPSALVREHVEWALDRHGAL

SEQ ID NO: 80074 - protein, 354 aa, Pseudomonas orientalis
  REGION 1..354: note = tr|A0A3G7X9A7|A0A3G7X9A7_9PSED Epoxyqueuosine reductase OS=Pseudomonas orientalis OX=76758 GN=queG PE=3; SV = 1
MPAITSDLPALAQSIKDWGRELGFQQVGISGLDLAEHEQHLQRWLDAGYHGEMDYMGAHGSKRSHPDELVPGTLRVVSLRMDYLPGDTQMAQLLAQPEKAYISRYALGRDYHKLIRKRVQQLADRIQAQIGPFGFRAFVDSAPVLEKAIAEQAGLGWIGKNTLVLNRKAGSYFFLSELFVDLPLPVDPPHATEHCGRCTACLDICPTNAFVGPYVLDARRCISYLTIELKSAIPEDLRPLIGNRVFGCDDCQIVCPWNRFARPTTENDFKPRHNLDNAELAELFMWDEDKFLSSTEGSPLRRAGYERWLRNLAVGLGNAPSSIPVLEALKARRDYPSELVREHVEWALMQHAAR

SEQ ID NO: 80075 - protein, 354 aa, Pseudomonas orientalis
  REGION 1..354: note = tr|A0A0R2ZV55|A0A0R2ZV55_9PSED Epoxyqueuosine reductase OS=Pseudomonas orientalis OX=76758 GN=queG PE=3; SV = 1
MPAITSDLPALAQSIKDWGRELGFQQVGISGLDLAEHEQHLQRWLDAGYHGEMDYMGAHGSKRSHPDELVPGTLRVVSLRMDYLPGDTQMAQLLAQPEKAYISRYALGRDYHKLIRKRVQQLADRIQAQIGPFGFRAFVDSAPVLEKAIAKQAGLGWIGKNTLVLNRKAGSYFFLSELFVDLPLPVDPPHTTEHCGRCTACLDICPTNAFVGPYMLDARRCISYLTIELKSAIPEDLRPLIGNRVFGCDDCQIVCPWNRFARPTTESDFKPRHNLDNAELAELFMWDEDKFLSSTEGSPLRRAGYERWLRNLAVGLGNAPSSIPVVEALKARRDYPSELVREHVEWALKQHAAR

SEQ ID NO: 80076 - protein, 354 aa, unidentified
  source 1..354: note = Pseudomonas oryzae
  REGION 1..354: note = tr|A0A1H1Z816|A0A1H1Z816_9PSED Epoxyqueuosine reductase OS=Pseudomonas oryzae OX=1392877 GN=queG PE=3; SV = 1
MSTSTPDLAALAQAIKTWGRELGFQQVGIADVELSAHEAHLARWLAVGYQGEMDYMAAHGHKRSRPAELVPGTLRVVSLRMDYLPGDTRMAETLAASEKAYVSRYALGRDYHKLVRKRLQQLAERIQAAIGPFGYRAFVDSAPVLEKALAQQAGLGWIGKNTLLLNKSAGSWFFLGELFVDLPLPVDAPHEREHCGRCQACLDICPTAAFVGPQLLDARRCISYLTIELKGSIPEELRAPIGNRVFGCDDCQLVCPWNRFARPTGEGDFQPRHGLDNAELATLFRWSEEEFLSRTEGSPLRRAGYERWLRNLAVGLGNAPSSIPVLEALRLRRTHPSALVREHVEWALARHGAA

SEQ ID NO: 80077 - protein, 354 aa, Pseudomonas oryzihabitans
  REGION 1..354: note = tr|A0A178LI92|A0A178LI92_9PSED Epoxyqueuosine reductase OS=Pseudomonas oryzihabitans OX=47885 GN=queG; PE = 3 SV=1
MSAVALDLAALADLIKTWGRELGFQQTGIAGLDLARHEEHLERWLAAGFHGEMDYMAAHGSKRSRPAELVPGTLRVVSLRMDYLPGDTRMSERLADGNAAYISRYALGRDYHKLIRKRLQQLAERIQGEIGPFGYRAFVDSAPVLEKAIAEQAGLGWIGKNTLVLNRMAGSWFFLGELFVDVPLPVDEPTPRDHCGTCHACLDICPTQAFVGPYQLDARRCISYLTIEFKGSIPLELRPLIGNRVFGCDDCQLVCPWNRFAKPTAEGDFQPRHSLDSASLAELFRWTEAEFLSRTEGSPLRRAGYERWLRNLAVGLGNAPTSIPVLEALKLQREHPSPLVREHVEWALQRHGEA

SEQ ID NO: 80078 - protein, 354 aa, Pseudomonas oryzihabitans
  REGION 1..354: note = tr|A0A0U4P5S3|A0A0U4P5S3_9PSED Epoxyqueuosine reductase OS=Pseudomonas oryzihabitans OX=47885 GN=queG; PE = 3 SV=1
MSAVALDLAALADLIKAWGRELGFQQTGIAGLDLARHEEYLERWLAAGFHGEMDYMAAHGSKRSRPAELVPGTLRVVSLRMDYLPGDTRMSERLADGTAAYISRYALGRDYHKLIRKRLQQLAERIQGEIGPFGYRAFVDSAPVLEKAIAEQAGLGWIGKNTLVLNRKAGSWFFLGELFVDVPLPVDEPTPRDHCGTCHACLDICPTQAFVGPYQLDARRCISYLTIEFKGSIPLELRPLIGNRVFGCDDCQLVCPWNRFAKPTAEGDFKPRHSLDSASLAELFRWTEAEFLSRTEGSPLRRAGYERWLRNLAVGLGNAPTSIPVLEALKLQREHPSPLVREHVEWALQRHGEA

SEQ ID NO: 80079 - protein, 356 aa, Pseudomonas otitidis
  REGION 1..356: note = tr|A0A1I0UBV3|A0A1I0UBV3_9PSED Epoxyqueuosine reductase OS=Pseudomonas otitidis OX=319939 GN=queG PE=3; SV = 1
MPLSPQQLDELADAIKTWGRELGFQQVGISDVDLGEHEAHLQRWLEAGHHGEMDYMAAHGSKRSHPDELVPGTLRVVSLRMDYLPGDTRMTQVLAEPEKAYVSRYALGRDYHKLIRKRLQQLADRIQAAIGPFGHRAFVDSAPVLEKAIAEQAGLGWIGKNTLVLNRKAGSYFFLGELFVDLPLPVDAPHGSEHCGRCTACMDICPTAAFVAPYQLDARRCISYLTIELKGSIPEALRPLIGNRVFGCDDCQIVCPWNRFARPSDQGDFQPRHNLDNTELASLFAWTEEEFLSRTEGSPLRRAGYERWLRNLAVGLGNAPSTVPVLEALRARRDHPSELVREHVRWALARHGASEA

SEQ ID NO: 80080 - protein, 355 aa, Pseudomonas pachastrellae
  REGION 1..355: note = tr|A0A1S8DD64|A0A1S8DD64_9PSED Epoxyqueuosine reductase OS=Pseudomonas pachastrellae OX=254161 GN=queG; PE = 3 SV=1
MTPQTPDYQQLAEQIRQLARELGFQQLGIGAAELGEHEEHLQRWLDAGHHGEMEWMASHGSKRTRPDELVPGTRRVLSVRMDYLPTETEMAKRLANPNAAYISRYALGRDYHKLIRRRLQQLAERIETLIGPFGYRAFVDSAPVMERALATRSGLGWIGKNTMLINRKAGSYFFLGELYTDLPLPIDAPQQTEHCGKCTACLTACPTDAFVGSHVLDARRCISYLTIELKGAIPEDLRKPMGNRVFGCDDCQLVCPWNRFAKATQETDFTPRHNLDQASLVELFRWDEATFLKRTEGLPVRRIGHERWLRNLAVGLGNATSSINVIEALKQRQTHPSALVREHVDWALAQHSINT

SEQ ID NO: 80081 - protein, 360 aa, Pseudomonas palleroniana
  REGION 1..360: note = tr|A0A1H5JHG5|A0A1H5JHG5_9PSED Epoxyqueuosine reductase OS=Pseudomonas palleroniana OX=191390 GN=queG; PE = 3 SV=1
MPAITSDLPALAQSIKDWGRELGFQQVGISGLDLAEHEQHLQRWLAAGYHGEMEYMGAHGSKRSHPDELVPGTLRVVSLRMDYLPGDTQMAQLLAQPEKAYISRYALGRDYHKLIRKRVQQLAERIQAQIGPFGFRAFVDSAPVLEKAIAEQAGLGWIGKNTLVLNRKAGSYFFLSELFVDLPLPVDAPHDTEHCGRCTACLDICPTNAFVGPYVLDARRCISYLTIELKSAIPEDLRPLIGNRVFGCDDCQIVCPWNRFARPTAEGDFKPRHNLDNAELAELFMWDEDKFLSSTEGSPLRRAGYERWLRNLAVGLGNAPSSIPVLEALKARRDYPSELVREHVEWALNQHAGRQCTSSL

SEQ ID NO: 80082 - protein, 355 aa, Pseudomonas panacis
  REGION 1..355: note = tr|A0A1H4M4Q2|A0A1H4M4Q2_PSEPA Epoxyqueuosine reductase OS=Pseudomonas panacis OX=307251 GN=queG PE=3; SV = 1
MPAITSDLPALAQSIKDWGRELGFQQVGISGLDLAEHEQHLQRWLDAGYHGEMEYMGAHGSKRSHPDELVPGTLRVVSLRMDYLPGDTHMAQRLAQPEKAYISRYALGRDYHKLIRKRVQQLAERIQAQIGPFGFRAFVDSAPVLEKAIAEKAGLGWIGKNTLVLNRKAGSYFFLSELFVDLPLPVDPPHATEHCGRCTACLDICPTNAFVGPYVLDARRCISYLTIELKSAIPEDLRPLIGNRVFGCDDCQIVCPWNRFARTTAESDFKPRHNLDNAQLAELFMWDEEKFLSSTEGSPLRRAGYERWLRNLAVGLGNAPSSIPVLEALKARRDYPSELVREHVEWALKQHAERQ

SEQ ID NO: 80083 - protein, 354 aa, Pseudomonas panipatensis
  REGION 1..354: note = tr|A0A1G8H7F3|A0A1G8H7F3_9PSED Epoxyqueuosine reductase OS=Pseudomonas panipatensis OX=428992 GN=queG; PE = 3 SV=1
MHDSSPDYSDIAQRIKTWGRELGFQQVGISGLDLERHGEHLQRWLAAGYQGEMDYMGAHGSKRWRPDELVPGTLRVISLRMDYLPGDTRMAQVLGAPSKAYVSRYALGRDYHKLIRKRLQQLAERIQQAVGPFGYRAFVDSAPVLEKAIGEQAGLGWIGKNTLLLNRKAGSYFFLGELYTDLPLPLDEAHGSEHCGRCSACLDICPTAAFVAPYVLDARRCISYLTIELKGPIPEALRAPIGNRVFGCDDCQMVCPWNRFARPTEQGDFQPRHGLDNAELAELFLWSEEEFLSRTEGSPLRRAGYERWLRNLAVGLGNAPSSIPVIEALKARRGCASELVREHVEWALRRHGID

SEQ ID NO: 80084 - protein, 354 aa, Pseudomonas parafulva
  REGION 1..354: note = tr|A0A497UB73|A0A497UB73_9PSED Epoxyqueuosine reductase OS=Pseudomonas parafulva OX=157782 GN=queG PE=3; SV = 1
MSAITTDLPALAQSIKDWGRELGFQQVGISGLDLAEHEQHLQRWLAAGYHGEMDYMGAHGSKRSHPEELVPGTLRVVSLRMDYLPGDTQMVQMLAQPEKAYISRYALGRDYHKLIRKRVQQLADKIQSQIGPFGFRAFVDSAPVLEKAIAEQAGLGWIGKNTLVLNRKAGSYFFLSELFVDLPLPVDEPHSSEHCGRCTACLDICPTNAFVGPYVLDARRCISYLTIELKNAIPEDLRPLIGNRVFGCDDCQIVCPWNRFARPSGESDFKPRHNLDNAELAELFMWDEDKFLSSTEGSPLRRAGYERWLRNLAVGLGNAPSSIPVLEALKARRDYPSDLVREHVEWALKQHGQL

SEQ ID NO: 80085 - protein, 356 aa, Pseudomonas parafulva
  REGION 1..356: note = tr|A0A0A7JSD7|A0A0A7JSD7_9PSED Epoxyqueuosine reductase OS=Pseudomonas parafulva OX=157782 GN=queG PE=3; SV = 1
MSASLPDLPLLAQSIKDWGHALGFAHVGIADVELGEHEQHLQRWLDAGHHGEMDYMAAHGTKRSRPAELIPGTLRVVSLRMDYLPGDTRMAQRLAQPEKAYVSRYALGRDYHKLVRKRVQHLADRIQEAIGPFGYRAFVDSAPVLEKAIAQQAGLGWIGKNTLLLNRKAGSYFFLAELFVDLPLPADEAQTSEHCGRCQACLDLCPTSAFVGPYQLDARRCISYLTIELRDAIPVELRPLIGNRVFGCDDCQIVCPWNRFAKSTGEDDFKPRHGLDNAELAALFLWDEKTFLSRTEGSPLRRAGYERWLRNLAVGLGNAPSTIAVIEALKARREHPSALVREHVQWALARHQVALE

SEQ ID NO: 80086 - protein, 354 aa, unidentified
  source 1..354: note = Pseudomonas paralactis
  REGION 1..354: note = tr|A0A0R3AGS1|A0A0R3AGS1_9PSED Epoxyqueuosine reductase OS=Pseudomonas paralactis OX=1615673 GN=queG; PE = 3 SV=1
MPAITSDLPALAQSIKDWGRELGFQQVGISGLDLAEHEQHLQRWLDAGYHGEMEYMGAHGSKRSHPDELVPGTLRVVSLRMDYLPGDTQMAQLLGQPEKAYISRYALGRDYHKLIRKRVQQLADRIQAQIGPFGFRAFVDSAPVLEKAIAEQAGLGWIGKNTLVLNRKAGSYFFLSELFVDLPLPVDPPHTTEHCGRCTACLDICPTNAFVGPYVLDARRCISYLTIELKSAIPEDLRPLIGNRVFGCDDCQIVCPWNRFARPTAESDFKPRHNLDNAELAELFMWDEDKFLNSTEGSPLRRAGYERWLRNLAVGLGNAPSSIPVLEALKARRDYPSELVREHVEWALNQHATR

SEQ ID NO: 80087 - protein, 359 aa, Pseudomonas pelagia
  REGION 1..359: note = tr|A0A2A4APP6|A0A2A4APP6_9PSED Epoxyqueuosine reductase OS=Pseudomonas pelagia OX=553151 GN=queG PE=3; SV = 1
MPVPHSTSDLTQLAEQIRQLGLALGFQQLGISDAATGPHEAHLKRWLDAGYQGEMQWMASHGTKRTRPVELVPGTQRVISVRMDYLPADSAMAKRLGQPDTAYISRYALGRDYHKLMRRRLQQLAEQIQALIGPFGYRAFVDSAPVMERGLATQAGLGWIGKNTMLLNRQAGSYFFLGELFTDLPLPLDDAYEDEHCGRCTACLDKCPTNAFVGPQVLDARRCISYLTIELKGAIPEDLRPMMGNRVFGCDDCQMVCPWNRFAKPTREADFSPRHDLDQASLVSLFRWDEQTFLQNTEGSPIRRIGHERWLRNLAVGLGNASSSIPVIEALKDRLSHPSELVREHVIWALERHGITAET

SEQ ID NO: 80088 - protein, 353 aa, Pseudomonas peli
  REGION 1..353: note = tr|A0A1G4QNB7|A0A1G4QNB7_9PSED Epoxyqueuosine reductase OS=Pseudomonas peli OX=592361 GN=queG PE=3 SV=1
MNTDTLDLIALAQSIKDWGRELGFQQVGIADVQLGEHEAHLQRWLDAGYQGEMDYMAAHGSKRSHPDELVPGTLRVVSLRMDYLPGDTQMAQRLGEPEKAYVSRYALGRDYHKLIRKRLQQLAERIQQQIGPFGYRAFVDSAPVLEKAIAEQAGLGWIGKNTLVLNRKAGSYFFLGELFVDLPLPVDPPHASEHCGRCTACMDICPTAAFVGPYVLDARRCISYLTIELKGSIPEELRAPIGNRVFGCDDCQMVCPWNRFAKPTEQGDFQPRHSLDNAELAELFCWSEEEFLNRTEGSPLRRAGYERWLRNLAVGLGNAPSSIPVLEALKARREHPSELVREHVEWALARHGL

SEQ ID NO: 80089 - protein, 354 aa, Pseudomonas plecoglossicida
  REGION 1..354: note = tr|A0A495P632|A0A495P632_9PSED Epoxyqueuosine reductase OS=Pseudomonas plecoglossicida OX=70775 GN=queG; PE = 3 SV=1
MSASTPDLAQLAQSIKIWGQELGFAHVGIAGVDLGEHEHHLQRWLDAGYQGEMEYLGAHGSKRSHPDQLIPGTVRVVSLRMDYLPGDTQMAQRLAQPEKAYVSRYALGRDYHKLVRKRVQFLADRIQEAIGPFGYRAFVDSAPVLEKALAEQAGLGWIGKNTLLLNRKAGSYFFLAELFVDLPLPVDEATTSEHCGRCQACLDICPTQAFVGPYVLDARRCISYLTIELRGAIPVDLRAKMGNRVFGCDDCQIVCPWNRFAKHSQEQDFQPRHGLENTDLAAMFLWDERTFLRKTEGGPLRRAGYERFLRNLAVGLGNAPSTIPVIEALKARRDDESELVREHVEWALARHGAQ

SEQ ID NO: 80090 - protein, 354 aa, Pseudomonas plecoglossicida
  REGION 1..354: note = tr|S2JUE6|S2JUE6_9PSED Epoxyqueuosine reductase; OS = Pseudomonas plecoglossicida NB2011 OX=1330531 GN=queG; PE = 3 SV=1
MSACTLDLAALAQSIKHWGRELGFAHVGIAGVDLGEHEQHLQRWLDAGYQGEMEYLGAHGSKRAHPEQLIPGTVRVVSLRMDYLPGDTQMAQRLAQPEKAYVSRYALGRDYHKLVRKRVQHLADRIQEDIGPFGYRAFVDSAPVLEKALAEQAGLGWIGKNTLLLNRKAGSYFFLAELFVDLPLPVDEAHASEHCGRCEACLDICPTKAFIGPYVLDARRCISYLTIELKGAIPVELRSMMGNRVFGCDDCQIVCPWNRFAQPTQENDFQPRHGLENTELAEMFLWDERTFLRKTEGGPLRRAGYERFLRNLAVGLGNAPSTIPVLEALKARRDDPSELVREHVQWALERHGCR

SEQ ID NO: 80091 - protein, 355 aa, Pseudomonas poae
  REGION 1..355: note = tr|A0A1H0H532|A0A1H0H532_9PSED Epoxyqueuosine reductase OS=Pseudomonas poae OX=200451 GN=queG PE=3 SV=1
MPAITSDLPALAQSIKDWGRELGFQQVGISGLDLAEHEQHLQRWLDAGYHGEMDYMGAHGSKRSHPEELVPGTLRVVSLRMDYLPGDTQMAHLLAQPEKAYISRYALGRDYHKLIRKRVQQLADRIQAQIGPFGFRAFVDSAPVLEKAIAEQAGLGWIGKNTLVLNRKAGSYFFLSELFVDLPLPVDPPHSTEHCGRCTACLDICPTNAFVGPYVLDARRCISYLTIELKSAIPEDLRPLIGNRVFGCDDCQIVCPWNRFARPTAESDFKPRHNLDNAELAELFLWDEDRFLSSTEGSPLRRAGYERWLRNLAVGLGNAPSSIPVLEALKARRAYPSELVREHVEWALKQHAERQ

SEQ ID NO: 80092 - protein, 354 aa, Pseudomonas poae
  REGION 1..354: note = tr|A0A2A9GBF0|A0A2A9GBF0_9PSED Epoxyqueuosine reductase OS=Pseudomonas poae OX=200451 GN=queG PE=3 SV=1
MPAITSDLPALAQSIKDWGRELGFQQVGISGLDLAEHEHHLQRWLDAGYHGEMDYMGAHGSKRSHPDELVPGTLRVVSLRMDYLPGDTQMAQLLAKPEKAYISRYALGRDYHKLIRKRVQQLADRIQAQIGPFGFRAFVDSAPVLEKAIAEQAGLGWIGKNTLVLNRKAGSYFFLSELFVDLPLPVDPPHATEHCGRCTACLDICPTNAFVGPYVLDARRCISYLTIELKSAIPEDLRPLIGNRVFGCDDCQIVCPWNRFARPTAESDFKPRHNLDNAELAELFMWDEDKFLSSTEGSPLRRAGYERWLRNLAVGLGNAPSSIPVLEALKARRDYPSELVREHVEWALNQHASR

SEQ ID NO: 80093 - protein, 361 aa, Pseudomonas pohangensis
  REGION 1..361: note = tr|A0A1H2H328|A0A1H2H328_9PSED Epoxyqueuosine reductase OS=Pseudomonas pohangensis OX=364197 GN=queG; PE = 3 SV=1
MSVSYTSADAPLLAELADSIRAWGRELGFQQVGISDVDLGEHAGHLESWLAAGYQGEMDYMAAHGSKRSHPEQLVPGTLRVISLRMDYLPGDTQMIRALKAPETAYISRYALGRDYHKLIRKRLQQLAERIQQQIGPLGYRAFVDSAPVLEKAAGQQAGLGWIGKNTLLLNRQAGSWFFLGELFVDIPLPVDAAHSSEHCGSCTACLDICPTAAFVGPYVLDARRCISYLTIELKGSIPLELRPLIGNRVFGCDDCQLVCPWNRFAKPTSQTDFLPRHHLDSTDLAALFRWTEDEFLSRTEGSPIRRTGYIGWSRNLAVGLGNAPGTIAVIEALQLRRNDPSELVREHVAWALQRHGRSVD

SEQ ID NO: 80094 - protein, 354 aa, unidentified
  source 1..354: note = Pseudomonas prosekii
  REGION 1..354: note = tr|A0A1H1U9S7|A0A1H1U9S7_9PSED Epoxyqueuosine reductase OS=Pseudomonas prosekii OX=1148509 GN=queG PE=3; SV = 1
MPAITTDLPALAQSIKDWGRELGFQQVGISGLDLAEHEQHLQRWLEAGYHGEMEYMGAHGSKRSHPEELVPGTLRVVSLRMDYLPGDTQMAQLLAQPEKAYVSRYALGRDYHKLIRKRVQQLAEKIQAVIGPFGYRAFVDSAPVLEKAIAEKAGLGWIGKNTLVLNRKAGSYFFLSELFVDLPLPEDPPHATEHCGRCTACLDICPTNAFVGPYVLDARRCISYLTIELKSAIPEELRPLIGNRVFGCDDCQIVCPWNRFARPTGESDFKPRHNLDNAELAELFMWDEERFLSSTEGSPLRRAGYERWLRNLAVGLGNAPSSIPVLEALKARREYPSELVREHVEWALKQHGLI

SEQ ID NO: 80095 - protein, 354 aa, unidentified
  source 1..354: note = Pseudomonas prosekii
  REGION 1..354: note = tr|A0A3L8CL25|A0A3L8CL25_9PSED Epoxyqueuosine reductase OS=Pseudomonas prosekii OX=1148509 GN=queG PE=3; SV = 1
MPAITTDLPALAQSIKDWGRELGFQQVGISGLDLAEHEQHLQRWLEAGYHGEMEYMGAHGSKRSHPEELVPGTLRVVSLRMDYLPGDTQMAQLLAQPEKAYVSRYALGRDYHKLIRKRVQQLAEKIQAVIGPFGYRAFVDSAPVLEKAIAEKAGLGWIGKNTLVLNRKAGSYFFLSELFVDLPLPEDPPHATEHCGRCTACLDICPTNAFVGPYVLDARRCISYLTIELKSAIPEELRPLIGNRVFGCDDCQIVCPWNRFARPTGESDFKPRHNLDNAELAELFMWDEERFLSSTEGSPLRRAGYERWLRNLAVGLGNAPSSIPVLEALKARREYPSELVREHVEWALKQHGLM

SEQ ID NO: 80096 - protein, 359 aa, unidentified
  source 1..359: note = Pseudomonas protegens
  REGION 1..359: note = tr|A0A423EFW2|A0A423EFW2_9PSED Epoxyqueuosine reductase OS=Pseudomonas protegens OX=380021 GN=queG PE=3; SV = 1
MPAITQDLPALAQSIKDWGRELGFQQVGISGLDLAEHEQHLERWLAAGYHGEMEYMGAHGSKRSHPDQLVPGTLRVVSLRMDYLPGDTQMAQRLAQPSKAYVSRYALGRDYHKLIRKRVQQLAERIQQAIGPFGYRAFVDSAPVLEKAIAEQAGLGWIGKNTLVLNRKAGSYFFLSELFVDLPLPLDAPHATEHCGRCTACLDICPTNAFVGPYVLDARRCISYLTIELKSAIPEDLRPLIGNRVFGCDDCQIVCPWNRFARSTAEGDFKPRHNLDNAELAELFMWDEDKFLSNTEGSPLRRAGYERWLRNLAVGLGNAPSSIPVLEALKARQDYPSELVREHVQWALDQHANRQCSSL

SEQ ID NO: 80097 - protein, 386 aa, unidentified
  source 1..386: note = Pseudomonas protegens
  REGION 1..386: note = tr|A0A2C9EFH8|A0A2C9EFH8_PSEPH Epoxyqueuosine reductase OS=Pseudomonas protegens (strain DSM 19095 / LMG 27888 / CHA0) OX=1124983 GN=yjeS PE=3 SV=1
MFCLRHASSSSDVWQNYTHLSPGFSRLMPAITQDLPALAQSIKDWGRELGFQQVGISGLDLAEHEQHLERWLAAGYHGEMEYMGAHGSKRSHPDQLVPGTLRVVSLRMDYLPGDTQMAQRLAQPSKAYVSRYALGRDYHKLIRKRVQQLAERIQQAIGPFGYRAFVDSAPVLEKAIAEQAGLGWIGKNTLVLNRKAGSYFFLSELFVDLPLPVDAPHATEHCGRCTACLDICPTNAFVGPYVLDARRCISYLTIELKSAIPEDLRPLIGNRVFGCDDCQIVCPWNRFARSTAEGDFKPRHNLDNAELAELFMWDEDKFLSNTEGSPLRRAGYERWLRNLAVGLGNAPSSIPVLEALKARQDYPSELVREHVQWALDQHANRQCSSL

SEQ ID NO: 80098 - protein, 376 aa, Pseudomonas pseudoalcaligenes
  REGION 1..376: note = tr|W6RB94|W6RB94_PSEP5 Epoxyqueuosine reductase; OS = Pseudomonas pseudoalcaligenes (strain CECT 5344); OX = 1182590 GN=yjeS PE=3 SV=1
MHGSLTTDVWQNYTYVHRLRPPMSDQTLDLNALALSIKDWGRELGFQQVGITDVELGEHEAHLQRWLAAGYQGEMDYMAAHGSKRSHPDELVPGTLRVVSLRMDYLPGDTQMAQRLNEPEQAYVSRYALGRDYHKLIRKRLQQLAERIQQQIGPFGYRAFVDSAPVLEKAIAEKAGLGWIGKNTLVLNRKAGSYFFLGELFVDLPLPVDAPHASEHCGRCSACMDICPTAAFTGPYALDARRCISYLTIELKGSIPEELRAPIGNRVFGCDDCQIVCPWNRFARPTEQGDFQPRHGLDNSGLAELFMWTEEEFLSRTEGSPLRRAGYERWLRNLAVGLGNAPSTIPVLQALQARREHPSALVREHVAWALERHGAL

SEQ ID NO: 80099 - protein, 355 aa, Pseudomonas psychrophila
  REGION 1..355: note = tr|S6HT56|S6HT56_9PSED Epoxyqueuosine reductase; OS = Pseudomonas psychrophila OX=122355 GN=queG PE=3 SV=1
MPAITADLPALAQSIKEWGRELGFQQVAIAGLDLGEHEHHLQRWLDAGYHGDMDYMAAHGSKRSHPEELVPGTLRVVSLRMDYLPGDTHMAQLLAQPEKAYVSRYALGRDYHKLIRKRVQQLADRIQADIGPFGFRAFVDSAPVLEKAIAQQAGLGWIGKNTLVLNRKAGSYFFLSELFVDLPLPVDPPHETEHCGRCTACLDICPTNAFVGPYVLDARKCISYLTIELKTAIPEELRSMIGNRVFGCDDCQIVCPWNRFARTTTEGDFKPRHNLDNAGLAELFMWDEDTFLSNTEGSPLRRAGYERWLRNLAVGLGNAPSTIPVLEALKARREYPSELVQEHVEWALAQHAKRA

SEQ ID NO: 80100 - protein, 355 aa, Pseudomonas psychrophila
  REGION 1..355: note = tr|A0A3N1ZP96|A0A3N1ZP96_9PSED Epoxyqueuosine reductase OS=Pseudomonas psychrophila OX=122355 GN=queG; PE = 3 SV=1
MPAITADLPALAQSIKEWGRELGFQQVAIAGLDLGEHEQHLERWLAAGYHGDMEYMGAHGSKRSHPEELVPGTLRVVSLRMDYLPGDTHMAQLLAQPEKAYVSRYALGRDYHKLIRKRVQQLADRIQAEIGPFGFRAFVDSAPVLEKAIAQKAGLGWIGKNTLVLNRKAGSYFFLSELFVDIPLPEDEPHTTEHCGRCSACLDICPTKAFVGPYVLDARRCISYLTIELKTAIPEELRSMMGNRVFGCDDCQIVCPWNRFARSTLEGDFKPRHNLDNAELAELFMWDEDTFLSSTEGSPLRRAGYERWLRNLAVGLGNAPSTIPVLEALKARREYPSQLVQEHVEWALKQHAERV

SEQ ID NO: 80101 - protein, 354 aa, Pseudomonas psychrotolerans
  REGION 1..354: note = tr|A0A1G5PDZ5|A0A1G5PDZ5_9PSED Epoxyqueuosine reductase OS=Pseudomonas psychrotolerans OX=237610 GN=queG; PE = 3 SV=1
MSAVALDLAALADLIKTWGRELGFQQTGIAGLDLARHEEHLERWLAAGFHGEMDYMAAHGSKRSRPAELVPGTLRVISLRMDYLPGDTRMSERLADGAAAYVSRYALGRDYHKLIRKRLQHLAERIQGEIGPFGYRAFVDSAPVLEKAIAEQAGLGWIGKNTLVLNRKAGSWFFLGELFVDVPLPVDEPTPRDHCGTCRACLDICPTQAFVGPYQLDARRCISYLTIEFKGSIPPELRPLIGNRVFGCDDCQLVCPWNRFAKPTAEGDFQPRHSLDSASLAELFRWTEAEFLSRTEGSPLRRAGYERWLRNLAVGLGNAPTSIPVVEALKLQREHPSPLVREHVEWALQRHAAS

SEQ ID NO: 80102 - protein, 354 aa, Pseudomonas psychrotolerans
  REGION 1..354: note = tr|A0A147GT48|A0A147GT48_9PSED Epoxyqueuosine reductase OS=Pseudomonas psychrotolerans OX=237610 GN=queG; PE = 3 SV=1
MSAVALDLAALADLIKTWGRELGFQQTGIAGLDLARHEEHLERWLAAGFHGEMDYMAAHGSKRSRPAELVPGTLRVISLRMDYLPGDTRMSERLADGAAAYVSRYALGRDYHKLIRKRLQQLAERIQGEIGPFGYRAFVDSAPVLEKALAEQAGLGWIGKNTLVLNRKAGSWFFLGELFVDVPLPVDEPTPRDHCGTCRACLDICPTNAFIGPYQLDARRCISYLTIEFKGSIPLELRPLIGNRVFGCDDCQLVCPWNRFAKPTAEGDFQPRHGLDNATLAELFRWTEAEFLSRTEGSPLRRAGYERWLRNLAVGLGNAPTNIPVVEALKLQRDHPSPLVREHVEWALERHGQG

SEQ ID NO: 80103 - protein, 356 aa, unidentified
  source 1..356: note = Pseudomonas punonensis
  REGION 1..356: note = tr|A0A1M7HJP6|A0A1M7HJP6_9PSED Epoxyqueuosine reductase OS=Pseudomonas punonensis OX=1220495 GN=queG; PE = 3 SV=1
MTDATLDLDSLAQSIKDWGRELGFQQVGISGLELGEHEAHLQRWLDAGYQGEMDYMAAHGRKRSHPDELVPGTLRVVSLRMDYLPGDTQMAQRLQEPEKAYVSRYALGRDYHKLIRKRLQQLAERIQQAIGPFGYRAFVDSAPVLEKAIAEQAGLGWIGKNTLVLNRKAGSYFFLGELFVDIPLPEDAPHASEHCGRCSACLDICPTAAFVGPYVLDARRCISYLTIELKGPIPEDLRAPIGNRVFGCDDCQMVCPWNRFAKATEQGDFQPRHSLDNAELAELFRWSEEEFLSRTEGSPLRRAGYERWLRNLAVGLGNAPSSIPVLEALEARREYPSELVREHVQWALEQHAQRQN

SEQ ID NO: 80104 - protein, 359 aa, Pseudomonas putida
  REGION 1..359: note = tr|A0A177SU77|A0A177SU77_PSEPU Epoxyqueuosine reductase OS=Pseudomonas putida OX=303 GN=queG PE=3 SV=1
MSVSSLDLPALARSIKDWGRELGFAHVGIAGVDLAEHEQHLERWLAAGYHGEMDYMGAHGSKRSHPDELVPGTVRVVSLRMDYLPGDTQMAQRLAQPERAYISRYALGRDYHKLVRKRVQQLAERIQTAIGPFGFRAFVDSAPVLEKAIAEQAGLGWIGKNTLLLNRKAGSYFFLAELFVDLPLPVDEAQATEHCGRCSACLDICPTNAFVGPYVLDARRCISYLTIELKNAIPEELRSMIGNRVFGCDDCQIVCPWNRFAKDTVENDFKPRHGLDNAGLAELFMWDEERFLASTEGSPLRRAGYERWLRNLAVGLGNAPSTIPVLEALNARREHPSELVREHVEWALRQHAERQCSSL

SEQ ID NO: 80105 - protein, 354 aa, Pseudomonas putida
  REGION 1..354: note = tr|A0A0C5SG12|A0A0C5SG12_PSEPU Epoxyqueuosine reductase OS=Pseudomonas putida S13.1.2 OX=1384061 GN=queG; PE = 3 SV=1
MSSCTPDLAQLAQSIKIWGQELGFAHVGIAGVDLGEHEHHLQRWLDAGYQGEMEYLGAHGSKRAHPEQLIPGTVRVVSLRMDYLPGDTQMAQRLAQPEKAYISRYALGRDYHKLVRKRVQFLADRIQEAIGPFGYRAFVDSAPVLEKALAEQAGLGWIGKNTLLLNRKAGSYFFLAELFVDLPLPVDDATTSEHCGRCQACLDICPTQAFVGPYVLDARRCISYLTIELKGAIPVELRSMMGNRVFGCDDCQIVCPWNRFAKHTQEQDFQPRHGLENAELAQMFLWDERTFLRKTEGGPLRRAGYERFLRNLAVGLGNAPSTIPVIEALKARREDESELVREHVEWALARHNIQ

SEQ ID NO: 80106 - protein, 362 aa, unidentified
  source 1..362: note = Pseudomonas reidholzensis
  REGION 1..362: note = tr|A0A383S0H9|A0A383S0H9_9PSED Epoxyqueuosine reductase OS=Pseudomonas reidholzensis OX=1785162 GN=queG; PE = 3 SV=1
MPCPSMSACTPDLAALAQSIKDWGRELGFAHVGIAGVDLGEHEQHLQRWLDAGYQGEMDYMAAHGSKRSHPDQLVPGTLRVVSLRMDYLPGDTRMAQLLAQPEKAYVSRYALGRDYHKLVRKRVQHLADRIQAAIGPFGFRAFVDSAPVLEKAIAQQAGLGWIGKNTLLLNRKAGSYFFLAELFVDLPLPVDEAQASEHCGRCQACLDVCPTQAFVGPYVLDARRCISYLTIELKQAIPVELRPLIGNRVFGCDDCQIVCPWNRFARPTQEDDFKPRHGLDNAELAQLFLWDEATFLGNTEGSPLRRAGYERWLRNLAVGLGNAPSSIPVLEALRARREYPSELVREHVEWALAQHEARRQG

SEQ ID NO: 80107 - protein, 359 aa, Pseudomonas reinekei
  REGION 1..359: note = tr|A0A1H0N1W5|A0A1H0N1W5_9PSED Epoxyqueuosine reductase OS=Pseudomonas reinekei OX=395598 GN=queG PE=3; SV = 1
MPAITTDLPALAQSIKDWGRELGFQQVGISGLDLAEHEQHLERWLEAGYHGEMDYMGAHGSKRSHPEELVPGTLRVVSLRMDYLAGDTHMAKVLAQPEKAYVSRYALGRDYHKLIRKRVQQLADKIQAQIGPFGFRAFVDSAPVLEKAIAEQAGLGWIGKNTLVLNRKAGSYFFLAELFVDLPLPVDPPHATEHCGRCSACLDICPTNAFVGPYVLDARRCISYLTIELKGAIPEDLRPLIGNRVFGCDDCQIVCPWNRFARPTGESDFKPRHNLDNAGLAELFMWDEDKFLSSTEGSPLRRTGYENWLRNLAVGLGNAPSTIPVLEALKARRDYPSELVREHVEWALKQHAKRQASSL

SEQ ID NO: 80108 - protein, 360 aa, Pseudomonas resinovorans
  REGION 1..360: note = tr|S6APA1|S6APA1_PSERE Epoxyqueuosine reductase; OS = Pseudomonas resinovorans NBRC 106553 OX=1245471 GN=queG; PE = 3 SV=1
MSLSTQELATLAQSIKEWGRELGFQQVGISGVELGEHEAHLQRWLDAGYQGEMDYMAAHGSKRSHPDELVPGTLRVISLRMDYLAGDTRMAQVLGQPEKAYVSRYALGRDYHKLIRKRLQQLAERIEQAVGPFSYRAFVDSAPVLEKAIAEQAGLGWIGKNTLVLNRKAGSYFFLGELFVDAPLPVDEPHGSEHCGRCSACLDICPTAAFVGPYQLDARRCISYLTIEYKGSIPEELRPLIGNRVFGCDDCQMVCPWNRFARPSGEGDFQPRHGLDNAELAELFRWSEEEFLSRTEGSPLRRAGYERWLRNLAVGLGNAPSSIPVLEALHLRREHPSALVREHVEWALARHRASARDVRS

SEQ ID NO: 80109 - protein, 356 aa, Pseudomonas rhizosphaerae
  REGION 1..356: note = tr|A0A089YVP7|A0A089YVP7_9PSED Epoxyqueuosine reductase OS=Pseudomonas rhizosphaerae OX=216142 GN=queG; PE = 3 SV=1
MSAPTIDLPALALSIKQWGRELGFQQVGIAGLDLAEHEQHLERWLESGYHGEMDYMAAHGSKRSHPEQLVPGTLRVVSLRMDYLPGDTHMAQRLAEPEKAYVSRYALGRDYHKLIRKRVQHLAERIQQDIGPFGFRAFVDSAPVLEKAIAQEAGLGWIGKNTLVLNRKAGSYFFLAELFVDLPLPVDEAHASEHCGRCTACLEICPTAAFVGPYVLDARRCISYLTIELKGSIPTELRPLIGNRVFGCDDCQIVCPWNRFARPSGEGDFQPRHQLDNAELAQLFLWDEAHFLSSTEGSPLRRAGYERFLRNLAVGLGNAPSSIPVLEALKTRREHPSELVREHVEWALAAHAQRSS

SEQ ID NO: 80110 - protein, 360 aa, Pseudomonas rhodesiae
  REGION 1..360: note = tr|A0A5C5P475|A0A5C5P475_9PSED Epoxyqueuosine reductase OS=Pseudomonas rhodesiae OX=76760 GN=queG PE=3; SV = 1
MPAITSDLPALAQSIKDWGRELGFQQVGISGLDLAEHEQHLQRWLDAGYHGEMDYMGAHGSKRSHPEELVPGTLRVVSLRMDYLPGDTQMAHLLAQPEKAYISRYALGRDYHKLIRKRVHQLADRIQSQIGPFGFRAFVDSAPVLEKAIAEQAGLGWIGKNTLVLNRKAGSYFFLSELFVDLPLPVDPPHSTEHCGRCTACLDICPTNAFVGPYVLDARRCISYLTIELKTAIPEDLRPLIGNRVFGCDDCQIVCPWNRFARPTGEGDFQPRHNLDNAELAELFMWDEDKFLSSTEGSPLRRAGYERWLRNLAVGLGNAPSSIPVLEALKARREYPSELVREHVEWALKQHAERQCTSSL

SEQ ID NO: 80111 - protein, 357 aa, Pseudomonas sabulinigri
  REGION 1..357: note = tr|A0A1H1QNT2|A0A1H1QNT2_9PSED Epoxyqueuosine reductase OS=Pseudomonas sabulinigri OX=472181 GN=queG; PE = 3 SV=1
MSESIDYHDLAEQIRSLASQLGFQQLGISAPDIGEHEQHLEQWLDAGYHGEMDWMASHGSKRTQPVELVPGTQRVISVRMDYLPGDSSMAQRLSEPDAAYISRYALGRDYHKLIRRRLQKLADAIQALIGPFGYRAFVDSAPVMERALAAGSGLGWIGKNSMLINRKAGSYFFLGELYTDLPLPIDAPQQSEHCGKCTACLERCPTQAFVGDKVLDARRCISYLTIELKGAIPTELRAPMGNRVFGCDDCQLVCPWNRFAKPTDEADFSPRHRLDQASLAELFRWDEATFLANTEGSPIRRIGHERWLRNLAVGLGNASSSIPVIEALKARRNHPSELVREHVAWALQQHGSSAAAD

SEQ ID NO: 80112 - protein, 354 aa, unidentified
  source 1..354: note = Pseudomonas sagittaria
  REGION 1..354: note = tr|A0A1I5P9Z4|A0A1I5P9Z4_9PSED Epoxyqueuosine reductase OS=Pseudomonas sagittaria OX=1135990 GN=queG; PE = 3 SV=1
MSTTAPDLVALAQSIRDWSRELGFQQVGIAGIELDEHEAHLQRWLAAGHHGEMDYMAAHGHKRSRPAELLPGTLRVISLRMDYLPGDTRMTEVLASPDKAYVSRYALGRDYHKLIRKRLQQLAERIQQAIGPFGHRAFVDSAPVLEKALAQQAGLGWIGKNTLLLNRKAGSWFFLGELYVDLPLPVDAPHASEHCGRCQACLDICPTAAFVGPQQLDARRCISYLTIELKGPIPVELRPLIGNRVFGCDDCQLVCPWNRFARPTAQGDFQPRHNLDNSELAALFRWSEEEFLARTEGSPLRRAGYPRWLRNLAVGLGNAPSSIAVIEALRLRRDDPSELVREHVEWALARHGVA

SEQ ID NO: 80113 - protein, 357 aa, unidentified
  source 1..357: note = Pseudomonas salegens
  REGION 1..357: note = tr|A0A1H2GJ66|A0A1H2GJ66_9PSED Epoxyqueuosine reductase OS=Pseudomonas salegens OX=1434072 GN=queG PE=3; SV = 1
MTMPPTNPADLAERIRDMATALGFQQLGISAASTGQHADHLQRWLDAGYHGEMQWMASHGRKRTEPAELVPGTLRVLSVRMDYLPPEPDMARCLGQPERAYISRYALGRDYHKLMRRRLQQLAEHIQQLIGPFGYRAFVDSAPVLERALATQAGLGWIGKNTMLINRRAGSYFFLGELFTDLPLPLDDAHEQEHCGRCTACLERCPTQAFTGPWSLDARRCISYLTIELKDSIPLELRPLMGNRVFGCDDCQMVCPWNRFAKPSAEDDFSPRQRLDQASLVELFRWDEATYLARTKGSAIRRIGHERWLRNLAVGLGNATSSIPVIEALRSRSTHPSELVREHVAWALARHQTTSQD

SEQ ID NO: 80114 - protein, 354 aa, Pseudomonas salomonii
  REGION 1..354: note = tr|A0A1H3L8Z1|A0A1H3L8Z1_9PSED Epoxyqueuosine reductase OS=Pseudomonas salomonii OX=191391 GN=queG PE=3; SV = 1
MPAITSDLPALAQSIKDWGRELGFQQVGISGLDLAEHEQHLQRWLDAGYHGEMEYMGAHGSKRSHPEELVPGTLRVVSLRMDYLPGDTQMAQLLAKPEKAYISRYALGRDYHKLIRKRVQQLADRIQAQIGPFGFRAFVDSAPVLEKAIAEQAGLGWIGKNTLVLNRKAGSYFFLSELFVDLPLPVDAPHATEHCGRCTACLDICPTNAFVGPYVLDARRCISYLTIELKSAIPEDLRPLIGNRVFGCDDCQIVCPWNRFARPTAESDFKPRHNLDNAELAELFMWDEDKFLSSTEGSPLRRAGYERWLRNLAVGLGNAPSSIPVLEALKARRDYPSELVREHVEWALNQHATR

SEQ ID NO: 80115 - protein, 548 aa, Pseudomonas salomonii
  REGION 1..548: note = tr|A0A3M4QG02|A0A3M4QG02_9PSED Epoxyqueuosine reductase OS=Pseudomonas salomonii OX=191391 GN=queG PE=3; SV = 1
MNLGCRDAHQPRRLTGMRRDYAVGRQAYTACGQLVQGIGIPDLRLLGVGGNRQQAFAPGRCAQAGTDNDHRDFFQQPHQLVGRTHADGHHLRQARQCGWHVLRASRQRDHAGATAQSAFSTQQRSTAKAMVAADDQQVAELAFMGVRGTCSQLRQMAVQQRLYVGNCVFCLRHASSSSDVWQNYTHLTCGFPCLMPAITSDLPALAQSIKDWGRELGFQQVGISGLDLAEHELHLQRWLDAGYHGEMDYMGAHGSKRSHPEELVPGTLRVVSLRMDYLPGDTQMAQLLAKPDKAYISRYALGRDYHKLIRKRVQQLADRIQAQIGPFGFRAFVDSAPVLEKAIAEQAGLGWIGKNTLVLNRKAGSYFFLSELFVDLPLPVDAPHATEHCGRCTACLDICPTNAFVGPYVLDARRCISYLTIELKSAIPEDLRPLIGNRVFGCDDCQIVCPWNRFARSTAESDFKPRHNLDNAELAELFMWDEDKFLSSTEGSPLRRAGYERWLRNLAVGLGNAPSSIPVLEALKARRDYPSELVREHVEWALNQHATR

SEQ ID NO: 80116 - protein, 359 aa, Pseudomonas saponiphila
  REGION 1..359: note = tr|A0A1H4WAV9|A0A1H4WAV9_9PSED Epoxyqueuosine reductase OS=Pseudomonas saponiphila OX=556534 GN=queG; PE = 3 SV=1
MPAITQDLPALAQSIKDWGRELGFQQVGISGLDLAEHEQHLERWLAAGYHGEMDYMGAHGSKRSHPEQLVPGTLRVVSLRMDYLPGDTQMAQRLAQPSKAYVSRYALGRDYHKLIRKRVQQLAERIQQAIGPFGYRAFVDSAPVLEKAIAEQAGLGWIGKNTLVLNRKAGSYFFLSELFVDLPLPVDEPHASEHCGRCTACLDICPTNAFVGPYVLDARRCISYLTIELKNAIPEELRPLIGNRVFGCDDCQIVCPWNRFARPSAESDFKPRHNLDNAELAELFMWDEDKFLSSTEGSPLRRAGYERWLRNLAVGLGNAPSSIPVLEALKARQDYPSELVREHVQWALAQHANRQCSSL

SEQ ID NO: 80117 - protein, 355 aa, unidentified
  source 1..355: note = Pseudomonas saudimassiliensis
  REGION 1..355: note = tr|A0A078MMF4|A0A078MMF4_9PSED Epoxyqueuosine reductase OS=Pseudomonas saudimassiliensis OX=1461581; GN = queG PE=3 SV=1
MPDTSPDYLLLAAQIRDIATELGFQQVGISDPDIGAHEQRLQEWLAAGYHGEMEWMASHGSKRTQPAELVPGTRRVISVRMDYLPGDTAMTKRLADPDAAYISRYALGRDYHKLIRRRLQQLAERIQALIGPFGFRAFVDSAPVMERALATRSGLGWIGKNTMLLNRKAGSFFFLGELYTDLPLPTDAPYEQEHCGSCTACLSRCPTDAFIGAHVLDARRCISYLTIELKGAIPEELRPRMGNRVFGCDDCQLVCPWNKFAKPTGEQDFSPRHQLDQADLITLFRWDEEQYLKNTEGSPLRRIGHERWLRNLAVGLGNAHTSIPVIDALNSRLDHPSELVQEHVRWALTQHGIAA

SEQ ID NO: 80118 - protein, 357 aa, unidentified
  source 1..357: note = Pseudomonas saudiphocaensis
  REGION 1..357: note = tr|A0A427EFA1|A0A427EFA1_9PSED Epoxyqueuosine reductase OS=Pseudomonas saudiphocaensis OX=1499686; GN = queG PE=3 SV=1
MSSSVPDPAALAQSIKEWGRELGFQQVGITGVDLAEHEAHLQRWLDQGYQGEMDYMAAHGTKRSRPDELVPGTLRVISLRMDYLPGDTGMAEQLAQAEKAYVSRYALGRDYHKLIRKRLQQLAERIQQVIGPFGFRAFVDSAPVLEKAVAQQAGLGWIGKNTLVLNRKAGSWFFLGELFVDIALPVDEPVTRDHCGSCHACLNICPTEAFVGERVLDARRCISYLTIELKGPIPVELRSKVGNRVFGCDDCQIVCPWNRFARPTEQPDFQPRHNLDNAELAVLFRWSEEEFLSRTEGSPLRRTGYERWLRNLAVGLGNAPSSIPVLEALKARREHPSELVREHVEWALAQHRLRSGA

SEQ ID NO: 80119 - protein, 357 aa, unidentified
  source 1..357: note = Pseudomonas saudiphocaensis
  REGION 1..357: note = tr|A0A078LX74|A0A078LX74_9PSED Epoxyqueuosine reductase OS=Pseudomonas saudiphocaensis OX=1499686; GN = queG PE=3 SV=1
MSSSVPDPAALAQSIKEWGRELGFQQVGITGVDLAEHEAHLQRWLDQGYQGEMDYMAAHGTKRSRPDELVPGTLRVISLRMDYLPGDTGMAEQLAQAEKAYVSRYALGRDYHKLIRKRLQQLAERIQQVIGPFGFRAFVDSAPVLEKAVAQQAGLGWIGKNTLVLNRKAGSWFFLGELFVDIALPVDEPVTRDHCGSCHACLDICPTEAFVGERVLDARRCISYLTIELKGPIPVELRSKVGNRVFGCDDCQIVCPWNRFARPTEQPDFQPRHNLDNAELATLFRWSEEEFLSRTEGSPLRRTGYERWLRNLAVGLGNAPSSIPVLEALEARREHPSELVREHVEWALAQHRLRSGA

SEQ ID NO: 80120 - protein, 392 aa, Pseudomonas savastanoi
  REGION 1..392: note = tr|A0A3M5GD52|A0A3M5GD52_PSESS Epoxyqueuosine reductase OS=Pseudomonas savastanoi OX=29438 GN=queG PE=3; SV = 1
MRFRVEHASIGSDVWQNYTHLGPGFSLRMSAITAALPTRDDLAALALSIKAWGRELGFQEVGISGLDLAEHEQHLQRWLDAGYHGEMDYMAAHGSKRSHPDELVPGTLRVVSLRMDYLPGDTEMAQRLTEPEKAYVSRYALGRDYHKLIRKRLQQLAERIQQAIGPFGFRAFVDSAPVLEKAIAEQAGLGWIGKNTLVLNRKAGSFFFLGELFVDIPIPVDAPHATEHCGRCTACLDICPTAAFVGPYVLDARRCISYLTIELKTAIPEELRPLIGNRVFGCDDCQIVCPWNRFARPTDQSDFQPRHNLDNAGLAELFLWDEDKFLSSTEGSPLRRAGYERWLRNLAVGLGNAPSTIPVIEALHARRDYPSELVREHVEWALQRHGVADAGG

SEQ ID NO: 80121 - protein, 364 aa, Pseudomonas savastanoi
  REGION 1..364: note = tr|A0A0Q0G698|A0A0Q0G698_PSESS Epoxyqueuosine reductase OS=Pseudomonas savastanoi pv. savastanoi; OX = 360920 GN=queG PE=3 SV=1
MSAITAVLPTSDDLAALAVSIKAWGRELGFQEVGISGLDLAEHEQHLQRWLDAGYHGEMDYMVAHGSKRSHPEELVPGTLRVVSLRMDYLPGDTEMAQRLTEPEKAYVSRYALGRDYHKLIRKRLQQLAERIQQAIGPFGFRAFVDSAPVLEKAIAEQAGLGWIGKNTLVLNRKAGSFFFLGELFVDIPLPVDAPHATEHCGRCTACLDICPTAAFVGPYVLDARRCISYLTIELKTAIPEELRPLIGNRVFGCDDCQIVCPWNRFARPTEQSDFQPRHNLDNAGLAELFLWDEDKFLSSTEGSPLRRAGYERWLRNLAVGLGNAPSTIPVIEALHARRDYPSELVREHVEWALQRHGVADAGG

SEQ ID NO: 80122 - protein, 354 aa, Pseudomonas segetis
  REGION 1..354: note = tr|A0A239DK74|A0A239DK74_9PSED Epoxyqueuosine reductase OS=Pseudomonas segetis OX=298908 GN=queG PE=3; SV = 1
MSIELLDLNQLAQSIKDWGRELGFQQVGISGLDLGEHETHLQRWLDAGYHGEMDYMAAHGSKRSHPEQLVPGTLRVISLRMDYLPGDTQMAKRLAQPEKAYVSRYALGRDYHKLIRKRLQHLAERIQEKIGPFGFRAFVDSAPVLEKAIAEKSGLGWIGKNTLVLNRKAGSYFFLGELFVDIELPVDPPHGSEHCGRCTACMDICPTQAFVGPYELDARRCISYLTIELKGAIPEELRAPIGNRVFGCDDCQMVCPWNRFASPTEQTDFKPRHQLDNAELAELFGWSEEQFLSRTEGSPLRRAGYERWLRNLAVGLGNAPSSIPVIEALKARREHSSALVREHVEWALKRHNQA

SEQ ID NO: 80123 - protein, 355 aa, Pseudomonas seleniipraecipitans
  REGION 1..355: note = tr|A0A1G7PY07|A0A1G7PY07_9PSED Epoxyqueuosine reductase OS=Pseudomonas seleniipraecipitans OX=640205; GN = queG PE=3 SV=1
MTDATPDLAHLAQSIKEWGRELGFQQVGISGLELGEHEAHLQRWLDAGYQGEMDYMAAHGRKRSHPDELVPGTLRVVSLRMDYLPGDTQMAERLQQPEKAYVSRYALGRDYHKLIRKRLQQLAERIQQAIGPFGYRAFVDSAPVLEKAIAEQSGLGWIGKNTLVLNRKAGSYFFLGELFVDIPLPEDAPHGSEHCGRCSACLDVCPTAAFVGPYLLDARRCISYLTIELKGPIPEELRAPIGNRVFGCDDCQMVCPWNRFAKATEQSDFQPRHSLDNAELAELFRWSEDEFLSRTEGSPLRRAGYERWLRNLAVGLGNAPSSIPVLEALQARRDYPSELVREHVEWALEQHAKRA

SEQ ID NO: 80124 - protein, 376 aa, unidentified
  source 1..376: note = Pseudomonas sihuiensis
  REGION 1..376: note = tr|A0A1H2N342|A0A1H2N342_9PSED Epoxyqueuosine reductase OS=Pseudomonas sihuiensis OX=1274359 GN=queG; PE = 3 SV=1
MHGSLTTDVWQNYTYVHRLRPPMSDQTLDLNALALSIKDWGRELGFQQVGITDVELGEHEAHLQRWLAAGYQGEMEYMAAHGSKRSHPDELVPGTLRVVSLRMDYLPGDTQMAQRLKESEQAYVSRYALGRDYHKLIRKRLQQLAERIQQQIGPFGYRAFVDSAPVLEKAIAEKAGLGWIGKNTLVLNRKAGSYFFLGELFVDLPLPVDAPHASEHCGRCTACMDICPTAAFVGPYVLDARRCISYLTIELKGSIPEELRAPIGNRVFGCDDCQIVCPWNRFARPTEQGDFQPRHGLDNSGLAELFMWTEEEFLSRTEGSPLRRAGYERWLRNLAVGLGNAPSTIPVLQALQARREHPSELVREHVAWALERHGAL

SEQ ID NO: 80125 - protein, 354 aa, unidentified
  source 1..354: note = Pseudomonas silesiensis
  REGION 1..354: note = tr|A0A191YM86|A0A191YM86_9PSED Epoxyqueuosine reductase OS=Pseudomonas silesiensis OX=1853130 GN=queG; PE = 3 SV=1
MPAITTDLPALAQSIKDWGRELGFQQVGISGLDLAEHEQHLQRWLEAGYHGEMDYMGAHGSKRSHPEELVPGTLRVVSLRMDYLPGDTEMAQRLAQPEKAYVSRYALGRDYHKLIRKRVQQLAEKIQAVIGPFGYRAFVDSAPVLEKAIAEKAGLGWIGKNTLVLNRKAGSYFFLSELFVDLPLPVDPPHASEHCGRCTACLDICPTNAFVGPYVLDARRCISYLTIELKSAIPEDLRPLIGNRVFGCDDCQIVCPWNRFARPSGESDFKPRHNLDNAELAELFMWDEDKFLSSTEGSPLRRAGYERWLRNLAVGLGNAPSSIPVLEALKARREYPSELVREHVEWALKQHGVL

SEQ ID NO: 80126 - protein, 354 aa, Pseudomonas simiae
  REGION 1..354: note = tr|A0A1N7TVP4|A0A1N7TVP4_9PSED Epoxyqueuosine reductase OS=Pseudomonas simiae OX=321846 GN=queG PE=3 SV=1
MPAITTDLPALAQSIKDWGRELGFQQVGISGLDLAEHEQHLQRWLDAGYHGEMEYMGAHGSKRSHPDELVPGTLRVVSLRMDYLPGDTQMAQLLAKPEKAYISRYALGRDYHKLIRKRVQQLADRIQAQIGPFGFRAFVDSAPVLEKAIAEKAGLGWIGKNTLVLNRKAGSYFFLSELFVDLPLPIDAPHSTEHCGRCTACLDICPTNAFVGPYVLDARRCISYLTIELKHAIPEDLRPLIGNRVFGCDDCQIVCPWNRFARATGESDFKPRHNLDNAELAELFMWDEDKFLSSTEGSPLRRAGYERWLRNLAVGLGNAPSSIPVLEALKARRDYPSELVREHVEWALNQHASR

SEQ ID NO: 80127 - protein, 354 aa, unidentified
  source 1..354: note = Pseudomonas soli
  REGION 1..354: note = tr|A0A2V4HY53|A0A2V4HY53_9PSED Epoxyqueuosine reductase OS=Pseudomonas soli OX=1306993 GN=queG PE=3 SV=1
MSADLPDIATLAQSIKDWGRELGFAHVGIAGVDLGEHEQHLQRWLAAGYNGEMEYMGEHGNKRSRPAELIPGTLRVISLRMDYLPGDTQMAKRLAEPEKAYISRYALGRDYHKLVRKRVQHFADRIQEAIGPFGYRAFVDSAPVLEKALAQEAGLGWIGKNTLLLNRKAGSYFFLAELFVDLPLPIDGVQGSDHCGRCQACLDICPTQAFVGPYQLDARRCISYLTIELRGAIPLELRSLIGNRVFGCDDCQIVCPWNRFAKATTEDDFMPRRGLDNIELAELFLWDEKRFLGCTEGSPLRRAGYERFLRNLAVGLGNAPSTIPVLEALNARRDDPSELVREHVEWALARHNAL

SEQ ID NO: 80128 - protein, 354 aa, unidentified
  source 1..354: note = Pseudomonas soli
  REGION 1..354: note = tr|A0A1H9RVE2|A0A1H9RVE2_9PSED Epoxyqueuosine reductase OS=Pseudomonas soli OX=1306993 GN=queG PE=3 SV=1
MSADLPDIATLAQSIKDWGRELGFAHVGIAGVDLGEHEQHLQRWLAAGHNGEMEYMGEHGNKRSRPAELIPGTLRVISLRMDYLPGDTQMAKRLADPEKAYISRYALGRDYHKLVRKRVQHFADRIQEAIGPFGYRAFVDSAPVLEKALAQEAGLGWIGKNTLLLNRKAGSYFFLAELFVDLPLPIDGVQGSDHCGRCQACLDICPTQAFVGPYQLDARRCISYLTIELRGAIPMELRSLIGNRVFGCDDCQIVCPWNRFAKTTTEDDFMPRRGLDNIELAELFLWDEKRFLGCTEGSPLRRAGYERFLRNLAVGLGNAPSTIPVLEALNARRDDPSELVREHVEWALARHNAL

SEQ ID NO: 80129 - protein, 358 aa, unidentified
  source 1..358: note = Pseudomonas songnenensis
  REGION 1..358: note = tr|A0A482UJI8|A0A482UJI8_9PSED Epoxyqueuosine reductase OS=Pseudomonas songnenensis OX=1176259 GN=queG; PE = 3 SV=1
MSSQALLDPAALATSIKEWGRELGFQQVGITDVDLGEHEAHLDAWLAAGYQGEMDYMAAHGSKRSRPDELVPGTLRVISLRMDYLPGDTRMTQQLAAPEKAYVSRYALGRDYHKLIRKRIQQLAERIQQVVGPFGFRAFVDSAPVLEKAAGQQAGLGWIGKNTLLLNRKAGSWFFLGELFVDIALPVDDPTTRDHCGSCHACLDVCPTEAFVGERLLDARRCISYLTIELKGAIPIELRDKIGNRVFGCDDCQIVCPWNRFARPTEQSDFQPRHSLDNAELATLFRWTEEEFLSRTEGSPLRRAGYQRWLRNLAVGLGNAPSSIPVLEALQARRDDPSELVREHVEWALAQHALRQPD

SEQ ID NO: 80130 - protein, 176 aa, Pseudomonas sp.
  REGION 1..176: note = tr|A0A348R284|A0A348R284_PSESP tRNA epoxyqueuosine(34) reductase QueG (Fragment); OS = Pseudomonas sp. OX=306 GN=queG PE=4 SV=1
EPTARDHCGSCHACLDICPTEAFVGERVLDARKCISYLTIELKGSIPVELRSKIGNRVFGCDDCQIVCPWNRFAKPTQQTDFQPRHSLDNAELATLFRWTEDEFLSRTEGSPLRRTGYQNWLRNLAVGLGNAPSSIPVLEALQSRRDDSSELVREHVEWALAQHEQRSSSASDSGN

SEQ ID NO: 80131 - protein, 357 aa, Pseudomonas sp.
  REGION 1..357: note = tr|A0A2I0CMF4|A0A2I0CMF4_9PSED Epoxyqueuosine reductase OS=Pseudomonas sp. ZYSR67-Z OX=1905276 GN=queG; PE = 3 SV=1
MPTSPLDLATLAASIKEWARELGFQQAGICEPQLDEQEAHLQRWLDAGYHGEMDYMAAHGSKRSRPAELVPGTLRVISLRMDYLPGDTRMSQRLAQPEQAYVSRYALGRDYHKLIRKRLQQLAERIQQAIGPFGFRAFVDSAPVLERAIARQAGLGWVGKHSLILNRRAGSWFFLGELFVDVPLPVDAPLDSEHCGRCTACLDICPTQAFVAPYVLDARRCISYLTIELKGPIPEALRPLIGNRVFGCDDCQIVCPWNRFARPSEQSDFQPRHGLDNSSLAELFLWSEEEFLQRTEGSPLRRAGYQRWLRNLAVGLGNAPSTIPVLQALRARQDDPSELVREHVAWALRQHAERDAQ

SEQ ID NO: 80132 - protein, 356 aa, Pseudomonas straminea
  REGION 1..356: note = tr|A0A1I1Y5I7|A0A1I1Y5I7_PSEOC Epoxyqueuosine reductase OS=Pseudomonas straminea OX=47882 GN=queG PE=3; SV = 1
MTDAAPDLASLAQSIKDWGRELGFQQVGISGLELGEHEAHLQRWLDAGYQGEMDYMAAHGRKRSHPDELVPGTLRVVSLRMDYLPGDTQMAQRLQEPEKAYVSRYALGRDYHKLIRKRLQQLAERIQQAIGPFGYRAFVDSAPVLEKAIAEQSGLGWIGKNTLVLNRKAGSYFFLGELFVDIPLPEDAPHGSEHCGRCSACLDICPTAAFVGPYVLDARRCISYLTIELKGPIPEELRAPIGNRVFGCDDCQMVCPWNRFAKPTEQSDFQPRHSLDNAELAELFRWSEEEFLSRTEGSPLRRAGYERWLRNLAVGLGNAPSSIPVLEALEARREYPSELVREHVRWALEQHAQRQS

SEQ ID NO: 80133 - protein, 354 aa, Pseudomonas stutzeri
  REGION 1..354: note = tr|A0A3Q9B2E7|A0A3Q9B2E7_PSEST Epoxyqueuosine reductase OS=Pseudomonas stutzeri OX=316 GN=queG PE=3 SV=1
MPAITTDLPALAQSIKDWGRELGFQQVGISGLDLGEHEQHLERWLAAGYHGEMDYMGAHGSKRSHPEELVPGTLRVVSLRMDYLAGDTHMAKMLAQPEKAYVSRYALGRDYHKLIRKRVQQLADKIQAEIGPFGFRAFVDSAPVLEKAIAEQAGLGWIGKNTLVLNRKAGSYFFLAELFVDLPLPVDPPHATEHCGRCSACLDICPTNAFVGPYVLDARRCISYLTIELKGAIPQDLRPLIGNRVFGCDDCQIVCPWNRFARPSGESDFKPRHNLDNAGLAELFMWDEEKFLSSTEGSPLRRTGYENWLRNLAVGLGNAPSTIPVLEALKARREHPSELVREHVEWALKQHGLV

SEQ ID NO: 80134 - protein, 357 aa, Pseudomonas stutzeri
  REGION 1..357: note = tr|I4JHA3|I4JHA3_PSEST Epoxyqueuosine reductase; OS = Pseudomonas stutzeri TS44 OX=477228 GN=queG PE=3 SV=1
MPSPALDAAALAQSIKEWGRELGFQQVGITGVDLGEHEAHLDAWLAAGYQGEMDYMAAHGSKRSRPDELVPGTLRVISLRMDYLPGDTRMTQQLASPEKAYVSRYALGRDYHKLIRKRIQQLAERIQQVVGPLGFRAFVDSAPVLEKAAGQQAGLGWIGKNTLLLNRKAGSWFFLGELFVDIALPVDEPVTRDHCGSCHACLDVCPTEAFVGERLLDARRCISYLTIELKGPIPVELRDKIGNRVFGCDDCQIVCPWNRFARPTEQHDFQPRHSLDNADLAVLFRWSEEEFLSRTEGSPLRRAGYERWLRNLAVGLGNAPSSIPVLEALEARRDDPSELVREHVEWALAQHARGRTG

SEQ ID NO: 80135 - protein, 354 aa, Pseudomonas synxantha; identical to SEQ ID NO: 80032
  REGION 1..354: note = tr|A0A419UVI9|A0A419UVI9_9PSED Epoxyqueuosine reductase OS=Pseudomonas synxantha OX=47883 GN=queG PE=3; SV = 1

SEQ ID NO: 80136 - protein, 354 aa, Pseudomonas synxantha
  REGION 1..354: note = tr|I4KVS4|I4KVS4_9PSED Epoxyqueuosine reductase; OS = Pseudomonas synxantha BG33R OX=96901 GN=queG PE=3 SV=1
MPAITSDLPALAQSIKDWGRELGFQQVGISGLDLAEHEQHLQRWLDAGYHGEMDYMGAHGSKRSHPDELVPGTLRVVSLRMDYLPGDTQMAQLLGQPEKAYISRYALGRDYHKLIRKRVQQLADRIQAQIGPFGFRAFVDSAPVLEKAIAEQAGLGWIGKNTLVLNRKAGSYFFLSELFVDLPLPVDPPHTTEHCGRCTACLDICPTNAFVGPYVLDARRCISYLTIELKSAIPEDLRPLIGNRVFGCDDCQIVCPWNRFARPTAESDFKPRHNLDNAELAELFMWDEDKFLSSTEGSPLRRAGYERWLRNLAVGLGNAPSSIPVLEALKARRDYPSELVREHVEWALNQHAAR

SEQ ID NO: 80137 - protein, 364 aa, Pseudomonas syringae
  REGION 1..364: note = tr|A0A2K4X140|A0A2K4X140_PSESX Epoxyqueuosine reductase OS=Pseudomonas syringae OX=317 GN=queG PE=3 SV=1
MSAITAALPTRDDLAALALSIKAWGRELGFQEVGISGLDLAEHEQHLQRWLDAGYHGEMDYMAAHGSKRSHPDELVPGTLRVVSLRMDYLPGDTEMAQRLTEPEKAYVSRYALGRDYHKLIRKRLQQLAERIQQAIGPFGFRAFVDSAPVLEKAIAEQAGLGWIGKNTLVLNRKAGSFFFLGELFVDIPLPVDAPHATEHCGRCTACLDICPTAAFVGPYVLDARRCISYLTIELKTAIPEELRPLIGNRVFGCDDCQIVCPWNRFARPTDQSDFQPRHNLDNAGLAELFLWDEDKFLSSTEGSPLRRAGYERWLRNLAVGLGNAPSTIPVIEALQARRDYPSELVREHVEWALQRHGVADAGG

SEQ ID NO: 80138 - protein, 364 aa, Pseudomonas syringae
  REGION 1..364: note = tr|A0A0N8TI08|A0A0N8TI08_9PSED Epoxyqueuosine reductase OS=Pseudomonas syringae pv. viburni OX=251703; GN = queG PE=3 SV=1
MSAITAALPTLDDLAALTLSIKAWGRELGFQEVGISGLDLAEHEQHLQRWLDAGYHGEMDYMAAHGSKRSHPDELVPGTLRVVSLRMDYLPGDTEMAQRLTEPEKAYVSRYALGRDYHKLIRKRLQQLAERIQQAIGPFGFRAFVDSAPVLEKAIAEQAGLGWIGKNTLVLNRKAGSFFFLGELFVDIPLPVDAPHATEHCGRCTACLDICPTAAFVGPYVLDARRCISYLTIELKTAIPEELRPLIGNRVFGCDDCQIVCPWNRFARPTDQSDFQPRHNLDNAGLAELFLWDEEKFLGSTEGSPLRRAGYERWLRNLAVGLGNAPSTIPVIEALQARRDYPSELVREHVEWALQRHGVADAEG

SEQ ID NO: 80139 - protein, 379 aa, Pseudomonas taeanensis
  REGION 1..379: note = tr|A0A0A1YQG1|A0A0A1YQG1_9PSED Epoxyqueuosine reductase OS=Pseudomonas taeanensis MS-3 OX=1395571; GN = queG PE=3 SV=1
MGSDVWQNYTHLRSGFPLNMSPSTLDHTALATLAQSIKDWGRELGFQQVGIAGLDLAEHEAHLQRWLAAGYQGEMDYMAAHGSKRSHPEQLVPGTLRVVSLRMDYLPGDTQMAQRLSEPEKAYVSRYALGRDYHKLIRKRLQQLAERIQQHIGPFGYRAFVDSAPVLEKAIAEQAGLGWIGKNTLVLNRQAGSYFFLGELFVDIPLPVDAPHASEHCGRCTACLDICPTAAFVGPYLLDARRCISYLTIELKGSIPEELRAPIGNRVFGCDDCQLVCPWNRFARPTEQGDFQPRHSLDNAELAALFRWSEEEFLSRTEGSPLRRAGYERWLRNLAVGLGNAPSSIPVLEALKARREHPSALVREHVEWALARHAKRGGA

SEQ ID NO: 80140 - protein, 355 aa, Pseudomonas taetrolens
  REGION 1..355: note = tr|A0A0J6GPI8|A0A0J6GPI8_PSETA Epoxyqueuosine reductase OS=Pseudomonas taetrolens OX=47884 GN=queG PE=3; SV = 1
MPAITVDLPALAQSIKEWGRELGFQQVAIAGLDLGEHEQHLERWLAAGYHGDMEYMGAHGSKRSHPEELVPGTLRVVSLRMDYLPGDTHMAQLLAQPEKAYVSRYALGRDYHKLIRKRVQQLADRIQAAIGPFGFRAFVDSAPVLEKAIAQKAGLGWIGKNTLVLNRKAGSYFFLSELFVDLPLPEDPPHETEHCGRCTACLDICPTNAFVGPYVLDARRCISYLTIELKTAIPEDLRPLIGNRVFGCDDCQIVCPWNRFARPTTEGDFKPRHNLDNAELAELFMWDEDKFLSSTEGSPLRRAGYERWLRNLAVGLGNAPSSIPVLEALKARREYPSQLVQEHVAWALKQHAERA

SEQ ID NO: 80141 - protein, 354 aa, Pseudomonas taiwanensis; identical to SEQ ID NO: 80060
  REGION 1..354: note = tr|V7DEX7|V7DEX7_9PSED Epoxyqueuosine reductase; OS = Pseudomonas taiwanensis SJ9 OX=1388762 GN=queG PE=3 SV=1

SEQ ID NO: 80142 - protein, 359 aa, Pseudomonas thivervalensis
  REGION 1..359: note = tr|A0A176NND6|A0A176NND6_9PSED Epoxyqueuosine reductase OS=Pseudomonas thivervalensis OX=86265 GN=queG; PE = 3 SV=1
MPAIPTDLPALAQSIKEWGRELGFQQVGISGLDLAEHEQHLQRWLEAGYHGEMDYMGAHGSKRSHPEELVPGTLRVVSLRMDYLPGDTQMAQMLGQSEKAYVSRYALGRDYHKLIRKRVQQLAEKIQAVIGPFGYRAFVDSAPVLEKAIAEQAGLGWIGKNTLVLNRKAGSYFFLSELFVDLPLPIDPPHGTEHCGKCTACLDICPTNAFVGPYVLDARRCISYLTIELKSAIPEELRPLIGNRVFGCDDCQIVCPWNRFARPSGESDFKPRHNLDNAGLAELFMWDEDKFLSSTEGSPLRRAGYERWLRNLAVGLGNAPSTIPVLQALEARRDYPSELVREHVEWALRQHAERQTSSL

SEQ ID NO: 80143 - protein, 360 aa, Pseudomonas tolaasii
  REGION 1..360: note = tr|A0A2N0E4X6|A0A2N0E4X6_PSETO Epoxyqueuosine reductase OS=Pseudomonas tolaasii NCPPB 2192 OX=564423; GN = queG PE=3 SV=1
MPAITSDLPALAQSIKDWGRELGFQQVGISGLDLAEHEQHLQRWLDAGYHGEMEYMGAHGSKRSHPDELVPGTLRVVSLRMDYLPGDTQMAQLLAKPEKAYISRYALGRDYHKLIRKRVQQLADRIQAQIGPFGFRAFVDSAPVLEKAIAEKAGLGWIGKNTLVLNRKAGSYFFLSELFVDLPLPVDPPHSTEHCGRCTACLDICPTNAFVGPYVLDARRCISYLTIELKNAIPEDLRPLIGNRVFGCDDCQIVCPWNRFARATGESDFKPRHNLDNAELAELFMWDEEKFLSSTEGSPLRRAGYERWLRNLAVGLGNAPSSIPVLEALKARRDYPSELVREHVEWALNQHAARQCTSSL

SEQ ID NO: 80144 - protein, 376 aa, Pseudomonas toyotomiensis
  REGION 1..376: note = tr|A0A1I5PT28|A0A1I5PT28_9PSED Epoxyqueuosine reductase OS=Pseudomonas toyotomiensis OX=554344 GN=queG; PE = 3 SV=1
MHGSLTTDVWQNYTYVHRLRPPMSDQTLDLNALALSIKDWGRELGFQQVGITDVELGEHEAHLQRWLAAGYQGEMEYMAAHGSKRSHPDELVPGTLRVVSLRMDYLPGDTQMAQRLKESEQAYVSRYALGRDYHKLIRKRLQQLAERIQQQIGPFGYRAFVDSAPVLEKAIAEKAGLGWIGKNTLVLNRKAGSYFFLGELFVDLPLPVDAPHASEHCGRCSACMDICPTAAFAGPYVLDARRCISYLTIELKGSIPEELRAPIGNRVFGCDDCQIVCPWNRFARPTDQGDFQPRHGLDNSGLAELFMWTEEEFLSRTEGSPLRRAGYERWLRNLAVGLGNAPSTIPVLQALQARREHPSELVREHVEWALARHGAL

SEQ ID NO: 80145 - protein, 354 aa, Pseudomonas toyotomiensis
  REGION 1..354: note = tr|A0A2G5G073|A0A2G5G073_9PSED Epoxyqueuosine reductase OS=Pseudomonas toyotomiensis OX=554344 GN=queG; PE = 3 SV=1
MSDQTLDLNALALSIKDWGRELGFQQVGITDVELGEHEAHLQRWLAAGYQGEMEYMAAHGSKRSHPDELVPGTLRVVSLRMDYLPGDTQMAQRLKESEQAYVSRYALGRDYHKLIRKRLQQLAERIQQQIGPFGYRAFVDSAPVLEKAIAEKAGLGWIGKNTLVLNRKAGSYFFLGELFVDLPLPVDAPHASEHCGRCSACMDICPTAAFAGPYVLDARRCISYLTIELKGSIPEELRAPIGNRVFGCDDCQIVCPWNRFARPTDQGDFQPRHGLDNSGLAELFMWTEEEFLSRTEGSPLRRAGYERWLRNLAVGLGNAPSTIPVLQALQARREHPSELVREHVEWALARHGAL

SEQ ID NO: 80146 - protein, 390 aa, Pseudomonas tremae; identical to SEQ ID NO: 79964
  REGION 1..390: note = tr|A0A0Q0CF77|A0A0Q0CF77_9PSED Epoxyqueuosine reductase OS=Pseudomonas tremae OX=200454 GN=queG PE=3 SV=1

SEQ ID NO: 80147 - protein, 354 aa, Pseudomonas trivialis
  REGION 1..354: note = tr|A0A0H5A6Y9|A0A0H5A6Y9_9PSED Epoxyqueuosine reductase OS=Pseudomonas trivialis OX=200450 GN=queG PE=3; SV = 1
MPAITSDLPALAQSIKDWGRELGFQQVGISGLDLAEHEQHLQRWLDAGYHGEMEYMGAHGSKRSHPEELVPGTLRVVSLRMDYLPGDTQMAQLLAQPEKAYISRYALGRDYHKLIRKRVQQLADRIQAQIGPFGFRAFVDSAPVLEKAIAEQAGLGWIGKNTLVLNRKAGSYFFLSELFVDLPLPVDAPHSTEHCGRCTACLDICPTNAFVGPYVLDARRCISYLTIELKSAIPEDLRPLIGNRVFGCDDCQIVCPWNRFARATAESDFKPRHNLDNAELAELFMWDEDKFLSSTEGSPLRRAGYERWLRNLAVGLGNAPSSIPVLEALKARRDYPSELVREHVEWALNQHATR

SEQ ID NO: 80148 - protein, 355 aa, Pseudomonas trivialis
  REGION 1..355: note = tr|A0A0R2Z9L0|A0A0R2Z9L0_9PSED Epoxyqueuosine reductase OS=Pseudomonas trivialis OX=200450 GN=queG PE=3; SV = 1
MPVITSDLPALAQSIKDWGRELGFQQVGISGLDLAEHEQHLQRWLDAGYHGEMDYMGAHGSKRSHPDELVPGTLRVVSLRMDYLPGDTQMAHLLAQPEKAYISRYALGRDYHKLIRKRVQQLAERIQAQIGPFGFRAFVDSAPVLEKAIAEQAGLGWIGKNTLVLNRKAGSYFFLSELFVDLPLPVDAPHSTEHCGRCTACLDICPTNAFVGPYVLDARRCISYLTIELKSAIPEDLRPLIGNRVFGCDDCQIVCPWNRFARPTAESDFKPRHNLDNAGLAELFLWDEDRFLSSTEGSPLRRAGYERWLRNLAVGLGNAPSSIPVLEALKARRDYPSELVREHVEWALKQHAERQ

SEQ ID NO: 80149 - protein, 354 aa, Pseudomonas umsongensis
  REGION 1..354: note = tr|A0A1H2D0N2|A0A1H2D0N2_9PSED Epoxyqueuosine reductase OS=Pseudomonas umsongensis OX=198618 GN=queG; PE = 3 SV=1
MPAITTDLPALAQSIKDWGRELGFQQVGISGLDLAEHEQHLERWLAAGYHGEMEYMGAHGSKRSHPEELVPGTLRVVSLRMDYLSGDTRMAQLLAQPEKAYVSRYALGRDYHKLIRKRVQQLAEKIQAEIGPFGYRAFVDSAPVLEKAIAEKAGLGWIGKNTLVLNRKAGSYFFLAELFVDLPLPVDPPHATEHCGRCSACLDICPTNAFVGPYVLDARRCISYLTIELKGAIPEELRPLIGNRVFGCDDCQIVCPWNRFARPSGESDFKPRHNLDNAGLAELFMWDEDKFLSSTEGSPLRRAGYENWLRNLAVGLGNAPSTIPVLEALKARREHPSELVREHVEWALKQHGLV

SEQ ID NO: 80150 - protein, 359 aa, Pseudomonas vancouverensis
  REGION 1..359: note = tr|A0A1H2PCW6|A0A1H2PCW6_9PSED Epoxyqueuosine reductase OS=Pseudomonas vancouverensis OX=95300 GN=queG; PE = 3 SV=1
MPAITTDLPALAQSIKDWGRELGFQQVGISGLDLAEHEQHLERWLAAGYHGEMEYMGAHGSKRSHPEELVPGTLRVVSLRMDYLSGDTQMAKMLAQPEKAYVSRYALGRDYHKLIRKRVQQLAEKIQAEIGPFGYRAFVDSAPVLEKAIAEQAGLGWIGKNTLVLNKKAGSYFFLSELFVDLPLPVDPPHATEHCGRCTACLDICPTNAFVSPYVLDARRCISYLTIELKGAIPEDLRPLIGNRVFGCDDCQIVCPWNRFARPSGENDFKPRHNLDNAGLAELFMWDEDKFLSNTEGSPLRRAGYQSWLRNLAVGLGNAPSTIPVLEALKARREYPSELVREHVEWALKQHAERQASSL

SEQ ID NO: 80151 - protein, 355 aa, Pseudomonas veronii; identical to SEQ ID NO: 80082
  REGION 1..355: note = tr|A0A0R3BGC1|A0A0R3BGC1_9PSED Epoxyqueuosine reductase OS=Pseudomonas veronii OX=76761 GN=queG PE=3 SV=1

SEQ ID NO: 80152 - protein, 355 aa, Pseudomonas veronii
  REGION 1..355: note = tr|A0A1D3JQR8|A0A1D3JQR8_9PSED Epoxyqueuosine reductase OS=Pseudomonas veronii 1YdBTEX2 OX=1295141; GN = queG PE=3 SV=1
MPAITSDLPALAQSIKDWGRELGFQQVGISGLDLAEHEQHLQRWLDAGYHGEMEYMGAHGSKRSHPDELVPGTLRVVSLRMDYLPGDTHMAQRLAQPEKAYISRYALGRDYHKLIRKRVQQLAERIQAQIGPFGFRAFVDSAPVLEKAIAEKAGLGWIGKNTLVLNRKAGSYFFLSELFVDVPLPVDPPHATEHCGRCTACLDICPTNAFVGPYVLDARRCISYLTIELKSAIPEDLRPLIGNRVFGCDDCQIVCPWNRFARTTAESDFKPRHNLDNAQLAELFMWDEEKFLSSTEGSPLRRAGYERWLRNLAVGLGNAPSSIPVLEALKARRDYPSELVREHVEWALKQHAERQ

SEQ ID NO: 80153 - protein, 355 aa, unidentified
  source 1..355: note = Pseudomonas versuta
  REGION 1..355: note = tr|A0A0M4QKF6|A0A0M4QKF6_9PSED Epoxyqueuosine reductase OS=Pseudomonas versuta OX=1788301 GN=queG PE=3; SV = 1
MPAITVDLPALAQSIKEWGRELGFQQVAIAGLDLGEHEQHLERWLAAGYHGDMEYMGAHGSKRSHPEELVPGTLRVVSLRMDYLPGDTHMAQLLAQPEKAYVSRYALGRDYHKLIRKRVQQLADRIQADIGPFGFRAFVDSAPVLEKAIAQKAGLGWIGKNTLVLNRKAGSYFFLSELFVDLPLPVDAPHETEHCGRCTACLDICPTNAFVGPYVLDARRCISYLTIELKTAIPEDLRPLIGNRVFGCDDCQIVCPWNRFARTTAEGDFKPRHNLDNAGLAELFMWDEDKFLSNTEGSPLRRAGYERWLRNLAVGLGNAPSSIPVLEALKARREYPSELVQEHVEWALAQHEQRV

SEQ ID NO: 80154 - protein, 360 aa, Pseudomonas viridiflava
  REGION 1..360: note = tr|A0A1Y6JQY0|A0A1Y6JQY0_PSEVI Epoxyqueuosine reductase OS=Pseudomonas viridiflava OX=33069 GN=queG PE=3; SV = 1
MSAITAELPTADDLVTLAQSIKAWGRELGFQEVGISGLDLAEHEQHLQRWLEAGYHGEMDYMAAHGSKRSHPEELVPGTLRVVSLRMDYLPGDTEMAQRLSEPEKAYVSRYALGRDYHKLIRKRLQQLAERIQQAIGPFGFRAFVDSAPVLEKAIAEQAGLGWIGKNTLVLNRKAGSFFFLGELFVDIPLPVDPPHATEHCGRCTACLDICPTAAFVGPYVLDARRCISYLTIELKTSIPEELRPLIGNRVFGCDDCQIVCPWNRFARPTDQSDFQPRHNLDNAGLAELFLWDEDKFLSSTEGSPLRRAGYERWLRNLAVGLGNAPSTIPVIEALEARRDYPSEMVREHVAWALGRHGRS

SEQ ID NO: 80155 - protein, 362 aa, Pseudomonas viridiflava
  REGION 1..362: note = tr|A0A0W0IIN3|A0A0W0IIN3_PSEVI Epoxyqueuosine reductase OS=Pseudomonas viridiflava ICMP 13104 OX=1198305; GN = queG PE=3 SV=1
MSAITAELPTFDDLAALALSIKAWGRELGFQEVGISGLDLAEHEQHLQRWLDAGYHGEMDYMAAHGSKRSHPEELVPGTLRVVSLRMDYLPGDSEMAQRLTEPEKAYVSRYALGRDYHKLIRKRLQQLAERIQQAIGPFGFRAFVDSAPVLEKAIAEQAGLGWIGKNTLVLNRKAGSFFFLGELFVDIPLPVDAPHATEHCGRCTACLDICPTAAFVGPYVLDARRCISYLTIELKTAIPEELRPLIGNRVFGCDDCQIVCPWNRFARPTGQSDFQPRHNLDNAGLAELFLWDEEKFLGNTEGSPLRRAGYERWLRNLAVGLGNAPSTIPVVEALRARRDYPSELVREHVEWALRRHGVAPL

SEQ ID NO: 80156 - protein, 365 aa, Pseudomonas vranovensis
  REGION 1..365: note = tr|A0A423DYF7|A0A423DYF7_9PSED Epoxyqueuosine reductase OS=Pseudomonas vranovensis OX=321661 GN=queG; PE = 3 SV=1
MPASAPDLPALAQSIKDWGRELGFAHVGITGVDLGEHEKHLERWLEAGYHGEMDYMGAHGSKRSHPDELVPGTLRVVSLRMDYLPGDTRMAQQLAQPEKAYISRYALGRDYHKLVRKRVQHLAERIQKDIGPFGFRAFVDSAPVLEKAIAEQAGLGWIGKNTLLLNRKAGSYFFLAELFVDMPLPVDPPQASEHCGRCSACLDICPTQAFVGPYVLDARRCISYLTIELKSAIPEELRPLIGNRVFGCDDCQIVCPWNRFARPSGENDFKPRHNLDSAGLAELFMWDEQTFLDSTEGSPLRRAGYERWLRNLAVGLGNAPSTIQVLEALKARQDFPSELVREHVQWALGQHAMKTAASIKPQASS

SEQ ID NO: 80157 - protein, 357 aa, unidentified
  source 1..357: note = Pseudomonas wadenswilerensis
  REGION 1..357: note = tr|A0A380T7I6|A0A380T7I6_9PSED Epoxyqueuosine reductase OS=Pseudomonas wadenswilerensis OX=1785161; GN = queG PE=3 SV=1
MSASAPDLPTLAQSIKDWGRELGFAHVGIAGVDLGEHEKHLERWLEAGYHGEMDYMGAHGSKRSHPDELVPGTLRVVSLRMDYLPGDTRMAQQLAQPEKAYISRYALGRDYHKLVRKRVQHLAERIQKDIGPFGFRAFVDSAPVLEKAIAEQAGLGWIGKNTLLLNRKAGSYFFLAELFVDMPLPVDPPQASEHCGRCSACLDICPTQAFVGPYVLDARRCISYLTIELKSAIPEELRPLIGNRVFGCDDCQIVCPWNRFARPTGESDFKPRHNLDSAGLAELFMWDEQTFLDSTEGSPLRRAGYERWLRNLAVGLGNAPSTIQVLEALKARQDFPSELVREHVEWALAQHAERQAG

SEQ ID NO: 80158 - protein, 357 aa, unidentified
  source 1..357: note = Pseudomonas weihenstephanensis
  REGION 1..357: note = tr|A0A0J6INC4|A0A0J6INC4_9PSED Epoxyqueuosine reductase OS=Pseudomonas weihenstephanensis OX=1608994; GN = queG PE=3 SV=1
MPANTVDLPVLAQSIKEWGRELGFQQVAIAGLDLGEHEQHLERWLAAGYHGEMEYMGAHGSKRSHPEELVPGTLRVVSLRMDYLPGDTHMAQLLAQPEKAYVSRYALGRDYHKLIRKRVQQLADRIQAEIGPFGFRAFVDSAPVLEKAIAQKAGLGWIGKNTLVLNRKAGSYFFLSELFVDLPLPEDPPHDTEHCGRCTACLDICPTNAFVGPYVLDARRCISYLTIELKSAIPVELRSMIGNRVFGCDDCQIVCPWNRFARTTGEGDFKPRHNLDNAELAELFMWDEDTFLSSTEGSPLRRAGYERWLRNLAVGLGNAPSSIPVLEALKARREYPSELVQEHVAWALEQHAQRVSG

SEQ ID NO: 80159 - protein, 357 aa, Pseudomonas xanthomarina
  REGION 1..357: note = tr|A0A098FZ94|A0A098FZ94_9PSED Epoxyqueuosine reductase OS=Pseudomonas xanthomarina OX=271420 GN=yjeS; PE = 3 SV=1
MSSLSLDPAALAQSIKEWGRELGFQQVGITDVDLGEHEAHLEAWLAAGYQGEMDYMAAHGSKRSRPDELVPGTLRVISLRMDYLPGDTRMTQQLASPEKAYVSRYALGRDYHKLIRKRIQQLAERIQQMVGPFGFRAFVDSAPVLEKAAGQQAGLGWIGKNTLLLNRKAGSWFFLGELFVDIALPVDEPTTRDHCGSCHACLDVCPTDAFVGERLLDARRCISYLTIELKGAIPVELRDKIGNRVFGCDDCQIVCPWNRFARPTEQSDFQPRHSLDNAELATLFRWTEEEFLSRTEGSPLRRAGYQRWLRNLAVGLGNAPSSIPVLEALEARRDDPSELVREHVEWALAQHAQRQAD

SEQ ID NO: 80160 - protein, 363 aa, Pseudomonas xanthomarina
  REGION 1..363: note = tr|A0A1M5KCS4|A0A1M5KCS4_9PSED Epoxyqueuosine reductase OS=Pseudomonas xanthomarina DSM 18231 OX=1403346; GN = queG PE=3 SV=1
MSNSTLDPTALANSIKEWGRELGFQQIGITDVDLGEHEAHLERWLAAGYHGEMDYMAAHGSKRSHPEQLVPGTLRVVSLRMDYLPGDTRMAQQLAHPEKAYVSRYALGRDYHKLIRKRLQQLAERIQQVVGPFGFRAFVDSAPVLEKAVAEQAGLGWIGKNTLVLNRKAGSWFFLGELFVDIALPVDEPTARDHCGSCHACLDICPTEAFVGERVLDARRCISYLTIELKGPIPVELRSKIGNRVFGCDDCQIVCPWNRFAKPTGQTDFQPRHSLDNAELAALFRWTEDEFLSRTEGSPLRRTGYQNWLRNLAVGLGNAPSSIPVLEALQARRDDPSELVREHVQWALVQHERRSSSVSNSGG

SEQ ID NO: 80161 - protein, 355 aa, Pseudomonas xinjiangensis
  REGION 1..355: note = tr|A0A1H1M5F9|A0A1H1M5F9_9PSED Epoxyqueuosine reductase OS=Pseudomonas xinjiangensis OX=487184 GN=queG; PE = 3 SV=1
MPETAIDYAELAERIRGFAEELGFQQTGISQPDLAEHEAWLDAWLREGYHGEMEWMASHGSKRTRPAELVPGTQRVISVRMDYLPADTDMVRRLGQPDSAYVSRYALGRDYHKLMRKRLQQLAERIQGLIGPFGFRAFVDSAPVMERALASRSGLGWVGKNSMLINRQAGSFFFLGELYTDLPLPTDEPYQQEHCGRCTACLDKCPTDAFVGDRVLDARRCISYLTIELKGSIPDELRSKMGNRVFGCDDCQLVCPWNRFARPTTEPDFSPRHELDQADLVELFRWDEASFLRNTEGSPIRRIGFERWLRNLAVGLGNASTSIPVVEALKSRRDHPSELVREHVQWALERHGEHQ

SEQ ID NO: 80162 - protein, 360 aa, unidentified
  source 1..360: note = Pseudomonas yamanorum
  REGION 1..360: note = tr|A0A143GQP7|A0A143GQP7_9PSED Epoxyqueuosine reductase OS=Pseudomonas yamanorum OX=515393 GN=queG PE=3; SV = 1
MPAITYDLPALAQSIKDWGRELGFQQVGISGLDLAEHEQHLQRWLDAGYHGEMDYMGAHGSKRSHPEELVPGTLRVVSLRMDYLPGDTQMAQLLAKPEKAYISRYALGRDYHKLIRKRVQQLADRIQAQIGPFGFRAFVDSAPVLEKAIAEQAGLGWIGKNTLVLNRKAGSYFFLSELFVDLPLPVDPPHTTEHCGRCTACLDICPTNAFVGPYVLDARRCISYLTIELKSAIPEELRPLIGNRVFGCDDCQIVCPWNRFARPTDEGDFKPRHNLDNAELAELFMWDEDKFLSNTEGSPLRRAGYERWLRNLAVGLGNAPSSIPVLEALKARREYPSELVREHVEWALNQHAERQCTSSL

SEQ ID NO: 80163 - protein, 354 aa, unidentified
  source 1..354: note = Pseudomonas yangmingensis
  REGION 1..354: note = tr|A0A1I4PQG5|A0A1I4PQG5_9PSED Epoxyqueuosine reductase OS=Pseudomonas yangmingensis OX=1720063 GN=queG; PE = 3 SV=1
MSDSSKDPQQLAEQIRRIASELGFQQVGISDVDLGDHEQRLQQWLDAGLHGEMEWMASHGSKRTRPEELVPGTLRVISVRLDYLPGDTRMAQRLSEPDSAYISRYALGRDYHKMMRRRLQQLAEQIQQLIGPFGYRAFVDSAPVMERALASRAGLGWVGKNTMLINRKAGSYFFLGELFTDLPLPLDTPDNSNHCGRCEACLTRCPTDAFIGPHVLDARRCISYLTIELKGSIPEDLRKPMGNRVFGCDDCQLVCPWNRFAKPSAETDFSPRHQLDQADLVSLFRWSEEEFLSRTEGSPIRRIGYQRWLRNLAVGLGNAHSSIPVIEALRSQRDHPDPLVREHVQWALAQHGEG

SEQ ID NO: 80164 - protein, 354 aa, unidentified; identical to SEQ ID NO: 80046
  source 1..354: note = Pseudomonas zeshuii
  REGION 1..354: note = tr|A0A1M6CPD9|A0A1M6CPD9_9PSED Epoxyqueuosine reductase OS=Pseudomonas zeshuii OX=1076620 GN=queG PE=3; SV = 1

SEQ ID NO: 80165 - protein, 360 aa, unidentified
  source 1..360: note = Pseudomonas zhaodongensis
  REGION 1..360: note = tr|A0A3M2HQ40|A0A3M2HQ40_9PSED Epoxyqueuosine reductase OS=Pseudomonas zhaodongensis OX=1176257 GN=queG; PE = 3 SV=1
MSSHAPDPADLALSIKEWGRELGFQQVGITGVDLAEHEAHLERWLAAGYHGEMDYMAAHGSKRSHPEQLVPGTLRVISLRMDYLPGDTRMAEQLAQPEKAYVSRYALGRDYHKLIRKRLQQLAERIQGVIGPFGFRAFVDSAPVLEKAVAQQAGLGWIGKNTLVLNRKAGSWFFLGELFVDIELPVDEPNARDHCGSCRACLDICPTEAFVGERVLDARRCISYLTIELKGPIPVELRSKIGNRVFGCDDCQIVCPWNRFARPTEQIDFQPRHSLDNAELATLFRWTEDEFLSRTEGSPLRRTGYQNWLRNLAVGLGNAPSSIPVLEALKSRREDQSDMVREHVEWALAEHEARGSTGSS

SEQ ID NO: 80166 - protein, 363 aa, unidentified
  source 1..363: note = Pseudomonas zhaodongensis
  REGION 1..363: note = tr|A0A365PWT1|A0A365PWT1_9PSED Epoxyqueuosine reductase OS=Pseudomonas zhaodongensis OX=1176257 GN=queG; PE = 3 SV=1
MSSTTLDPAALADSIKEWGRELGFQQVGITGVDLGEHEAHLERWLAAGYQGEMDYMAAHGSKRSHPEQLVPGTLRVISLRMDYLPGDTRMAEQLAQPEKAYVSRYALGRDYHKLIRKRLQQLAERIQHVIGPFGFRAFVDSAPVLEKAVAQQAGLGWIGKNTLVLNRKAGSWFFLGELFVDIALPVDEPTDRDHCGSCHACLDVCPTDAFVGERVLDARKCISYLTIELKGPIPVELRSKIGNRVFGCDDCQIVCPWNRFAKPTQQTDFQPRHSLDNAELATLFRWTEEEFLSRTEGSPLRRTGYQSWLRNLAVGLGNAPSSIPVLEALQARRDDPSELVREHVQWALAQHEQRPPAYPHTGD

SEQ ID NO: 80167 - protein, 353 aa, unidentified
  source 1..353: note = Pseudooceanicola antarcticus
  REGION 1..353: note = tr|A0A285HR35|A0A285HR35_9RHOB Epoxyqueuosine reductase OS=Pseudooceanicola antarcticus OX=1247613; GN = queG PE=3 SV=1
MPGDTLVETLKRQALAEGFSAVRICAPEAVPQVAGRLQAFLEAGFHGQMQWMEERSHWRGDPAQLWPEAQSIIMLAENYGPDHDPLAVLEQPDRAGISVYAQNKDYHDVVKKRLKRLARWLIAEAGPQEDGAAAQVKVFVDTAPVPEKALGQAAGLGWQGKHTNLVSRELGSWFFLGAIFTTLELPRDAPEVDHCGQCRRCLDACPTDAFPAPYQLDARRCISYLTIEHKGPVPEELRPALGNRIYGCDDCLAVCPWNKFARRASEVKYHARDDLNAPALAELAGLDDAAFRARFSGSPIKRIGRDRFLRNVAYAIGNSGRADLRTAVAPLAEDPDPTLAEAARWALDRLPSA

SEQ ID NO: 80168 - protein, 347 aa, unidentified
  source 1..347: note = Pseudooceanicola atlanticus
  REGION 1..347: note = tr|A0A0A0EI36|A0A0A0EI36_9RHOB Epoxyqueuosine reductase OS=Pseudooceanicola atlanticus OX=1461694; GN = queG PE=3 SV=1
MAGLKARLVDQALAEGFDACRICRPGDVPEVAGRLRAFLDAGYHGQMGWMEDRAHWRGDPSVLWPEARSVIMLAESYTPEHDPLEVLEHPDRAAISVYAQNRDYHDLVKKRLKRVARWLIAETDPEVQVKVFVDTAPVPEKPLGQAAGLGWQGKHTNLVGRGLGNWFFIGSVFTTLELEPDAAEVDHCGSCRRCLDVCPTDAFPAPYQLDARRCISYLTIEHKGPVDPDLRPLMGNRIYGCDDCLAICPWNKFAVEAREIRYRGREDLTAPALEELAALDDAGFRARFSGSPIKRIGRDRFVRNVLYAIGNSGQARLRPVAQRLTDDPDDSVADAARWAAARLAEAV

SEQ ID NO: 80169 - protein, 349 aa, unidentified
  source 1..349: note = Pseudooceanicola batsensis
  REGION 1..349: note = tr|A3TWG1|A3TWG1_PSEBH Epoxyqueuosine reductase; OS = Pseudooceanicola batsensis (strain ATCC BAA-863 / DSM 15984 / KCTC 12145 / HTCC2597) OX=252305 GN=queG PE=3 SV=1
MGHDLKNRLIAQAAELGFDACRICRPGDIPEVPERLAAFLGAGFHGQMSWLAERSHWRADPETLWPEARSVIMLAENYGPDHDPLDILDRPDRGAVSVYARNRDYHDVVKKRLKRLARWLIAEAGTEPEVKVFVDTAPVAEKPLGHAAGLGWQGKHTNLVSRDLGSWFFIGSVFTTLDLPPDEAETDHCGSCRRCLDICPTDAFPAPYQLDARRCISYLTIEHDGPVDPDLRPALGNRIYGCDDCLAVCPWNKFAQTAQEARYHAREDLAAPHLAELAALDDAAFRRKFSGSPIKRIGRNRFVRNVLYAIGNSADPMFADIAGRLRTDPDPTVAEAAEWALRRLGGHKT

SEQ ID NO: 80170 - protein, 348 aa, unidentified
  source 1..348: note = Pseudooceanicola flagellatus
  REGION 1..348: note = tr|A0A1W2AJ23|A0A1W2AJ23_9RHOB Epoxyqueuosine reductase OS=Pseudooceanicola flagellatus OX=1387277; GN = queG PE=3 SV=1
MQDLKDRLIAQALADGFDACRICRPWDVPQVAGRLAAFLESGAHGQMGWLAERSHWRGDPAALWPEARSVIMLAENYGPSHDPLEVLDQRDRAAISVYAQNRDYHDVVKKRLKRVGRWLIDAAAKSSSEAPEIKVFVDTAPVPEKPLGAAAGLGWQGKHTNLVSRDLGSWFFLGSIFTTLNLPADAAERDHCGSCRACLDVCPTNAFPASYRLDARRCISYLTIEHHGPVDEALRPLLGNRIYGCDDCLAVCPWNKFAQTAAEVKYHPRAELLAPRLAELAALDDAAFRALFSGSPVKRIGRGRFVRNVLYAIGNSGDAELRGVAQGLCDDADATVADAARWAVSRLD

SEQ ID NO: 80171 - protein, 335 aa, unidentified
  source 1..335: note = Pseudooceanicola lipolyticus
  REGION 1..335: note = tr|A0A2M8J4U1|A0A2M8J4U1_9RHOB tRNA epoxyqueuosine(34) reductase QueG (Fragment); OS = Pseudooceanicola lipolyticus OX=2029104 GN=queG PE=3; SV = 1
MGAALKARLVEQALAEGFVSCRICRPWDVPQVAARLQAFLAAGFHGQMGWLAERSHWRGDPAQLWPEARSVIMLAESYAPERDPLEVLDRRDRGAISVYAQNRDYHDLVKKRLKRLARWLIAEAGGEVKVFVDTAPVPEKALGQAAGLGWQGKHTNLLSRDWGNWAFLGSVFTTLDLPADMAEQDHCGSCRACLDICPTDAFPAPYRLDARRCISYLTIEHKGPVEEALRARMGNRIYGCDDCLAVCPWNKFAVAASDLRYAARAELQAPKLAELARLDDAGFRALFSGSPIKRIGRDRFVRNVLYAIGNSGDATLRGVAQGLCDDPDPAVADAA

SEQ ID NO: 80172 - protein, 353 aa, unidentified
  source 1..353: note = Pseudooceanicola marinus
  REGION 1..353: note = tr|A0A1X7A2Z3|A0A1X7A2Z3_9RHOB Epoxyqueuosine reductase OS=Pseudooceanicola marinus OX=396013 GN=queG; PE = 3 SV=1
MTEALKRKLLDQARAEGFSAARLCAPEAVPDVAERLRAFLAAGYHGQMSWLADRSHWRGDPSALWPEARSILMLAENYGPDHDPLEVLGHPDRAGITVYAQNRDYHDVVKKRLKRLARWLIAEAGPQADGEAAQVKVFVDTAPVPEKALGQAAGLGWQGKHTNLVSRELGSWFFLGAIFTTLELPLDDAEVDHCGRCRRCLDACPTDAFPQPYQLDARRCISYLTIEYKGPIPEELRAKLGNRIYGCDDCLAVCPWNKFAERAAEVKYHARDDLLAPPLAELAALDDTAFRARFSGSPIKRIGRDRFVRNVAYAIGNSGRPDLLPAVEALTGDADPVVAEAAGWAVAQLRARS

SEQ ID NO: 80173 - protein, 341 aa, unidentified
  source 1..341: note = Pseudooceanicola nitratireducens
  REGION 1..341: note = tr|A0A1I1HGD1|A0A1I1HGD1_9RHOB Epoxyqueuosine reductase OS=Pseudooceanicola nitratireducens OX=517719; GN = SAMN05421762_0249 PE=4 SV=1
MKEALVSRALEEGFSLCRVCRPGDIPHAADRLHAFLEAGYHGQMGWMAERTAWRGDPAALWPEARSVIMLAENYTPDCDPMEVVGQPESAAISVYARNRDYHDVVKKRLKRVARWLLEAAKEGEVKVFVDTAPVMEKPLGQAAGLGWQGKHTNLVSRDLGSWFFLGAIFTTLELEPDAAEVDHCGSCRRCLTACPTDAFPAPYRLDARRCISYLTIEHAGPVDEALRPMLGNRIYGCDDCLAACPWNKFAAEAAEVKYHARPDLVAPDLEELAGLDDAGFRALFSGSPIKRIGRGRFVRNVLYAIGNSGAGRFRPVTRALCADADPVVADAAQWALERLPE

SEQ ID NO: 80174 - protein, 346 aa, unidentified
  source 1..346: note = Pseudooceanicola sp.
  REGION 1..346: note = tr|A0A2E2P5J4|A0A2E2P5J4_9RHOB Epoxyqueuosine reductase OS=Pseudooceanicola sp. OX=1914328 GN=queG PE=3; SV = 1
MDAGLKARLVAQARDEGFVACRVCRPGDVPEVAGRLAEFLDLGRHGQMGWMAERSHWRGDPAALWPEARSVIMLAESYTPEVDPRAVLERSERGAISVYAQNRDYHDLVKKRLKRLARWLIEAAGGAEVKVFVDTAPVPEKPLGQAAGLGWQGKHTNLLSRDWGNWAFLGSIFTTLELPVDASEVDHCGSCRACLDVCPTDAFPAPYHLDARRCISYLTIEHHGPVDSELRGLMGNRIYGCDDCLAVCPWNKFAVAASDMRYAARPDLVAPELAELAVLDDAAFRAMFSGSPIKRIGRDRFVRNVLYAIGNSGRRALRAVAQGLVDDADPTVADAARWAAERLAEA

SEQ ID NO: 80175 - protein, 346 aa, unidentified
  source 1..346: note = Pseudooctadecabacter jejudonensis
  REGION 1..346: note = tr|A0A1Y5SCF2|A0A1Y5SCF2_9RHOB Epoxyqueuosine reductase OS=Pseudooctadecabacter jejudonensis OX=1391910; GN = queG PE=3 SV=1
MSEDLKDRLKARAFEEGFAGFGVCRPDAVPQIAERLARFVEEGRHGQMAWMGERMAWRGNPTALWPEAKSVVMLAEPYTPEHDPLAVLEQRDRAAISVYAQNRDYHDLVKKRLKRVGRWLVDAASCEIKVFVDTAPVMEKPLAAAAGLGWQGKHTNLLSRALGNWFFLGAIFTTVELPVDRRGEERCGSCRACLDACPTDAFPAPFQLDARRCISYLTIEHKGPVPEDLRGLMGNRIYGCDDCLAVCPWNKFAAEAREVRYAARADLLAPPLRELAALDDAAFRSMFSGSPIKRIGRDRFVRNVLYAIGNSADASLFLVAQGLVEDPAPEVADAARWACGQLRETI

SEQ ID NO: 80176 - protein, 309 aa, unidentified
  source 1..309: note = Pseudopedobacter saltans
  REGION 1..309: note = tr|A0A2W5ER51|A0A2W5ER51_9SPHI Epoxyqueuosine reductase OS=Pseudopedobacter saltans OX=151895 GN=queG; PE = 3 SV=1
MDLQKRSIWIKQLAQKSGFDYCGIAKAQQLDKEATYLEQWLNQGMHGKMQYMENHFDMRIDPRKLVPGAKSVITFFKNYYPNTISDNKEIKISKYAYGSDYHDVIRSQLKLLLKDINEKFGEVQGRGFVDSAPVLERAWAEKAGIGWQGKNGMVINRQSGSFFFIATLIVDLELTYDDPIAKDFCGTCTRCIDACPTEAILPNKVVDGSKCISYFTIELKDQLIPDNYKGKFDNWMFGCDTCQDVCPWNRFSKPNKEPLFSPIPEILNFKEKDWEEMTEEEFKKVFKNSPLKRSKFEGIRRNLKFLNLQ

SEQ ID NO: 80177 - protein, 313 aa, unidentified
  source 1..313: note = Pseudopedobacter saltans
  REGION 1..313: note = tr|F0S927|F0S927_PSESL Epoxyqueuosine reductase; OS = Pseudopedobacter saltans (strain ATCC 51119 / DSM 12145 / JCM 21818 / LMG 10337 / NBRC 100064 / NCIMB 13643) OX=76 2903 GN=queG PE=3 SV=1
MNEQQKLKYSEMIKAEAKRLGFLFCGISKAEFLEEEASRLEKWLRNDYQGEMAYMNNHFDKRLDPRLLVDGAKSVISIALNYYTDAKQNDESAPKISKYAYGTDYHFVIKDKLKSLHHFIEENIGAVSGRAFVDSAPVLDKAWAKKGGLGWVGKNANIINNKSGSFFFLGELIVDMELAYDVPFSTDHCGTCTRCIDACPTEAIVSPYVVDGSKCISYLTIELKEEIPHSFKNKMDNWMFGCDVCQNVCPWNRFSVIHQEEAFNPHPDLLEMSKRDWEEITEEVFGKVFKKSAVKRTKIAGLKRNITFIKTVE

SEQ ID NO: 80178 - protein, 352 aa, unidentified
  source 1..352: note = Pseudopelagicola gijangensis
  REGION 1..352: note = tr|A0A1M6ARL5|A0A1M6ARL5_9RHOB Epoxyqueuosine reductase OS=Pseudopelagicola gijangensis OX=1470563; GN = queG PE=3 SV=1
MADDLKSKLVAEAQEMGFDSCRICRPDAVGHVPEGLSAYLAKGHHGQMGWLAERTHWRGNPSVLWPEAKSVIMLGESYSPEHDPTAVLEMPDRAAISVYAQNKDYHEIVKKRLKRLARWLIAEVGDETQVKVFVDTAPVPEKPLGQAAGLGWQGKHTNLVSRELGSWFFIGSVFTTVELETDYAEIDHCGSCRACLDACPTDAFPAPNQIDARRCISYLTIEHHGPVDLQFRPLLGNRIYGCDDCLAACPWNKFAVEAREMRYHARDDLMAPKLSSLVELDDASFRTYFSGSPIKRIGRNRFIRNVLYAIGNSDDINLLPKVRALQTDPDETVVDAAHWAEEQLKQVANRQV

SEQ ID NO: 80179 - protein, 344 aa, unidentified
  source 1..344: note = Pseudopuniceibacterium sediminis
  REGION 1..344: note = tr|A0A399IYZ5|A0A399IYZ5_9RHOB Epoxyqueuosine reductase OS=Pseudopuniceibacterium sediminis OX=2211117; GN = queG PE=3 SV=1
MTEFLRDRLLAQARGEGFSAARLCLPGDVPEVPGRLAAFLQAGRHGQMRWLEERSQWRGDPTALWPEARSVLMLAENYGPDSDPLAVLAQRDRAAISVYAQNRDYHDVVKKRLKRVARWLVSEAPGCEVKVFVDTAPVPEKALGQAAGVGWQGKHTNLVSRDLGSWFFLGAIFTTLELFPDAAESDHCGGCRRCLDVCPTDAFPAPYQLDARRCISYLTIEHKGPVDEELRARMGNRIYGCDDCLAVCPWNKFARRASEVKYHARDDLRAPSLAELAALDDAGFRARFSGSPIKRIGRDRFVRNVLYAIGNSAVPSLLPVAQGLTEDADATVADAARWAVARLR

SEQ ID NO: 80180 - protein, 310 aa, Pseudoramibacter alactolyticus
  REGION 1..310: note = tr|E6MEH4|E6MEH4_9FIRM Putative iron-sulfur cluster-binding protein OS=Pseudoramibacter alactolyticus ATCC 23263 OX=887929 GN=HMP0721_0407 PE=4 SV=1
MCKRILAIVDEAQIRALARTLNIPLIGITDPTPLNNFLPRLQARQGANGRTIPFVRTEAEKRIDFRSVMPTVQTVIVIGVPYPLFPERAAVPGEGRIASVACGEDYHRVVGRKMAALVAALKDLSPEPHAFQTYVDNSCLIDKASAWRAGLGFFGKNNLLIHPDYGSAFNIGQILTDLPVAFTKAAPMPCRCGDCDRCLKACPTGALGEGFALDYTRCLSNLTQQKRLLPEEATHIQTFVYGCDYCQWSCPFNRKAATISATQAYGDLEMLSEIAEADFETNFGERSLAWRGAAVLRRNARLVKAKNTKK

SEQ ID NO: 80181 - protein, 382 aa, unidentified
  source 1..382: note = Pseudorhizobium pelagicum
  REGION 1..382: note = tr|A0A081MH13|A0A081MH13_9RHIZ Epoxyqueuosine reductase OS=Pseudorhizobium pelagicum OX=1509405 GN=queG; PE = 3 SV=1
MSPPQPDRRRQEKLTAFIKAEAAAQGFDLCRITHAGSIPEATARLDTFLADGHHGTMGWMEETRDRRGSPTALWPEARSVVMFGLNYGPDEDPRALQAKPSQGAISVYARNRDYHDVIKGRLKEIATRFAARAGEDVKVFVDTAPVMEKPLAEAAGLGWQGKHTNLLSRSHGSWLFLGSLFTTADLILDAPEVDHCGSCRACLDACPTNAFPAPYRLDARRCISYLTIEHKGPIDPDLRPLIGNRIYGCDDCLAACPWNKFAVSASEMKLKARDDLKEPSLAFLLGLDDAAFRSFFSGSPVKRIGRDRFIRNVLMAAGNSADPKLIAPCLALAGDASPMVRGMAIWALKQLMQAEEFERFATSAQGEHDPEVLDEWRLAGAL

SEQ ID NO: 80182 - protein, 340 aa, unidentified
  source 1..340: note = Pseudorhodobacter antarcticus
  REGION 1..340: note = tr|A0A1H8E2F1|A0A1H8E2F1_9RHOB Epoxyqueuosine reductase OS=Pseudorhodobacter antarcticus OX=1077947; GN = SAMN05216227_100812 PE=4 SV=1
MQAFRDTLHARALTEGFAAMGICAPDATPHTPDRLAQFVDLGRHGQMGWMAERMAWRGSAAALWPDARSVIMLAEPYTPPENPLPVLALRDRAAVSVYAQGRDYHDLVKKRLKRLGRWVVDQTGAEIKVFVDTAPVMEKPLAQAAGLGWQGKHTNLLSRDLGNWFFLGAIFTTLDLPRDGPETSHCGNCTACLDICPTNAFPAPYQLDARRCISYLTIEHAGPVDLELRALMGNRIYGCDDCLAICPWNKFAVAASEIGYARRVGAPPLADLASLDDAAFRTRFSGSPIKRIGRNRFIRNVLYAIGNSGNPSLRTAAAPHLIDPDDTVADAARWAIARLS

SEQ ID NO: 80183 - protein, 384 aa, Pseudorhodobacter sp.
  REGION 1..384: note = tr|A0A5C7TJA8|A0A5C7TJA8_9RHOB Epoxyqueuosine reductase OS=Pseudorhodobacter sp. OX=1934400 GN=queG PE=3; SV = 1
MTAAELAQLAHDIKLWARELGFDQVGIADTDLTLEEPKLQAWLDAGYHGTMDYMARHGMMRARPHELLPGTLRVISVRMNYLPFEAGFAATLRDPTLGYISRYALGRDYHKVLRNRLKQLGERIELRCDTLLRAAGQTLGEWRPFVDSAPILERPLAAKAGLGWVGKHSLLINESAGSFFFLGELLIALPLPVDAPVEKELCGKCVACINICPTGAIIAPYVVDGRRCISYLTIENDGPIPEEFRPLMGNRIYGCDDCQLICPWNRYANASPEPDFSPRPNLHRPPLLTLWGWSEAEFLKHTEGSPIRRIGYQRWRRNLAVALGNGPASSEVLAALQQALPEAGPMVAEHIEWALATLARRQQEGTKKTRLLIRCIEKGLPDHA

SEQ ID NO: 80184 - protein, 342 aa, Pseudorhodobacter sp.
  REGION 1..342: note = tr|A0A4P8EFI5|A0A4P8EFI5_9RHOB tRNA epoxyqueuosine(34) reductase QueG OS=Pseudorhodobacter sp. S12M18 OX=2500533 GN=queG PE=4 SV=1
MDAAAFRAVLHDRALAEGFSAMGICAPDATSDTAERLAQYVDLGRHGQMGWMAERMGWRGSAAALWPEARSVIMLAEVYTPPENPLPVLELRDQAAVSVYAQGRDYHDLVKKRLKRLGRWMVDQTGAQIKVFVDTAPVMEKPLAQAAGLGWQGKHTNLLSRDLGNWFFLGSIFTTMELPRDAPETSHCGNCTACLDICPTKAFPAPYQLDARRCISYLTIEHNGPIDPDLRPLLGNRIYGCDDCLAICPWNKFAVTASENGYAHRVGAPPLAELVALDDASFRTRFSGSPVKRIGRNRFIRNVLYAIGNSGNPTLREAAQPLLADPDATVADAAAWAIARLS

SEQ ID NO: 80185 - protein, 360 aa, Pseudorhodoferax soli
  REGION 1..360: note = tr|A0A368XAQ8|A0A368XAQ8_9BURK Epoxyqueuosine reductase OS=Pseudorhodoferax soli OX=545864 GN=queG PE=3; SV = 1
MVQIDALRLVSQIRDWASALGFSQIGIAPVDLSSAEPGFAAWLAAGFHGEMAYMAHHGMKRARPAELVAGTLSVLTARMDYLPQDTPPDWQAQEFARLERPGEAIVSVYARGRDYHKVLRARLQKLAERIAEAVGPLGFRVFTDSAPVLEAELAARSGQGWRGKHTLVLNREGGSMFFLGEIYLDIALPPSAPVSAHCGQCQACIDVCPTGAIVGPQRLDARRCISYLTIEHAGPIPLPLRHLLANRIYGCDDCQLACPWNKFAGRAALPDFDAREGLAGSALATLFGWSEDEFLRRTEGSPIRRIGHERWLRNIAVALGNALRQAPADERAPLRTALQTHAAHASALVREHVAWALAQG

SEQ ID NO: 80186 - protein, 357 aa, Pseudorhodoferax sp.
  REGION 1..357: note = tr|A0A0S9M3H7|A0A0S9M3H7_9BURK Epoxyqueuosine reductase OS=Pseudorhodoferax sp. Leaf265 OX=1736315; GN = queG PE=3 SV=1
MDALRLVSRIRDWASALGFSQIGIAPVDLSSAEPGFAAWLAAGFHGEMDYMARHGMKRARPAELVVGTLSVLTARMDYLPQDTPPDWQAAEFARLARPGEAIVSVYARGRDYHKVLRTRLQKLAERIAQEVGPLGSRVFTDSAPVLEAELAARSGQGWRGKHTLVLNRTGGSMFFLGEIYLDIALPVSAPVTAHCGECQACIDVCPTGAIVGPQRLDARRCISYLTIEHAGPIPLPLRPLLANRIYGCDDCQLACPWNKFAGRAALPDFDARDGLAGSALAALFGWSEDEFLRRTEGSAIRRIGHERWLRNIAVALGNALRQAPADERAPLRAALQARAGHASALVREHVAWALAQG

SEQ ID NO: 80187 - protein, 358 aa, Pseudorhodoferax sp.
  REGION 1..358: note = tr|A0A0S9NXP1|A0A0S9NXP1_9BURK Epoxyqueuosine reductase OS=Pseudorhodoferax sp. Leaf274 OX=1736318; GN = queG PE=3 SV=1
MDALRLVSHIRDWASALGFSQIGIAPVDLSSAEPGFAAWLAAGFHGEMAYMAAHGMKRARPAELVQGTLSVLTARMDYLPQDTPADWQAREFARLERPTEAIVSVYARGRDYHKVLRARLQKLAERIAQEVGPLGFRVFTDSAPVLEAELAARSGQGWRGKHTLVLNREGGSMFFLGEIYLDIALPASDAVTAHCGQCQACIDICPTGAIVGPQRLDARRCISYLTIEHAGPIPLPLRHLLANRIYGCDDCQLACPWNKFAGRSALPDFDAREGLAGSALATLFGWSEDEFLRRTEGSPIRRIGHERWLRNIAVALGNALRQLPAGEQAPLRAALQARAGHASALVREHVDWALAQQG

SEQ ID NO: 80188 - protein, 360 aa, Pseudoruegeria aquimaris
  REGION 1..360: note = tr|A0A1Y5TDL2|A0A1Y5TDL2_9RHOB Epoxyqueuosine reductase OS=Pseudoruegeria aquimaris OX=393663 GN=queG; PE = 3 SV=1
MDGLKQRLVAQALAEGFSACRVTHPGAVPEIAERLERFVEAGRHGQMGWMAERMHWRGNPAALWPEARSVIMLAEAYTPQEDPLALLEARDRAAISVYARNRDYHDIVKKRLKRVGRWLLEQRPGEEIKVFVDTAPVMEKPLAAAAGLGWQGKHTNLLSRDLGNWFFLGAIFTTIELPPDAAARPSCGSCRACLDACPTEAFPAPFQLDARRCISYLTIEHDGPVDEDLRARMGNRIYGCDDCLAVCPWNKFAVQAREMRYAARPELLEPKLADLAELDDGAFRALFSGSPIKRIGRNRFIRNVLYAIGNSGDISLRAKAEALCADPDATVADAARWAVARLSNEGSEKSSGVVNGPAKA

SEQ ID NO: 80189 - protein, 342 aa, unidentified
  source 1..342: note = Pseudoruegeria haliotis
  REGION 1..342: note = tr|A0A2T0RTL3|A0A2T0RTL3_9RHOB Epoxyqueuosine reductase OS=Pseudoruegeria haliotis OX=1280846 GN=queG; PE = 3 SV=1
MDGLRARLEAQARAEGFVAMGVCRPDSIGHVPEALSTFVAEGYHGQMEWMADRMAWRGDPVALWPEARSVIVLAESYSPDDDPRDGLEQRNCGNISVYARGKDYHDLVKKRLKRLARWLIAEAGGEVKVFVDTAPVAEKPLAQAAGLGWQGKHTNLVSRDMGNWVFLGSIFTTLELPTDPAEVDHCGSCRSCLDVCPTAAFVAPYRMDARRCISYLTIEHKGQIPEDLREGLGNRIYGCDDCLAACPWNKFAVAASDMRYAARDGTLAPPLAELAALDDRAFRERFAGSPIKRIGRNRFVRNVLYAIGNSGAPALIATAKPLLDDPDPAVADAAQWAIDRLS

SEQ ID NO: 80190 - protein, 345 aa, Pseudoruegeria lutimaris
  REGION 1..345: note = tr|A0A1G8R9V0|A0A1G8R9V0_9RHOB Epoxyqueuosine reductase OS=Pseudoruegeria lutimaris OX=571298 GN=queG; PE = 3 SV=1
MTRLRDRLERQAVAEGFSLMRICRPDAIAHVPGELAEFVERGFHGQMDWMTERMAWRGDPSALWPEARSIILLAESYSPEEDPEANIANPELATVSVYARGKDYHDLVKKRLKRLARWLIAEGGGEVKVFVDTAPVAEKPLGQAAGLGWQGKHTNLVSRDLGNWFFIGSVFSTLELEPDEPEQDHCGSCRACLDACPTEAFVAPYRMDARRCISYLTIEHHGPVDPELRARMGNRIYGCDACLAACPWNKFAVEASDLRYAARGDLAAPPLAELAQLDDSAFRARFSGSPIKRIGRNRFVRNVLYAIGNSGQPGFRAIVENLCEDPDSTVADAANWALSRLPGVS

SEQ ID NO: 80191 - protein, 354 aa, Pseudoruegeria sp.
  REGION 1..354: note = tr|A0A1X4IVS3|A0A1X4IVS3_9RHOB Epoxyqueuosine reductase OS=Pseudoruegeria sp. SK021 OX=1933035 GN=queG; PE = 3 SV=1
MTLTEGTDGAALKSALIAQARTEGFAKTGICRPDAVPELAARLAAFIAQDRHGQMGWMAERTGWRGDPAALWPQARSVIMLAEPYTPAEDPLAVLDQPSCGAISVYARNRDYHDLVKKRLKRVGRWLIEQAPGAEIKVFVDTAPVMEKPLAAAAGLGWQGKHTNLLGRDLGNWFFLGAIFTTLDLPTDAPGVESCGSCTACLDVCPTGAFPAPFQLDARRCVSYLTIEHAGPVDLELRPRLGNRIYGCDDCLAVCPWNKFAVAATEMRYAAREDLTAPHLSLLCGLDDAAFRAMFSGSPIKRIGRNRFVRNVLYAIGNSADQGLVSTARARLEDDDPTVRDAAEWAVARLREPT

SEQ ID NO: 80192 - protein, 311 aa, Pseudosphingobacterium domesticum
  REGION 1..311: note = tr|A0A1H7IKX3|A0A1H7IKX3_9SPHI Epoxyqueuosine reductase OS=Pseudosphingobacterium domesticum OX=407022; GN = queG PE=3 SV=1
MQSAAASYSKLIKDEAKRLGFSFCGIAEATFLEDEAPRLETWLKGQMHGEMHYMENHFDKRLDPRLLVDGAKSVISLGFNYYNSDLQSDKESPKISKYAYGMDYHTVIKDRLKLLLAYIQTEIGEVGGRAFVDSAPVLERAWAKKSGLGWVGKNGNLINKKHGSFFFLCELIIDLPLAYDIPPTKDYCGTCTKCIDACPTEAIVAPQIVNGSKCISYLTIELKNEIPQEFAGKMDNWMFGCDVCQDVCPWNRFSEPHKEEAFHPHPDLLDMKQRDWEEITEETFQRVFKKSAVKRAKFAGLTRNIKFLKNS

SEQ ID NO: 80193 - protein, 366 aa, Pseudospirillum japonicum
  REGION 1..366: note = tr|A0A1H6QRS7|A0A1H6QRS7_9GAMM Epoxyqueuosine reductase OS=Pseudospirillum japonicum OX=64971 GN=queG; PE = 3 SV=1
MPTQAELATLADFAKHTARDLGFSACGITDTHIPAETLHQYQAWLDAGYHGEMDYLERNIDKRAEPARLVEGSTRIICVRMDYLPAQVDTLKVLQQGERAYISRYALGRDYHKLIRKRLTQLGQALQQKAADLGFRAFVDSAPVLERPLAQQAGLGWIGKNTLVIHPRAGSLFFLGELFISLPLPIDTPYTREHCGQCDACQRLCPTQAFVAPYVLDARRCISYLTIEYSGSIPLALRPLIGNRIFGCDDCQLVCPWNRFSQPTQETDFSPRHHLDRAHLLDLLAWTQEEFLTRTQGSPIRRAGYRQWQRNLAIALGNAPYHLEIYQALAHQCHQHQEDALLLEHFTWALQQQTNKQATFIEVQAV

SEQ ID NO: 80194 - protein, 379 aa, unidentified
  source 1..379: note = Pseudovibrio axinellae
  REGION 1..379: note = tr|A0A165YYY5|A0A165YYY5_9RHOB Epoxyqueuosine reductase OS=Pseudovibrio axinellae OX=989403 GN=queG PE=3; SV = 1
MTDKQAARVKAELIKRARAIGFDDVRVTTADAIPLAPERLHHFIEQGYHATMEWMPETEVRRSSPLELWPEARSVIMLAMNYGPDVDPMEMREKPDKAHISVYARNRDYHDIIKGKMKELASLLVSKGGGDVKVFVDTAPVMEKPLAHSAGLGWQGKHSNLVSRELGSWFFLGSIFSTLDLPLDEPEVDHCGNCKRCLTVCPTSAFPSAYQVDANRCISYLTIEHHGPIPMEFRRNMGNRIYGCDDCLAVCPWNKFAQSASEAKLQAREDLLEPALTDLLKLDDAAFRSFFSGNPVKRIGRNRFIRNCLIAAGNSSDAQLLPQVVEHLQDDDETVRATAVWALSQLVPSAAFEEHKSAALADEQSELVKVEWETVSHES

SEQ ID NO: 80195 - protein, 378 aa, Pseudovibrio denitrificans
  REGION 1..378: note = tr|A0A1I7B6D0|A0A1I7B6D0_9RHOB Epoxyqueuosine reductase OS=Pseudovibrio denitrificans OX=258256 GN=queG; PE = 3 SV=1
MTEKQAARVKADLIKRARAIGFDDIRITTADAIPLAPERLHHFIEQGYHATMEWMPETELRRSSPLELWPEARSVIMLAMNYGPDIDPMEMREKPDKAHISVYARNRDYHDIMKGKMKELASLLVSKGGGDVKVFVDTAPVMEKPLAYSAGLGWQGKHSNLVSRELGSWFFLAAIFSTLDLPLDEPEVDHCGNCKRCLTVCPTKAFPAPYQVDANRCISYLTIEHHGPIPLEFRKPIGNRIYGCDDCLSVCPWNKFAQSASEAKLQAREDLMEPALADLLQMDDPSFRKFFSGSPVKRIGRNRFIRNCLIAAGNSAEEKLIPRVLEHLQDEDETVRATAVWALAQLVSEADFEMHKSAVIADEPSEVVRAEWEQGTSS

SEQ ID NO: 80196 - protein, 378 aa, Pseudovibrio sp.
  REGION 1..378: note = tr|G8PNU4|G8PNU4_PSEUV Epoxyqueuosine reductase; OS = Pseudovibrio sp. (strain FO-BEG1) OX=911045 GN=queG; PE = 3 SV=1
MTEKQAARVKADLIKRARAIGFDDIRITTADAIPLAPERLHHFIEQGYHATMEWMPETEVRRSSPLELWPEARSVVMLAMNYGPDIDPMEMREKPDKAHISVYARNRDYHDIMKGKMKELASLLVSKGGGDVKVFVDTAPVMEKPLAYSAGLGWQGKHSNLVSRELGSWFFLAAIFSTLDLPLDEPEVDHCGNCKRCLTVCPTKAFPAPYQVDANRCISYLTIEHHGPIPLEFRKPMGNRIYGCDDCLSVCPWNKFAQSASEAKLQAREELMEPALADLLQMDDPTFRKFFSGSPVKRIGRNRFIRNCLIAAGNSAEEKLIPCVLEHLRDEDETVRATAVWALAQLVSEADFEMHKSAAFKNEQSEVVRTEWEQGTSS

SEQ ID NO: 80197 - protein, 378 aa, Pseudovibrio sp.
  REGION 1..378: note = tr|A0A166EI88|A0A166EI88_9RHOB Epoxyqueuosine reductase OS=Pseudovibrio sp. WM33 OX=1735585 GN=queG PE=3; SV = 1
MTEKQAARVKADLIKRARAVGFDDIRITTADAIPLAPERLHHFIEQGYHATMEWMPETEVRRSSPLELWPEARSVVMLAMNYGPDIDPMEMRDKPDKAHISVYARNRDYHDIVKGKMKELASLLVSKGGGDVKVFVDTAPVMEKPLAHSAGLGWQGKHSNLVSRELGSWFFLGAIFSTLDLPLDEPEVDHCGNCKRCLTVCPTKAFPAPYQVDANRCISYLTIEHHGPIPLEFRKPIGNRIYGCDDCLSVCPWNKFAQSASEAKLQAREDLMEPALAELLQMDDPTFRKFFSGSPVKRIGRNRFIRNCLIAAGNSAEEKLIPNVLNHLRDEDETVRASAVWALAQLVSTTDFEKHKRALLVGETSGVVKAEWEQGTSS

SEQ ID NO: 80198 - protein, 364 aa, Pseudoxanthobacter soli
  REGION 1..364: note = tr|A0A1M7ZD03|A0A1M7ZD03_9RHIZ Epoxyqueuosine reductase OS=Pseudoxanthobacter soli DSM 19599 OX=1123029; GN = SAMN02745172_01149 PE=4 SV=1
MLARAAELGFDDCRIARPGDAALRATRLEAFLDAGRHGTMDWLAEAPERRADPRRLWPDVASVIMLGLNYGPAPDAWAARDDAGAGLISVYARNRDYHDVIKGRLKMLGQSLVARAGGEIKVFVDTAPVMEKPLAAEAGLGWQGKHTNLVSRRFGSWLFLGAVFTTLDIAPDAPERDHCGSCRACLDACPTAAFPAPYQIDARRCVSYLTIEHKGPIPVDLRPGIGNRIYGCDDCLAACPWNKFAEAGRETKLAARDDLAAPRLADLAALDDAGFRALFSGSPIKRIGRDRFVRNVLVAIGNSGDEALLPAVTARLDDGAPVVRGAAAWALGRLAPETFAAERDRRLAGEADPETRTEWLTPPR

SEQ ID NO: 80199 - protein, 363 aa, unidentified
  source 1..363: note = Pseudoxanthomonas composti
  REGION 1..363: note = tr|A0A4Q1JUT2|A0A4Q1JUT2_9GAMM Epoxyqueuosine reductase OS=Pseudoxanthomonas composti OX=2137479 GN=queG; PE = 3 SV=1
MQAHVPAPAAAVPDYAAMARRLRMLAQDFGFQRFGITGIDLAQDEAHLQRWLDEGLHGTMEWMARHGDKRARPDALIPGTLRVISVGLDYGRNDSDEAWQTLADGRRAYVARYALGRDYHKLMRNRLQKLAERMQAEVGAFGHRVFVDSAPVLERALARNAGLGWIGKHTCLIDRDGGSWFFLGEIYVDIPLPVDVPATAHCGSCVRCIEVCPTQAIVAPHRLDARRCIAYLTIEHEGAIPVEMRVPIGNRIFGCDDCQLVCPWNKFAKRSDEPDFRARNDLDVATLPQLFAWDEDEFLRRTEGSPIRRSGHERWLRNIAVALGNAPRTPEVMQALASRRDHPSALVREHVAWAITQQDTERA

SEQ ID NO: 80200 - protein, 362 aa, Pseudoxanthomonas dokdonensis
  REGION 1..362: note = tr|A0A0R0CR71|A0A0R0CR71_9GAMM Epoxyqueuosine reductase OS=Pseudoxanthomonas dokdonensis OX=344882; GN = queG PE=3 SV=1
MSEMVAATRPLPPPQLQALAQRVRGLAREFGFQRCGISDINLSQDEAHLQDWLANGLYGSMHWMAQHGSKRSRPAELIPGTLRVISVGLDYGRNDGDEAWQTLADGQRAYVARYALGRDYHKLMRNRLQQLASRIQQEVGSFGHRVFVDSAPVLERALARNAGLGWIGKHTCLIDKDGGSWFFLGEIYVDLPLPVDAPASAHCGSCVRCIDICPTAAIIAPHRLDARRCISYLTIEHDGSIPEALRKPIGNRIFGCDDCQLVCPWNKFAKRNDEPDFRARNDLDVATLPQLFAWEEDEFLRRTEGSAIRRSGHERWLRNIAVALGNAPGRPDILQALASRRDHPSPLVREHVAWALRQHGVS

SEQ ID NO: 80201 - protein, 363 aa, Pseudoxanthomonas indica
  REGION 1..363: note = tr|A0A1T5J187|A0A1T5J187_9GAMM Epoxyqueuosine reductase OS=Pseudoxanthomonas indica OX=428993 GN=queG; PE = 3 SV=1
MSPALATTIDYTALAARVRALAAEFGFQRCGIADIELGADEDHLRDWLTQGLYGSMDWMARHGDLRSRPHELLPGTLRVISVGLDYGRNDGDEAWQTLADGSRAYVARYALGRDYHKLMRNRLQKLADRLQQEVGAFGHRVFVDSAPVLERALARNAGLGWIGKHTCLIDKDGGSWFFLGEIYVDLPLPVDAPASAHCGTCTRCIDICPTQAITAPYRLDARRCISYLTIEHAGSIPEELRVPIGNRIFGCDDCQLVCPWNKFAQRTDEPDFRARNDLDTATLPQLFAWDEAEFLRRTEGSAIRRSGHERWLRNIAVALGNAPTTPEVQAALASRRDDPSDIVREHVAWAIAQHEQRARQEKL

SEQ ID NO: 80202 - protein, 359 aa, Pseudoxanthomonas sp.
  REGION 1..359: note = tr|A0A543DTZ9|A0A543DTZ9_9GAMM Epoxyqueuosine reductase OS=Pseudoxanthomonas sp. 3HH-4 OX=1690214; GN = queG PE=3 SV=1
MFPPGPTTSAPDPHTLALRVRALAREFGFQRCGIAGIELGDDEQHLRDWLAQGLYGSMAWMAHHGDKRARPQELIPGTLRVISVGLDYGRNDSDDAWDTLQDGTRAYVARYALGRDYHKLMRNRLQKLAERLQQEVGAFGHRVFVDSAPVLERALARNAGLGWIGKHTCLIDRDGGSWFFLGEIYVDLALPVDAPASAHCGTCTRCIDVCPTQAITAPYRLDARRCISYLTIEHDGAIPEDLRPAIGNRIFGCDDCQLVCPWNKFAKRTDEPDFRARNDLDVATLPQLFAWDGDEFLRRTEGSAIRRSGHERWLRNIAVALGNAPATPDVLAALESRREDPSPLVREHVAWALHRHRSL

SEQ ID NO: 80203 - protein, 362 aa, Pseudoxanthomonas sp.
  REGION 1..362: note = tr|A0A3R8MM41|A0A3R8MM41_9GAMM Epoxyqueuosine reductase OS=Pseudoxanthomonas sp. SGD-10 OX=2493089; GN = queG PE=3 SV=1
MSPTPPASPAQPAAIDLVAAARRVRELAREHGFQRCGISGVDLAEDEAHLRDWLAQGLYGTMDWMARHGTARSRPRELVPGTVRVVSVGLDYGQDGDQAWATLADGRRAYVARYALGRDYHKLMRNRLQKLAERLQREFGAFGYRVFVDSAPVLERALGRNAGLGWIGKHTCLIDKDGGSWFFLGEIYLDLPLPVDPPASAHCGTCSRCIPACPTGAITAPYRLDARRCISYLTIEHDGPIPEELRPAIGNRIFGCDDCQLVCPWNKFARRTDEPDFRARNNLDQATLAELFAWEEEEFLRRTEGSAIRRSGHERWLRNIAVALGNAPTTPEVVAALESRREHPSQLVREHVAWALERHRGA

SEQ ID NO: 80204 - protein, 356 aa, Pseudoxanthomonas spadix
  REGION 1..356: note = tr|A0A3M6Q124|A0A3M6Q124_9GAMM Epoxyqueuosine reductase OS=Pseudoxanthomonas spadix OX=415229 GN=queG; PE = 3 SV=1
MSACSATPIDLHALAAQARTLSRQLGFQRCGITGVELGQDQEHLRSWLAEGLYGSMDWMARHADMRSRPAELIPGTLRVISVGLDYGHDDSSQAWATLANGERAYVARYALGRDYHKLMRKRLQTLATRLQEQVGPMGHRVFVDSAPVLERALARNAGLGWIGKHTCLIDRHGGSWFFLGEIYVDIPLPVDTPASAHCGSCVRCIDVCPTQAIIAPHRLDARRCIAYLTIEHEGPIPIELRKPIGNRIFGCDDCQLVCPWNKFARRTDEPDFRARNDLDVATLPQLFAWDEAEFLTRTEGSAIRRSGHQRWLRNIAVALGNAPSSPAVLQALASRRDDASPLVREHVAWALAQHEA

SEQ ID NO: 80205 - protein, 356 aa, Pseudoxanthomonas spadix
  REGION 1..356: note = tr|G7USF6|G7USF6_PSEUP Epoxyqueuosine reductase; OS = Pseudoxanthomonas spadix (strain BD-a59) OX=1045855; GN = queG PE=3 SV=1
MSACSATPIDLHALAAQVRALSRELGFQRCGITGVELGQDQEHLRSWLAEGLYGSMDWMARHGDMRSRPAELIPGTLRVISVGLDYGHDDSSQAWATLANGERAYVARYALGRDYHKLMRGRLQKLAMRLQEQVGPIGHRVFVDSAPVLERALARNAGLGWIGKHTCLIDRHGGSWFFLGEIYVDIPLPVDTPASAHCGSCVRCIDVCPTQAIIAPHRLDARRCIAYLTIEHEGPIPIELRKPIGNRIFGCDDCQLVCPWNKFARRTDEPDFRARNDLDVATLPQLFAWDEAEFLTRTEGSPIRRSGHQRWLRNIAVALGNAPSSPAVLEALASRREDDSALVREHVGWALAQHEA

SEQ ID NO: 80206 - protein, 359 aa, Pseudoxanthomonas suwonensis
  REGION 1..359: note = tr|A0A2W4YBR1|A0A2W4YBR1_9GAMM Epoxyqueuosine reductase OS=Pseudoxanthomonas suwonensis OX=314722; GN = queG PE=3 SV=1
MSAASSPHVDVASLAVRIKSLARRLGFQRCGISGIDLSEDEGHLRDWLAQGLYGSMDWMARHGDKRARPQELVPGTIRVISVGLDYGQDDDQAWQTLHDGERAYVARYALGRDYHKRMRQRLQSLADAVADVIGPFGYRAFTDSAPVLERALARNAGLGWIGKHTCLIDKNGGSWFFLGELYVDIPLPIDAPADNHCGTCSRCITVCPTQAITAPYRLDARRCISYLTIEHDGSIPEDLRPLIGNRIFGCDDCQLVCPWNKFARRTDDADFRARNNLDTATLAELFAWSETEFLQRTEGSAIRRSGYRRWLRNIAVALGNAPRTEAVLVALDSRRDDDPVVREHVQWALHMQERRPTRR

SEQ ID NO: 80207 - protein, 370 aa, Pseudoxanthomonas suwonensis
  REGION 1..370: note = tr|E6WU96|E6WU96_PSEUU Epoxyqueuosine reductase; OS = Pseudoxanthomonas suwonensis (strain 11-1) OX=743721; GN = queG PE=3 SV=1
MAGGSYNRGMSPTLPASPAEPAAIDLVAATRRVRELAREHGFQRCGISGVDLAEDEAHLRDWLAQGLYGTMEWMARHGTARSRPQELVPGTVRVVSVGLDYGQDDEAAWQTLADGRRAYVARYALGRDYHKLMRNRLQKLAERLQQEFGSFGYRVFVDSAPVLERALARNAGLGWIGKHTCLIDRDGGSWFFLGEIYLDLPLPVDPPASAHCGTCSRCIPACPTGAITAPYRVDARRCISYLTIEHDGAIPADLRPAMGNRIFGCDDCQLVCPWNKFARRTDEPDFRARNDLDRATLAQLFAWEEDEFLRRTEGSAIRRSGHERWLRNIAVALGNAPTTPEVIAALESRRGHPSALVREHVAWALERHGR

SEQ ID NO: 80208 - protein, 362 aa, Pseudoxanthomonas taiwanensis; identical to SEQ ID NO: 80203
  REGION 1..362: note = tr|A0A562D310|A0A562D310_9GAMM Epoxyqueuosine reductase OS=Pseudoxanthomonas taiwanensis J19 OX=935569; GN = queG PE=3 SV=1

SEQ ID NO: 80209 - protein, 356 aa, unidentified
  source 1..356: note = Pseudoxanthomonas wuyuanensis
  REGION 1..356: note = tr|A0A286D9A6|A0A286D9A6_9GAMM Epoxyqueuosine reductase OS=Pseudoxanthomonas wuyuanensis OX=1073196; GN = queG PE=3 SV=1
MLPVRLPDPAALAHRVRELARALGFQRCGIAGIELGQDEAHLRDWLAKGLYGSMEWMARHGDKRARPDELIPGTLRVISVGLDYGRNDSDDAWHTLADGERAYVARYALGRDYHKLMRNRLQKLAERIQAEVGPFGHRVFVDSAPVLERALARNAGLGWIGKHTCLIDKDGGSWFFLGEIYVDLPLPIDAPASAHCGTCTRCIEICPTQAITAPYRLDARRCISYLTIEHEGAIPEDLRPAIGNRIFGCDDCQLICPWNKFAKRTDEADFRARNDLDTATLPQLFAWSEDEFLQRTEGSAIRRSGYERWLRNIAVALGNAPATPAVLEALASRRDHESAVVREHVAWALQRHASNT

SEQ ID NO: 80210 - protein, 308 aa, Pseudozobellia sp.
  REGION 1..308: note = tr|A0A2E5BBW4|A0A2E5BBW4_9FLAO Epoxyqueuosine reductase OS=Pseudozobellia sp. OX=2024854 GN=queG PE=3; SV = 1
  VARIANT 212: note = Xaa can be any naturally occurring amino acid
MVYNKSRYCDLIKQEAARLGFLSCGISKAEFLEAEAPRLEKWLNNQMHGEMGYMANHFDKRLDPRLLVDGAKSVISLLLNYYPEEEQKSSTYKISKYAYGQDYHHVIKSKLRELHNFIVEEIGEVNGRAFVDSAPVLDKAWAAKSGLGWIGKNSNLLTQQVGSFYFIAELIVDLELDYDTPVTDHCGTCTACIDACPTNAIVEPYVVDGSKXISYFTIELKNEIPNEFQGKFDDWAFGCDVCQDVCPWNRFSKPHREPLFDPHPDLLNMSKKDWEEMTEDVFKKVFKKSAVKRTKFSGLKRNIDFLKK

SEQ ID NO: 80211 - protein, 306 aa, Pseudozobellia sp.
  REGION 1..306: note = tr|A0A3B0C693|A0A3B0C693_9FLAO Epoxyqueuosine reductase OS=Pseudozobellia sp. CCMM003 OX=2419782 GN=queG; PE = 3 SV=1
MHGKGRHTVLIKEEAKRLGFLSCGISKAAFLEEEAPRLEKWLKNSMHGEMHYMENHFDKRLDPTKLVDGAKSVISLLLNYYPSESQIQDTFKVSKYAYGMDYHFVIKEKLKNLLQFIQEEIGEVHGRAFVDSAPVLDKAWAAKSGLGWMGKHSNLLTQKVGSFYFIAELIVDLELDYDAPVTDHCGSCTACIDACPTEAIVEPYVVDGSKCISYFTIELKNEIPTSVKDQFEDWIFGCDVCQDVCPWNRFSKSHDEPLFHPKPELLSMTKKDWEEITEDVFRKVFQKSAVKRTKFSGLKRNINFIK

SEQ ID NO: 80212 - protein, 306 aa, Pseudozobellia thermophila
  REGION 1..306: note = tr|A0A1M6KJG8|A0A1M6KJG8_9FLAO Epoxyqueuosine reductase OS=Pseudozobellia thermophila OX=192903 GN=queG; PE = 3 SV=1
MNKKADYSKLIKDEAKRLGFLSCGISKADFLEEEAPRLETWLKKGMHGEMGYMENHFDKRLDPRLLVDGAQSVISLLLNYYPEKKQDEGSYKISKYAYGQDYHHVIKSKLRQLQEFISSEIGEVNGRAFVDSAPVLDKAWAAKSGLGWVGKNSNLITQKVGSFYFIAELIVDLELAYDTPVTDHCGTCTACIDACPTQAIVEPYVVDGSKCISYFTIELKNEIPEDYRGKFDDWAFGCDVCQDVCPWNRFSKPHSEPLFDPHPDLLDMTRQDWEEITEEVFRKVFKKSAVKRTKYTGLKRNIDFLK

SEQ ID NO: 80213 - protein, 379 aa, Psychrobacillus insolitus
  REGION 1..379: note = tr|A0A2W7PCW2|A0A2W7PCW2_9BACI Epoxyqueuosine reductase OS=Psychrobacillus insolitus OX=1461; GN = C7437_103230 PE=4 SV=1
MNINQFQNNLIEYAASIGIDKIGFTSASPFHELKNRLVRQQELGYASGFEESDIEKRTHPELLLSEAESIIAIAIAYPSKMKDAPSSTKGARRGIFARASWGMDYHTVLREKLALLELFILTHIPDAKLRSMVDTGELSDRAVAERAGIGWSAKNCAVITPEFGSYVYLGEMVTSIPFAPSEQMEDQCGDCRLCLDICPTGALIEGGQLNAQRCIAFITQTKTMVPDEFRAKIGNRIYGCDTCQTICPKNKAKANLHQEAFKPDPELVKPLLIPLLSMTNRSFKETYGHMSGAWRGKNPIQRNAIIALAHFKEASAVPTLIKLMENDARPVIRGTAAWAIGKINTEEGLVALKKAEQTEEVQEVLEEIRKGLLFYTLEK

SEQ ID NO: 80214 - protein, 379 aa, unidentified
  source 1..379: note = Psychrobacillus lasiicapitis
  REGION 1..379: note = tr|A0A544SV85|A0A544SV85_9BACI tRNA epoxyqueuosine(34) reductase QueG OS=Psychrobacillus lasiicapitis OX=1636719 GN=queG PE=4 SV=1
MNINQFQQQLIEYAASIGIDKIGFTSASPFKELKNRLIRQQELGYASGFEESDIEKRAHPELLLSDAESIISIAIAYPSKMKDAPKSIKGARRGIFARASWGTDYHTVLREKLALLELYILTHIPDAKLRSMVDTGELSDRAVAERAGIGWSAKNCAVITPEFGSYVYLGEMITSIPFAPSEQMEDQCGECTLCLDICPTGALIQGGQLNAQRCIAFITQTKTMVPDEFRTKIGNRIYGCDTCQTICPKNKGKANLHQEAFTPDPELVKPLLLPLLNMTNRTFKETYGHMSGAWRGKNPIQRNAILALAHFKEVSAVPTLIELMEKDARPVIRGTAAWAIGKINTEEGLTALKKAEQNEKVEEVLAEIRKGLEFYTIEK

SEQ ID NO: 80215 - protein, 379 aa, Psychrobacillus psychrodurans
  REGION 1..379: note = tr|A0A1I4WN55|A0A1I4WN55_9BACI Epoxyqueuosine reductase OS=Psychrobacillus psychrodurans OX=126157; GN = SAMN05421832_11684 PE=4 SV=1
MNIIQFQQNLIDYAASIGIDKIGFTSVSPFHELKNRLIRQQELGYASGFEESNIEKRVHPKMLLEESSSIISIAIAYPSKMKDAPQSVKGARRGIFARASWGIDYHTVLREKLALLELYILTHIPDAKLRSMVDTGELSDRAVAERAGIGWSAKNCSIITPEFGSYVYLGEMITSIPFAPSEQMEEQCGDCRLCLDVCPTGALIQGGQLNAQRCIAFITQTKTMVPDEFRTKIGNRIYGCDTCQTVCPKNKGKANLHQESFKPDPELVKPLLLPLLKMTNRTFKETYGHMSGAWRGKNPIQRNAIIALAHFKEQEAVPTLIDLMQNDARPVIRGTAAWAIGKINSKEGLLALKKAEQHEQVEEVLKEIRKGLEYYTIEN

SEQ ID NO: 80216 - protein, 379 aa, Psychrobacillus psychrotolerans
  REGION 1..379: note = tr|A0A1I6B7S4|A0A1I6B7S4_9BACI Epoxyqueuosine reductase OS=Psychrobacillus psychrotolerans OX=126156; GN = SAMN05421670_0227 PE=4 SV=1
MNIIQFQENLIDYAASIGIDKIGFTSVSPFHELKNRLIRQQELGYASGFEEPDIEKRVHPENLSEEASSIISIAIAYPSKMKDAPQSVKGARRGIFARASWGIDYHTVLREKLALLELYILSHIPDAKLRSMVDTGELSDRAVAERAGIGWSAKNCAIITPEFGSYVYLGEMITSIPFESSEQMEDQCGDCRLCLDVCPTGALIEGGQLNAQRCIAFITQTKTMVPDEFRAKIGNRIYGCDTCQTVCPKNKGKANLHQESFKPEPELVKPLLLPLLKMTNRTFKETYGHMSGAWRGKNPIQRNAIIALAHFKEQAAVPTLIDLMQHDARPVIRGTAAWAIGKINTQEGLLALQEAEQSEQVDEVLEEIRKGLEYYTVEN

SEQ ID NO: 80217 - protein, 379 aa, unidentified
  source 1..379: note = Psychrobacillus soli
  REGION 1..379: note = tr|A0A544T0I1|A0A544T0I1_9BACI tRNA epoxyqueuosine(34) reductase QueG OS=Psychrobacillus soli; OX = 1543965 GN=queG PE=4 SV=1
MNINQFQQQLIEYAASIGIDKIGFTSASPFHELKNRLIRQQELGYASGFEEPDIEKRTHPELLLSEAESIIAIAIAYPSKMKNAPQSVKGARRGIFARASWGTDYHTVLREKLALLELYILTHIPNARLRSMVDTGELSDRAVSERAGIGWSAKNCAIITPEFGSYVYLGEMITSIPFAPSEQMEDQCGDCTLCLDICPTGALIQGGQLDAQRCIAFITQTKTMVPDEFRDKIGNRIYGCDTCQTICPKNKGKANLHQEAFTPDPELVKPLLLPLLKMTNRTFKETYGHMSGAWRGKNPIQRNAIIALAHFREASAVPTLIELMENDARLVIRGTAAWAIGKINTDEGLAALKKAEQNEEADEVLEEIRKGLQFYILEN

SEQ ID NO: 80218 - protein, 379 aa, Psychrobacillus sp.
  REGION 1..379: note = tr|A0A5J6PP44|A0A5J6PP44_9BACI tRNA epoxyqueuosine(34) reductase QueG OS=Psychrobacillus sp. AK 1817 OX=2303505 GN=queG PE=4 SV=1
MNINQFQQNLIEYAATIGIDKIGFTTVSPFHELKNRLIRQQELGYASGFEEPDLDKRTHPELLLEEAQSIISIAIAYPSKMKNAPQSVKGARRGIFARASWGIDYHTVLREKLAQLELYILTHIPDARLRSMVDTGELSDRAVAERSGIGWSAKNCSIITPEFGSYVYLGEMISSIPFAPSEQMEDQCGDCSLCLEVCPTGALIEGGQLNAQRCIAFITQTKTMVPDEFRAKIGNRIYGCDTCQTVCPKNKGKANLHQEAFKPDPELVKPLLLPLLSMSNRTFKETYGHMSGSWRGKNPIQRNAIIALAHFKEEAAVPTLIELMLHDARPVIRGTAAWAIGKINTEEGLLALKKAEKTEQEEQVIEEIRKGLAFYTIQN

SEQ ID NO: 80219 - protein, 379 aa, Psychrobacillus sp.
  REGION 1..379: note = tr|A0A544TNP6|A0A544TNP6_9BACI tRNA epoxyqueuosine(34) reductase QueG OS=Psychrobacillus sp. Z8 OX=2325572 GN=queG PE=4 SV=1
MNINQFQQQLIEYAATIGIDKIGFTSASPFRELKNRLIRQQELGYASGFEESDINKRTHPELLLSEAESIIAIAIAYPSKMKDAPQSVKGARRGIFARASWGTDYHTVLREKLALLELFILTHIPDARLRSMVDTGELSDRAVAERAGIGWSAKNCSIITPEFGSYVYLGEMITSIPFAPSEQMEDQCGDCTLCLDICPTGALIQGGQLDAQRCIAFVTQTKTIVPDEFRTKIGNRIYGCDTCQTICPKNKGKANMHQSAFKPDPELVKPLLVPLLSMTNRSFKETYGHMSGAWRGKNPIQRNAILALAHFKEVSAVPVLIQLLENDPRPVIRGTAAWAIGKINSEEGLTALKKAEQTEVVEEVLKEINKGLQFYKIEK

SEQ ID NO: 80220 - protein, 405 aa, Psychrobacter alimentarius
  REGION 1..405: note = tr|A0A144NJL7|A0A144NJL7_9GAMM Epoxyqueuosine reductase OS=Psychrobacter alimentarius OX=261164 GN=queG; PE = 3 SV=1
MNHSSKPNLLDASIKQVSANSGASEKKITIKNTPAFTTTADVKHWIKAQAQALGFADCGFLSVHHPLFAQQILQLQQWLDKGYEGQLQFMHNNHHLRANPDQLVEGAKTIISVRMDYLTQTPTPRTVSDNDHPNQGIIARYARGRDYHKTMRSRLKQLALNIETMLPEWQHLNIGSDQDFIFRPFSDSAPIFERPIAEAAGLGWTGKHTLLLNKQAGSFFVLGELFVSLELPDDQPVKAHCGSCSACIDICPTQAIVAPYELNASACISYLTIEHDGIIDHKYRRAIGNRVFGCDDCQLICPWNRYANLTSVDDFAPRHSLDNSSLLELWQWQEADFMKKTEGSPLRRTGYVNFLRNIAIGLGNANGSEATITHLQSKLGKHSDVLDEHIIWAINEQHEKINAAQ

SEQ ID NO: 80221 - protein, 407 aa, Psychrobacter aquaticus
  REGION 1..407: note = tr|U4TDC0|U4TDC0_9GAMM Epoxyqueuosine reductase; OS = Psychrobacter aquaticus CMS 56 OX=1354303 GN=queG PE=3; SV = 1
MNNDSQPDLPFLSTKQLSSTPNDASTKKIAITHAPVFATATDVKQWIKTQAQALGFADCGFLSVHHPLFTQQIVQLQQWLDKGYEGQLQFMHNNHHLRAHPEQLVEGAKTIISVRMDYLTQTPTPRTISDNDHPNQGIIARYARGRDYHKTMRSRLKQLALTIETMLPEWRHLNIGSEKDFIFRPFSDSAPIFERPIAEAAGLGWTGKHTLLINKQAGSFFVLGELFISLELPDDEPVKEHCGSCSACIDICPTQAIVAPYELNASACISYLTIEHDGIIDTKYRHAIGNRVFGCDDCQLICPWNRYANITPVEDFAPRHNLDNSSLLELWQWSEEEFMRKTEGSPLRRTGYVNFLRNITIGLGNANGSQQTIAQLQSKLGVHNEMLDEHITWAIAEQRDKLKMAES

SEQ ID NO: 80222 - protein, 405 aa, Psychrobacter arcticus
  REGION 1..405: note = tr|Q4FUC1|Q4FUC1_PSYA2 Epoxyqueuosine reductase; OS = Psychrobacter arcticus (strain DSM 17307 / 273-4); OX = 259536 GN=queG PE=3 SV=1
MSNNSQATLPAQLSSVLTSTSAKKIAINNTHDFATTADIKRWIKAEAQSLGFADCGFLSVHHPLFVKQTEQLKQWLAKGYEAQLQFMHSNHHLRAHPEQLVEGAKTIISVRMDYLTQTPTPRAVTDNDYPNQGIIARYARGRDYHKTMRSRLKQLALKIEAMLPEWRHLDIGADTDFIFRPFSDSAPIFERPIADAAGLGWTGKHTLLINKQAGSFFVLGELFMSLELPDDEPVKEHCGSCSACIDICPTQAIVAPYELNASACISYLTIEHDGIIDTKYRRAIGNRIFGCDDCQLICPWNRYANLTPVEDFAPRHRLDSSSLLELWQWQEAEFMKKTEGSPLRRTGYVNFLRNIAIGLGNATGNKEIIEALQVKLGLHNTMLDEHIDWAIAEQHHKLDILFISK

SEQ ID NO: 80223 - protein, 405 aa, Psychrobacter cryohalolentis
  REGION 1..405: note = tr|Q1QDF1|Q1QDF1_PSYCK Epoxyqueuosine reductase; OS = Psychrobacter cryohalolentis (strain K5) OX=335284; GN = queG PE=3 SV=1
MSNKSQTNSQTQMPSLPTSVSAKKIAINNTHDFTTTTDIKHWIKETAQSLGFADCGFLSVHHPLFVKQTEQLRQWLAKGYQAQLQFMHSNHHLRAHPEQLVEGAKTIISVRMDYLTQTPTPRTVTDNDYPNQGIIARYARGRDYHKTMRSRLKQLALKIEAMLPEWRHLDIGADTDFIFRPFSDSAPIFERPIADAAGLGWTGKHTLLINKQAGSFFVLGELFMSLELPDDEPVKEHCGSCSACIDICPTQAIVAPYELNASACISYLTIEHDGVIDEKYRRAIGNRIFGCDDCQLICPWNRYANLTPVEDFAPRHRLDSSSLLELWQWQEAEFMKKTEGSPLRRTGYVNFLRNIAIGLGNATVNQENIEALQAKLGLHNTMLDEHIDWAVAEQRHKLDILLINN

SEQ ID NO: 80224 - protein, 412 aa, Psychrobacter fozii
  REGION 1..412: note = tr|A0A2V4UXF4|A0A2V4UXF4_9GAMM Epoxyqueuosine reductase OS=Psychrobacter fozii OX=198480 GN=queG PE=3; SV = 1
MNNSSTPSLPISSTKQVAGQQRAAAIDDTTANKIALNNTSEFSTTADVKQWIKTQAQALGFADCGFLSVHHPLFAKQIVQLQQWLEKGYEGQLQFMHSNHELRANPEQLVDGARTIISVRMDYLTQAPKPRAVTDNDLPNQGIIARYARGRDYHKTMRSRLKQLALKIETMLPEWQHLNIGSERDFIFRPFSDSAPIFERPIADAAGLGWTGKHTLLINKQAGSFFVLGELFISLELPDDQPIKEHCGSCSACIDICPTQAIVAPYELNASACISYLTIEHKGTIDTKYRRAIGNRVFGCDDCQLICPWNRYANITPVEDFAPRHNLDSSSLLELWQWQESDFMKKTEGSPLRRTGYVSFLRNIAIGLGNANASTDTITQLQSKLGVHNEILDEHILWAITEQQDKLKAIES

SEQ ID NO: 80225 - protein, 398 aa, Psychrobacter frigidicola
  REGION 1..398: note = tr|A0A5C7A485|A0A5C7A485_9GAMM Epoxyqueuosine reductase OS=Psychrobacter frigidicola OX=45611 GN=queG; PE = 3 SV=1
MTIKPTARNSSINLPATNNIAVVNTAMFTTPEDVKYWIKTQAQALGFADCGFLSVHHPLFTQQMKQLQKWLDKGYEGQLQFMHNNHHLRAHPEQLVAGARTIISVRMDYLTEAPQPRTVADNSRPNNGIIARYARGRDYHKTMRSRLKQLALQIEAALPEWQHLDIGNKTDFVFRPFSDSAPIFERPIADAAGLGWTGKHTLLLNKQAGSFFVLGELFISLELPDDKPVEAHCGSCNACIDICPTQAIVAPHELNAAACISYLTIEHKGTIDHKYRRAIGNRVFGCDDCQLICPWNRYAKLTSVDDFAPRHNFDDSSLLKLWQWTEAKFLQNTQGSPLRRTGYVSFLRNITIGLGNADVSTDIIAQLHTRLGVHSDMLDEHIQWAIDEQQSKLSSINK

SEQ ID NO: 80226 - protein, 410 aa, Psychrobacter immobilis
  REGION 1..410: note = tr|A0A2V1ZZN5|A0A2V1ZZN5_PSYIM Epoxyqueuosine reductase OS=Psychrobacter immobilis OX=498 GN=queG PE=3; SV = 1
MNNLPKANLPISSTQQKSAKQISSEPKPASEKKIKVNNSPIFTTTADVKQWIKDQAQALGFADCGFLSVHHPLFAKQIVQLQQWLEKGYEGQLQFMHNNHELRANPDQLVEGAKTIISVRMDYLTQAPTPRTITDNDYPNQGIIARYARGRDYHKTMRSRLKQLALKIEAMLPEWQHLNIGSEQDFIFRPFSDSAPIFERPIADAAGLGWTGKHTLLINKQAGSFFVLGELFISLELPDDKPVKKHCGSCSACIDICPTQAIVAPYELNASACISYLTIEHDGIIDIKYRRAIGNRIFGCDDCQLICPWNRYANLTPVEDFAPRHNLDSSSLLELWQWQEAEFMKKTEGSPLRRTGYVNFLRNIAIGLGNANGNEETITQLQSKLGVHNEMLDVHINWAIAEQYEKLKNL

SEQ ID NO: 80227 - protein, 387 aa, Psychrobacter pacificensis
  REGION 1..387: note = tr|A0A1G6X826|A0A1G6X826_9GAMM Epoxyqueuosine reductase OS=Psychrobacter pacificensis OX=112002 GN=queG; PE = 3 SV=1
MPTDKNKIAVSNSTVFATTADVKQWIKVQAQTLGFADCGFLSVHHPLFTKQIEQLQKWLDKGYEGQLQFMHNNHHLRAHPEQLVEGAKTIISVRMDYLTKAPTPRAVTDNDHPNQGIIARYARGRDYHKTMRSRLKQLALNIEAMLPEWQHLDIGSDKEFVFRPFSDSAPIFERPIADAAGLGWTGKHTLLINKQAGSFFVLGELFLSLELPDDQPVKEHCGSCSACIDVCPTQAIVAPYELNASACISYLTIEHDGIIDTKYRRAIGNRVFGCDDCQLICPWNRYANLTTVKDFAPRHGLDNSSLLELWQWQEADFLNNTQGSPLRRTGYINFLRNIAIGLGNANASLDVVEQLKSKLTIHNAMLDEHIEWALNEQQKKLKDSTQV

SEQ ID NO: 80228 - protein, 388 aa, unidentified
  source 1..388: note = Psychrobacter pasteurii
  REGION 1..388: note = tr|A0A1R4EEZ0|A0A1R4EEZ0_9GAMM Epoxyqueuosine reductase OS=Psychrobacter pasteurii OX=1945520 GN=queG; PE = 3 SV=1
MTASSPPDSNTSQPLSLNPFNDAQDVKNWIHEQALALGFADCGFISVSHPVFEQQMQGLRDWLAEGHHGQLSFLELNHDKRANPGLLVEGTRTIISVRMDYLETPPKPRQIEDNSRPNHAIIARYARGRDYHKTLRSRLKKLAQQIEAMLPQWQHLDVNAEQPFVFRPFSDSAPIFERPLADAAGLGWTGKHTLLINKQSGSFFVLGELFLSLTLPDDSPVTAHCGSCSACIDICPTQAIIGPYRLKADACISYLTIEHDGVIDEKYRKAIGNRVFGCDDCQLICPWNRYAKVSPIDDFLARHNLDNSLLAELWQWSEETFLTKTQGSPIRRTGYNNFLRNLAIGIGNAPYDEINIALLESRLGTLGEVLDEHIQWAISEQRSKAAEK

SEQ ID NO: 80229 - protein, 386 aa, Psychrobacter phenylpyruvicus
  REGION 1..386: note = tr|A0A379LNX4|A0A379LNX4_9GAMM Epoxyqueuosine reductase OS=Psychrobacter phenylpyruvicus OX=29432; GN = queG PE=3 SV=1
MPDSTPPDSTPSQSFATNPFNDAQDVKNWIREQALALGFADCGFIGVNHPVFEQQMQGLRDWLAAGYHGQLTFMELNHDKRANPGLLVEGSRTIVSVRMDYLEAAPKPRRIEDNHRPNHAIIARYARGRDYHKTMRSRLKKLAQQIETMLPQWQHLDVNADQPFVFRPFSDSAPIFERPLADAAGLGWTGKHTLLINRQSGSFFVLGELFLSLALPDDSPVSAHCGSCSACIDICPTQAIIGPYKLKADACISYLTIEHDGVIDKKYRRAIGNRVFGCDDCQLICPWNRYAKLSPIDDFLARHKLDDSLLIELWQWSEQTFLDKTQGSPIRRTGYVNFLRNLAIGIGNAPYTADNIIALESRLGTLGDVLDEHIHWAIAEQRAKAS

SEQ ID NO: 80230 - protein, 386 aa, unidentified
  source 1..386: note = Psychrobacter piechaudii
  REGION 1..386: note = tr|A0A1R4GTT8|A0A1R4GTT8_9GAMM Epoxyqueuosine reductase OS=Psychrobacter piechaudii OX=1945521 GN=queG; PE = 3 SV=1
MPDSTPPDSSAFRSLNPNPFNDAQDVKNWIREQALALGFADCGFIGVNHPVFSQQMQGLRDWLAAGHYGQLNFMELNHDKRANPGLLVEGSRTIISVRMDYLEATPKPRRIEDNHRPNHAIIARYARGRDYHKTMRSRLKQLAQKIETMLPQWQHLDVNADQPFVFRPFSDSAPIFERPLADAAGLGWTGKHTLLLNKQSGSFFVLGELFLSLALPDDSPVTAHCGSCTACIDICPTKAIIGPYKLKADACISYLTIEHDGVIDEKYRRAIGNRVFGCDDCQLICPWNRYAKLSPIDDFLARHNLDDSLLIELWQWSEQIFLDKTQGSPIRRTGYVNFLRNLAIGIGNAPYTADNITALESRLGTLGDVLDEHIRWAITEQLTKAN

SEQ ID NO: 80231 - protein, 389 aa, Psychrobacter piscatorii
  REGION 1..389: note = tr|A0A0T6DPD5|A0A0T6DPD5_9GAMM Epoxyqueuosine reductase OS=Psychrobacter piscatorii OX=554343 GN=queG; PE = 3 SV=1
MPTDKNKIAVSNSTVFATTADIKQWIKTQAQTLGFADCGFLSVHHPLFTKQIEQLQKWLDKGYEGQLQFMHNNHHLRAHPEQLVDGAKTIISVRMDYLTKAPTPRAVTDNDHPNQGIIARYARGRDYHKTMRSRLKQLALNIEAMLPEWQHLDIGSDKEFVFRPFSDSAPIFERPIADAAGLGWTGKHTLLINKQAGSFFVLGELFLSLELPDDQPVKEHCGSCSACIDVCPTQAIVAPYELNASACISYLTIEHDGIIDTKYRRAIGNRVFGCDDCQLICPWNRYANLTTVEDFAPRHGLDNSNLLELWQWQEADFLNNTQGSPLRRTGYVNFLRNIAIGLGNANASPHVIEQLKSKLTLHNAMLDEHIEWAIAEQGRKLDASSKPTS

SEQ ID NO: 80232 - protein, 411 aa, Psychrobacter sp.
  REGION 1..411: note = tr|A0A3D2A2E7|A0A3D2A2E7_9GAMM Epoxyqueuosine reductase OS=Psychrobacter sp. OX=56811 GN=queG PE=3 SV=1
MSTLSKSDLPDTSNGQTAAATPAHLSQVPSKKIDVKSDSPFTSAEDVKRWIKSQAQTLGFGDCGFLSVYHPLFAQQMTQLQQWLAKGYEGQLQFMHNNHHLRAHPDQLVEGAKTIISVRMDYLTQTPTPRTVADNDFPNQGIIARYARGRDYHKTMRSRLKQLALQIEAMLPEWQHLNIGSAQEFVFRPFSDSAPIFERPIADAAGLGWTGKHTLLLNKQAGSFFVLGELFISLELPDDAPVKSHCGSCSACIDVCPTQAIVAPYELNASACISYLTIEHDGIIDEKYRRAIGNRVFGCDDCQLICPWNRYANITTVEDFAPRHSLDNSSLLELWQWQEADFMQKTQGSPLRRTGYVNFLRNIAIALGNANGSQEVITQLQAKLQTHNAMLDEHIHWAIAEQKQKLSDTDA

SEQ ID NO: 80233 - protein, 418 aa, Psychrobacter sp.
  REGION 1..418: note = tr|A0A553XZ52|A0A553XZ52_9GAMM Epoxyqueuosine reductase OS=Psychrobacter sp. YGAH215 OX=2596826 GN=queG; PE = 3 SV=1
MNSKAQPKQLQSTQPDAQTSDAHNLAAQASAPNRVEQARIAVHNASEFATPADVKQWIKTQAQGLGFADCGFLSVHHPLFIEQTEHLKQWLAKGYEGQLQFMHHNHHLRAQPEQLVEGAKTIISVRMDYLTQTPTPRAVTDNAYPNQGIIARYARGRDYHKTMRSRLKQLALKIEAMLPEWQHINIGSEQDFIFRPFSDSAPIFERPIADAAGLGWTGKHTLLINKQAGSFFVLGELFMSLELPDDEPVKEHCGSCSACIDVCPTQAIIAPYELKASACISYLTIEHDGIIDSKYRRAIGNRIFGCDDCQLICPWNRYANITPVEDFSPRHNLDNSSLLELWQWQEAEFMKKTEGSPLRRTGYVNFLRNIAIGLGNADGSTEIITQLQAKLGVHNAMLDDHIHWAIKEQQEKLENLKP

SEQ ID NO: 80234 - protein, 398 aa, Psychrobacter urativorans
  REGION 1..398: note = tr|A0A0M5MJY6|A0A0M5MJY6_9GAMM Epoxyqueuosine reductase OS=Psychrobacter urativorans OX=45610 GN=queG; PE = 3 SV=1
MNIKLFANRSSTNDSSTNSIAVANTSPFMTPEDVKHWIKTQAQALGFADCGFLSVHHPLFAQQIEQLQKWLAKGYEGQLQFMHNNHHLRAHPEQLVEGAKTIISVRMDYLTQAPTARTVADNNRPNHGIIARYARGRDYHKTMRNRLKQLALNIEAMLPEWQHLDIGTQADFVFRPFSDSAPIFERPIADAAGLGWTGKHTLLLNKQAGSFFVLGELFISLELPDDKPVKAHCGSCSACIDICPTQAIISPHELNAAACISYLTIEHDGIIDKKYRRAIGNRIFGCDDCQLICPWNRYAKLTAVEDFAPRNNLDDSTLLELWQWQEAEFLQKTQGSPIRRTGYVNFLRNIAIGLGNAEASTDIIVQLHSKLSAHNDILDEHIHWAINEQQDKLSKNKE

SEQ ID NO: 80235 - protein, 256 aa, Psychroflexus gondwanensis
  REGION 1..256: note = tr|N1WZD7|N1WZD7_9FLAO (4Fe-4S)-binding protein; OS = Psychroflexus gondwanensis ACAM 44 OX=1189619; GN = pgond44_07400 PE=4 SV=1
MENHFDKRLDPTKLVEGSKSVISLLYNYFPETTQKDATYKVSKYAYGKDYHHVIKAKLKTLMESLTEGIGEIGGRAFVDSAPVLEKAWAAKSGLGWVGKHSNLLTKQTGSFYFIAELILDIELEYDTPVTDHCGTCTKCIDACPTEAIYEPYKVDGSKCISYFTIELKDNIPKGYQDKFEDWMFGCDICQDVCPWNRFSKPHNEPLFNPHPDLLEYDKKEWEEITKDVFNEIFRKSAVKRTKYEGLKRNMNYIKTK

SEQ ID NO: 80236 - protein, 308 aa, unidentified
  source 1..308: note = Psychroflexus halocasei
  REGION 1..308: note = tr|A0A1H4CX10|A0A1H4CX10_9FLAO Epoxyqueuosine reductase OS=Psychroflexus halocasei OX=908615 GN=queG; PE = 3 SV=1
MNLNAEKHSQLIKKKAEKYGFISCGISKAEFLEEEAPRLENWLNNNANGKMQYMENHFDKRLDPSELVEGAKSVVSLLYNYFPEENQKENTFKVSKYAYGQDYHHVIKKKLRMMMEELNEEIGEINGRVFVDSAPVLEKAWAAKSGLGWIGKHSNLLTKQRGSFYFISELIIDLPLAYDTPVTDHCGSCTKCIDACPTQAITPYQVDGSKCISYLTIELKEEIPSDFKNKFEDWMFGCDICQDVCPWNRFSKPHNEPLFNPHPDLLDYKKEDWTEITKDVFNEIFRKSAVKRTKYEGLKRNINYILKD

SEQ ID NO: 80237 - protein, 313 aa, unidentified
  source 1..313: note = Psychroflexus salarius
  REGION 1..313: note = tr|A0A1M4WMR5|A0A1M4WMR5_9FLAO Epoxyqueuosine reductase OS=Psychroflexus salarius OX=1155689 GN=queG; PE = 3 SV=1
MKTATSKHTQFIKKTAKDLGFISCGISQAEFLEAEAPRLESWLKSNAHGQMQYMENHFDKRLDPTKLVEGSKSVISLLYNYFPDKTQNENTYKVSKYAYGQDYHHVIKAKLKTFIDHIRNEIGEVSGRAFVDSAPVLEKAWAAKSGLGWIGKHSNLLSKQVGSFYFIAELILDLELETDTPVTDHCGSCTKCIDACPTNAITPYQVDGSKCISYFTIELKDEIPREFKNQFDDWMFGCDICQDVCPWNRFSKPHNEPLFNPHLNLLENTKEDWEEITKEVFNEIFRKSAVKRTKFEGLKRNINHIKQNSNPNS

SEQ ID NO: 80238 - protein, 291 aa, Psychroflexus sediminis
  REGION 1..291: note = tr|A0A1G7UNH9|A0A1G7UNH9_9FLAO Epoxyqueuosine reductase OS=Psychroflexus sediminis OX=470826 GN=queG; PE = 3 SV=1
MGFLSCGISKAEFLEEEAPRLEHWLKQNAHGEMQYMENHFDKRLDPTKLVEGSKSVISLLYNYFPAETQREDTYKISKYAYGRDYHHVIKSKLKEMMHTLNAEIGEIGGRAFVDSAPVLEKAWAAKSGLGWVGKHSNLLSKQTGSFYFIAELILDIELETDTPVTDHCGTCTKCIDACPTDAIYEPYKVDGSKCISYFTIELKNEIPTGYEDKFEDWMFGCDICQDVCPWNRFSKAHNEPLFNPHPDLLSHDKKDWEEITKDVFNDIFRKSAVKRTKFEGLKRNINYIQSS

SEQ ID NO: 80239 - protein, 308 aa, Psychroflexus sp.
  REGION 1..308: note = tr|A0A2M9TQS8|A0A2M9TQS8_9FLAO Epoxyqueuosine reductase OS=Psychroflexus sp. S27 OX=1982757 GN=queG PE=3; SV = 1
MNSNTEKHSQLIKEKAEKYGFISCGISKAEFLEQEAPRLENWLNENANGKMQYMENHFDKRLDPSKLVEGAKSVVSLLCNYFPEEKQKENTFKVSKYAYGQDYHHVIKKKLRLMMEELNEEIGEINGRVFVDSAPVLEKAWAAKSGLGWIGKHSNLLTKQRGSFYFISELVIDLPLAYDTPVTDHCGSCTKCIDACPTQAITPYQVDGSKCISYLTIELKEEIPSDFKNKFEDWMFGCDICQDVCPWNRFSKPHNEPLFNPHPDLLTYDKEDWTEITKDVFNEIFRKSAVKRTKYEGLKRNINYILKD

SEQ ID NO: 80240 - protein, 311 aa, Psychroflexus sp.
  REGION 1..311: note = tr|A0A4U5TSC6|A0A4U5TSC6_9FLAO Epoxyqueuosine reductase OS=Psychroflexus sp. WDS2C27 OX=1883405 GN=queG; PE = 3 SV=1
MSNAEKYTQLIKTEAKRLGFLSCGISKAEFLEDEAPRLEKWLKENRHGEMRYMENHFDKRLDPTKLVEGSKSVVSLLYNYYPEKQQQSDTYKISKYAYGQDYHFVIKRKLKSLLNTLQEEIGEVHGRAFVDSAPVLDKAWAVRSGLGWMGKHSNVLTKSLGSFYFIAELIIDLELEYDTPVTDHCGSCTACIDACPTEAIVDPYVVDGSKCISYFTIELKDDLPSSYKGQFDDWMFGCDVCQDVCPWNKFSKSHNEPLFNPDGRLLNYDKQDWEEITEEVFQDIFRKSAVKRTKYTGLKRNIAFLKSKRED

SEQ ID NO: 80241 - protein, 386 aa, Psychromonas ingrahamii
  REGION 1..386: note = tr|A1SZL6|A1SZL6_PSYIN Epoxyqueuosine reductase; OS = Psychromonas ingrahamii (strain 37) OX=357804 GN=queG; PE = 3 SV=1
MINQKNLIDPTETLDLLSLSQNIKLWGKELGFQKVGISDIDLKDQESKLQSWLDNNYHGEMEYMSKHGMKRARPDELLPGTLRVISVRMDYLPDNAQFASTLKNKDNAYISRYALGRDYHKVLRKRLKKLGQKIELEVGQLGYRPFVDSAPILERPLAAKAGLGWVGKHSLLLDAKAGSWFFIGELLVDLPLPVDQPVENKCGKCVACLTICPTQAIVAPYVVDGRRCISYLTIELQGPIPVEFRKAIGNRIYGCDDCQLICPWNRFADTTEESDYQVRQQLENKSLLELFNWTEDEFLTYSEGSPIRRIGYQRWLRNISVALGNAPASEAIVDTLKNKLALNLSEMLNEHLQWALDQHQGQIPVFNERLKKRLINSVEKGLPRDA

SEQ ID NO: 80242 - protein, 392 aa, Psychromonas sp.
  REGION 1..392: note = tr|A0A366WEH7|A0A366WEH7_9GAMM Epoxyqueuosine reductase OS=Psychromonas sp. B3M02 OX=2267226 GN=queG; PE = 3 SV=1
MKITQESTSSQINSTPLSSTVLSELAENIKVWGKALGFQGVGISDVDLTDQEANLQAWLDNQYHGEMDYMERHGMMRARPNELLPGTLRVISVRMDYLPDDAQFAANLEDKDLAYISRYALGRDYHKVLRKRLKQLGDKIKNEVGELGFRPFVDSAPILERPLAEKAGLGWVGKHSLLLDKDSGSWFFLGELLIDLALPVDQAQPNQCGQCVACMKICPTQAIVAPYVVDGRRCISYLTIELQGAIPTEFRKAIGNRIYGCDDCQLICPWNRFADTTEESDYQAKDFLQNQSLLSLFAWSETTFLKNTEGSPIRRIGYQRWLRNIAIALGNAPSSIDVITSLQNKLVESEDELVNEHIEWALAEQQQKLPINIDRLNQRLIKAVKKGLPRDA

SEQ ID NO: 80243 - protein, 388 aa, Psychromonas sp.
  REGION 1..388: note = tr|A0A2N1A7R9|A0A2N1A7R9_9GAMM Epoxyqueuosine reductase OS=Psychromonas sp. Urea-02u-13 OX=2058326; GN = queG PE=3 SV=1
MVEKITPDETFNHQDIDLIQLSENIKLWGKALGFQQVGISDIDLKQHEAKLQQWLDNKYHGEMDYMEKHGMKRARPAELHPGTLRVISVRMDYLPDNAQFARTLKNKDNAYISRYALGRDYHKVIRKRLKQLGQKIEEQVGKLGYRPFVDSAPVLERPLAEKAGLGWTGKHSLLIDAKNGSWFFIGELMIDLPLPVDKPVEEKCGQCVACIKICPTQAIVAPYVVDGRRCISYLTIELQGAIPVEFRKAIGNRIYGCDDCQLICPWNRFANTTQEQDYQARHQLEKQPLLDLFSWTEAQFLSNTEGSPIRRIGYERWLRNIAVALGNAPSSPAVVESLNNKRLESDSDLLNEHIDWALEQHTMQIPIVTDRLNNRLIKAIEKGLPRDA

SEQ ID NO: 80244 - protein, 308 aa, Psychroserpens burtonensis
  REGION 1..308: note = tr|A0A5C7BC67|A0A5C7BC67_9FLAO Epoxyqueuosine reductase OS=Psychroserpens burtonensis OX=49278 GN=queG; PE = 3 SV=1
MEVNKTQHSQFIKTEAKRLGFLSCGISKAGFLEEEAPRLEKWLKNNAHGEMRYMENHFDKRLDPTKLVEGSKSVISLLLNYYPSEIQNPESYQLSKYAYGTDYHFVIKDKLKELLQSIQDEIGDVHGRAFVDSAPVLDKAWAAKSGLGWIGKHSNLLTQQIGSFYFIAELIIDLDLEYDYATTDHCGTCTACIDACPTEAITEPYVVDGSKCISYFTIELKENIPLDFKGQFDDWMFGCDICQDVCPWNKFSKAHSEPLFNPHPELLDMTKKDWEEITKDTFNKVFKKSAVKRTKFDGLERNIKFLKE

SEQ ID NO: 80245 - protein, 389 aa, Psychrosphaera saromensis
  REGION 1..389: note = tr|A0A2S7UVA5|A0A2S7UVA5_9GAMM Epoxyqueuosine reductase OS=Psychrosphaera saromensis OX=716813 GN=queG; PE = 3 SV=1
MNTSDPKNHLLDRQLNGKLNEKIKLWGQELGFQHVGISDIDLSAQEPKMLNWLEKGFHGEMGYMETHGTKRSRPAELLPGTVSIVSVRLDYLPPDAKFAATLEQPNHAFISRYALGRDYHKVIRNKLKKLGQMIEKEVGVENLSFRPFVDSAPVLERPIAEKAGLGWTGKHSLLINNTAGSWFFLGELFLPIALEPDQAVDNECGSCVACITTCPTQAIVEPYVVDGRKCISYLTIELKDSIPEQYRKAMGNRIYGCDDCQLICPWNRFAELSTEPDFLPRTQLHPVSLLELWQWQEPHFLKVTEGSPIRRIGFECWMRNIAIALGNAPFSLEIVEQLNSKLTLISDMVDEHILWALEQQKLKAENSGVDSRQLKRLIKAIKIGLPRDA

SEQ ID NO: 80246 - protein, 387 aa, unidentified
  source 1..387: note = Pueribacillus theae
  REGION 1..387: note = tr|A0A2U1K252|A0A2U1K252_9BACI tRNA epoxyqueuosine(34) reductase QueG OS=Pueribacillus theae; OX = 2171751 GN=queG PE=4 SV=1
MSLDKLKQEIIEYSRTIGIDKIGFTTADPFVELKERLRDQQALNYQSGFEEPDIEKRTNPKMLMPEAKSIIAIAVAYPSRIKNKPKNEKHNRRGLFASASWGMDYHHVLRDRLTKLEAFIKKREPTAIMTSMVDTGELSDRAVAERAGLGYVGKNCALITKEFGSYVYLGEMITNLPFPSDEPVTDSCGSCNKCVEACPTGALVQGGQLDSTKCLAFLTQTKGFLPDEYRDKLGNRLYGMDKCQIVCPKNKTLDFHHHPEFEPDPDIAMPPLKPLLKMSNREFKEKFGSIAGSWRGKKPIQRNAILALAHFKDTTAVDELIEVMESDPRPVIRGTAAWALGKIGDPKAETALKKKKMEEKDKEVLKEIDKGLSMLKNKQNKESQWVF

SEQ ID NO: 80247 - protein, 334 aa, unidentified
  source 1..334: note = Puniceibacterium antarcticum
  REGION 1..334: note = tr|A0A2G8RKC4|A0A2G8RKC4_9RHOB 4Fe-4S ferredoxin; OS = Puniceibacterium antarcticum OX=1206336 GN=P775_02430; PE = 4 SV=1
MQEALAAGFDLCRVCRPWDVPQVPGRLAAFLERGYHGQMSWLAERSHWRGAPQVLWPEARSVIMLGESYTPGHDPLEVLGHPEQGAVSVYAQNRDYHDVVKKRLKRLARWLIAEGGGAVKVFVDTAPVPEKPLGQAAGLGWQGKHTNLVSRDLGSWFFLGSVFSTLDLPADQAEVDHCGSCRACLDICPTSAFPAPYQLDARRCISYLTIEHHGPVDEDLRALMGNRIYGCDDCLAVCPWNKFAVAAQEVKYHARAELVAPRLADLAQFDDAGFRAHFSGSPIKRIGRGRFTRNVLYAIGNSGEARLRPVAQGLCKDEDPVVADAARWAVERLG

SEQ ID NO: 80248 - protein, 342 aa, unidentified
  source 1..342: note = Puniceibacterium sediminis
  REGION 1..342: note = tr|A0A238WSH9|A0A238WSH9_9RHOB Epoxyqueuosine reductase OS=Puniceibacterium sediminis OX=1608407; GN = SAMN06265370_10751 PE=4 SV=1
MDVLKDRLVSEALTAGFDLCRICRPWDVPEVPGRLAAFLEHGYQGQMSWLADRSHWRGAPQVLWPEARSVIMLGESYTPQHDPLEVLGLPECGAVSVYAQNRDYHDVVKKRLKRLARWLIAEAGGEVKVFVDTAPVPEKPLGQAAGLGWQGKHTNLVSRDLGSWFFLGSVFTTLELPTDKAEVDHCGSCRACLDVCPTNAFPAPYQLDARRCISYLTIEHHGPVDPELRPLLGNRIYGCDDCLAVCPWNKFAVAAQEVKYHARQDLIAPPLEVLARLDDAGFRAHFSGSPVKRIGHGRFVRNVLYAIGNSATSRLRPVAQSLCEDEDPVVADAARWAVERLA

SEQ ID NO: 80249 - protein, 344 aa, unidentified; identical to SEQ ID NO: 80179
  source 1..344: note = Puniceibacterium sp.
  REGION 1..344: note = tr|A0A5B3BLQ3|A0A5B3BLQ3_9RHOB Epoxyqueuosine reductase OS=Puniceibacterium sp. HSS470 OX=2541729; GN = queG PE=3 SV=1

SEQ ID NO: 80250 - protein, 344 aa, unidentified
  source 1..344: note = Puniceibacterium sp.
  REGION 1..344: note = tr|A0A0J5Q8Q9|A0A0J5Q8Q9_9RHOB Epoxyqueuosine reductase OS=Puniceibacterium sp. IMCC21224 OX=1618204; GN = queG PE=3 SV=1
MQALTKALKAEAVAVGFDLCRMCRPWDVGQVPDRLAAFLDRGHHGQMHWLAERSHWRGAPQLLWPEARTVIMLGESYTPQHDPLSVLDQPAHGAISVYAQNRDYHDVLKKRLKRLARWLIAEAGGEVKVFVDTAPVPEKPLGQAAGLGWQGKHTNLVSRQLGSWFFLGSVFTTLELDIDTLEVDHCGSCRACLDICPTSAFPAPYQLDARRCISYLTIEHHGPVDPALRPMLGNRIYGCDDCLAVCPWNKFAQTAHEIKYQARPELVAPELAALAVLDDGTFRTLFSGSPIKRIGRNRFVRNVLYAIGNSGTAALRGVAQGLCDDPDPVVADAARWAVARLEAV

SEQ ID NO: 80251 - protein, 340 aa, unidentified; identical to SEQ ID NO: 78916
  source 1..340: note = Puniceicoccaceae bacterium
  REGION 1..340: note = tr|A0A2D7F393|A0A2D7F393_9BACT tRNA epoxyqueuosine(34) reductase QueG OS=Puniceicoccaceae bacterium OX=2026784 GN=queG PE=4 SV=1
  VARIANT 100: note = Xaa can be any naturally occurring amino acid
  VARIANT 117: note = Xaa can be any naturally occurring amino acid

SEQ ID NO: 80252 - protein, 335 aa, unidentified
  source 1..335: note = Puniceicoccaceae bacterium
  REGION 1..335: note = tr|A0A1Z9GDP4|A0A1Z9GDP4_9BACT tRNA epoxyqueuosine(34) reductase QueG OS=Puniceicoccaceae bacterium TMED149 OX=1986788 GN=CBD09_01045 PE=4 SV=1
MKTEQWIAIEELAKTLGFHKAGVAKIPIELRKDYYKKWIESGQHGTMGWMEKNTDRRFDPGSILPEAKCLLVFSLNYFQPDPKRKFRIAKYALGNDYHKFMLKRLKQICRFMKATYGTEQRPYVDTGPLLEKPIAEAAGIGWQGKSTILVEPKGGTWSLLGTIITTLDLPSYGAGKNYCGSCSRCIDACPTRAITAPYQLDASKCIAYLTIEHKGAIPEKFRKQIGDRVFGCDTCLDVCPWNKWAKRTKEANFEAKELPELSKILDWDQSDFDLYLQASPIRRLKLNGLKRNVALVLGNIGNKGDLAALARLSEEGDADLSEQAEWSIQEINARD

SEQ ID NO: 80253 - protein, 377 aa, unidentified
  source 1..377: note = Puniceispirillum marinum
  REGION 1..377: note = tr|D5BNK6|D5BNK6_PUNMI Iron-sulfur cluster binding protein OS=Puniceispirillum marinum (strain IMCC1322); OX = 488538 GN=SAR116_0030 PE=4 SV=1
MPKSAVSKDKSKLKAWLIADAKAAGFADIGITKATHSAQTTDGLAQFLDDDFEGDMAWLRDTADRRQQPHAMWGDARTAIVLGMNYGPDHDPMGNLDARDKGNISVYARGRDYHEVIKGKLKQLAGRLAVKSGWQVKVFVDTAPLMEKPLGQSAGIGWQGKHTNLVSRTHGSWLFLGTILTDGELPYDEAQSDHCGSCRDCLDICPTDAFPAPYRLDARRCISYLTIEHKGQIPKDFRTAIGNRIFGCDDCLAVCPWNKYAKAASEAKLAARMETTLPELAALLALDEAGFRAQFASTPVRRAGYERFLRNVLVAAGNSADMGLVDVIMPHLDHASGLVRGMAVWALGQLMDDADFMAMKARYIGVETDADVAAEWG

SEQ ID NO: 80254 - protein, 369 aa, Pusillimonas sp.
  REGION 1..369: note = tr|A0A5A9XBY6|A0A5A9XBY6_9BURK Epoxyqueuosine reductase OS=Pusillimonas sp. ANT_WB101 OX=2597356 GN=queG; PE = 3 SV=1
MTHTTSSLITPDSGQWIQQIQAWASELGFSKIGVAGVDLSSAEPNLLHWLSLGYHGDMHYMELHGLKRARPAELVPGTISVITARMPYLPRSTAPDWQDRERARLDQPAEGVVSLYARGRDYHKVVRSRLRKLCDRIETLVGPFGHRVFSDSAPVLEKELASRSGQGWRGKHSMVLSREAGSMFFLGEIFVDFALEPTDPVSAHCGTCTACIDVCPTGAIVAPGVVDARRCISYLTIENHGPIPEELRPLMGNHIFGCDDCQTFCPWNKYAQTTELPDFDERSPLVGRQLVDLFAWDEETFLKRAEGGPIRRINHERWLRNIAVALGNALLQADEAQAHELRTALLGRANHESPLVREHVAWALAQRLP

SEQ ID NO: 80255 - protein, 366 aa, Pusillimonas sp.
  REGION 1..366: note = tr|A0A4R1LRA7|A0A4R1LRA7_9BURK Epoxyqueuosine reductase OS=Pusillimonas sp. YR330 OX=2135726 GN=queG; PE = 3 SV=1
MPSSLSANTDSSQWIHQIRAWARELGFSQIGVSGVDLSAAEPYLLQWLAQGYHGDLHYMERHGLMRTRPAELVPGTVSVITARMPYLPRSTEPGWQDRELARLNEPGEGVVSLYARGRDYHKVVRGRLRKLCDRIETLVGPFGYRAFSDSAPVLEKELACRSGQGWRGKHSMVLSRDAGSMFFLGEIFVDFALSSTDSVSAHCGSCTACIDVCPTGAIVAPGVVDARRCISYLTIESHGPIPEDLRPLMGNRIYGCDDCQIICPWNKYAQTTEIPDFDERPPLVGHRLVNLFAWDEATFLKNTEGGPIRRINHERWLRNIAVALGNALRQADATQAQELRAALLGRANHESALVREHVAWALAQCG

SEQ ID NO: 80256 - protein, 308 aa, unidentified
  source 1..308: note = Pustulibacterium marinum
  REGION 1..308: note = tr|A0A1I7HAI4|A0A1I7HAI4_9FLAO Epoxyqueuosine reductase OS=Pustulibacterium marinum OX=1224947 GN=queG; PE = 3 SV=1
MNSNTTKYTQFIKAKAKELGFLSCGISKADFLEEEAPRLEKWLNEGRNGKMQYMENHFDKRLDPRLLVDDAKSVISLLLNYYPSETQNPNAPKISKYAYGTDYHFVIKDKLKILLEAIQEEIGEVGGRAFVDSAPVLDKAWAAKSGLGWIGKNANLLAKQTGSFFFIAELIVDLPLEYDGPTTDHCGSCTACIDACPTQAIVEPYVVDGSKCISYLTIELKENIPTEFKGKMDDWMFGCDVCQDVCPWNRFSKAHTEPLFHPNPELLEMDYKDWQELTQETFSKVFKKSAVKRTKFAGLNRNIKFLKE

SEQ ID NO: 80257 - protein, 322 aa, unidentified
  source 1..322: note = Pyrinomonas methylaliphatogenes
  REGION 1..322: note = tr|A0A0B6WXJ2|A0A0B6WXJ2_9BACT Epoxyqueuosine reductase OS=Pyrinomonas methylaliphatogenes OX=454194; GN = queG PE=3 SV=1
MQGTISKDASPRTRAAKIRERALNLGFHKVGIARAEPLTEERARLEEWLARGFHATMQWMARDTERRADPRHLLPSAKSVVVVALNYYTPHEHDEDPDRGKISRYAWGDDYHEIIGDKLRTLLDWIRAEWPEAEGRICVDAQPTMDKAWAVRAGLGWIGKHSNLITREYGSWVFLGELLLNLELEPDVGPAEDHCGTCTLCLEACPTGAIVEPRVVDANRCISYATIELRAAQIPEEIARNLRGWLYGCDICQDVCPWNRFEKPTDEPRFEPRYGQTTLPLAEVIAMDHETYVARFRRSPIKRAKLAGLQRNARALRNRSGD

SEQ ID NO: 80258 - protein, 381 aa, unidentified
  source 1..381: note = Quasibacillus thermotolerans
  REGION 1..381: note = tr|A0A0F5I4U0|A0A0F5I4U0_9BACI Epoxyqueuosine reductase OS=Quasibacillus thermotolerans OX=1221996; GN = queG PE=3 SV=1
MDYQQLKQEIIEYSRIIGIDKIGFTSASPFTELKSRLLRQQELGYASGFEEKDIDKRVDPSLLLEEPRSIIAIALAYPSKMKESVKGKRGERRGIFCRASWGEDYHTILRGRLKKLEAFISSKVPDARFRSMVDTGELADRAVAERAGIGWSGKNCSIITPEFGSYVYLGEMVTNLPLEPDAPIENQCGTCTKCLDACPTGALVQGGQLNAQRCIAFLTQTKGFMPEEFREKLGNRIYGCDTCQTVCPKNKGIDFHLHEEMEPDAEAVRPLLEPLLHLSNKEFKQTFGYMSGSWRGKKPIQRNAIIALAHFKEEESVPALVDVLLNDVRPVIRGTSAWALAKIGGGQALEALLAAKEKETDEEVQQEIEQAISSVKNHEKQ

SEQ ID NO: 80259 - protein, 388 aa, unidentified
  source 1..388: note = Quisquiliibacterium sp.
  REGION 1..388: note = tr|A0A5C8P5Y6|A0A5C8P5Y6_9BURK Epoxyqueuosine reductase OS=Quisquiliibacterium sp. CC-CFT501 OX=2498847; GN = queG PE=3 SV=1
MSSTPNLATATLRQWAAELGFASLGVAGVDLSSVEGGLQAWLDAGWHGEMDYMARHGMARARPAELVPGTVSAIMVTLDYAPEDPGWVDLAWRTLAQGERAYLSRYALGRDYHKVVRARLQKLAERIAAAAGPFGHRVFCDSAPVMEVELARRAGLGWRGKHTLLIHPKRGSTFFLGTLYTDLPLPADEPEPDHCGSCTRCIEACPTGAIVSPWRLDARRCISYLTIELKGAIPEPLRAPIGNRIYGCDDCQLACPWNRFAQPAGLPDFAPRNGLDAASLVELFRWSAEEFDARLAGSPIRRIGHERWLRNIAVALGNAGGTDGVRGAEGTGGGADAIAVARAALAARADHPSALVREHVGWALAQLERRAPGGRNEGGEGAPARAND

SEQ ID NO: 80260 - protein, 384 aa, Rahnella aquatilis
  REGION 1..384: note = tr|H2IS52|H2IS52_RAHAC Epoxyqueuosine reductase; OS = Rahnella aquatilis (strain ATCC 33071 / DSM 4594 / JCM 1683 / NBRC 105701 / NCIMB 13365 / CIP 78.65) OX=745277; GN = queG PE=3 SV=1
MTLPLDLVQLAQHIKQWGQSLGFQQVGICDTDLSAEEPKLQDWLDKQYHGEMEWMARHGMLRARPHELLPGTLRVISVRMNYLPAKAAFAKTLNNPQLGYVSRYALGRDYHKVLRQRLKKLGDMIQTHCTEHADQTITFRPFVDSAPLMERPLAAKAGLGWVGKHSLILNRESGSWFFLGELLIDLPLPVDQPQEEKCGKCVACITTCPTGAIVAPYTVDARRCISYLTIELEGAIPEEFRPLMGNRIYGCDDCQLICPWNRYSQLTDEEDFSPRAALHAPELIELFGWTEEKFLRITEGSPIRRIGHLRWLRNIAVALGNAPYSEEVLNTLQSREGENALLDEHISWAIAQQVARRNEHRVEVQSSQQKRLIRAVEKGLPRDA

SEQ ID NO: 80261 - protein, 384 aa, Rahnella aquatilis
  REGION 1..384: note = tr|H8NSD2|H8NSD2_RAHAQ Epoxyqueuosine reductase; OS = Rahnella aquatilis HX2 OX=1151116 GN=queG PE=3 SV=1
MTLPLDLVQLAQHIKQWGQSLGFQQVGICDTDLSAEEPKLQDWLDKQYHGEMEWMARHGMLRARPHELLPGTLRVISVRMNYLPAKAAFAKILNNPQLGYVSRYALGRDYHKVLRQRLKKLGDMIQAHCTEHADQTVTFRPFVDSAPVMERPLAAKAGLGWVGKHSLILNRESGSWFFLGELLIDLPLPVDQPQEEKCGKCVACITTCPTGAIVAPYTVDARRCISYLTIELEGAIPEEFRALMGNRIYGCDDCQLICPWNRYSQLTDEEDFSPRAALHAPELIELFSWAEEKFLRITEGSPIRRIGHLRWLRNIAVALGNAPYSEDVLNALQSREGENALLDEHINWAIAQQTERRNEHRIEVQTSQQKRLIRAVEKGLPRDA

SEQ ID NO: 80262 - protein, 385 aa, unidentified
  source 1..385: note = Rahnella inusitata
  REGION 1..385: note = tr|A0A419M4Y8|A0A419M4Y8_9GAMM Epoxyqueuosine reductase OS=Rahnella inusitata OX=58169 GN=queG PE=3 SV=1
MTLPLDLVQLAQHIKQWGQSLGFQQVGICDTDLSAEEPKLQDWLDKQYHGEMEWMARHGMLRARPHELLPGTLRVISVRMNYLPAKAAFAKTLNNPQLGYVSRYALGRDYHKVLRQRLKKLGDMIQAYCTEQQSDHAVTFRPFVDSAPIMERPLAAKAGLGWVGKHSLILNRESGSWFFLGELLIDLPLPVDAPQEEKCGKCVACMTTCPTGAIVAPYTVDARRCISYLTIELEGAIPEEFRPMMGNRIYGCDDCQLICPWNRYSQLTDEEDFSPRAALHAPELIALFGWTEEKFLRITEGSPIRRIGHLRWLRNISVALGNAPYSEEVLTALQSRTGENALLDEHIEWAICQQTERRSEHRVEVQTSQQKRLIRAVEKGLPRDA

SEQ ID NO: 80263 - protein, 384 aa, Rahnella sp.
  REGION 1..384: note = tr|A0A0H3F4D4|A0A0H3F4D4_RAHSY Epoxyqueuosine reductase OS=Rahnella sp. (strain Y9602) OX=741091 GN=queG; PE = 3 SV=1
MTLPLDLVQLAQHIKQWGQSLGFQQVGICDTDLSAEEPKLQDWLDKQYHGEMEWMARHGMLRARPHELLPGTLRVISVRMNYLPAKAAFAKILNNPQLGYVSRYALGRDYHKVLRQRLKKLGDMIQAHCTEHADQTVTFRPFVDSAPVMERPLAAKAGLGWVGKHSLILNRESGSWFFLGELLIDLPLPVDQPQEEKCGKCVACITTCPTGAIVAPYTVDARRCISYLTIELEGAIPEEFRALMGNRIYGCDDCQLICPWNRYSQLTDEEDFSPRAALHAPELIELFSWAEEKFLRITEGSPIRRIGHLRWLRNIAVALGNAPYSEDVLNALQSREGENALLDEHISWAIAQQTERRNEHRIEVQTSQQKRLIRAVEKGLPRDA

SEQ ID NO: 80264 - protein, 330 aa, Rahnella sp.
  REGION 1..330: note = tr|A0A4R2Z3S5|A0A4R2Z3S5_9GAMM Epoxyqueuosine reductase OS=Rahnella sp. JUb53 OX=2485128 GN=EC840_10544; PE = 4 SV=1
MARHGMLRARPHELLPGTLRVISVRMNYLPAKAAFAKTLNNPQLGYVSRYALGRDYHKVLRQRLKKLGDMIQAHCTEHADQTVTFRPFVDSAPVMERPLAAKAGLGWVGKHSLILNRESGSWFFLGELLIDLPLPVDQPQEEKCGKCVACMTTCPTGAIVAPYTVDARRCISYLTIELEGAIPEEFRPLMGNRIYGCDDCQLICPWNRYSQLTDEEDFSPRAALHAPELMTLFGWTEEKFLRITEGSPIRRIGHLRWLRNIAVALGNAPYSQDVMDSLHSREGENALLDEHISWAIAQQVERRNEHRVEVQTLQQKRLIRAVEKGLPRDA

SEQ ID NO: 80265 - protein, 384 aa, unidentified
  source 1..384: note = Rahnella woolbedingensis
  REGION 1..384: note = tr|A0A419N522|A0A419N522_9GAMM Epoxyqueuosine reductase OS=Rahnella woolbedingensis OX=1510574 GN=queG; PE = 3 SV=1
MTLPLDLVQLAQHIKQWGQSLGFQQVGICDTDLSVEEPKLQDWLDKQYHGEMDWMARHGMLRARPHELLPGTLRVISVRMNYLPAKAAFAKTLNNPQLGYVSRYALGRDYHKVLRQRLKKLGDMIQAHCTEHADPTVTFRPFVDSAPVMERPLAAKAGLGWVGKHSLILNRESGSWFFLGELLIDLPLPVDQPQEEKCGKCVACITTCPTGAIVAPYTVDARRCISYLTIELEGAIPEEFRPLMGNRIYGCDDCQLICPWNRYSQLTDEEDFSPRAALHAPELITLFGWTEEKFLRITEGSPIRRIGHLRWLRNIAVALGNAPYSQEVMDSLHLREGENALLDEHISWAIAQQVERRKEHRVEVQTLQQKRLIRAVEKGLPRDA

SEQ ID NO: 80266 - protein, 311 aa, unidentified
  source 1..311: note = Raineya orbicola
  REGION 1..311: note = tr|A0A2N3IAQ2|A0A2N3IAQ2_9BACT Epoxyqueuosine reductase OS=Raineya orbicola OX=2016530 GN=queG PE=3 SV=1
MGFAEKYSQLIKQKAREIGFDFCGIAKAEFLEKEAPRLEMWLKNNMQGEMSYMANHFDKRLNPKLLVEGAKSVISVLLNYFPKQDLAQTNPDNFKISKYAYGEDYHFVMKRKMNELLNFIRENIGEINGRAFVDSAPVMDKVWAERSGLGWIGKHTNLINRKIGSFFFIGEIIIDLELAYDAPTGDYCGTCRRCLEACPTEAIVSPYVVDGSKCISYLTIELKNEIPQEFQGKMENWIFGCDVCQDVCPWNRFAKPHQTPEFEPNEHLKNMQKKDWLEITEEVFAKVFPKSAVKRTKIKGLQRNIQFASLE

SEQ ID NO: 80267 - protein, 391 aa, Ralstonia insidiosa
  REGION 1..391: note = tr|A0A191ZZ26|A0A191ZZ26_9RALS Epoxyqueuosine reductase OS=Ralstonia insidiosa OX=190721 GN=queG PE=3; SV = 1
MSATPTPAPTAALETNLDTRLPTGEADVAALVAQIRTWGAELGFDAIRIASIDLSHAEEGLQTWLAQGFHGDMDYMANHGLLRARPAELVAGTVRAIVARMPYLPHDTRGHTDQPAAGSDWRTVEWDRMRRPEDATISLYARGRDYHKVLRQRLQKLAEKIAGAVGPYGFRVFTDSAPVLEVALASNGGLGWRGKHTLLLDRDAGSMFFLGEILIDLPLPIDPPVEPHCGNCTRCIDVCPTQAIVAPYTVDARRCISYLTIEHKGSIPVELREAMGNRVYGCDDCQLICPWNKFAVPANLPDFDVRNGLDAATLVDLFGWTESEFNQRLEGSPIRRIGHERWLRNIAVALGNALRGPLPEASRAQLRAALHARADHPSELVREHVAWALAA

SEQ ID NO: 80268 - protein, 385 aa, Ralstonia mannitolilytica
  REGION 1..385: note = tr|A0A160BRT4|A0A160BRT4_9RALS Epoxyqueuosine reductase OS=Ralstonia mannitolilytica OX=105219 GN=queG; PE = 3 SV=1
MSATPTSSLQTNLDARLPANEADMRALVAQIRSWGAELGFDAIRIASIDLSHAEEGLQTWLAQGFHGDMDYMANHGMLRARPAELVAGTVRAIVARMPYLPHPTRESAPAEDWRTIEWDRLRRPQDATISLYARGRDYHKVLRQRLQKLAEKIAAAVGPYGFRVFTDSAPVLEVALASNGGLGWRGKHTLLLDRDAGSMFFLGEILIDLPLPEDPPVEPHCGNCTRCIDVCPTQAIVAPYVVDARRCISYLTIEHKGSIPVELRAVMGNHVYGCDDCQLICPWNKFAVPANVPDFDVRNGLDAATLAGLFAWTEAEFNQRLEGSPIRRIGHERWLRNIAVAIGNALREPLADDTRAQLTAALHARADDPSALVREHVAWALAQTT

SEQ ID NO: 80269 - protein, 385 aa, Ralstonia mannitolilytica
  REGION 1..385: note = tr|A0A2N5LCX0|A0A2N5LCX0_9RALS Epoxyqueuosine reductase OS=Ralstonia mannitolilytica OX=105219 GN=queG; PE = 3 SV=1
MSATPTSSLQTNLDARLPANEADMHALVAQIRSWGAELGFDAIRIASIDLSHAEEGLQTWLAQGFHGDMDYMANHGMLRARPAELVAGTVRAIVARMPYLPHPTRERAPAEDWRTIEWDRLRRPQDATISLYARGRDYHKVLRQRLQRLAEKIAAAVGPYGFRVFTDSAPVLEVALASNGGLGWRGKHTLLLDRDAGSMFFLGEILIDLPLPEDPPVEPHCGNCTRCIDVCPTQAIVAPYVVDARRCISYLTIEHKGSIPVELRAAMGNHVYGCDDCQLICPWNKFAVPANVPDFDVRNGLDAATLAGLFAWTEAEFNQRLEGSPIRRIGHERWLRNIAVAIGNALRERLSDDTRAQLSAALHARADDPSALVREHVAWALAQKT

SEQ ID NO: 80270 - protein, 385 aa, Ralstonia pickettii; identical to SEQ ID NO: 80268
  REGION 1..385: note = tr|A0A291EJ18|A0A291EJ18_RALPI Epoxyqueuosine reductase OS=Ralstonia pickettii OX=329 GN=queG PE=3 SV=1

SEQ ID NO: 80271 - protein, 385 aa, Ralstonia pickettii
  REGION 1..385: note = tr|R0CJA8|R0CJA8_RALPI Epoxyqueuosine reductase; OS = Ralstonia pickettii OR214 OX=1264675 GN=queG PE=3 SV=1
MSATPTSSPETNLDARLPADAAGMHALVAQIRSWGAELGFDAVRIADVDLSHAEEGLQTWLAQGFHGDMDYMANHGMLRARPAELVAGTVRAIVARMPYLPHLADPQTPGSDWRTIEWDRLRRPKDATISLYARGRDYHKVLRQRLQKLAEKIAGAIGPYGFRVFTDSAPVLEVALATNGGLGWRGKHTLLLDRDAGSMFFLGEILVELPFPVDPPVEPLCGNCTRCIDVCPTQAIVAPYTVDARRCISYLTIEHKGSIPVELRAAMGNRVYGCDDCQLICPWNKFAVPANLPDFDVRNGLDAATLAELFNWTDAEFNQRLEGSPIRRIGHERWLRNIAVAIGNALRAPLPDTTRAQLFAALKARADDASELVREHVAWALAQTT

SEQ ID NO: 80272 - protein, 383 aa, unidentified
  source 1..383: note = Ralstonia pseudosolanacearum
  REGION 1..383: note = tr|A0A223GPV3|A0A223GPV3_9RALS Epoxyqueuosine reductase OS=Ralstonia pseudosolanacearum OX=1310165; GN = queG PE=3 SV=1
MSGTPTSLPEPGLDARLPADEAGMAALVAQIRSWGTGLGFDAIRIADIDLSHAEDGLRTWLAQGFHGDMDYMANHGMLRARPAELVAGTVRAIVARMPYVPHRGAAPAAGDDWRAIEWDRLRRPEDATVSLYARGRDYHKVLRQRLQKLAERIAGAVGPYGYRVFTDSAPVLEVALATNGGLGWRGKHTLLLDRDAGSMFFLGEILIDLPLPVDPPVTPRCGHCTRCIEVCPTQAIVAPYVVDARRCISYLTIEHKGAIPVELRAAMGNHVYGCDDCQLACPWNKFAVHASLPDFDVRNGLDAAALVDLFGWTEDQFNQRLEGSPIRRIGHERWLRNLAVALGNALRAPLPEPAHARLRAALLTRAEDPSALVREHVAWALAQ

SEQ ID NO: 80273 - protein, 383 aa, unidentified
  source 1..383: note = Ralstonia pseudosolanacearum
  REGION 1..383: note = tr|A0A454TJS0|A0A454TJS0_9RALS Epoxyqueuosine reductase OS=Ralstonia pseudosolanacearum OX=1310165; GN = queG PE=3 SV=1
MSGTPTSLPEPGLDARLPADEAGMAALVAQIRSWGTELGFDAIRIADIDLSHAEDGLRTWLAQGFHGDMDYMANHGMLRARPAELVAGTVRAIVARMPYVPHRGAAPAAGDDWRAIEWDRLRRPEDATVSLYARGRDYHKVLRQRLQKLAERIAGAVGPYGYRVFTDSAPVLEVALATNGGLGWRGKHTLLLDRDAGSMFFLGEILIDLPLPVDPPVTPRCGHCTRCIEVCPTQAIVAPYVVDARRCISYLTIEHKGAIPVELRAAMGNHVYGCDDCQLACPWNKFAVHASLPDFDVRNGLDAAALVDLFGWTEDQFNQRLEGSPIRRIGHERWLRNLAVALGNALRAPLPEPAHARLRAALLTRAEDPSALVREHVAWALAQ

SEQ ID NO: 80274 - protein, 386 aa, Ralstonia solanacearum
  REGION 1..386: note = tr|A0A5H2PIL4|A0A5H2PIL4_RALSL tRNA epoxyqueuosine(34) reductase QueG OS=Ralstonia solanacearum OX=305 GN=queG PE=4 SV=1
  VARIANT 214: note = Xaa can be any naturally occurring amino acid
MSGTPTSLPEPGLDARLPADEAGMAALVAQIRSWGTGLGFDAIRIADVDLSHAEDGLRTWLAQGFHGDMDYMANHGMLRARPAELVAGTVRAIVARMPYVPHRGAAAPPGSDWRAIEWDRLRRPEDATISLYARGRDYHKVLRQRLQKLAEHIASAVGPYGYRVFTDSAPVLEVALATNGGLGWRGKHTLLLDRDAGSMFFLGEILIDLPLPVXPPATPRCGHCTRCIDVCPTQAIVAPYVVDARRCISYLTIEHKGAIPVELREAMGNHVYGCDDCQLVCPWNKFAVHASLPDFDVRNGFDAVTLVDLFGWTEDEFNQRLEGSPIRRIGHERWLRNIAVALGNALRAPLPASSRARLLAALQARADDPSPLVREHVAWALAQVQH

SEQ ID NO: 80275 - protein, 456 aa, Ralstonia solanacearum
  REGION 1..456: note = tr|A3RYL7|A3RYL7_RALSL Epoxyqueuosine reductase; OS = Ralstonia solanacearum UW551 OX=342110 GN=queG PE=3 SV=1
MARDSVVLPAPRSPESCTCTGRGPSARTACARAAPNAAVAASSTSGTVRSASGSVGPAKAAAMGTGGIAYNLGMSGTPTSLPEPGLDARLPADEGGMAALVAQIRSWGTGLGFDAIRIADVDLSHAEDGLRTWLAQGFHGDMDYMANHGMLRARPAELVAGTVRAIVARMPYVPHRGAAAPAGGDWRAIEWDRLRRPEDATISLYARGRDYHKVLRQRLQKLAEHIASAVGPYGYRVFTDSAPVLEVALATNGGLGWRGKHTLLLDRDAGSMFFLGEILIDLPLPVDPPATPRCGHCTRCIDVCPTQAIVAPYVVDARRCISYLTIEHKGAIPVELREAMGNHVYGCDDCQLVCPWNKFAVHAGLPDFDVRNGFDAVTLVDLFNWTEDEFNQRLEGSPIRRIGHERWLRNIAVALGNALRAPLPASSRARLLAALQAHADDPSPLVREHVAWALAQ

SEQ ID NO: 80276 - protein, 397 aa, Ralstonia sp.
  REGION 1..397: note = tr|A0A1H0MR10|A0A1H0MR10_9RALS Epoxyqueuosine reductase OS=Ralstonia sp. 25mfcol4.1 OX=1761899 GN=queG; PE = 3 SV=1
MIDRAVPAPTPAQTAHPAEDSAPARPDSASVTTDVDLASLAASLRGWGRALGFDEIRIADVDLRHAEAGLLAWLQAGYHGDMDYMANHGAKRARPHELVPGTVRAIVARMPYLPAQGPDDWRRHELARLDDPATAVISLYARGRDYHKVLRNRLQQLAARIETAIGPFGYRVFTDSAPVMEVALASQGGLGWRGKHTLLLDRDGGSMFFLGEILVDIPLPADPAEAPHCGNCRRCIDICPTGAILEPFRLDARRCISYLTIEHKGAIPEALRAPMGNRVYGCDDCQLACPWNKFAHRATLPDFDVRNGFDAPDMAELFGWTEAEFNQRLEGSPIRRIGHERWLRNLAVGLGNSLRAASASDPALAQRIRAALLARRDTATPLVREHIDWALAQDTAG

SEQ ID NO: 80277 - protein, 385 aa, Ralstonia sp.
  REGION 1..385: note = tr|A0A5C6YJQ1|A0A5C6YJQ1_9RALS Epoxyqueuosine reductase OS=Ralstonia sp. TCR112 OX=2601730 GN=queG PE=3; SV = 1
MSATPTSSPETNLDARLPADAAGMQALVAQIRSWGAELGFDAVRIADVDLSHAEEGLQTWLAQGFHGDMDYMANHGMLRARPAELVAGTVRAIVARMPYLPHLADPQTPGSDWRTIEWDRLRRPEDATISLYARGRDYHKVLRQRLQKLAEKIAGAVGPYGFRVFTDSAPVLEVALATNGGLGWRGKHTLLLDRDAGSMFFLGEILVDLPFPVDPPVEPHCGNCTRCIDVCPTQAIVAPYTVDARRCISYLTIEHKGSIPVELRAAMGNRVYGCDDCQLICPWNKFAVPANLPDFDVRNGLDAATLAGLFHWTDAEFNQRLEGSPIRRIGHERWLRNIAVAIGNALRAPLPDSARAQLTAALHARADDPSELVREHVAWALTQST

SEQ ID NO: 80278 - protein, 376 aa, Ralstonia syzygii
  REGION 1..376: note = tr|G3A0Z1|G3A0Z1_9RALS Epoxyqueuosine reductase; OS = Ralstonia syzygii R24 OX=907261 GN=queG PE=3 SV=1
MPEPGLDARLPADEAGMAALVAQIRSWGTGLGFDAIRIADVDLSHAEDGLRTWLAQGFHGDMDYMANHGMLRARPAELVAGTVRAIVARMPYVPHRGAAPPAVGDWRAIEWDRLRRPEDATISLYARGRDYHKVLRQRLQKLAEQIAGAVGPYGYRVFTDSAPVLEVALATNGGLGWRGKHTLLLDRDAGSMFFLGEILIDLPLPVDPPVTPRCGHCTRCIEVCPTQAIVAPYVVDARRCISYLTIEHKGAIPVELRAAMGNHVYGCDDCQLVCPWNKFAVHASLPDFDVRNGFDAVALVDLFSWTEDEFNQRLEGSPIRRIGHERWLRNIAVALGNALRAPQPEPARARLRAALQARADDPSPLVREHVAWALAQ

SEQ ID NO: 80279 - protein, 403 aa, Ramlibacter henchirensis
  REGION 1..403: note = tr|A0A4Z0C2K7|A0A4Z0C2K7_9BURK Epoxyqueuosine reductase OS=Ramlibacter henchirensis OX=204072 GN=queG; PE = 3 SV=1
MRCDAFGEGARVVLARPPQQDGAARPGGASYNRRVTRAGSQIDGPSLVVSIGRWGHELGFSQIGVAGVDLSSAEPGLLQWLSNGFHGEMAYMEAHGLRRARPAELVPGTLSVITARMDYLPQATPEGWQAIEWDRLKRPREGAVSLYARGRDYHKVMRNRLQKLSDRIAQEIGPFGHRAFTDSAPVLEAELAARSGQGWRGKHTLILSREAGSMYFLGEIYVDIALPASAPVTAHCGSCTACIDICPTGAIVGEQRLDARRCISYLTIEHAGPIPVELRPLMGNRIYGCDDCQLVCPWNKYAGRSALPDFDERPGMSGAALAELLGWSEGEFLRRTEASAIRRIGHERWLRNVAVAAGNALRVADDEPLRGALRKLVDHPSSLVREHVAWALAGARVEADARG

SEQ ID NO: 80280 - protein, 348 aa, unidentified
  source 1..348: note = Ramlibacter rhizophilus
  REGION 1..348: note = tr|A0A4Z0C0J2|A0A4Z0C0J2_9BURK Epoxyqueuosine reductase OS=Ramlibacter rhizophilus OX=1781167 GN=queG; PE = 3 SV=1
MRLWALELGFSQIGVAGIDLSSAEDGLLQWLSHGFHGDMSYMAAHGLKRARPAELVPGTVSVLTARMDYLPQGTPEGWQAVEWERLRRPGEGVVSLYARGRDYHKVMRSRLQKLAERLAEDVGPFGHRVFTDSAPVLEAELATRSGQGWRGKHTLVLDREGGSMFFLGEIYLDLALPTTDPVSAHCGSCEACVHACPTGAILGPGVLDARRCISYLTIEHAGSIDPALRPLMGNRIYGCDDCQLACPWNKFARPAVLADFDARDGLVGTPLADLLSWSEARFLQRTEGSAIRRIGHERWLRNLAVAAGNALRAGEGDASLVASLEALRSHSSAVVREHVAWALAQATA

SEQ ID NO: 80281 - protein, 346 aa, Ramlibacter sp.
  REGION 1..346: note = tr|A0A4Z0BEG7|A0A4Z0BEG7_9BURK Epoxyqueuosine reductase OS=Ramlibacter sp. 18x22-1 OX=2530451 GN=queG; PE = 3 SV=1
MGRWGRELGFSQIGVAGVDLSSAEPGLLQWLSNGFHGEMAYMAAHGVKRARPAELVPGTLSVITARMDYLPAGTSGEWQAVEWDRLRRADEGYVSMYARGRDYHKVLRSRLQKLCDRIAAEIGPFGHRAFTDSAPVLEVELATRSGQGWRGKHTLVLSREAGSMFFLGEIYVDLALPESPPVTAHCGSCAACIDVCPTGAIVAPHWLDARRCISYLTIEHPGPIPLELRPLIGNRVYGCDDCQLACPWNKYAQSSSLPDFDPREGFSGATLAALLSWDEAEFLRRTEGGPIRRIGHERWLRNVAVAAGNALRIADDAALRSALQARLTHPSELVREHVQWALAQHA

SEQ ID NO: 80282 - protein, 514 aa, Ramlibacter sp.
  REGION 1..514: note = tr|A0A4Y7B2I0|A0A4Y7B2I0_9BURK Epoxyqueuosine reductase OS=Ramlibacter sp. WS9 OX=1882741 GN=queG PE=3; SV = 1
MQQFLAQRRLRKQGDVARFVGLHLDADHQVGARKQPLGLLGPFGQLQPIPGEDVPKAGVFPFARVVEAEEVEVPDRHAGHFVRLDHGVSRALHAALHAQRAQQVPHQRGLARPQVAVQFDEGIGQLRMRSQLRGEGACVVFRAQNHGANGSFYNRRVAFNSAQMGPQLVRQIREWAVELGFSQIGIAGVDLSSAEAGLAAWLSNGFHGEMAYMQTHGLKRARPAELVPGTVSVITVRMDYLSDATPEGWQAVEFDRLNRPEEGIVSLYARGRDYHKVLRARLQKLSDRISAEVGPFGYRVFTDSAPVLEAELAARSGQGWRGKHTLVLNREAGSMFFLGEIYVDLALPASEPTSDHCGSCSACIEVCPAQAIIAPYRLDARRCISYLTIEHAGSIPEDLRPLIGNRIYGCDDCQLICPWNKFARRNALPDFDERTGLTGRQLVELFAWTEADFLTRTEGSPIRRIGHERWLRNVAVAMGNALRSHDDAVLRAALQARADHPSDLVREHVAWALS

SEQ ID NO: 80283 - protein, 349 aa, Ramlibacter tataouinensis
  REGION 1..349: note = tr|A0A127JZ02|A0A127JZ02_9BURK Epoxyqueuosine reductase OS=Ramlibacter tataouinensis OX=94132 GN=queG; PE = 3 SV=1
MVTDIRGWAHGLGFSQIGVAGVDLSSAEAGLLAWLSNGYHGEMDYMQAHGLKRARPAELVPGTLSVITARMDYLPRTTPEGWQAIEFDRLKRPGEGVVSAYARGRDYHKVLRSRLQKLSERIAQAVGPFGHRVFTDSAPVLEAELAARSGQGWRGKHTLVLSREAGSMFFLGEIYVDIALPESLPVTEHCGSCSACIDICPTQAIVGPGRLDARRCISYLTIEHAGAIPEALRPLMGNRIYGCDDCQLACPWNKFAQRSALPDFDEREGLAGGQLADLFAWSEEEFLRRTEGGPIRRIGHERWLRNIAVALGNALRASGDPSLRAALQARADHPSALVREHVAWALGQG

SEQ ID NO: 80284 - protein, 351 aa, Ramlibacter tataouinensis
  REGION 1..351: note = tr|F5Y3N8|F5Y3N8_RAMTT Epoxyqueuosine reductase; OS = Ramlibacter tataouinensis (strain ATCC BAA-407 / DSM 14655 / LMG 21543 / TTB310) OX=365046 GN=queG PE=3 SV=1
MAQIGHWARELGFSQIGIAGVDLSSAEPGLVAWLEQGFHGEMAYMAAHGLKRARPAELVPGTVSVLTARMDYLPAATPDGWRAVEWERLRRPGEAVVSLYARGRDYHKVLRARLQKLADRIAQAVGPFGHRVFTDSAPVLEAELAARSGQGWRGKHTLLLDREAGSMFFLGEIYLDLALPPSAPVQAHCGRCSACMDLCPTRAIVAPGRLDARRCISYLTIEHAGPIPAELRPLMGNRIYGCDDCQLACPWNKFARRSPLPDFDAREGLAGSALAELFGWSEEEFLRRTEGSAIRRIGHERWLRNLAVALGNALALQDDAAMRAALAARQDHPSALVREHVAWALAQQAQR

SEQ ID NO: 80285 - protein, 379 aa, unidentified
  source 1..379: note = Raoultella electrica
  REGION 1..379: note = tr|A0A514EX44|A0A514EX44_9ENTR Epoxyqueuosine reductase OS=Raoultella electrica OX=1259973 GN=queG PE=3; SV = 1
MSQPLDLNKLAQQIKQWGTELGFQQVGITDTDLSASEPKLQAWLDKQYHGEMEWMARHGMMRARPHELQPGTLRVISVRMNYLPANAAFARTLKDPSLGYVSRYALGRDYHKLLRNRLKKLGELIQEQCTSLNFRPFVDSAPILERPLAEKAGLGWTGKHSLILNRDAGSFFFLGELLVDIPLPIDSPVTEECGRCVACMTICPTGAIVEPYTVDARRCISYLTIELEGVIPEELRPLIGNRIYGCDDCQLICPWNRFSQLTDEADFSPRQALHAPPLIELFAWSEAHFLKVTEGSAIRRIGHLRWLRNIAVALGNAAWDEAHLTALESRRGEHPLLDEHIDWAVAQQIDKRNANVVEVQLPKKQRLVRVIEKGLPRDA

SEQ ID NO: 80286 - protein, 379 aa, Raoultella ornithinolytica
  REGION 1..379: note = tr|A0A4R2XSQ4|A0A4R2XSQ4_RAOOR Epoxyqueuosine reductase OS=Raoultella ornithinolytica OX=54291 GN=queG; PE = 3 SV=1
MLQPLDLNKLAQQIKQWGTELGFQQVGITDTDLSVSEPKLQAWLDKQYHGEMEWMARHGMMRARPHELLPGTLRVISVRMNYLPANAAFARTLKDPALGYVSRYALGRDYHKLLRNRLKKLGEMIQEQCASLNFRPFVDSAPVLERPLAEKAGLGWTGKHSLIINRDAGSFFFLGELLVDIPLPVDRPVAEECGRCVACMTICPTGAIVEPYTVDARRCISYLTIELEGAIPIEFRSLIGNRIYGCDDCQLICPWNRFSQLTDEEDFSPRKALHAPPLVELFAWSESHFLKVTEGSAIRRIGHLRWLRNIAVALGNAPWDEAHLKALESRRGEHPLLDEHIEWAIDQQIARRSAGAVDVQLPKKQRLVRVVEKGLPRDA

SEQ ID NO: 80287 - protein, 379 aa, Raoultella ornithinolytica
  REGION 1..379: note = tr|A0A1Y6GNQ4|A0A1Y6GNQ4_RAOOR Epoxyqueuosine reductase OS=Raoultella ornithinolytica OX=54291 GN=queG; PE = 3 SV=1
MSQPLDLNKLAQQIKQWGTELGFQQVGITDTDLSASEPKLQAWLDKQYHGEMEWMARHGMMRARPHELQPGTLRVISVRMNYLPANAAFARTLKDPSLGYVSRYALGRDYHKLLRNRLKKLGEMIQEQCASLNFRPFVDSAPILERPLAEKAGLGWTGKHSLILNRDAGSFFFLGELLVDIPLPIDSPVTEECGRCVACMTICPTGAIVEPYTVDARRCISYLTIELEGAIPEAFRPLIGNRIYGCDDCQLICPWNRFSQLTDETDFSPRKALHAPPLIELFAWSEAHFLKVTEGSAIRRIGHLRWLRNIAVALGNAPWDEAHLTALESRRGEHPLLDEHIEWAVAQQIEKRNANVIEVQLPKKQRLVRVIEKGLPRDA

SEQ ID NO: 80288 - protein, 379 aa, Raoultella planticola
  REGION 1..379: note = tr|A0A485AN29|A0A485AN29_RAOPL Epoxyqueuosine reductase OS=Raoultella planticola OX=575 GN=queG PE=3 SV=1
MSQPLDLNKLAQQIKQWGTELGFQQVGITDTDLSASEPKLQAWLDKQYHGEMEWMARHGMMRARPHELQPGTLRVISVRMNYLPANAAFARTLKDPTLGYVSRYALGRDYHKLLRNRLKKLGEMIQEQCASLNFRPFVDSAPILERPLAEKAGLGWTGKHSLILNRDAGSFFFLGELLVDIPLPIDSPVTEECGRCVACMTICPTGAIVEPYTVDARRCISYLTIELEGAIPEEFRPLIGNRIYGCDDCQLICPWNRFSQLTDEADFSPRKALHAPPLVELFAWSEAHFLKVTEGSAIRRIGHLRWLRNIAVALGNAPWDEAHLTALESRRGEHPLLDEHIEWAVAQQIDKRNANVVEVQLPKKQRLVRVIEKGLPRDA

SEQ ID NO: 80289 - protein, 379 aa, Raoultella planticola; identical to SEQ ID NO: 80287
  REGION 1..379: note = tr|A0A377TAL0|A0A377TAL0_RAOPL Epoxyqueuosine reductase OS=Raoultella planticola OX=575 GN=queG PE=3 SV=1

SEQ ID NO: 80290 - protein, 379 aa, Raoultella sp.
  REGION 1..379: note = tr|A0A4R3ZEC8|A0A4R3ZEC8_9ENTR Epoxyqueuosine reductase OS=Raoultella sp. BIGb0138 OX=2485115 GN=queG; PE = 3 SV=1
MSQPLDLNKLAQQIKQWGTELGFQQVGITDTDLSASEPKLQAWLDKQYHGEMEWMARHGMMRARPHELLPGTLRVISVRMNYLPANAAFARTLKDPALGYVSRYALGRDYHKLLRNRLKKLGEMIQEQCASLNFRPFVDSAPILERPLAEKAGLGWTGKHSLILNRDAGSFFFLGELLIDIPLPIDQPVTEECGRCVACMTICPTGAIVEPYTVDARRCISYLTIELEGAIPEEFRPLIGNRIYGCDDCQLICPWNRFSQLTDEEDFSPRKALHAPPLVELFAWSEAHFLKVTEGSAIRRIGHLRWLRNIAVALGNAAWDEANLIALESRRGEHPLLDEHIEWAVAQQIDKRNANVVDVQLPKKQRLVRVIEKGLPRDA

SEQ ID NO: 80291 - protein, 379 aa, Raoultella sp.
  REGION 1..379: note = tr|A0A509CVJ9|A0A509CVJ9_9ENTR Epoxyqueuosine reductase OS=Raoultella sp. NCTC 9189 OX=2583577 GN=queG; PE = 3 SV=1
MLQPLDLNKLAQQIKQWGTELGFQQVGITDTDLSVSEPKLQAWLDKQYHGEMEWMARHGMMRARPHELLPGTLRVISVRMNYLPANAAFARTLKDPALGYVSRYALGRDYHKLLRNRLKKLGEMIQEQCASLNFRPFVDSAPVLERPLAEKAGLGWTGKHSLIINRDAGSFFFLGELLVDIPLPVDRPVAEECGRCVACMTICPTGAIVEPYTVDARRCISYLTIELEGAIPIEFRPLIGNRIYGCDDCQLICPWNRFSQLTDEEDFSPRKALHAPPLVELFAWSESHFLKVTEGSAIRRIGHLRWLRNIAVALGNAPWDEAHLKALESRRGEHPLLDEHIEWAIDQQIARRSAGAVEVQLPKKQRLVRVVEKGLPRDA

SEQ ID NO: 80292 - protein, 379 aa, Raoultella terrigena
  REGION 1..379: note = tr|A0A3P8L2Z8|A0A3P8L2Z8_RAOTE Epoxyqueuosine reductase OS=Raoultella terrigena OX=577 GN=queG PE=3 SV=1
MLQPLDLNKLAQQIKQWGTELGFQQVGITDTDLSVSEPKLQAWLDKQYHGEMEWMARHGMMRARPHELLPGTLRVISVRMNYLPANAAFARTLKDPALGYVSRYALGRDYHKLLRNRLKKLGEMIQEQCASLNFRPFVDSAPVLERPLAEKAGLGWTGKHSLIINRDAGSFFFLGELLVDIPLPVDRPVAEECGRCVACMTICPTGAIVEPYTVDARRCISYLTIELEGAIPIEFRPLIGNRIYGCDDCQLICPWNRFSQLTDEEDFSPRKALHAPPLVELFAWSESHFLKVTEGSAIRRIGHLRWLRNIAVALGNAPWDEAHLKALESRRGEHPLLDEHIEWAIDQQIARRSAGAVDVQLPKKQRLVRVVEKGLPRDA

SEQ ID NO: 80293 - protein, 222 aa, Raoultella terrigena
  REGION 1..222: note = tr|A0A4U9D4L1|A0A4U9D4L1_RAOTE Epoxyqueuosine reductase OS=Raoultella terrigena OX=577 GN=queG_1 PE=4; SV = 1
MIQEQCASLNFRPFVDSAPVLERPLAEKAGLGWTGKHSLIINRDAGSFFFLGELLVDIPLPVDRPVAEECGRCVACMTICPTSAIVEPYTVDARRCISYLTIELEGAIPIEFRPLIGNRIYGCDDCQLICPWNRFSQLTDEEDFSPRKALHAPPLVELFAWSESHFLKVTEGSAIRRIGHLRWLRNIAVALGNAPWDEAHLKALESRRGRAPRFSMSISSGQ

SEQ ID NO: 80294 - protein, 323 aa, unidentified
  source 1..323: note = Raphidiopsis brookii
  REGION 1..323: note = tr|D4TVM7|D4TVM7_9CYAN Epoxyqueuosine reductase; OS = Raphidiopsis brookii D9 OX=533247 GN=queG PE=3 SV=1
MSYLTSLSTHTIKEKAYKLGFHKVGVAVVLGESKEKERLRKWISLGYHADMDWMTNPKREDIKLVMPEVRSLVCVAINYYTPHPRPQGVEYGKISRYGWGRDYHRILHKKLKQLATWLESKGEGIKARYYADTGPIQDKVWAEKAGIGWIGKNGNVITREYGSWVFLGEVLTNLELEGDTPATQHCGTCNRCIEACPTEAIAQPFVVDANKCIAYHTIENRGETLPITIERNLQGWVAGCDICQDVCPWNQRFSQITDVVDFHPYPGNLAPKLVELSEITDEQWNEKFSASALRRIKPGMLRKNARANLTTLKLNNDSKSNHL

SEQ ID NO: 80295 - protein, 324 aa, unidentified
  source 1..324: note = Raphidiopsis curvata
  REGION 1..324: note = tr|A0A1Z4VF81|A0A1Z4VF81_9CYAN Epoxyqueuosine reductase OS=Raphidiopsis curvata NIES-932 OX=1973482; GN = queG PE=3 SV=1
MSSLTSLSTHTIKEKAYKLGFHKVGIAVVLGVESKEKERLRKWISLGYHADMDWMTNPKREDIRLVMPEVRSLVCVAINYYTPHSRPLGGEYGKISRYGWGRDYHRILHKKLKQLATWLESQGEGIKARYYADTGPIQDKVWAEKAGIGWIAKNGNVITREYGSWVFLGEVLTNLELEGDTPATQHCGTCNRCIEACPTQAITQPFVVDANKCIAYHTIENRGETLPINIERNLQGWVAGCDICQDVCPWNQRFSQVTDVVDFHPYPGNLAPKLLELSEITDEQWNEKFTASALRRIKPEMLRKNARANLTTLKLNNDSESNHL

SEQ ID NO: 80296 - protein, 311 aa, Reichenbachiella agariperforans
  REGION 1..311: note = tr|A0A1M6NJT9|A0A1M6NJT9_9BACT Epoxyqueuosine reductase OS=Reichenbachiella agariperforans OX=156994; GN = queG PE=3 SV=1
MILDQTKLTYFIKQKATEEGFLSCGIAKAEFLEEEAPKLEKWLNQGMHGEMAYMANHFDKRLDPRKLVDGAKSVISLLYNYYPEKNLAEEDNYKIAKYAYGKDYHYIIKPKLKTILNEIIEHVGDVNARVFVDSAPVHERAWAAKAGQGWVGKNSLLLNKQSGSFFFLAEIILDVDLDYDGPVKDYCGTCSKCMDACPTDAIPEPYVVDGSRCISYLTIELRDQIPEEFRGKMENWVFGCDICQDVCPWNRFSKKHQEEAFVPHDKLEGMSTSDWEEITEEMFREVFKGSAVKRTKLEGLKRNISFAKKNA

SEQ ID NO: 80297 - protein, 310 aa, Reichenbachiella faecimaris
  REGION 1..310: note = tr|A0A1W2GDC6|A0A1W2GDC6_9BACT Epoxyqueuosine reductase OS=Reichenbachiella faecimaris OX=692418 GN=queG; PE = 3 SV=1
MDHFKLTQLIKQKSAEEGFQFCGVAKAEFLEKEAPKLEEWLNQDMHGEMAYMANHFDKRLDPRKLVDGAKSVISLLYNYYPEKDLNEDKEVKIAKYAFGKDYHHIIKPKLKTILQSISEQVGEVNARVFVDSAPVHERAWAAKAGLGWVGKNSLLLNKSMGSFFFLAEIIVDVELKYDGPIKDYCGTCTACMDACPTDAIPDPYVVDGSKCISYLTIELKNEIPNSFAGQMEGWAFGCDICQDVCPWNRFSKPHQEPDFKPHEKLGEMKSSDWSELTEELFREVFKGSAVKRTKYSGLKRNIDFLKKKPN

SEQ ID NO: 80298 - protein, 310 aa, Reichenbachiella sp.
  REGION 1..310: note = tr|A0A2G5L4X8|A0A2G5L4X8_9BACT Epoxyqueuosine reductase OS=Reichenbachiella sp. 5M10 OX=1889772 GN=queG; PE = 3 SV=1
MDRVKLTHLIKQKALQEGFMACGIAKADFLAEEAPKLERWLNQGMHGEMGYMANHFDKRLDPRKLVEGAKTVISLSYNYFPESNLAKEDNYKIAKYAYGKDYHYIIKPKLKTVLQEVIEQVGEVNARVFVDSAPVHERAWAAKAGIGWVGKNSLLLNKKSGSFFFLAEIILDVELDYDSPVKDYCGTCTKCMDACPTDAIPEPYVVDGSRCISYLTIELRDQIPSEFQGKMENWVFGCDICQDVCPWNRFSKPHQEESFMPHAQLDEWSKSDWEEMTEEVFREVFRGSAVKRAKYEGLKKNVAFAKSRNT

SEQ ID NO: 80299 - protein, 357 aa, Reinekea blandensis
  REGION 1..357: note = tr|A4BEA9|A4BEA9_9GAMM Epoxyqueuosine reductase; OS = Reinekea blandensis MED297 OX=314283 GN=queG PE=3 SV=1
MAERSDLISTYDPLTLAEQIRALGRDLGFQAVTFANPSTEQHRAGFESWLEAGYAGDMGWLERNLDKRFDAASLHPGTKTVICVRMDYWPEAADGLTLLSQTDRAYISRYALGRDYHKVLRKRLSDFARQITELAGDHGARPFVDSAPVMERQLAAHSGLGWIGKNSLLLAPGHGSTFFLGELCTNLALPFDSPNPASHCGSCQQCMVDCPTDAFVSDGVLDATRCISYLTIEYSGAIPEDLRAAMGNRIYGCDDCQLVCPHNRKAPVSDETDFQPRSELDGGALVDLFDWSEAEFLKKTEGSAIRRIGYEQWQRNLAVALGNGPVTAEARESLSRGLGRVSELVDDHIRWALNRLG

SEQ ID NO: 80300 - protein, 368 aa, unidentified
  source 1..368: note = Reinekea forsetii
  REGION 1..368: note = tr|A0A2K8KMJ4|A0A2K8KMJ4_9GAMM Epoxyqueuosine reductase OS=Reinekea forsetii OX=1336806 GN=queG PE=3 SV=1
MMNLPMAVPVDLIATTTELSLAEKIRALGAPLGFQAMRFCAPDTRAHGEHLQQWLDAGYHGEMDWLTRNSDKRLRGDLLQPGTKTVIAVRMDYLPANHHSMAVLDSPELAYVARYALGRDYHKVLRKRLVQLAQQITELAGSHGYRPFVDSAPVMERQLAEQAGLGWTGKNTLLLAPGVGSWFFLGELFTDLDLPFDPPLEQGHCGSCNQCLVDCPTDAFVAPGVLDARKCISYLTIEYDGSIPVDLRAKMGNRIYGCDDCQLVCPHNNKADTTQEADFTPRHSLEKISLMEAFSWTEVEFLHNTEGSPIRRIGYAQWQRNIAVALGNAPASPELIATLERAKGRVSALVDEHIDWALVQLQSAVVAD

SEQ ID NO: 80301 - protein, 363 aa, Reinekea marinisedimentorum
  REGION 1..363: note = tr|A0A4R3IBT0|A0A4R3IBT0_9GAMM Epoxyqueuosine reductase OS=Reinekea marinisedimentorum OX=230495 GN=queG; PE = 3 SV=1
MQSPDNLITTAESLTLAEQIRDIGKKLGFQAVHFSTPDTSGHAEQYNAWVDAGYNGDMAWMARNCDKRFDGSELQPGTKTVISVRMNYQPDGAAPESVLGDPGKAYIARYALGRDYHKVLRKRLMHFAKAIEEIAGKHGYRPFVDSAPVMERQIAEQSGMGWIGKNTLLLAPGSGSWFFLGELFTDLELPFDAPFPKSHCGSCQQCLIDCPTDAFLGPNKLDARKCISYLTIEYAGSIPVELREKMGNRIYGCDDCQLVCPHNRKANDTEEADFQPRHNLDDASLLSLFAWSEQQFLNNTEGSPIRRIGYEQWTRNLAVALGNGPCSEQATDQLKQKLGQVSALVDEHIEWALSRLQQQAGDR

SEQ ID NO: 80302 - protein, 364 aa, Reinekea sp.
  REGION 1..364: note = tr|A0A5C8Z7Q9|A0A5C8Z7Q9_9GAMM Epoxyqueuosine reductase OS=Reinekea sp. SSH23 OX=2593301 GN=queG PE=3; SV = 1
MQPTNSIIATSGELTLAEQIRQLGLNLGLQAVHFSSPSTDEHELRFQQWLDAGHHGEMDWLQRNKDKRFHGGQLHPGTKTVISVRMDYLPDGAPPFNILSDPNKAYVARYAVGRDYHKVLRKRLTLFAKQIAQLAGEHGYRPFVDSAPVMERQLAEKSGMGWIGKNTLLLAPGAGSWFFLGELFTDLELPFDEPFEKNHCGSCQECLVKCPTDAFTQAGVLDARKCISYLTIEYSGSIPVDLRSKMGNRIYGCDDCQLVCPHNNKADTSAESDFTPRHQLDQASLTDLFSWDETTFLSRTEGSPIRRIGYQQWLRNIAIALGNGEPSHQVIQLLSNKLGCYSELLDEHLRWAIEQLEQRLTINS

SEQ ID NO: 80303 - protein, 399 aa, unidentified
  source 1..399: note = Reyranella soli
  REGION 1..399: note = tr|A0A512NIJ4|A0A512NIJ4_9PROT Epoxyqueuosine reductase OS=Reyranella soli OX=1230389 GN=queG PE=3 SV=1
MSRQPPVPKRKPKPATPAELRNAIRDEALRLGFDAVGFAPANAGAEARDQRLLRLGEFLNAGWQGDMGWLGERTEQRADPQTLWQEARTVVSLAINYAPPTDPLEVLRQDERAAISVYAQGRDYHDVMKSKLKTLGRFIWDTYRHDLKVFVDTAPLMEKPMAQMAGHGWQGKHTNLVSRQFGSWLFLGEILLSVELPADSPESDHCGQCRACLDICPTKAFPAPYRLEARRCISYLTIEHEGPIDRELRPLLGNRIYGCDDCLAVCPWNKFAQEARETSLMPRPALNAPLLAELATLDEEGFRKRFAGTAIKRIGRDRFLRNVAYALGNSSSRETALPAVERLLDDPSPLVRGGAVWALSRLAPRQIVQRQRTAREDDPEVRNEWREALQTVRGRENGR

SEQ ID NO: 80304 - protein, 315 aa, Reyranella sp.
  REGION 1..315: note = tr|A0A522ZFT4|A0A522ZFT4_9PROT tRNA epoxyqueuosine(34) reductase QueG (Fragment) OS=Reyranella sp. OX=1929291 GN=queG PE=4 SV=1
MARLPPRPKRPPKQATPRALRDAISAKALELGFDAVAFAPAQLSPEARQLRRERMEAFLERGFQGDMGWLVDRAEQRIDPSGLWPEARTVVSVALNYGPAGDPRFMQEERERGAVSVYAQGRDYHDVMKSRLKQLGRFIWDTYHESLKVFVDTAPLMEKLAAQQAGHGWQGKHTNLVSRRFGSWLFLGELLLSIELPPDEPETDHCGQCRACLDACPTNAFPAPYQLDARRCISYLTIEHAGPIDREFRSALGNRIYGCDDCLAACPWNKFARQSREAAFAPRAELQAPLLAELATLDDPTFRTRFSGTAVKRIG

SEQ ID NO: 80305 - protein, 393 aa, Reyranella sp.
  REGION 1..393: note = tr|A0A5C5SUP8|A0A5C5SUP8_9PROT Epoxyqueuosine reductase OS=Reyranella sp. CPCC 100927 OX=2599616 GN=queG; PE = 3 SV=1
MTRHPAPGLKRRAPSDPRAIREEIRAEAQRLGFDAVGFAAAQAPPEQHDALAAFVHQGWHGDMDWLADDTETRANPARLWPRAGTLIALGMTYTPAHDPLAVLAQRDRAAIAVYAQGRDYHMVVKSRLKALGLWIWNRWGRELKVFVDTAPVMERPAAARAGLGWQGKHTNLVSRTHGSWLFLGEILTTLALPADEPERDHCGTCRACLDICPTGAFPAPGRLDARRCISYLTIEHAGPIPREFRAPIGNRIYGCDDCLAVCPWNKFAQTAREAAFAPRPGTAAPRLTDLAALDDAAFRRLFSGTAIKRSGRDRFVRNVAIALGNSADAQSLPAVRHLLDDTSPLVRGAAVWALMQLSPTAFREERERRRVAESDADVQAEWDAVPGTRKHAS

SEQ ID NO: 80306 - protein, 375 aa, Rheinheimera nanhaiensis
  REGION 1..375: note = tr|I1DUS8|I1DUS8_9GAMM Epoxyqueuosine reductase; OS = Rheinheimera nanhaiensis E407-8 OX=562729 GN=queG PE=3; SV = 1
MNYHELAQQIKQWAKQLGFADAGISGVSLADAERQLQKWLDAGYHGEMDYMASHGMLRARPDELVPGTLRVISVRMDYLPKAAGFATNLADPTQAYISRYALGRDYHKLIRNRLKQLGERINQQVSELGYRPFTDSAPILERPLAQQAGLGWVGKHSLLLNHQAGSWFFLGELLVNLPLPVDQPHDGDCGSCVACITSCPTGAIVEPYVVDARRCISYLTIELKGAIPEEFRPLLGNRIYGCDDCQLVCPENRNAPLSIESDFQRREQWQNQSLLSLFAWQEDEFLRFTEGSAIRRIGYERWQRNIAVALGNAPYQIEIEQALSAKLSSASPLVAEHIAWALAQQKRKGWQAESLLPRSTERLVRIIQKGLPRDA

SEQ ID NO: 80307 - protein, 377 aa, Rheinheimera pacifica
  REGION 1..377: note = tr|A0A1H6JL65|A0A1H6JL65_9GAMM Epoxyqueuosine reductase OS=Rheinheimera pacifica OX=173990 GN=queG PE=3; SV = 1
MTTDYAALALQIKRWAQELGFAQLGITGVSLPDAERQLQKWLDAGYHGEMDYMASHGMLRARPAELVPGTLRVLSVRMNYLPEGAGFATNLADPTQAYISRYALGRDYHKLVRNRLKQLGERINQQVAELGYRPFTDSAPILERPLAQQAGLGWIGKHSLLLNQEAGSWFFLGELLVNLPLPIDTPHEGDCGSCVACITSCPTGAIVEPYVVDARRCISYLTIELKGAIPEEFRPLLGNRIYGCDDCQLVCPENRAAPLSIEGDFQRRPQWQSQSLLSLFAWQEGEFLSHTEGSAIRRIGYERWQRNIAVALGNAPYQADIVQALSAKLDSASELVAEHIHWALAQQKRKSWQAESLLPRSTERLVRIIQKGLPRDA

SEQ ID NO: 80308 - protein, 378 aa, unidentified
  source 1..378: note = Rheinheimera salexigens
  REGION 1..378: note = tr|A0A1E7Q978|A0A1E7Q978_9GAMM Epoxyqueuosine reductase OS=Rheinheimera salexigens OX=1628148 GN=queG; PE = 3 SV=1
MMNIDYPQLALQIKQWAKELGFAELGITDVDLSEAEPHLQRWLDAGYHGEMDYMASHGMMRARPAELHPGTLRVLSVRLNYLPTTAAFATNLADPNLAYISRYALGRDYHKLMRNRLKQLGDKIKQQVTTLGFRPFVDSAPILERPLAQKAGLGWIGKHSLLLNSDHGSWFFLGELLVDIPLPVDPPHQGDCGHCVACITTCPTGAIVAPYIVDARRCISYLTIELKEAIPEEFRPLIGNRIYGCDDCQLVCPENRQAPLSTETDFQRREHWQDQSLLSLFAWPESVFLRNTEGSAIRRIGHQRWQRNIAVALGNAPYSADIIAVLQQQLTDATPLVAEHIQWALQQQKRKGWQQDSLIPRQTARLVRIIEKGLPRDA

SEQ ID NO: 80309 - protein, 383 aa, Rheinheimera sp.
  REGION 1..383: note = tr|A0A3D5BFY8|A0A3D5BFY8_9GAMM Epoxyqueuosine reductase OS=Rheinheimera sp. OX=1869214 GN=queG PE=3 SV=1
MSNSHSFSDADWATLASQIKSWALELGFSQAGICDTDLNSQEPKLQQWLDAGMHGEMQYMAEHGMKRARPAELQPGTIRVISVRLDYLPAGAGFATNLSDPQQAYISRYALGRDYHKLMRQRLKQLGEKIEQHIGAYGYRPFVDSAPVLERPLAAKAGLGWTGKHSLLLNPQAGSWFFLGELLVSLPLPVDEPIQQDCGSCVACITMCPTGAIVSPYVVDARRCISYLTIELKDAIPQELRPLLGNRIYGCDDCQLVCPVNRQAPLGKEEDFQRRPQWRDQSLLSLFLWDEATFLKMTEGSAIRRIGYQRWQRNLAVALGNAPFNEEILALLLAEQQHPDALVREHLQWALAQQQQKQQQQQKENRQQQRLIRIIQLGLPRDA

SEQ ID NO: 80310 - protein, 379 aa, Rheinheimera sp.
  REGION 1..379: note = tr|A0A3S3S852|A0A3S3S852_9GAMM Epoxyqueuosine reductase OS=Rheinheimera sp. YQF-1 OX=2499626 GN=queG; PE = 3 SV=1
MTSTINWLHLAEQIKVWGQQLGFQQIGITDTDLASEEAKLQQWLDDGFHGEMEYMAAHGMKRARPAELHPGTIRVISARMDYLPEHAQFAANLADPSMAYISRYALGRDYHKLIRNRLKQLGERIEKELGALGFRPFVDSAPILERPLAIKAGLGWQGKHSLVLNQDAGSWFFLGELLVDIPLPVDAVHTGDCGACVACITICPTQAIVAPYTVDARRCISYLTIELQGAIPEEFRSLLGNRIYGCDDCQLVCPVNRAADTTQEQDFQRRPQWLNKSLLDLWRWTETEFLKYTEGSAIRRIGYQRWQRNIAVALGNAPFDLAIIEALQQQQPQSDELVSEHIQWALLQQQKKSLLQQNLLSRQTDRLIRAIQKGLPRDA

SEQ ID NO: 80311 - protein, 377 aa, unidentified
  source 1..377: note = Rheinheimera tuosuensis
  REGION 1..377: note = tr|A0A285IXH8|A0A285IXH8_9GAMM Epoxyqueuosine reductase OS=Rheinheimera tuosuensis OX=1323745 GN=queG; PE = 3 SV=1
MAIDYQQLAAQIKQWARQLGFQELGITATDLSTEEPKLKAWLEQGYHGDMQFMAEHGMLRARPAELLPGTLRVLSVRMDYLPAAAGFATNLADPTKAYISRYALGRDYHKLVRSRLKKLAQKISNEIPELGFRPFVDSAPVLERPLAQRAGLGWVGKHSLLLERGVGSWFFLGELLVDIPLPVDEPHQGDCGSCVACITSCPTGAIVAPYVVDGRRCISYLTIELKTAIPEELRPLIGNRIYGCDDCQLVCPENREAPLSIESDFQRRTQWQDQDLLQLFAWDEETFLRLTEGSAIRRIGFERWQRNIAVALGNAPYQSEITDALQQAKAHCSVLVAEHIDWALAQQKRKSWQAANLLPRSTERLIRIIQKGLPRDA

SEQ ID NO: 80312 - protein, 360 aa, unidentified
  source 1..360: note = Rhizobacter gummiphilus
  REGION 1..360: note = tr|A0A1W6LHR8|A0A1W6LHR8_9BURK Epoxyqueuosine reductase OS=Rhizobacter gummiphilus OX=946333 GN=queG; PE = 3 SV=1
MDQVGDPAALVEQLRGWARSLGFSQIGVADVDLSSAEPGLLAWLDHGFHGSMAYMATHGLKRARPAELVPGTVRVITARMDYLPRTRHDGDNDWQAVEWAHLARPENAGVSTYARGRDYHKVLRNRLQKLADRLAEAVGPLGHRVFTDSAPVLEVELASRSGIGWRGKHTLTLHREAGSMFFLGEIYIDLPLPLSEPVTPHCGSCSACIDVCPTRAIVAPYRVDARRCISYLTIEHDGAIPEDLRPLIGNRIYGCDDCQLVCPWNKYAQRSTLPDFDPRAPLLHPTLLQLWAWTEADFLRHTEGGPIRRIGYERWRRNLAVGLGNALRADPSLADVRAALEAARDAASPLVQEHIDWALR

SEQ ID NO: 80313 - protein, 364 aa, Rhizobacter sp.
  REGION 1..364: note = tr|A0A1M7P4I4|A0A1M7P4I4_9BURK Epoxyqueuosine reductase OS=Rhizobacter sp. OV335 OX=1500264 GN=queG PE=3; SV = 1
MTEAQQLDGDGLVAQLREWGLALGFSQIGVADVDLSSAEAGLLAWLRDGFHGEMGYMAAHGLKRARPAELVPGTVRVITARMDYLPKGTTDDWQAVEWDRLASPAQATVSVYARGRDYHKVLRHRLQKLADRLQQEVGPRGHRVFTDSAPVLEVELASRSGIGWRGKHTLTLHREAGSMFFLGEIYVDLPLPLSTPVTGHCGSCSACIDVCPTRAIVAPYRVDARRCISYLTIEHAGPIPVELRPAIGNRIYGCDDCQLACPWNKYAQRSPLPDFDMRDTLAAPTLLGLWAWTEADFLRHTEGSAIRRIGHQRWRRNLAVAIGNALRDAATPAADRAALAAALQASREGADELVREHIDWALSA

SEQ ID NO: 80314 - protein, 370 aa, Rhizobacter sp.
  REGION 1..370: note = tr|A0A3N7HU64|A0A3N7HU64_9BURK Epoxyqueuosine reductase OS=Rhizobacter sp. S-16 OX=2496871 GN=queG PE=3; SV = 1
MTGAQDLNADALLPLLRQWAAALGFSQIGVADVDLASAEPGLMRWLDNGFHGSMDYMATHGLKRARPAELVPGTVRVITARMDYLPSNTPEGWQAIEWQRLADPMQANVSMYARGRDYHKVLRSRLQKLADQLAEEVGPFGFRVFTDSAPVLEVELASRSGIGWRGKHTLTLHREAGSMFFLGEIYVDMPLPLTEPVQAHCGSCTACIDVCPTKAIIAPYRVDARRCIAYLTIEDRGPIPVEMRAAIGNRIYGCDDCQLVCPWNKFAQRATVPDFDAREGLSDAQLLHLWAWSEDDFLRYTEGSPIRRIGHEAWLRNIAVALGNALRATGRGDIADALRSRRESACALVREHIDWALAQAGLGENSGGGS

SEQ ID NO: 80315 - protein, 354 aa, unidentified
  source 1..354: note = Rhizobiaceae bacterium
  REGION 1..354: note = tr|A0A522SK36|A0A522SK36_9RHIZ tRNA epoxyqueuosine(34) reductase QueG OS=Rhizobiaceae bacterium OX=1913961 GN=queG PE=4 SV=1
MTRPDAIKAAPERLKLFVADNFHGTMGWMAETAERRGDPETLWPDVKSVIMLGTNYGPAFDPLAVLAERDRGAISVYAQNRDYHDVVKGRLKQVAGKLAALSGADVKVFVDTAPVMEKPLAAAAGLGWQGKHTNLVSRDFGSWLFLGSIFTTAVLEPDPPETDRCGSCRACLDICPTKAFPEPYRLDARRCISYLTIEHKGPIPHEFREAIGNHIYGCDDCLSVCPWNKFARAASEVKLAQRPELRAPRLDELLELDDAAFRLFFSGSPVKRIGRDRFVRNVLIAVGNSGEGAFVPRCESLLGDSSALVRGASVWALSRLLTPQAFAERALPYRAKETDPDVIAEWDAGMGNKG

SEQ ID NO: 80316 - protein, 394 aa, unidentified
  source 1..394: note = Rhizobiaceae bacterium
  REGION 1..394: note = tr|A0A4U6ATN3|A0A4U6ATN3_9RHIZ Epoxyqueuosine reductase OS=Rhizobiaceae bacterium LC148 OX=1120689; GN = queG PE=3 SV=1
MRTSISDRTRPGEQAPEKEARRREKLTAFIRAEAAAQGFDLCRITHPDSIPQAPGRLRTFLNDGHHGTMEWMAETRERRGDPKVLWPEVRSVVVFGLNYGPDEDPRELLDKPEKAAISVYARNRDYHDVIKGRLKEIATRFAARAGEDVKVFVDTAPVMEKPLAEAAGLGWQGRHTNLVSRTHGSWIFLGSLFTTADLDIDAPEIDHCGSCRACLDACPTAAFPAPYRLDARRCISYLTIEHKGPIDPEFRPLIGNRIYGCDDCLAACPWNKFAASASEMKLKAREDLKEPSIAFLLTLDEAAFRSFFSGSPVKRIGRDRFIRNVLIAAGNSGDRSLIDQCRMLASDPSATVRGMAIWALKQLMTLEEFARFAEMRAGETDAEVQEEWRMAGVA

SEQ ID NO: 80317 - protein, 388 aa, unidentified
  source 1..388: note = Rhizobiales bacterium
  REGION 1..388: note = tr|A0A2N6BM31|A0A2N6BM31_9RHIZ Epoxyqueuosine reductase OS=Rhizobiales bacterium OX=1909294 GN=queG PE=3; SV = 1
MDGSLRANIINWAREAGFERVGITRPDRIEAAGRQLARFLEAGHHGQMSWMAERQDWRADPRALWPACRSVVVLGLNYGPDHNPLDDLAKTGTGLVSVYARRKDYHVIVKKKLKQVAGKIARASGGEVKVFVDTAPVLEKPLAMAAGIGWQGKHSSLVSRDYGNWLFLGEIFTEAEIDPDEAESDHCGRCRQCLDICPTNAFPAPYQLDARRCISYLTIEHRGHIAPDLRAAMGNRVFGCDDCLAICPWNKFAQNARTATLALRPELAELPLARLAALDETAFRELFAGTPVKRTGREGFVRNVLIAIGNSADAALAPAAMARLEDASPVVRAAAVWALGRLMRPQEMKALAERHRMREKDRQVADEWSAATARPPETATACSGEKRD

SEQ ID NO: 80318 - protein, 372 aa, unidentified
  source 1..372: note = Rhizobiales bacterium
  REGION 1..372: note = tr|A0A3R7Q6C7|A0A3R7Q6C7_9RHIZ Epoxyqueuosine reductase OS=Rhizobiales bacterium TMED94 OX=1986858; GN = queG PE=3 SV=1
  VARIANT 316: note = Xaa can be any naturally occurring amino acid
  VARIANT 323: note = Xaa can be any naturally occurring amino acid
  VARIANT 327..328: note = Xaa can be any naturally occurring amino acid
  VARIANT 333: note = Xaa can be any naturally occurring amino acid
  VARIANT 357: note = Xaa can be any naturally occurring amino acid
MHSLISKSTIQKKSKEFGFDIIKITDPKIHKKDQHYIKDFLENDFHGDMDWLKKNLERRVSPKKLWPDVKSIIVLGVNYGPNHDPMKNLENEEIGNISVYARGNDYHDVIKKNLKKFGRWIVNQTNSEIKVFIDTAPIMEKTIAQKAGLGWQGKHTNLVSRDYGSWLFLASIFTNLELESDKEGINHCGNCNNCIEICPTDAFTEPYKLDARKCISYLTIEHKGIIPSHLRSKIGNRIYGCDDCLAVCPWNKFAKESNEIKFKQKNQTELYDLKKLSLLNDNNFRKMFSKSPIKRIGRNRFLRNVLIAIGNAKLKXAKYHINXNIFXXSPIVXGAAIWALNQITEGEELDKIKKLSXSKEKDPDVIKEWIEL

SEQ ID NO: 80319 - protein, 383 aa, unidentified
  source 1..383: note = Rhizobium acidisoli
  REGION 1..383: note = tr|A0A0N0LF84|A0A0N0LF84_9RHIZ Epoxyqueuosine reductase OS=Rhizobium acidisoli OX=1538158 GN=AOG23_05705; PE = 4 SV=1
MPEADDKERRRRDNLTNFVRAESAAKGFDLCRITRPDAIPEAKERLGQFIDAGRHGTMEWMAETRERRGDPRTLWSEVRSVVVFGLNYAPEEDPRGILAKPDKAAISVYARNRDYHDIIKGRLKEIATRFAARAGADVKVFVDTAPVMEKPLAAAAGLGWQGKHTNLVSRTHGSWLFLGSMFTTADLAVDAEEADHCGSCRACLDICPTAAFPAPYQIDARRCISYLTIEHKGPIDPELRPLIGNRIYGCDDCLAACPWNKFASAASEMKLKARDDLQEPSITFLLTLDDPTFRAFFSGSPVKRIGRDRFIRNVLIAAGNSGEKALIGQCRMLADDASPVVRGMAVWALSRLMAAGEFSAFAAQRAGESDDDVLNEWRLAGVG

SEQ ID NO: 80320 - protein, 385 aa, unidentified
  source 1..385: note = Rhizobium aethiopicum
  REGION 1..385: note = tr|A0A1C3Y0C4|A0A1C3Y0C4_9RHIZ Epoxyqueuosine reductase OS=Rhizobium aethiopicum OX=1138170 GN=queG PE=3; SV = 1
MPEAYRDDKERRRRDNLTDFVRAESAAKGFDLCRITRPDSIPDAKQRLGEFIDAGRHGTMEWMAETRERRGDPRTLWSEVRSVVVFGLNYAPEEDPRGILAKPDKAAISVYARNRDYHDIIKGRLKEIATRFAARAGADVKVFVDTAPVMEKPLAAAAGLGWQGKHTNLVSRTHGSWLFLGTMFTTADLAIDAPETDHCGSCRACLDACPTAAFPAPYQIDARRCISYLTIEHKGPIDPDLRMLIGNRIYGCDDCLAACPWNKFASAASEMKLQAREDLQEPSIAFLLTLDDPAFRAFFSGSPVKRIGRDRFIRNVLIAAGNSGEKALIPQCRMLAGDVSPVVRGMAIWALSRLMEAGEFSVFAAQRADESDDDVLNEWRLAGVG

SEQ ID NO: 80321 - protein, 388 aa, unidentified
  source 1..388: note = Rhizobium album
  REGION 1..388: note = tr|A0A2U2DS64|A0A2U2DS64_9RHIZ tRNA epoxyqueuosine(34) reductase QueG OS=Rhizobium album; OX = 2182425 GN=queG PE=4 SV=1
MPHAGTEEKRERRRESLTAFLRAEALAQGFDLCRITGPGSIPQAPARLAEFIDAGRHGTMDWMPETQARRADPSVLWSEVRSIAVFGLNYGPDEDPRGILDKPDKAAISVYARNRDYHDVIKGRLKEIATRFAARAKEDVKVFVDTAPVMEKPLAAAAGLGWQGKHTNLVNRTHGSWLFLGSLFTTADLVQDEPERDHCGSCRACLDACPTDAFPAPYKIDARRCISYLTIEHKGDIDPSLRVRMGNRIYGCDDCLAACPWNKFAQAASEMKFRAREDLKEPSIAFLLTLDDPTFRSFFSGSPVKRIGRHRFVRNVLIAAGNSGDRSLIGPCRECLADEMPVVRAMAVWALSRLMTPQEFGGLAEWREKEQDSAVLAEWQRAGAALCI

SEQ ID NO: 80322 - protein, 382 aa, unidentified
  source 1..382: note = Rhizobium altiplani
  REGION 1..382: note = tr|A0A125Q799|A0A125Q799_9RHIZ Epoxyqueuosine reductase OS=Rhizobium altiplani OX=1864509 GN=queG PE=3; SV = 1
MAMENKDQKRRDTLTAFVRSEAKALGFDLCRITRPDAIPEAKERLGEFIDAGRHGTMEWMAETRDRRGDPRTLWSDVRSIVVFGLNYGPDEDPREILTKPDKAAISVYARNRDYHDIIKGRLKEIATRFAARAGADVKVFVDTAPVMEKPLAAAAGLGWQGKHTNLVSREHGSWLFLGSMFTTADLNIDAPEIDHCGSCRACLDICPTKAFPGPYQIDARRCISYLTIEHKGPIDPALRSLIGNRIYGCDDCLAACPWNKFAHEASEMKLQAREDLKEPSIEYLLGLDDAAFRTFFSGSPVKRIGRDRFIRNVLIAAGNSNDRRFVEQCRKLSEDPSPVVRGMAIWALSRLLEAGEFSAFAAQRPDESDSDVLSEWRLAGAV

SEQ ID NO: 80323 - protein, 385 aa, unidentified
  source 1..385: note = Rhizobium anhuiense
  REGION 1..385: note = tr|A0A432NB82|A0A432NB82_9RHIZ tRNA epoxyqueuosine(34) reductase QueG OS=Rhizobium anhuiense; OX = 1184720 GN=queG PE=4 SV=1
MPEPKNDDKERRRRDNLTEFVRAESAAKGFDLCRITRPDAIPEAKERLGQFIDAGRHGTMDWMAETRDRRGDPRTLWSEVRSVVVFGLNYAPEEDPRGILDKSDKAAISVYARNRDYHDVIKGRLKEIATRFAARAGADVKVFVDTAPVMEKPLAAAAGLGWQGKHTNLVSRTHGSWLFLGTMFTTADLAVDAAENDHCGSCRACLDICPTAAFPAPYQIDARRCISYLTIEHKGPIDADLRVLIGNRIYGCDDCLAACPWNKFASSASEMKLQAREELKEPSIAFLLTLDDAAFRTFFSGSPVKRIGRDRFVRNVLIAAGNSGETALIGQCRMLASDPSPVVRGMAVWALSRLMEAGEFSAFAAQRAHERDDDVLNEWRLAGVG

SEQ ID NO: 80324 - protein, 385 aa, unidentified
  source 1..385: note = Rhizobium azibense
  REGION 1..385: note = tr|A0A4R8ARY6|A0A4R8ARY6_9RHIZ Epoxyqueuosine reductase OS=Rhizobium azibense OX=1136135 GN=EV128_101719; PE = 4 SV=1
MPERIADDKERKRRDNLTAFVRAQAATFGFELCRITRPDSIPEAKERLGEFIDAGRHGTMEWMAETRDRRGDPRTLWSDVKSIVVFGLNYGPGEDPRYILEKPDKAAISVYARNRDYHDVIKGRLKEIATRFAARAGADVKVFVDTAPVMEKPLAAAAGLGWQGKHTNLVSRSHGSWLFLGSMFTTADLNIDDAEIDHCGSCRACLDSCPTNAFPAPYQIDARRCISYLTIEHKGPIDLEFRPLIGNRIYGCDDCLAACPWNKFAVSASEMKLQARDDLKEPSIAFLLTLDDAAFRIFFSGSPVKRIGRARFIRNVLIAAGNSGDRSLADQCRWLATDASPVVRGMAIWALSRLMEPGEFAVFAAQRPDETDVGVLAEWQLAGVV

SEQ ID NO: 80325 - protein, 385 aa, unidentified
  source 1..385: note = Rhizobium azibense
  REGION 1..385: note = tr|A0A4R3RV15|A0A4R3RV15_9RHIZ Epoxyqueuosine reductase OS=Rhizobium azibense OX=1136135 GN=queG PE=3; SV = 1
MPERIADDKERKRRDSLTAFVRAEAAKLGFELCRITRPDSIPEAKERLGEFIDAGRHGTMEWMAETRDRRGDPRTLWSDVKSIVVFGLNYGPGEDPRHILETPDKAAISVYARNRDYHDVIKGRLKEIATRFAARAGADVKVFVDTAPVMEKPLAAAAGLGWQGKHTNLVSRSHGSWLFLGSMFTTADLNIDDAEIDHCGSCRACLDACPTNAFPAPYQIDARRCISYLTIEHKGPIDVEFRPLIGNRIYGCDDCLAACPWNKFAASASEMKLRARDDLKEPSISFLLTLDEAAFRTFFSGSPVKRIGRDRFIRNVLIAAGNSGDQSLADQCRRLATDASADVRGMAIWALSRLMEPGEFGDFAAQRPDETDAGVLAEWQLAGVM

SEQ ID NO: 80326 - protein, 385 aa, unidentified
  source 1..385: note = Rhizobium esperanzae
  REGION 1..385: note = tr|A0A246E467|A0A246E467_9RHIZ Epoxyqueuosine reductase OS=Rhizobium esperanzae OX=1967781 GN=queG PE=3; SV = 1
MPEAYRDDKERRRRDNLTEFVRTESAAKGFDLCRITRPDAIPEAKQRLGQFIDAGRHGTMEWMAETRERRGDPLTLWSEVRSVVVFGLNYAPEEDPRGILDKPDKAAISVYARNRDYHDIIKGRLKEIATRFAARAGADVKVFVDTAPVMEKPLAAAAGLGWQGKHTNLVSRTHGSWLFLGSMFTTADLAVDAPETDHCGSCRACLDVCPTAAFPAPYQIDARRCISYLTIEHKGPIDPDLRPLIGNRIYGCDDCLAACPWNKFAVSASEMKLKAREDLQEPSLTFLLTLDDAAFRAFFSGSPVKRIGRDRFIRNVLIAAGNSGETALIAQCRELAGDAAPAVRGMAVWALSRLMEAGEFSAFAAQRTDESDDDVLHEWRLAGVG

SEQ ID NO: 80327 - protein, 386 aa, Rhizobium etli
  REGION 1..386: note = tr|A0A327XRV6|A0A327XRV6_RHIET Epoxyqueuosine reductase OS=Rhizobium etli OX=29449 GN=queG PE=3 SV=1
MPERSALTKEDKRLQTLTAFVKAEAQALGFDLCRITRPDSIPEAKERLGQFIDAGRHGTMEWMAETRERRGDPRTLWSDVKSVVVFAMNYGPEEDPRGILEKPDKAAISVYARNRDYHDIIKGRLKEIATRFAARAGEDVKVFVDTAPVMEKPLAAAAGLGWQGKHTNLVSRAHGSWLFLGSMFTTADLLIDAPEIDHCGSCRACLDACPTAAFPDPYQIDARRCISYLTIEHKGPIDPAIRPLIGNRIYGCDDCLAACPWNKFASAASEIKLKAREDLQEPDISALLALDDPSFRSFFSGSPVKRIGRDRFVRNVLIAAGNSGDRQFLDACLSLSADASPVVRAMAIWALSRLMEAGEFQRFAAQRPQDESDSDVLNEWRLAGAA

SEQ ID NO: 80328 - protein, 383 aa, Rhizobium etli
  REGION 1..383: note = tr|A0A0A8G7C8|A0A0A8G7C8_RHIET Epoxyqueuosine reductase OS=Rhizobium etli bv. phaseoli str. IE4803; OX = 1432049 GN=queG PE=3 SV=1
MPEIDDKERRRRDNLTEFVRAESAAKGFDLCRITRPDAIREAKERLGQFIDAGRHGTMEWMAETRDRRGDPLTLWSEVRSVVVFGLNYAPEEDPRGILGKPDKAAISVYARNRDYHDIIKGRLKEIATRFAARAGADVKVFVDTAPVMEKPLAAAAGLGWQGKHTNLVSRTHGSWLFLGSMFTTADLTVDAPETDHCGSCRACLDICPTAAFPAPYQIDARRCISYLTIEHKGPIDPDLRPLIGNRIYGCDDCLAACPWNKFAVSAFEMKLKAREDLKEPSLAFLLTLDDAAFRAFFSGSPVKRIGRDRFIRNVLIAAGNSGETALIAQCRELAGDAAPAVRGMAIWALSRLMEAGEFSIFAAQRTDENDDDVLNEWRLAGVD

SEQ ID NO: 80329 - protein, 382 aa, unidentified
  source 1..382: note = Rhizobium favelukesii
  REGION 1..382: note = tr|W6RP28|W6RP28_9RHIZ Epoxyqueuosine reductase; OS = Rhizobium favelukesii OX=348824 GN=queG PE=3 SV=1
MATENKEQRRRDTLTAFVRAEAKALGFDLCRVTRPDAIPEAKERLGEFIDAGRHGTMEWMAQTRDRRGDPRTLWNDVRSIVVFGLNYGPEDDPREILAKSDKAAISVYARNRDYHDVIKGRLKEIATRFVARAGADVKVFVDTAPVMEKPLAAAAGLGWQGKHTNLVSREHGSWLFLGSMFTTADLNTDAPEIDHCGSCRACLDICPTNAFPGPYQIDARRCISYLTIEHKGPIDPALRPLIGNRIYGCDDCLAACPWNKFAHEASEMKLQAREDLKEPSIEDLLSLDDASFRAFFSGSPVKRIGRDRFIRNVLIAAGNSGDRRFVDRCRALSRDASPVVRGMAVWALSRLLEAGEFSAFAAQKPDESDSDVLDEWRLAGAV

SEQ ID NO: 80330 - protein, 390 aa, unidentified
  source 1..390: note = Rhizobium fredii
  REGION 1..390: note = tr|A0A2A6M128|A0A2A6M128_RHIFR Epoxyqueuosine reductase OS=Rhizobium fredii OX=380 GN=queG PE=3 SV=1
MPGDAPKAENQGRKRRTLTAFLKEEAAAKGFDLCRITRPDAIPEAPDRLRQFLAAGCHGTMEWLAETAERRAEPRVLWSDVRSIVLFGMNYGPDSDPLAILAKRDRGAISVYAQNRDYHDVVKGRLKEIATRFAARAGEDVKVFVDTAPVMEKPLAEKAGIGWQGKHTNLVSREFGSWLFLGSLFTTADLDLDAPERDNCGSCRACLDACPTGAFPVPYRIDARRCISYLTIEHKGPIDPELRPLIGNRIYGCDDCLAVCPWNKFARSASEMKLKARDDLQEPELAALLTLDDVAFRSLFSGSPVKRIGRDRFVRNVLIAAGNSGQKDLIPACKALARDGSPTVRGMAVWALSRLMPAGDLAAFAAECGQETDDEVLSEWEMAGVSRCMS

SEQ ID NO: 80331 - protein, 390 aa, unidentified
  source 1..390: note = Rhizobium fredii
  REGION 1..390: note = tr|G9A678|G9A678_RHIFH Epoxyqueuosine reductase; OS = Rhizobium fredii (strain HH103) OX=1117943 GN=queG PE=3; SV = 1
MPGDAIKAENQGRKRRTLTAFLKEEAAAKGFDLCRITRPDAIPEAPDRLAQFLAAGCHGTMEWLAETAERRADPRVLWSDVRSIVLFGMNYGPDSDPLAILARRDRGAISVYAQNRDYHDVVKGRLKEIATRFAARAGEDVKVFVDTAPVMEKPLAEKAGIGWLGKHTNLVSREFGSWLFLGSLFTTADLDLDAPERDNCGSCRACLDACPTGAFPAPYRIDARRCISYLTIEHKGPIDLELRPLIGNRIYGCDDCLAVCPWNKFARSASEMKLKAREDLQEPELAALLTLDDAAFRSLFSGSPVKRIGRDRFVRNVLIAAGNSGQKDLIPACKALARDGSPTVRGMAVWALSRLMPAGDLAAFAAECGQETDDEVLSEWEMAGVSRCMS

SEQ ID NO: 80332 - protein, 385 aa, unidentified
  source 1..385: note = Rhizobium freirei
  REGION 1..385: note = tr|N6UGW2|N6UGW2_9RHIZ Epoxyqueuosine reductase; OS = Rhizobium freirei PRF 81 OX=363754 GN=queG PE=3 SV=1
MPEDRETERANKRRSALTAFLREEARAQGFDLCRITRPDAIPEAAVRLGQFLDKGHHGTMGWMEETRDRRADPRVLWSETRSIAVFGLNYGPDEDPRGILDKRDKAAISVYAQNRDYHDIIKGRLKEIATRFAARSKEDVKVFVDTAPVMEKPLAGAAGLGWQGKHTNLVSRAFGSWLFLGSMFTTADLEPDQPEVDHCGSCRACLDICPTSAFPAPYQLDARRCISYLTIEHKGPIDPELRPMIGNRIYGCDDCLAVCPWNKFASAASEMKLVARDDLKEPSIAFLLDLDDPTFRTFFSGSPVKRIGRDRFIRNVLIAAGNSRERSLTEKCRELAEDPSPVVRGMAVWALSQLMTAGEFRAFAAQRHGEADEEVRAEWKLAGVL

SEQ ID NO: 80333 - protein, 391 aa, Rhizobium galegae
  REGION 1..391: note = tr|A0A5J5KJA4|A0A5J5KJA4_RHIGA tRNA epoxyqueuosine(34) reductase QueG OS=Rhizobium galegae; OX = 399 GN=queG PE=4 SV=1
MRTLISDATSREEEKTLRRREKLTVFIREEAAAQGFDLCRITGPDSIPQAPERLEIFLADGHHGSMDWLSETRLRRADPKVLWDQVRSIVMFGLNYGPDEDPRGVLDKHDKAAISVYARNRDYHDVIKGRLKEIATRFAARAGEDVKVFVDTAPVMEKPLAEAAGLGWQGKHTNLVSRTHGSWLFLGSLFTTADLLVDEAETDHCGSCRACLDACPTSAFPAPYRLDARRCISYLTIEHKGPIDPEFRPLIGNRIYGCDDCLAACPWNKFAASASEMKLQAREDLKEPSIAFLLTLDDATFRSFFSGSPVKRIGRDRFIRNVLIAAGNSGDAMLIGQCLELAGDLSPAVRGMAIWALKRLMTDIDFARFAGARGVEDDPDVREEWRLAGAA

SEQ ID NO: 80334 - protein, 385 aa, Rhizobium gallicum
  REGION 1..385: note = tr|A0A1L5NDP8|A0A1L5NDP8_9RHIZ Epoxyqueuosine reductase OS=Rhizobium gallicum OX=56730 GN=queG PE=3 SV=1
MPERIADDRERKRRDNLTAFVRAEAATLGFELCRITRPDSIPEAKERLGEFIDAGRHGTMEWMAETRDRRGDPRALWSDVKSIVVFGLNYGPGEDPRSILEKPDKAAISVYARNRDYHDVIKGRLKEIATRFAARAGADVKVFVDTAPVMEKPLAAAAGLGWQGKHTNLVSRSHGSWLFLGSMFTTADLNIDDAEIDHCGSCRACLDACPTNAFPAPYQIDARRCISYLTIEHKGPIDFEFRPLIGNRIYGCDDCLAACPWNKFAVSASEMKLQARDDLKEPSIAFLLTLDDAAFRIFFSGSPVKRIGRARFIRNVLIAAGNSGDHSLADQCRWLATDASPVVRGMAIWALSRLMEPGEFAVFAAQRPDETDAGVLAEWQLAGVV

SEQ ID NO: 80335 - protein, 385 aa, Rhizobium gallicum; identical to SEQ ID NO: 80324
  REGION 1..385: note = tr|A0A0B4WYP6|A0A0B4WYP6_9RHIZ 4Fe-4S cluster binding protein OS=Rhizobium gallicum bv. gallicum R602; OX = 1418105 GN=RGR602_CH00324 PE=4 SV=1

SEQ ID NO: 80336 - protein, 382 aa, unidentified
  source 1..382: note = Rhizobium grahamii
  REGION 1..382: note = tr|A0A370KVP1|A0A370KVP1_9RHIZ Epoxyqueuosine reductase OS=Rhizobium grahamii OX=1120045 GN=queG PE=3; SV = 1
MATENKEQKRRDTLTAFVRSEAKALGFDLCRITRADAIPEAKERLGEFIDAGRHGTMEWMAETRDRRGDPRNLWSDVRSIVVFGLNYGPDEDPRDILAKPDKAAISVYARNRDYHDVIKGRLKEIATRFAARAGADVKVFVDTAPVMEKPLAAAAGLGWQGKHTNLVSRELGSWLFLGSMFTTADLNTDAAEVDHCGSCRACLDICPTNAFPAPYQIDARRCISYLTIEHKGPIDPVLRPLIGNRIYGCDDCLAVCPWNKFAHEASEMKLQPREDLKEPTIEFLLSLDDAAFRAFFSDSPVKRIGRDRFIRNVLIAAGNSGDRRFVERCRALSQDPSPVVRGMAVWALSRLFEAGEFAAFAAQRPDESDSDVRDEWRLAGAV

SEQ ID NO: 80337 - protein, 382 aa, unidentified
  source 1..382: note = Rhizobium grahamii
  REGION 1..382: note = tr|S3I458|S3I458_9RHIZ Epoxyqueuosine reductase; OS = Rhizobium grahamii CCGE 502 OX=990285 GN=queG PE=3 SV=1
MATENKEQKRRDTLTAFVRSEAKALGFDLCRITRPDAIPEAKERLGEFIDAGRHGTMDWMAETRDRRGDPRTLWSDVRSIVVFGLNYGPDEDPRDILAKPDKAAISVYARNRDYHDVIKGRLKEIATRFAARAGADVKVFVDTAPVMEKPLAAAAGLGWQGKHTNLVSRELGSWLFLGSMFTTADLNIDAAEVDHCGSCRACLDICPTNAFPAPYQIDARRCISYLTIEHKGPIDPGLRPLIGNRIYGCDDCLAVCPWNKFAHEASEMKLQPREDLKEPTIEFLLSLDDAAFRVFFSGSPVKRIGRDRFIRNVLIAAGNSGDRRFVERCRALSQDPSPVVRGMAVWALSRLFEAGEFAAFAAQRPDESDSDVRDEWRLAGAV

SEQ ID NO: 80338 - protein, 385 aa, Rhizobium hainanense
  REGION 1..385: note = tr|A0A1C3WDM3|A0A1C3WDM3_9RHIZ Epoxyqueuosine reductase OS=Rhizobium hainanense OX=52131; GN = GA0061100_11624 PE=4 SV=1
MPDDREAEKTDKRRKALTAFLREEALAQGFDLCRITRPDAIPEAAVRLGEFLDKGRHGTMGWMAETRDRRGDPRVLWGETRSIAVFGLNYGPDEDPRGILEKKDKAAISVYARNRDYHDIIKGRLKEIATRFAARSKEDVKVFVDTAPVMEKPLAGAAGLGWQGKHTNLVSRDFGSWLFLGSMFTTADLEPDEPEIDHCGSCRACLDVCPTAAFPAPYQLDARRCISYLTIEHKGPIDPELRPLIGNRIYGCDDCLAACPWNKFASAASEMKLVARDDLKGPSIAFLLDLDDAAFRAFFSGSPVKRIGRDRFIRNVLIAAGNSGQRSLIGRCCELTGDPSPVVRGMAIWTLSRLMTAGEFNAFAAQRGDEADEEVRTEWALAGVL

SEQ ID NO: 80339 - protein, 385 aa, unidentified
  source 1..385: note = Rhizobium hidalgonense
  REGION 1..385: note = tr|A0A2A6KHD6|A0A2A6KHD6_9RHIZ tRNA epoxyqueuosine(34) reductase QueG OS=Rhizobium hidalgonense OX=1538159 GN=queG PE=4 SV=1
MPEADRDDKERRRRDNLTEFVRAESAAKGFDLCRITRPDAIPEAKQRLGEFIDAGRHGTMEWMAETRDRRGDPRTLWSEVKSVVVFGLNYAPEEDPRGILDKSDKAAISVYARNRDYHDVIKGRLKEIATRFAARAGADVKVFVDTAPVMEKPLAAAAGLGWQGKHTNLVSRTHGSWLFLGTMFTTADLAVDAEETDHCGSCRACLDACPTAAFPAPYQIDARRCISYLTIEHKGPIDPELRPLIGNRIYGCDDCLAACPWNKFASSASEMKLQAREELKEPSIAFLLTLDDAAFRAFFSGSPVKRIGRDRFVRNLLIAAGNSGEKALIAQCRMLAGDTSPVVRGMAVWALSRLMAAGEFSLFAAQRAGESDGDVLNEWRLAGVV

SEQ ID NO: 80340 - protein, 384 aa, unidentified
  source 1..384: note = Rhizobium ipomoeae
  REGION 1..384: note = tr|A0A4S8P1T1|A0A4S8P1T1_9RHIZ tRNA epoxyqueuosine(34) reductase QueG OS=Rhizobium ipomoeae; OX = 1210932 GN=queG PE=4 SV=1
MREPQSDPKIRKRREELTRFLRQEAAAQGFDLCRVTLPDSIPQAPERLQHFLDAERHGTMAWMEETKERRADPRVLWSDVRSVVMFGMNYGPDDDPRLLQEQPDKAAISVYARNRDYHDVIKGRLKEIATRFAARAGEDVKVFVDTAPVMEKPLAAAAGLGWQGKHTNLVSREYGSWLFLGSLFTTAELDIDTGEVDHCGSCRACLAACPTDAFPAPYQIDARRCISYLTIEHKGTIHPDLRPAFGNRIYGCDDCLAACPWNKFAEEAREMKLQARDDLKAPDIASLLTLDDAAFRSLFSGSPVKRIGRNRFVRNVLIAAGNSGLPHLIPLCSSLLDDASPDVRGMAVWALSRLMPAADFDALRQTRQAGETDDEVQSEWMRER

SEQ ID NO: 80341 - protein, 385 aa, unidentified
  source 1..385: note = Rhizobium jaguaris
  REGION 1..385: note = tr|A0A387FF19|A0A387FF19_9RHIZ tRNA epoxyqueuosine(34) reductase QueG OS=Rhizobium jaguaris; OX = 1312183 GN=queG PE=4 SV=1
MPENRAAEKEGKRRHTLTAFLRDEARAQGFDLCRITRPDAIPEAGIRLDQFLERGFHGTMAWMEETRERRGNPHVLWNDVRSIAVFGLNYGPEEDPRGILEKPDKGAISVYARNRDYHDVIKGRLKEIATRFAARSQEDVKVFVDTAPVMEKPLAAAAGLGWQGKHTNLVSRTHGSWLFLGSMFTTADLDPDEAEIDRCGSCRACLDACPTAAFPAPYQLDARRCISYLTIEHKGPIDPWLRPLIGNRIYGCDDCLAACPWNKFASAASEMKLAARNDLKEPSISFLLTLDDAAFRTFFSGSPVKRIGRDRFVRNVLIAAGNSGERGLIATCRTLAGDPSPAVRGMAVWALSRLMTAGEFRSFAAERGDEPDADVRAEWTMAGVA

SEQ ID NO: 80342 - protein, 385 aa, unidentified
  source 1..385: note = Rhizobium laguerreae
  REGION 1..385: note = tr|A0A1S9GXA9|A0A1S9GXA9_9RHIZ tRNA epoxyqueuosine(34) reductase QueG OS=Rhizobium laguerreae; OX = 1076926 GN=BS630_10090 PE=4 SV=1
MPEADNDDKERRRRDNLTEFVRAESAAKGFDLCRITRPDAITEAKERLGQFIDAGRHGTMDWMAETRDRRGDPRTLWSEVRSVVVFGLNYAPDEDPRGILDKPDKAAISVYARNRDYHDVIKGRLKEIATRFAARAGADVKVFVDTAPVMEKPLAEAAGLGWQGKHTNLVSRVHGSWLFLGTMFTTADLVIDEAETDHCGSCRACLDICPTAAFPAPYQIDARRCISYLTIEHKGPIDADLRGLIGNRIYGCDDCLAACPWNKFASSASEMKLKAREDLKEPSIAFLLTLDDAAFRAFFSGSPVKRIGRDRFIRNVLIAAGNSGDKVLVGPCRLLSDDPSPVVRGMAVWALSRLMEAGEFAAFAARRTDERDDDVLNEWRLAGVG

SEQ ID NO: 80343 - protein, 385 aa, unidentified
  source 1..385: note = Rhizobium laguerreae
  REGION 1..385: note = tr|A0A4R3QXE0|A0A4R3QXE0_9RHIZ Epoxyqueuosine reductase OS=Rhizobium laguerreae OX=1076926; GN = EV131_104204 PE=4 SV=1
MPEPDNDDKDRRRRDNLTEFVRAESAAKGFDLCRITRPDAIPEAKERLGQFIDAGRHGTMDWMAETRDRRGDPRTLWSEVRSVVVFGVNYAPDEDPRSILDKPDKAAISVYARNRDYHDVIKGRLKEIATRFAARAGADVKVFVDTAPVMEKPLAAAAGLGWQGKHTNLVSRVHGSWLFLGTMFTTADLAVDAPESDHCGSCRACLDICPTAAFPAPYQIDARRCISYLTIEHKGPIDADLRGLIGNRIYGCDDCLAACPWNKFASSASEMKLKAREDLKEPSIAFLLTLDDAAFRAFFSGSPVKRIGRDRFVRNVLIAAGNSGDKALIGQCRGLSEDPSPVVRGMAVWALSRLMEAGEFAAFAAQRADERDDDVLNEWRLAGVG

SEQ ID NO: 80344 - protein, 385 aa, Rhizobium leguminosarum
  REGION 1..385: note = tr|A0A4V1P2M3|A0A4V1P2M3_RHILE tRNA epoxyqueuosine(34) reductase QueG OS=Rhizobium leguminosarum OX=384 GN=B5P46_04185 PE=4 SV=1
MPEPKNDDKERRRRDNLTEFVRAESAAKGFDLCRITRPDTIPQAKERLGQFIDAGRHGTMDWMAETRDRRGDPRTLWSAVRSVVVFGLNYAPEEDPRGILDKPDKAAISVYARNRDYHDVIKGRLKEIATRFAVRAGADVKVFVDTAPVMEKPLAEAAGLGWQGKHTNLVSRVHGSWLFLGTMFTTADLAVDAPESDHCGSCRACLDICPTAAFPAPYQIDARRCISYLTIEHKGPIDADLRVLIGNRIYGCDDCLAACPWNKFASSASEMKLKAREDLKEPSIAFLLTLDDAAFRAFFSGSPVKRIGRDRFVRNVLIAAGNSGDKVLIGPCRLLSEDPSPVVRGMAVWALSRLMEAGEFSAFAAQRADERDDDVLNEWRLAGVG

SEQ ID NO: 80345 - protein, 385 aa, Rhizobium leguminosarum
  REGION 1..385: note = tr|J0JX01|J0JX01_RHIL1 Epoxyqueuosine reductase; OS = Rhizobium leguminosarum bv. viciae (strain WSM1455); OX = 755176 GN=queG PE=3 SV=1
MPEPDYDDKERRRRDNLTEFVRAESAAKGFDLCRITRPDAIPQAKERLDEFIDAGRHGTMDWMAETRDRRGHPRTLWSEVRSVVVFGLNYAPEEDPRGILDKPDKAAISVYARNRDYHDVIKGRLKEIATRFAARAGADVKVFVDTAPVMEKPLAAAAGLGWQGKHTNLVSRAHGSWLFLGTMFTTADLAVDAPETDHCGSCRACLDICPTAAFPAPYQIDARRCISYLTIEHKGPIDADLRGLIGNRIYGCDDCLAACPWNKFASSASEMKLQAREDLKEPSIAFLLTLDDAAFRAFFSGSPVKRIGRDRFVRNVLIAAGNSGDKALIGPCRGLSEDPSPVVRGMAVWALWRLMEAGEFAAFAAQMADERDDDVLNEWRLAGVG

SEQ ID NO: 80346 - protein, 385 aa, Rhizobium loessense
  REGION 1..385: note = tr|A0A1G4Q0H8|A0A1G4Q0H8_9RHIZ Epoxyqueuosine reductase OS=Rhizobium loessense OX=158890; GN = SAMN02927900_01192 PE=4 SV=1
MPERIADDKERKRRDNLTAFVRAEAATLGFELCRITRPDSIPEAKERLGEFIDAGRHGTMEWMAETRDRRGDPRTLWSDVKSIVVFGLNYGPGEDPRHILEKPDKAAISVYARNRDYHDVIKGRLKEIATRFAARAGADVKVFVDTAPVMEKPLAAAAGLGWQGKHTNLVSRSHGSWLFLGSMFTTADLNTDDAEIDHCGSCRACLDACPTNAFPAPYQIDARRCISYLTIEHKGPIDFEFRPLIGNRIYGCDDCLAACPWNKFAVSASEMKLQSRDDLKEPSIAFLLTLDDAAFRSFFSGSPVKRIGRARFIRNVLIAAGNSGDHSLVDQCRWLATDASPVVRGMAIWALSRLMEPGEFAVFAAQRPDEIDAGVLAEWQLAGVV

SEQ ID NO: 80347 - protein, 384 aa, unidentified
  source 1..384: note = Rhizobium loti
  REGION 1..384: note = tr|A0A101KNZ1|A0A101KNZ1_RHILI Epoxyqueuosine reductase OS=Rhizobium loti OX=381 GN=queG PE=3 SV=1
MRTSISDKTRLRALIDAEARRAGFEAVAVTRPDAIPRAPARLAEFVADGFHGSMDWIAETIERRAEPSTLWPEVRSIIVLAMNYGPDRDPREILQKRDRGAISVYAQNRDYHDVMKGRLKEIAGKIVARAGGDVKVFVDTAPVMEKPLAEAAGLGWQGKHTNLVSREHGSWLFLGTIFTTAELEPDAPEVDHCGSCRACLDVCPTDAFPAPYRLDARRCISYLTIENMGPIPREFREKIGNRIYGCDDCLAACPWNKFASIASEAKLAARNDLREPSLSELLLLDDAAFRSFFSGSPIKRIGRDRFVRNVLVAAGNSDDTSLTPVVRGLLDDGSPLVRGAAVWALSRLMASSDFAKLAASAMKTESDAAVRDEWLSTLPDAEGS

SEQ ID NO: 80348 - protein, 387 aa, unidentified
  source 1..387: note = Rhizobium loti
  REGION 1..387: note = tr|A0A2T3F242|A0A2T3F242_RHILI Epoxyqueuosine reductase OS=Rhizobium loti OX=381 GN=queG PE=3 SV=1
MPGDAAKADNQGRKRRTLTAFLKEEAAAKGFDICRITHPDAIPQAPERLRQFLAAGAHGTMDWLAETAERRSDPRVLWSEVRSIVLFGMNYAPEDDPREVLARRDRGAISVYARNRDYHDVVKGRLKEIATRFAARAGEDVKVFVDTAPVMEKPLAEKAGIGWQGKHTNLVSREFGSWLFLGSLFTTAELDLDEPERDHCGSCRACLDACPTDAFPAPYRIDARRCISYLTIEHKGSIAPELRPLIGNRIYGCDDCLAACPWNKFARSASEMKLQARDDLREPELSFLLTLDDPGFRAFFSGSPVKRIGRDRFVRNALIAAGNSGEKSLIEVCKALAADASPTVRGMAVWALSRLISSADLAVFARQCGPETDDEVLAEWQMAGVNR

SEQ ID NO: 80349 - protein, 385 aa, Rhizobium lusitanum
  REGION 1..385: note = tr|A0A1C3W5C0|A0A1C3W5C0_9RHIZ Epoxyqueuosine reductase OS=Rhizobium lusitanum OX=293958; GN = GA0061101_108207 PE=4 SV=1
MPEDREAEKAGKRRRALTAFLREEAGAQGFDLCRITRPDAIPEAAVRLGQFLEQGHHGTMSWMEETRDRRGDPRVLWRETRSIAVFGLNYGPDEDPRGILEKTDKAAISVYARNRDYHDVIKGRLKEIATRFAARSKEDVKVFVDTAPVMEKPLAAAAGLGWQGKHTNLVSRTHGSWLFLGSMFTTADLEPDEPEIDHCGSCRACLDVCPTAAFPAPYQLDARRCISYLTIEHKGPIDPQIRPMIGNRIYGCDDCLAACPWNKFASAASEMKLVAREELKEPSIAFLLTLDDTAFRAFFSGSPVKRIGRDRFIRNVLIAAGNSGERALIELCRDLAKDPSSVVRGMAVWALSRLMTAGEFRAFAAERDDEPDEEVRAEWKIAGAM

SEQ ID NO: 80350 - protein, 387 aa, unidentified
  source 1..387: note = Rhizobium meliloti
  REGION 1..387: note = tr|A0A2J0ZAD3|A0A2J0ZAD3_RHIML Epoxyqueuosine reductase OS=Rhizobium meliloti OX=382 GN=queG PE=3 SV=1
MPGDAAKAENQGRKRRTLTAFLKEEAAAKGFDICRITHPDAIPHAPERLRQFLAAGAHGTMDWLAETAERRSDPRVLWSEVRSIVLFGMNYAPEDDPRDVLARRDRGAISVYARNRDYHDVVKGRLKEIATRFAARAGEDVKVFVDTAPVMEKPLAEKAGIGWQGKHTNLVSREFGSWLFLGSLFTTAELELDEPERDHCGSCRACLDACPTDAFPAPYRIDARRCISYLTIEHKGSIAPELRPLIGNRIYGCDDCLAACPWNKFARSASEMKLQAREDLKEPELSFLLTLDDTGFRAFFSGSPVKRIGRDRFVRNALIAAGNSGEKNLTEVCKALAADASPTVRGMAVWALSRLISSTDLAVFARQCGPETDDEVLAEWQMAGVNR

SEQ ID NO: 80351 - protein, 366 aa, unidentified
  source 1..366: note = Rhizobium meliloti
  REGION 1..366: note = tr|Q92SP4|Q92SP4_RHIME Epoxyqueuosine reductase; OS = Rhizobium meliloti (strain 1021) OX=266834 GN=queG PE=3; SV = 1
MPGDAAKADNQGRKRRTLTAFLKEEAAAKGFDICRITHPDAIPQAPERLRQFLAAGAHGTMDWLAETAERRSDPRVLWSEVRSIVLFGMNYAPEDDPREVLARRDRGAISVYARNRDYHDVVKGRLKEIATRFAARAGEDVKVFVDTAPVMEKPLAEKAGIGWQGKHTNLVSREFGSWLFLGSLFTTAELDLDEPERDHCGSCRACLDACPTDAFPAPYRIDARRCISYLTIEHKGSIAPELRPLIGNRIYGCDDCLAACPWNKFARSASEMKLQARDDLREPELSFLLTLDDPGFRAFFSGSPVKRIGRDRFVRNALIAAGNSGEKSLIEVCKALAADASPTVRGMAVWALSRLISSADLAVFAR

SEQ ID NO: 80352 - protein, 382 aa, unidentified
  source 1..382: note = Rhizobium mesoamericanum
  REGION 1..382: note = tr|K0PWH4|K0PWH4_9RHIZ Epoxyqueuosine reductase; OS = Rhizobium mesoamericanum STM3625 OX=1211777 GN=queG; PE = 3 SV=1
MATENKELKRRDTLTAYIRSQAKALGFDLCRITRPDAIPEAKQRLGEFIDAGRHGTMEWMAETRDRRGDPRTLWSDVRSIVVFGLNYGPDEDPRDILKKPDKAAISVYARNRDYHDVIKGRLKEIATRFAARAGADVKVFVDTAPVMEKPLAAAAGLGWQGKHTNLVSRELGSWLFLGSMFTTANLNIDNPEVDHCGSCRACLDICPTDAFPGPYQIDARRCISYLTIEHKGPIDPTLRPLIGNRIYGCDDCLAACPWNKFAHEASEMKLRAREDLKEPTIEYLLGLDDAAFRTFFSGSPVKRIGRDRFIRNVLIAAGNSGERRFVEKCHALTRDPSPVVRGMAVWALSRLLEAGEFSAFAAQRPDESDSDVLNEWRLAGAV

SEQ ID NO: 80353 - protein, 385 aa, Rhizobium miluonense
  REGION 1..385: note = tr|A0A1C3U0K9|A0A1C3U0K9_9RHIZ Epoxyqueuosine reductase OS=Rhizobium miluonense OX=411945 GN=queG PE=3; SV = 1
MPEDREAEKAGKRRSALTAFLREEARAQGFDLCRITRPDAIPQAAVRLGQFLDKGHHGTMGWMAETRERRGDPRVLWSETRSIVVFGLNYGPDEDPRGVLEKKDKAAISVYARNRDYHDIIKGRLKEIATRFAARSKEDVKVFVDTAPVMEKPLAGAAGLGWQGKHTNLVSRAFGSWLFLGSMFTTADIEPDEPEIDHCGSCRACLDVCPTNAFPAPYQLDARRCISYLTIEHKGPIDPELRPMIGNRIYGCDDCLAACPWNKFASAASEMKLVARDDLKEPSIAFLLTLDDAAFRAFFSGSPVKRVGRDRFIRNVLIAAGNSGEPSLIGRCCELAEDPSPVVRGMAVWALSRLMTSGEFRAFAAQRHDEADEEVRAEWTLAGVL

SEQ ID NO: 80354 - protein, 385 aa, Rhizobium mongolense
  REGION 1..385: note = tr|A0A559ST78|A0A559ST78_9RHIZ Epoxyqueuosine reductase OS=Rhizobium mongolense USDA 1844 OX=1079460; GN = queG PE=3 SV=1
MPQRIADDKERKRRDNLTAFVRAEAATLGFELCRITRPDSIPEAKERLGEFIDAGRHGTMEWMAETRDRRGDPRTLWSDVKSIVVFGLNYGPEEDPRRILEKPDKAAISVYARNRDYHDVVKGRLKEIATRFAARAGADVKVFVDTAPVMEKPLAAAAGLGWQGKHTNLVSRSHGSWLFLGSMFTTADLNTDDAEIDHCGSCRACLDACPTNAFPAPYQIDARRCISYLTIEHKGPIDLEFRPLIGNRIYGCDDCLAACPWNKFAVSASEMKLQARGDLKEPSIAFLLTLDDAAFRSFFSGSPVKRIGRARFIRNVLIAAGNSGDHSLADQCRSLATDASPVVRGMAIWALSRLVKPGEFAVFAAQRPDETDAGVLAEWQLAGVV

SEQ ID NO: 80355 - protein, 385 aa, Rhizobium multihospitium
  REGION 1..385: note = tr|A0A1C3WG51|A0A1C3WG51_9RHIZ Epoxyqueuosine reductase OS=Rhizobium multihospitium OX=410764; GN = GA0061103_5406 PE=4 SV=1
MPDDRETEKAGKQRRALTVFLREEARAQGFDLCRITRPDAIPEAAIRLGQFLDKGHHGTMGWMEETRDRRGDPRVLWSETRSIAVFGLNYCPDEDPRGILEKKDKAAISVYARNRDYHDVIKGRLKEIATRFAARSKEDVKVFVDTAPVMEKPLAAAAGLGWQGKHTNLVSRAFGSWLFLGSMFTTADLEPDEAEVDHCGSCRACLDACPTAAFPAPYQLDARRCISYLTIEHKGPIDPEFRSLIGNRIYGCDDCLAACPWNKFASTASEMKLVAREDLKEPSIAFLLDLDDAAFRTFFSGSPVKRIGRDRFIRNVLIAAGNSGERSLIERCCELAGDPSPVVRGMAIWALSRLMTAGEFSAFAAQRHEEADEEVRAEWKLAGVL

SEQ ID NO: 80356 - protein, 384 aa, unidentified
  source 1..384: note = Rhizobium naphthalenivorans
  REGION 1..384: note = tr|A0A512HE29|A0A512HE29_9RHIZ Epoxyqueuosine reductase OS=Rhizobium naphthalenivorans OX=1118451; GN = queG PE=3 SV=1
MPEAQAISTSDRKRASLTAFIKKEAEALGFELCRVVAPDSIPDAPARLSSYIAAGYHGTMDWMPETRERRADPRVLWSEVRSIVMFGMNYGPDLDPRHLQQEPGKGAISVYARNRDYHDVMKGRLKEIATRFAARSGADVKVFVDTAPVMEKPLAAEAGLGWQGKHTNLVSRKFGSWLFLGSLFTTADLNRDAPEIDHCGSCRACLDACPTDAFPAPYKIDARRCISYLTIEHKGSIDPALRAAFGNRIYGCDDCLSVCPWNKFAQAAREMKLQARADLIEPDLRFLLALDDPHFRTFFSGSPVKRIGRNRFVRNCLIAAGNSALPELIPACQTLVDDPAPEVRGMAVWALSRLMPGPEFERLSRERLPLETDAEVRREWMLSE

SEQ ID NO: 80357 - protein, 383 aa, unidentified
  source 1..383: note = Rhizobium nepotum
  REGION 1..383: note = tr|A0A0D8KH53|A0A0D8KH53_9RHIZ Epoxyqueuosine reductase OS=Rhizobium nepotum 39/7 OX=1368418 GN=queG; PE = 3 SV=1
MDVASDKQRIRARKLTDFVRQEALSLGFDLCRITAPDSIPLAPERLRQFLDKGYHGTMAWMEETEARRAEPKTLWGDVRSIVMFGLNYGPEEDPRGILSKPDKAAISVYARNRDYHDVIKGRLKEIATRFAARAGEDVKVFVDTAPVMEKPLAAAAGLGWQGKHTNLVSRTHGSWLFLGSMFTTAELCLDEAERDHCGSCRACLDACPTAAFPAPYQLDARRCISYLTIEHKGTIPHEFRPMIGNRIYGCDDCLAACPWNKFAASASEMKLQAREDLQEPSIAFLLTLDDAAFRSFFSGSPVKRIGRNRFIRNVLIAAGNSGDRQFVEQCKSLAERDPSPEVRGMAAWALSRLMDRDEFRTYSAGRAPEPDPEAEMEWQLAEA

SEQ ID NO: 80358 - protein, 390 aa, Rhizobium oryzae
  REGION 1..390: note = tr|A0A1X7ETP9|A0A1X7ETP9_9RHIZ Epoxyqueuosine reductase OS=Rhizobium oryzae OX=464029 GN=queG PE=3 SV=1
MRTLISDQDQEDEKALRRREKLTAFIREEAEAQGFDLCRITRPDSIPRAPERLRTFLDEGHHGTMAWMAETRERRADPKALWSEVRSIVLFGLNYGPDEDPRGILDRPDRAAISVYARNRDYHDVIKGRLKEIATRFAARAGEDVKVFVDTAPVMEKPLAEAAGLGWQGKHTNLVSRTHGSWLFLGSLFTTAELIVDAPETDHCGSCRACLDACPTAAFPAPYRLDARRCISYLTIEHKGPIDPEFRPLIGNRIYGCDDCLAACPWNKFAASASEMKLRAREDLKEPSIAFLLTLDDAAFRTFFSGSPVKRIGRDRFVRNVLIAAGNSGDPALIGQCLELARDPSPVVRGMAIWALKRLMRPEDFARFAQTRDVEDDPGVREEWRLAGAG

SEQ ID NO: 80359 - protein, 392 aa, Rhizobium oryzae
  REGION 1..392: note = tr|A0A1Q9AUV2|A0A1Q9AUV2_9RHIZ Epoxyqueuosine reductase OS=Rhizobium oryzae OX=464029 GN=queG PE=3 SV=1
MRISTSDNPEGSAERQRAKLTAFLKDEARDKGFDLCRITLPSAIPQAPARLKDFLDNNYHGTMDWMAETAERRADPRALWDEVRSVVVFGMNYGPEHDPRAVLAMPDRGAISVYAQNRDYHDVIKGKLKEVATRFAARAGADVKVFVDTAPVMEKPLAEQAGLGWQGKHTNLVSRELGSWLFLGSLFTTADLMIDAPEQDHCGSCRACLDACPTDAFPAPYRIDARRCISYLTIEHKGEIEPEMRPLFGNRIYGCDDCLAACPWNKFARQAAEMKLRAREDLKAPPLRDLLALDDAAFRSLFSGSPVKRIGRDRFLRNCLIAAGNSGDPALAEPVRTLLDDGAPVVRAMAVWALARLLGMPAMHALAHRAAAEEDAAVLREWKRLEDPACIS

SEQ ID NO: 80360 - protein, 390 aa, unidentified
  source 1..390: note = Rhizobium oryziradicis
  REGION 1..390: note = tr|A0A1Q8ZT30|A0A1Q8ZT30_9RHIZ tRNA epoxyqueuosine(34) reductase QueG OS=Rhizobium oryziradicis OX=1867956 GN=BJF95_17925 PE=4 SV=1
MPHDRNSDRAAEKAAEKRRKLTAFLKEEAADKGFDVCRITPPDSMPQAPARLDAFLAANHHGTMAWMSETKERRADPRVLWSDVRSVAMFGLNYGPDSDPRALQDQPEKAAISVYARNRDYHDIIKGKLKEVATRFAARAGEDVKVFVDTAPVMEKPLAEAAGLGWQGKHTNLVSRTFGSWLFLGSLFTTADLDMDERERDHCGSCQSCLDACPTDAFPAPYQIDARRCISYLTIEHKGVIDRTLRSAFGNRIYGCDDCLAACPWNKFASLSREMKLHARADLQAPDIAFFLTLDDASFRSHFSGSPVKRIGRDRFVRNTLIAAGNSGMRAFIPQCQALLTDPSPDVRGMAVWALSRLMPPSDFKNLALYSVREPDEDVRNEWRDAGVEQ

SEQ ID NO: 80361 - protein, 383 aa, Rhizobium phaseoli
  REGION 1..383: note = tr|A0A2U3D4Z1|A0A2U3D4Z1_9RHIZ Epoxyqueuosine reductase OS=Rhizobium phaseoli OX=396 GN=B5K03_01375 PE=4; SV = 1
MPDNDDKERRRRDNLTEFVRTESAAKGFDLCRITRPDAIPEAKQRLGQFIDAGRHGTMEWIAETRERRGDPLALWSEVRSVVVFGLNYAPEEDPRGILGKPDKAAISVYARNRDYHDIIKGRLKEIAMRFAARAGADVKVFVDTAPVMEKPLAAAAGLGWQGKHTNLVSRTHGSWLFLGSMFTTADLAVDEAETDHCGSCRACLDICPTAAFPAPYQIDARRCISYLTIEHKGPIDPDLRPLIGNRIYGCDDCLAACPWNKFAVSAAEMKLKARDDLKEPSLAFLLTLDDAAFRTFFSGSPVKRIGRDRFIRNVLIAAGNSGEKALIAQCRQLAADASPVVRGMAVWALSRLMEAGEFSGFATQRADETDDDVLTEWRLAGVS

SEQ ID NO: 80362 - protein, 383 aa, Rhizobium phaseoli
  REGION 1..383: note = tr|A0A0M3GQY9|A0A0M3GQY9_9RHIZ Iron-sulfur cluster binding protein OS=Rhizobium phaseoli Ch24-10 OX=1128399; GN = RPHASCH2410_CH08520 PE=4 SV=1
MPDNDDKERRRRDNLTEFVRAESAAKGFDLCRITRPDAIPEAKQRLGQFIDAGRHGTMEWMAETRERRGDPLTLWSEVRSVVVFGLNYAPEEDPRGILGKPDKAAISVYARNRDYHDIIKGRLKEIATRFAARAGADVKVFVDTAPVMEKPLAAAAGLGWQGKHTNLVSRAHGSWLFLGSMFTTADLAVDEAETDHCGSCRACLDICPTAAFPAPYQIDARRCISYLTIEHKGPIDPDLRPLIGNRIYGCDDCLAACPWNKFAVSAAEMKLKARENLKEPSLTFLLTLDDAAFRTFFSGSPVKRIGRDRFIRNVLIAAGNSGETALIAQCRALAGDAAPAVRGMAVWALSRLMQAGEFSAFAAQRTDESDDDVLNEWRLAGVD

SEQ ID NO: 80363 - protein, 383 aa, Rhizobium pisi
  REGION 1..383: note = tr|A0A427N8W0|A0A427N8W0_9RHIZ Epoxyqueuosine reductase OS=Rhizobium pisi OX=574561 GN=queG PE=3 SV=1
MPEPNDKESKRRDNLSAFVKAESAAHGFDLCRITRADAIPEAGQRLGEFIDAGRHGTMEWMAETRDRRGDPRTLWSDVKSVVVFGLNYAPEEDPRGILDKPDKAAISVYARNRDYHDVIKGRLKEIATRFAARASADVKVFVDTAPVMEKPLAVAAGLGWQGKHTNLVSRLHGSWLFLGSMFTTADLAVDAPETDHCGSCRACLDICPTAAFPAPYQIDARRCISYLTIEHKGPIDPDLRPLIGNRIYGCDDCLAVCPWNKFASSASEMKLKAREDLKEPSIAFLLTLDDAAFRAFFSGSPVKRIGRDRFIRNLLIAAGNSGMPELIAQCRLLAADPSPVVRGMAVWALSRLMEAGEFVAFAAQRADERDDGVLNEWRLAGVG

SEQ ID NO: 80364 - protein, 383 aa, Rhizobium pusense
  REGION 1..383: note = tr|A0A4U1K1U9|A0A4U1K1U9_9RHIZ Epoxyqueuosine reductase OS=Rhizobium pusense OX=648995 GN=queG PE=3 SV=1
MDVADEKQRIRARKLTDFIRQEALSLGFDLCRVTAPDSIPLAPERLREFLGKGYHGTMAWMEETEARRAEPKTLWSDVRSIVMFGLNYGPDEDPRNLLSKPDKAAISVYARNRDYHDVIKGRLKEIATRFAARAGEDVKVFVDTAPVMEKPLAAAAGLGWQGKHTNLVSRSHGSWLFLGSMFTTADLCLDEAEKDHCGSCRACLDACPTAAFPAPYQLDARRCISYLTIEHKGPIPHEFRPMMGNRIYGCDDCLAACPWNKFAASASEMKLQAREDLKEPSIDFLLTLDDAAFRSFFSGSPVKRIGRSRFIRNVLIAAGNSGNRQFVERCKALAETDPSPEVRGMAAWALSRLMDRGEFRTYSATRAPETDPEAEMEWQLAEA

SEQ ID NO: 80365 - protein, 383 aa, Rhizobium pusense; identical to SEQ ID NO: 74973
  REGION 1..383: note = tr|A0A1S9EIZ1|A0A1S9EIZ1_9RHIZ Epoxyqueuosine reductase OS=Rhizobium pusense OX=648995 GN=queG PE=3 SV=1

SEQ ID NO: 80366 - protein, 383 aa, Rhizobium radiobacter
  REGION 1..383: note = tr|A0A546Y6D9|A0A546Y6D9_RHIRD Epoxyqueuosine reductase OS=Rhizobium radiobacter OX=358 GN=queG PE=3 SV=1
MDVATDKQRIRARKLTDFVRQEALSLGFDLCRITAPDSIPLAPERLRLFLDSGYHGTMAWMEETEARRAEPKTLWGDVRSIVMFGLNYGPEEDPRALLSKPDKAAISVYARNRDYHDIIKGRLKEIATRFAARAGEDVKVFVDTAPVMEKPLAAAAGLGWQGKHTNLVSRTHGSWLFLGSMFTTAELCLDEAEKDHCGSCRACLNACPTAAFPAPYQLDARRCISYLTIEHKGPIPHEFRPMIGNRIYGCDDCLAACPWNKFAASASEMKLQAREDLKEPAIAFLLTLDDTAFRSFFSGSPVKRIGRNRFVRNVLIAAGNSADRQFMEQCKTLAETDPSPEVRGMAAWALSRLMDREEFRTYSAGRAPEHDPEVEMEWQQAEA

SEQ ID NO: 80367 - protein, 383 aa, Rhizobium radiobacter
  REGION 1..383: note = tr|A0A5B1AKH4|A0A5B1AKH4_RHIRD Epoxyqueuosine reductase OS=Rhizobium radiobacter OX=358 GN=queG PE=3 SV=1
MDVASEKQRIRAHKLTDFVRQEALSLGFDLCRITAPDSIPLAPERLRQFLDNGYHGTMAWMEETEARRAEPKTLWGDVRSIVMFGLNYGPEEDPRDLLSKPDKAAISVYARNRDYHDIIKGRLKEIATRFAARAGEDVKVFVDTAPVMEKPLAAAAGLGWQGKHTNLVSRTHGSWLFLGSMFTTAELCLDEAEKDHCGSCRACLDACPTAAFPAPYQLDARRCISYLTIEHKGPIPHEFRPMIGNRIYGCDDCLAACPWNKFAASASEMKLQAREDLKEPSIAFLLTLDDAAFRSFFSGSPVKRIGRNRFIRNVLIAAGNSADRQFVEQCKALAETDPSPEVRGMAAWALSRLMDRDEFRTYSAGRAPEPDPEAEMEWQLAEA

SEQ ID NO: 80368 - protein, 392 aa, unidentified
  source 1..392: note = Rhizobium rhizosphaerae
  REGION 1..392: note = tr|A0A1Q9AEZ0|A0A1Q9AEZ0_9RHIZ Epoxyqueuosine reductase OS=Rhizobium rhizosphaerae OX=1672749 GN=queG; PE = 3 SV=1
MRISTSEDKDSPEARQKAKLTAFLKAEARDKGFDLCRITLPDSIPEAPARLRDFLDRGYHGTMDWMAETAERRADPRVLWGEVRAIVVFGMNYGPEHDPRAVLSMPDRGAISVYAQNRDYHHVIKGRLKEVATRFAARAGADVKVFVDTAPVMEKPLAEQAGLGWQGKHTNLVSRDFGSWLFLGSLFTTADLEIDAPERDHCGSCRACLSACPTDAFPAPYRIDARRCISYLTIEHKGEIAPEMRASFGNRIYGCDDCLAACPWNKFAAQAAEMKLRAREELKAPPLADLLRLDDAEFRSLFSGSPVKRIGRDRFLRNCLIAAGNSGDPALVEPVLRCLDDATPVVRAMAVWALGRLLGTAARTTLADRIAAEEDEAVLREWKRLEDPACIS

SEQ ID NO: 80369 - protein, 384 aa, Rhizobium rosettiformans
  REGION 1..384: note = tr|A0A4V4HR90|A0A4V4HR90_9RHIZ tRNA epoxyqueuosine(34) reductase QueG OS=Rhizobium rosettiformans W3 OX=538378 GN=queG PE=4 SV=1
MDEPQIDPKIRKLRADLTRFLRQEAEAQGFDLCRITLPDAIPEAPARLESFLEDGRHGTMAWMEETKERRSDPRVLWSDVSSIVMFGMNYGPDEDPRLLQAQPEKAAISVYARNRDYHDVIKGRLKEVATRFAARAGEDVKVFVDTAPVMEKPLAAAAGLGWQGKHTNLVSREYGSWLFLGSLFTTADLEIDEAERDHCGSCRACLDACPTNAFPAPYQIDARRCISYLTIEHKGPIDRALRPAFGNRIYGCDDCLAACPWNKFAASAREMKLVAREDLKAPDIAYFLTLDDPTFRTYFSGSPVKRIGRDRFVRNVLIAAGNSGSVELAPACQALLSDASADVRGMAAWALSRLLRGDDFMRLRAEHMPGEMDETVRQEWMTGS

SEQ ID NO: 80370 - protein, 384 aa, Rhizobium selenitireducens
  REGION 1..384: note = tr|A0A376ACS5|A0A376ACS5_9RHIZ Epoxyqueuosine reductase OS=Rhizobium selenitireducens ATCC BAA-1503; OX = 1336235 GN=queG PE=3 SV=1
MPQEQAISAPDKKRASLTAFIKKEAEAQGFDLCRITTPDAIPEAPERLSAYIEAGYHGTMDWMPETRERRGDPRVLWPDVRSIVMFGMNYGPDLDPRYLQSRPEKGAVSVYARNRDYHDVMKGRLKEIATRFAARAGADVKVFVDTAPVMEKPLAAAAGLGWQGKHTNLVSRDFGSWLYLGSLFTTADLLLDEPEVDHCGSCRACLDACPTHAFPAPYKIDARRCISYLTIEHKGSIDPDLRAAFGNRIYGCDDCLSACPWNKFASEAREMKLQARADLLEPDLSFLLSLDDPTFRTFFSGSPVKRIGRNRFVRNCLIAAGNSGSGDLVPACRTLIGDAAPEVRGMAVWALSRLLPQADFAKMRQAHLPAETEAEVRREWTMAE

SEQ ID NO: 80371 - protein, 391 aa, unidentified
  source 1..391: note = Rhizobium smilacinae
  REGION 1..391: note = tr|A0A5C4XSN6|A0A5C4XSN6_9RHIZ tRNA epoxyqueuosine(34) reductase QueG OS=Rhizobium smilacinae; OX = 1395944 GN=queG PE=4 SV=1
MRTSISSAETTGDDKALRRREKLTAFIRQEATAQGFDLCRITLPTSIPRAPERLSTFLEDSHHGTMDWMAETKERRADPTTLWSEVRSIVMFGLNYGPEEDPRYLLSMKDKAAISVYARNRDYHDIIKGRLKEIATRFAARAGEDVKVFVDTAPVMEKPLAEAAGLGWQGKHTNLVSRSHGSWLFLGSLFTTAELTIDGAEKDHCGSCRACLDACPTAAFPAPYRLDARRCISYLTIEHKGSIDAGLRPLIGNRIYGCDDCLAACPWNKFAASSSEMKLQAREDLKEPSIAFLLTLDDPTFRSFFSGSPVKRIGRDRFVRNVLIAAGNSGDPQFIPQCRQLADDASPTVRGMAVWTLRRLMDDDAFAAFARPRVPDNDPEVRREWQMAGVD

SEQ ID NO: 80372 - protein, 383 aa, unidentified
  source 1..383: note = Rhizobium sophoriradicis
  REGION 1..383: note = tr|A0A3R9C9B8|A0A3R9C9B8_9RHIZ Epoxyqueuosine reductase OS=Rhizobium sophoriradicis OX=1535245 GN=queG; PE = 3 SV=1
MPDNDDKERRRRDNLTEFVRAESAAKGFDLCRITRPDAIPEAKERLGQFIDAGRHGTMEWMAETRERRGDPLTLWSEVRSVVVFGLNYAPEEDPRGILDKPDKAAISVYARNRDYHDIIKGRLKEIATRFAARAGADVKVFVDTAPVMEKPLAAAAGLGWQGKHTNLVSRTHGSWLFLGSMFTTADLAVDAPETDHCGSCRACLDICPTAAFPAPYQIDARRCISYLTIEHKGPIDPDLRPLIGNRIYGCDDCLAVCPWNKFAISAFEMKLKAREDLKEPSLAFLLTLDDAAFRAFFSGSPVKRIGRDRFIRNVLIAAGNSGETALIAQCRELAGDAAPAVRGMAVWALSRLMEAGEFSIFAAQRTDESDDDVLNEWRLAGVD

SEQ ID NO: 80373 - protein, 383 aa, unidentified
  source 1..383: note = Rhizobium sophoriradicis
  REGION 1..383: note = tr|A0A2A5KUD6|A0A2A5KUD6_9RHIZ tRNA epoxyqueuosine(34) reductase QueG OS=Rhizobium sophoriradicis OX=1535245 GN=queG PE=4 SV=1
MPDNDDKERRRRDNLTEFVRAESAAKGFDLCRITRPDAIPEAKERLGQFIDAGRHGTMEWMAETRERRGDPLTLWSEVRSVVVFGFNYAPEEDPRGILGKPDKAAISVYARNRDYHDIIKGRLKEIATRFAARAGADVKVFVDTAPVMEKPLAAAAGLGWQGKHTNLVSRTHGSWLFLGSMFTTADLAVDAPETDHCGSCRACLDICPTAAFPAPYQIDARRCISYLTIEHKGPIDPDLRPLIGNRIYGCDDCLAACPWNKFAVSAFEMKLKAREDLKEPSLAFLLTLDDAAFRAFFSGSPVKRIGRDRFIRNVLIAAGNSGETALIAQCRELAGDAAPAVRGMAVWALSRLMEAGEFSIFAAQRTDENDDDVLNEWRLAGVD

SEQ ID NO: 80374 - protein, 384 aa, Rhizobium sp.
  REGION 1..384: note = tr|A0A2M8UJQ1|A0A2M8UJQ1_RHISP Epoxyqueuosine reductase OS=Rhizobium sp. OX=391 GN=queG PE=3 SV=1
MPPEQADPSSDRKRASLTAFIRKEAEAQGFELCRITRPDAIPEAPARLSAYVEAGYHGTMEWMPETRERRSDPRVLWGDVRSIVMFGMNYGPDLDPRYLQAKPDKGAISVYARNRDYHDVMKGRLKEIATRFAARAGADVKVFVDTAPVMEKPLAAAAGLGWQGKHTNLVSRYYGSWLFLGSLFTTADLEVDAPEIDHCGSCRACLDACPTDAFPAPYKIDARRCISYLTIEHKGSIDPELRAAFGNRIYGCDDCLSACPWNKFAREAREMKLQARADLIEPDLTFLLSLDDPTFRAFFSGSPVKRIGRNRFVRNCLIAAGNSGLGDVIPACRTLIGDAAPEVRGMAIWALSRLLTAAEFAELREGHLPGEAEGEVRREWMMSE

SEQ ID NO: 80375 - protein, 390 aa, Rhizobium sp.
  REGION 1..390: note = tr|A0A095UBV1|A0A095UBV1_9RHIZ 4Fe-4S ferredoxin; OS = Rhizobium sp. YS-1r OX=1532558 GN=JL39_30900 PE=4 SV=1
MRTLISDDNREAEKALRRREKLTAFLHAEAKSQGFDLCQVTGPDSIPRAPERLEVFLAEGHHGTMDWMAETRLRRADPKVLWSEVRSIVMFGLNYGPDEDPRGILDRPDKAAISVYARNRDYHDLIKGRLKEIATRFAARAGEDVKVFVDTAPVMEKPLAEAAGLGWQGKHTNLVSRTHGSWLFLGSLFTTAELIVNEPETDHCGSCRACLDACPTAAFPAPYRLDARRCISYLTIEHKGPIAPEFRPLIGNRVYGCDDCLAACPWNKFAASASEMKLKAREDLKEPSIAFLLTLDDATFRTFFSGSPVKRIGRDRFIRNVLIAAGNSGDASLIARCRELSGDPSPVVRGMAIWALRRLMPDGDFARFAQTRRIEEDPEVLEEWRLAGAG

SEQ ID NO: 80376 - protein, 397 aa, unidentified
  source 1..397: note = Rhizobium straminoryzae
  REGION 1..397: note = tr|A0A549T7S2|A0A549T7S2_9RHIZ Epoxyqueuosine reductase OS=Rhizobium straminoryzae OX=1387186 GN=queG; PE = 3 SV=1
MRTSTSDQDRPSAAEAQKAAERRRKLTGFLHAEAAAQGFDLCRITRPDAIPDAKARLDAFLAAGRHGTMAWMEETRERRADPKVLWGAVRSIVMFGLNYGPDEDPRGILDRPDRAAISVYARNRDYHDVIKGRLKEIATRFAARAGEDVKVFVDTAPVMEKPLAAAAGLGWQGKHTNLVSRSHGSWLFLGSLFTTVDLEIDAAERDHCGSCRACLDACPTAAFPAPYQIDARRCISYLTIEHKGPIDRDLRPLIGNRIYGCDDCLAACPWNKFAASASEMKFRAREDLKEPEIAALLTLDDAAFRALFSGSPVKRIGRDRFVRNVLIAAGNSGRADLIAPCLRLLTDGSDIVRAMAVWALSRLMPADAFETLKAEPRSEASAEVETEWQNAGVQTCG

SEQ ID NO: 80377 - protein, 388 aa, unidentified
  source 1..388: note = Rhizobium subbaraonis
  REGION 1..388: note = tr|A0A285UR46|A0A285UR46_9RHIZ Epoxyqueuosine reductase OS=Rhizobium subbaraonis OX=908946 GN=queG PE=3; SV = 1
MAMAGAATSADRIERQRNKLKAFLLAEAADKGFDVCRVARPDSIPDAPARLDDFLAAGYHGTMDWMAETRDRRADPRALWSEVRSVVLFGMNYGPDEDPRDVLAMKNSAAISVYAKNRDYHDVIKGKLKEVATRFAARAGEDVKVFVDTAPVMEKPLAMQAGLGWQGKHTNLVSRDFGSWLFLGSMFTTAELIADDPERDHCGSCRACLDACPTSAFPAPYRIDARRCISYLTIEHKGTIERELRPLLGNRIYGCDDCLAACPWNKFAAVAAEMKFHARDDLRAPKLAELLTLDDAAFRTRFSGSPVKRIGRDRFVRNVLIAAGNSGDAALAPICATLASDPSPTVRGMAVWALRQLLARDSFEKFARRAADETDPEVRAEYEAATEV

SEQ ID NO: 80378 - protein, 385 aa, Rhizobium sullae
  REGION 1..385: note = tr|A0A2N0DD95|A0A2N0DD95_RHISU Epoxyqueuosine reductase OS=Rhizobium sullae OX=50338 GN=queG PE=3 SV=1
MPERMTDDKERKRRDNLTAFVHAEAAALGFDLCRITRPDSIPEAKERLGEFIDAGRHGTMEWMAETRDRRGDPRTLWSDVKSIVVFGLNYGPEEDPRQILEKPDKAAISVYARNRDYHDVIKGRLKEIATRFAARAGVDVKVFVDTAPVMEKPLAAAAGLGWQGKHTNLVSRSHGSWLFLGSMFTTADLNIDGAEIDHCGSCRACLDACPTNAFPAPYQIDARRCISYLTIEHKGPIDPEFRPLIGNRIYGCDDCLAACPWNKFAASASEMKLQARKDLKEPSIAFLLTLDDAAFRTFFSGSPVKRIGRNRFIRNVLIAAGNSGDRGLIGQCRRLAADASPVVRAMAIWALSRLMDPGEFAAFAAQRPDESDADVRAEWQLAGVV

SEQ ID NO: 80379 - protein, 385 aa, Rhizobium sullae
  REGION 1..385: note = tr|A0A4R3QC72|A0A4R3QC72_RHISU Epoxyqueuosine reductase OS=Rhizobium sullae OX=50338 GN=queG PE=3 SV=1
MPERMTDDKERKRRDNLTAFVHAEAAALGFDLCRITRPDSIPEAKERLGEFIDAGRHGTMEWMAETRDRRGDPRTLWSDVKSIVVFGLNYGPEEDPRQILEKPDKAAISVYARNRDYHDVIKGRLKEIATRFAARAGVDVKVFVDTAPVMEKPLAAAAGLGWQGKHTNLVSRSHGSWLFLGSMFTTADLNIDGAEIDHCGSCRACLDACPTNAFPAPYQIDARRCISYLTIEHKGPIDPEFRPLIGNRIYGCDDCLAACPWNKFAASASEMKLQARKDLKEPSIAFLLTLDDAAFRTFFSGSPVKRIGRNRFIRNVLIAAGNSGDRGLIGQCRRLAADASPVVRAMAIWALSRLMVPGEFAAFAAQRPDESDADVRAEWQLAGVV

SEQ ID NO: 80380 - protein, 390 aa, Rhizobium taibaishanense
  REGION 1..390: note = tr|A0A1Q9A978|A0A1Q9A978_9RHIZ Epoxyqueuosine reductase OS=Rhizobium taibaishanense OX=887144 GN=queG; PE = 3 SV=1
MAEADKPGREAEKARIRAGKLTAFLKQEAADKGFDLCRITGPDSIPQAPARLSAFIKAGHHGTMAWMEETRERRGDPKVLWPEVRSVVMFGLNYGPDSDPRLLQAEPEKAAISVYARNRDYHDVIKGKLKEVATRFAARAGEDVKVFVDTAPVMEKPLAAAAGLGWQGKHTNLVSRDFGSWLFLGSMFTTADLELDAPERDRCGSCRACLDACPTAAFPAPYEIDARRCISYLTIEHKGVIDRDLRPAFGNRIYGCDDCLAACPWNKFAATAREIKLQAREDLQAPEIAAFLALDDTGFRSHFSGSPVKRIGRDRFVRNVLIAAGNSGSGELIAPCKALLDDASPDVRGMAVWALSRLMTSADFSTLASYKDKEPDEDVRAEWLAVGVTS

SEQ ID NO: 80381 - protein, 382 aa, Rhizobium tibeticum
  REGION 1..382: note = tr|A0A1H8E169|A0A1H8E169_9RHIZ Epoxyqueuosine reductase OS=Rhizobium tibeticum OX=501024 GN=queG PE=3; SV = 1
MATENKEQRRRDTLTAFVRAEAKALGFDLCRVTRPDAIPQAKERLGEFIDAGRHGTMEWMAQTRDRRGDPRTLWSDVRSIVVFGLNYGPEDDPREILAKSDKAAISVYARNRDYHDVIKGRLKEIATRFAARAGADVKVFVDTAPVMEKPLAAAAGLGWQGKHTNLVSREHGSWLFLGSMFTTADLNTDAPEIDHCGSCRACLDICPTNAFPGPYQIDARRCISYLTIEHKGPIDPALRPPIGNRIYGCDDCLAACPWNKFAHEASEMKLQAREDLKEPSIEDLLSLDDAGFRAFFSGSPVKRIGRDRFIRNVLIAAGNSGDRRFVDRCRALSRDASPVVRGMAVWALSRLLEAGEFSAFAAQRADESDSDVLDEWRLAGAV

SEQ ID NO: 80382 - protein, 385 aa, Rhizobium tropici
  REGION 1..385: note = tr|A0A329Y921|A0A329Y921_RHITR Epoxyqueuosine reductase OS=Rhizobium tropici OX=398 GN=queG PE=3 SV=1
MPDDRETEKANKRRSTLTAFLREEARAQGFDLCRITRPDAIPQAAVRLGQFLDKGHHGTMGWMEETRDRRGDPRVLWSETRSIVVFGLNYGPDEDPRGILEKKEKAAISIYARNRDYHDIIKGRLKEIATRFAARSKEDVKVFVDTAPVMEKPLAEAAGLGWQGKHTNLVSRAFGSWLFLGSMFTTADLELDEPEIDHCGSCRACLDVCPTAAFPAPYQLDARRCISYLTIEHKGPIDPELRPLIGNRIYGCDDCLAACPWNKFASAASEMKLVARDDLKEPSIAFLLDLDDAAFRTFFSGSPVKRIGRDRFIRNVLIAAGNSGERSFIERCRQLAGDPSPVVRGMAIWALSRLMTAGEFRAFAAERDDEANEEVRAEWTLAGVV

SEQ ID NO: 80383 - protein, 385 aa, Rhizobium tropici
  REGION 1..385: note = tr|L0LF61|L0LF61_RHITR Epoxyqueuosine reductase; OS = Rhizobium tropici CIAT 899 OX=698761 GN=queG PE=3 SV=1
MPGDREAEKADKRRNTLTAFLREEARAHGFDLCRITRPDAIPEAAVRLGQFLDKGYHGTMGWMEETRDRRGDPRVLWSETRSIVVFGLNYGPEEDPRGILEKQDKAAISVYARNRDYHDVIKGRLKEIATRFAAHSKEDVKVFVDTAPVMEKPLAGAAGLGWQGKHTNLVSRAFGSWLFLGSMFTTADLEPDEPEVDHCGSCRACLDVCPTSAFPAPYQLDARRCISYLTIEHKGPIAPQLRPLIGNRIYGCDDCLAACPWNKFASSASEMKLVAREDLKEPSIAFLLDLDDATFRTFFSGSPVKRIGRDRFIRNVLIAAGNSSERSLIERCCELAGDPSPVVRGMAVWALSRLMTAGEFHAFAAQRHDEADEEVRAEWKLAGVS

SEQ ID NO: 80384 - protein, 390 aa, Rhizobium tubonense
  REGION 1..390: note = tr|A0A2W4CMV0|A0A2W4CMV0_9RHIZ Epoxyqueuosine reductase OS=Rhizobium tubonense OX=484088 GN=queG PE=3; SV = 1
MPEEIDTSSRAEDGRRKRRETLTSFVRAEALAQGFDLCRITRPDAIPEARERLDDFLDHGYHGTMDWMAETRDRRGNPLVLWSEVRSVVVFGLNYGPDEDPRGILSRPDKAAISVYARNRDYHDVIKGRLKEIATRFAARSKEDVKVFVDTAPVMEKPLAAAAGLGWQGKHTNLVSRTHGSWLFLGSMFTTADLTTDAPEVDHCGSCRACLDACPTAAFPAPYQIDARRCISYLTIEHKGPIDPALRPLIGNRIYGCDDCLAACPWNKFAAAASEMKLVARDDLKEPSIAFLLTLDDPTFRTFFSGSPIKRIGRDRFIRNVLIAAGNSSDGALAAPCRRLTDDPSPVVRGMAVWALSRLMPAGEFHAFAAERREETDEDVRREWQLAGVA

SEQ ID NO: 80385 - protein, 392 aa, unidentified
  source 1..392: note = Rhizobium tumorigenes
  REGION 1..392: note = tr|A0A2W4BWC6|A0A2W4BWC6_9RHIZ Epoxyqueuosine reductase OS=Rhizobium tumorigenes OX=2041385 GN=queG PE=3; SV = 1
MPEATENPSTRPDKAAGRSLKTFLQEEARRLGFDLCRITGPDSIQQAGPRLGIYLDEGFHGTMDWMAETRERRASPAALWSDVRSVVVFGLNYGPDEDPRGILGKPDKAAISVYARNRDYHDVIKGRLKEIATRFAARSKEDVKVFVDTAPVMEKPLAAAAGLGWQGKHTNLVSRTHGSWLFLGSMFTTADLGSDEPESDHCGSCTACLTACPTDAFPAPYQLDARRCISYLTIEHKGPIDRQLRPLIGNHIYGCDDCLAACPWNKFAASASEMKLVAREDLREPSIAFLLGLDDATFRSFFSGSPIKRIGRDRFTRNVLIAAGNSHDGTLIEPCRRLADDSAPIVRGMAAWALGRLMTAGEFARFAAERPDDLDEEVREEWRAARMMSCTQ

SEQ ID NO: 80386 - protein, 385 aa, Rhizobium vallis
  REGION 1..385: note = tr|A0A432PS87|A0A432PS87_9RHIZ Epoxyqueuosine reductase OS=Rhizobium vallis OX=634290 GN=queG PE=3 SV=1
MPEADNNDKDRRRRDNLTDFVRAESAAKGFDLCRITRPDAIPHARERLGQFIDAGRHGTMDWMAETRDRRGDPRTLWSEVRSVVVFGLNYAPEEDPRGVLDKPDKAAISVYARNRDYHDVIKGRLKEIATRFAARAGADVKVFVDTAPVMEKPLAAAAGLGWQGKHTNLVSRVHGSWLFLGSMFTTADLAVDAPETDHCGSCRACLDICPTAAFPAPYQIDARRCISYLTIEHKGPIDPELRPLIGNRIYGCDDCLAVCPWNKFASSASEMKLKARQDLQEPSIAFLLTLDDAAFRSFFSGSPVKRIGRDRFVRNVLIAAGNSGETSLIGQCRILANDASPVVRGMAVWALSRLMEAGEFSAFAAQRADERDADVLNEWWLAGVG

SEQ ID NO: 80387 - protein, 370 aa, Rhizomicrobium sp.
  REGION 1..370: note = tr|A0A177QAF7|A0A177QAF7_9PROT Epoxyqueuosine reductase OS=Rhizomicrobium sp. SCGC AG-212-E05 OX=1799655; GN = queG PE=3 SV=1
MPNSISDQIRERAKAEGFDLVRFASAKAAPANAQRLQEFLHAGHHGEMDWMAERAGWRADPQEMWPAARSVIMLGVNYGPGDDPLAIQQRRDRAAISVYAQGDDYHDVVKKKLKALAGHIFQSFGADVKVFVDTAPVMEKPLAQKAGLGWQGKHTNLVSREFGSWLFLGSIFTTLELPPDAAEEDHCGNCHACLDVCPTNAFPAPYRLDARRCISYLTIENKGPIPREFRAAMGNRIYGCDDCLAVCPWNKFASAASEMKLSAREELKAPRLAELATLDDAGFRALFRKSPVKRIGRERFARNVMIAIGNSADPSLAGAAREALADTSPLVRGAAVWALSQLLPADEFAALAQKTQENDEDVRREWSATA

SEQ ID NO: 80388 - protein, 382 aa, unidentified
  source 1..382: note = Rhizorhabdus dicambivorans
  REGION 1..382: note = tr|A0A2A4G0N4|A0A2A4G0N4_9SPHN Epoxyqueuosine reductase OS=Rhizorhabdus dicambivorans OX=1850238 GN=queG; PE = 3 SV=1
MTTDPSSLREAIRAEALALGFAACGFARADAAPEAAERLDDWLEAGAHGSMDWMEARKGQRARPQALWPEARSLIMLGMSYAPRENPMRLADEPGIGRISVYAQGADYHDIVKKALKHLARWLVDRAGGELKVFVDTAPVMEKPLSAAAGIGWQGKHSNLVSRDHGSWLFLGAIMTSLDLPPDEAHDDRCGSCDACQTACPTDAFPRPYVVDARRCISYLTIEHKGPIPHEFRSAIGNRIYGCDDCLAVCPWNKFAQAGAANRAFAARAELAAPELADLLAMDDAAFRAIFSGSPIKRIGRDRMLRNALIAAGNSRRAGLVPMVEALLDDPAPVVRGAAVWALARLDPTRFAVQHAARLPSEKDQQVGKEWNVAIAKTGAAD

SEQ ID NO: 80389 - protein, 381 aa, unidentified
  source 1..381: note = Rhizorhabdus sp.
  REGION 1..381: note = tr|A0A521STX3|A0A521STX3_9SPHN Epoxyqueuosine reductase OS=Rhizorhabdus sp. OX=1968843 GN=queG PE=3 SV=1
MTDAFTLREEIRAHALSLGFAACGFAHADAAPEAAARLDDWLEAGSHGSMDWMEARKGERARPRGLWPDARSLIMLGMSYAPREDPLRLAAEPGIGRISAYAQGHDYHDVVKKALKHLARWLVEQAGGELKVFVDTAPVMEKPLAAAAGIGWQGKHSNLVSRDHGSWLFLGAIMTSLDLPPDEAHDDRCGSCDACQTACPTDAFPRPYVVDARRCISYLTIEHKGPIPQEFRVALGNRIYGCDDCLAVCPWNKFAEAAAANRAFAARAELAAPELADLIAMDDAAFRAIFSGSPIKRIGRDRMVRNALLAAGNSGLSRLVPAIASLLDDPAPVVRGAAIWALGRLDPARFDAERAARRACEKDQDVAAEWDVAIAKRAVAR

SEQ ID NO: 80390 - protein, 365 aa, unidentified
  source 1..365: note = Rhodanobacter denitrificans
  REGION 1..365: note = tr|M4NFN5|M4NFN5_9GAMM Epoxyqueuosine reductase; OS = Rhodanobacter denitrificans OX=666685 GN=queG PE=3 SV=1
MRRIYNRWMSGTDIQAPPDYATLARDIKRWAIELGFADAGISGTDLGEDEQHLQRWLDGDHHGEMEYMARHGTKRTRPAELEPGTQRVISVRMDYIPPGTANAWDVLGDAEAGYVSRYALGRDYHKLMRQRLQKLAERIHGVVGDFGYRAYVDSAPVLEKALARNAGLGWIGKHTVLINRHAGSYFFLGELYTDLPLPVDEPASAHCGSCTRCIEVCPTQAILGPYRLDAKRCISYLTIELKGSIPEELRTPMGNRIFGCDDCQLVCPWNKFAQMTAEPDFAPRHSLDGAKLVELFAWSEEEFLKRTEGMAIRRTGYEGWLRNIAVALGNAPKSAAVIAALAARADHPSAVVREHVAWALAKQRS

SEQ ID NO: 80391 - protein, 378 aa, unidentified
  source 1..378: note = Rhodanobacter denitrificans
  REGION 1..378: note = tr|A0A2W5MX30|A0A2W5MX30_9GAMM Epoxyqueuosine reductase OS=Rhodanobacter denitrificans OX=666685 GN=queG; PE = 3 SV=1
MPAPDQPAIDFDALAREVRAWARELGFADVGISGTELGEDEAHLLAWLDAGHHGEMAYMASHSTKRSRPAELQPGTLRVISVRMDYLPAAARDGWDVLADAERGYVARYALGRDYHKLMRNRLQKLAERIEAAAGPFGYRAFVDSAPVLERALARNAGIGWIGKHTCLIDSRGGSWFFLGELFTDLPLPLDQPASAHCGTCTRCIEICPTQAILGPNRLDARRCIAYLTIESRGPIPLELRPLIGNRIFGCDDCQLICPWNKFATPTTSPDFAPRHRLDDARLVDLFAWSEAEFLQRTEGSPIRRTGYAGWLRNIAVALGNAPYSDETLCALQAREHDVSDLVREHVQWAIGEQRRKRDRGELRTCSAPASPSPARTA

SEQ ID NO: 80392 - protein, 357 aa, Rhodanobacter fulvus
  REGION 1..357: note = tr|I4VKF6|I4VKF6_9GAMM Epoxyqueuosine reductase; OS = Rhodanobacter fulvus Jip2 OX=1163408 GN=queG PE=3 SV=1
MSAADVPSTTDFAALARDIKHWARELGFANTGISGVDLDEDEQHLQRWLDEGHHGEMDYMARHGSKRTRPAELEPGTQRVISVRMDYIPPGTANAWEVLGDAQAGYVSRYALGRDYHKLMRSRLQKLAERIQGVVGDFGYRAYVDSAPVMEKALARNAGLGWIGKHTVLINRRAGSYFFLGELYTDLPLPVDPPASAHCGTCTRCIDVCPTQAILGPYQLDAKRCISYLTIELKGSIPEDLRAPMGNRIFGCDDCQLVCPWNKFAQETSEPDFAPRHSLDGAKLVELFAWTEQEFLKRTEGMAIRRTGYEGWLRNIAVALGNAPRSTEVVEALNARADHPSPVVREHVAWALARQRG

SEQ ID NO: 80393 - protein, 359 aa, unidentified
  source 1..359: note = Rhodanobacter glycinis
  REGION 1..359: note = tr|A0A502BYB0|A0A502BYB0_9GAMM Epoxyqueuosine reductase OS=Rhodanobacter glycinis OX=582702 GN=queG PE=3; SV = 1
MSSTGIRSTPDYTALARDIKRWANELGFADAGISGTDLGEDEQHLERWLGHGHHGEMEYMARHGTRRARPAELEPGTQRVISVRMDYIPPGTANAWSVLQDTEAGYVSRYALGRDYHKLMRNRLQKLAERIHAVVGDFGYRAYVDSAPVLEKALARNAGLGWIGKHTVLINRHAGSYFFLGELYTDLPLPVDEPASAHCGSCSRCIEICPTQAILGPYRLDAKRCISYLTIELRGSIPEDLRAPMGNRIFGCDDCQLVCPWNKFAQATAEPDFAPRHSLDGAKLIDLFAWSEEEFLKRTEGMAIRRTGYEGWLRNIAVALGNAPPSTSVREALGARADHPSAIVREHVAWALAKQQNPA

SEQ ID NO: 80394 - protein, 359 aa, unidentified
  source 1..359: note = Rhodanobacter glycinis
  REGION 1..359: note = tr|A0A5B9E136|A0A5B9E136_9GAMM Epoxyqueuosine reductase OS=Rhodanobacter glycinis OX=582702 GN=queG PE=3; SV = 1
MSTVPAIDYNALARDIKQWARELGFAEAGISGVTLAPDETHLQDWLDAGHHGEMEYMARHGTKRSRPDELEPGTQRVISVRMDYIPPGTRNAWEVIGDGDAGYVSRYALGRDYHKLMRNRLQKLAARIQAEVGDFGYRAYVDSAPVLEKALARNAGLGWIGKHTVLINRHAGSYFFLGELYTDLPLPVDVPATAHCGTCTRCIDVCPTGAILGPNKLDARRCISFLTIELKGSIPEELRAPMGNRIFGCDDCQLVCPWNKFAQEAVEPDFAPRHSLDGAKLLELFAWSEAEFLKRTEGMAIRRTGYEGWLRNIAVALGNAPHSQATIDALNARADDASPVVREHVAWALQRQAEKETGA

SEQ ID NO: 80395 - protein, 365 aa, Rhodanobacter lindaniclasticus
  REGION 1..365: note = tr|A0A4S3KIF7|A0A4S3KIF7_9GAMM Epoxyqueuosine reductase OS=Rhodanobacter lindaniclasticus OX=75310; GN = queG PE=3 SV=1
MRMSVPSLSAPPDYAALARDIKRWARELGFADTGISGVDLAEDEQHLQHWLDAGRHGEMEYMARHGTKRTRPAELEPGTQRVISVRMDYTPPGTANAWDVLGDGEAGYVSRYALGRDYHKLMRNRLQKLAERIRAVVGEFGHRAYVDSAPVMEKALARNSGLGWIGKHTVLINRHAGSYFFLGELYTDLPLPVDPPASAHCGTCTRCIEVCPTQAITGPYQLDAKRCISYLTIELKGSIPEELRAPMGNRIFGCDDCQLVCPWNKFAQVATEADFAPRHSLDGAKLVELFGWSEEEFLKRTEGMAIRRTGYEGWLRNIAVALGNAPPGDAIDAALAGRADDASPLVREHVAWAQAQQAARKRRGG

SEQ ID NO: 80396 - protein, 356 aa, Rhodanobacter sp.
  REGION 1..356: note = tr|A0A522LBY3|A0A522LBY3_9GAMM Epoxyqueuosine reductase OS=Rhodanobacter sp. OX=1883446 GN=queG PE=3 SV=1
MAHISYPQLALDIKRWARELGFAETGITDTDLSQDAEGLKQYLAAGHHGTMRWLQDRFDLKTHPEALHPGTIRVISVRMNYAQADIKGAWDIVRNSELGYISRYALGRDYHKLVRKQLQKLADRITQEIGPFNYRAFCDSAPVMEKSLAQKAGLGWRGKHTLTLSRSGGSYFFLGELFTDLPLPIDHPVENYCGTCTRCIDACPTGAIIAPYQLDAKRCISYLTIEYKGSIDPELRPLMGNRIFGCDDCQLACPWNKFAQVTMENDFLPRHHLDGTKLVELFAWDEDTYLKKTEGMSIRRAGYESWLRNIAIALGNAKHSDEVVAALQTRTEHPSPIVREHVAWALAEQAKKAAAT

SEQ ID NO: 80397 - protein, 365 aa, Rhodanobacter sp.
  REGION 1..365: note = tr|A0A4R8LA22|A0A4R8LA22_9GAMM Epoxyqueuosine reductase OS=Rhodanobacter sp. TND4FH1 OX=1907401 GN=queG; PE = 3 SV=1
MRRTYNRQMFRTDSPSAPDYTVLARDIKRWARELGFADTGISGTQLGDDEQHLLSWLDHGHHGEMEYMARHGTKRTRPAELEPGTQRVISVRMDYIPPGTANAWAVLNDAEAGYVSRYALGRDYHKLMRSRLQKLAERIQGVVGDFGYRAYVDSAPVLEKALARNAGMGWIGKHTVLINRNAGSYFFLGELYTDLPLPVDEPASAHCGTCARCIEICPTQAILGPYRLDAKRCISYLTIELKGSIPEDLRAPMGNRIFGCDDCQLVCPWNKFAQTTTEPDFAPRHSLDGAKLVELFAWSEDEFLKRTEGMAIRRTGYEGWLRNIAVALGNAPGSTAVIEALQARADHPSEIVREHVAWALAKQRH

SEQ ID NO: 80398 - protein, 364 aa, Rhodanobacter spathiphylli
  REGION 1..364: note = tr|I4W419|I4W419_9GAMM Epoxyqueuosine reductase; OS = Rhodanobacter spathiphylli B39 OX=1163407 GN=queG PE=3; SV = 1
MRRTYNSRMSDIDTRSPDYAALARDIKCWARELGFADTGISGTRLADDEKHLLSWLDHGHHGEMEYMARHGTKRARPAELEPGTQRVISVRMDYIPPGTANAWGVLKDAEAGYVSRYALGRDYHKLMRGRLQKLAERIHGAIGDFGYRAYVDSAPVLEKALARNAGMGWIGKHTVLINRNAGSYFFLGELYTDLPLPVDEPASAHCGSCTRCIEVCPTQAIIGPYQLDAKRCISYLTIELKGSIPEELRTPMGNRIFGCDDCQLVCPWNKFAQTTTEADFAPRHSLDGARLVELFAWSEDEFLKRTEGMAIRRTGYEGWLRNIAVALGNAPQSAAAIESLNARADDPSPVVREHVAWALAKQRR

SEQ ID NO: 80399 - protein, 365 aa, Rhodanobacter thiooxydans
  REGION 1..365: note = tr|A0A154QCQ0|A0A154QCQ0_9GAMM Epoxyqueuosine reductase OS=Rhodanobacter thiooxydans OX=416169 GN=queG; PE = 3 SV=1
MQRIYNDRMSSTETHATPDYATLARDIKRWAIELGFADAAISGTDLGEDEQHLQRWLDGGHHGEMEYMARHGSKRTRPAELEPGTQRVISVRIDYIPPGTANAWDVLGDAEAGYVSRYALGRDYHKLMRGRLQKLAERIHGVVGDFGYRAYVDSAPVLEKALARNAGLGWIGKHTVLINRHAGSYFFLGELYTDLPLPLDEPASAHCGTCTRCIEVCPTQAILGPYRLDAKRCISYLTIELKGSIPEELRTPMGNRIFGCDDCQLVCPWNKFAQVATEPDFAPRHSLDGAKLVELFAWSEDEFLKRTEGMAIRRTGYEGWLRNIAVALGNAPKSAAAIEALESRADHPSAIVREHVAWALAKQRH

SEQ ID NO: 80400 - protein, 363 aa, unidentified
  source 1..363: note = Rhodanobacteraceae bacterium
  REGION 1..363: note = tr|A0A522R416|A0A522R416_9GAMM Epoxyqueuosine reductase OS=Rhodanobacteraceae bacterium OX=2052182; GN = queG PE=3 SV=1
MQSGSEPTARDIDFAVLARRIKAWGVELGFAKVGITGVDLGEDEAHLHEWLRKGRHGSMDYMQHHGNKRSRPQELQPGTVRVVSVRMDYFPRGMDAGATWRTLGDGERAYIARYALGRDYHKLIRGRLQKLADRIAAEIGPFGYRAFTDSAPVLEKALARNAGLGWIGKHTLLLDRDAGSWFFLGELYTDLPLPMDEPATAHCGTCTRCMDVCPTRAITGPYQLDARRCIAYLTIESKDAIPEELRPLMGNRVFGCDDCQLVCPWNKFAQPTHEEDFAPRHGLDGTKLAELFAWTEEEFLKKTEGMPIRRAGYEGFSRNVAVALGNAPPSPEVIDALNARAHDPSPLVREHVAWALARHAHHG

SEQ ID NO: 80401 - protein, 362 aa, unidentified
  source 1..362: note = Rhodanobacteraceae bacterium
  REGION 1..362: note = tr|A0A2Z6E5Q9|A0A2Z6E5Q9_9GAMM Epoxyqueuosine reductase OS=Rhodanobacteraceae bacterium Dysh456; OX = 2010829 GN=queG PE=3 SV=1
MAAMSAMPPDYAALARDIKQWARELGFAAAGISDVELEEDERHLEGWLAEGLHGAMDYMARHGRKRSRPAELQPGTRRVISVRMDYLPAQARDPWQVLGDGELAYVARYALGRDYHKLMRSRLQRLAERIQAAIGPFGHRVFVDSAPVLEKALARHAGLGWIGKHTLLIDRRAGSYFFLGELYTDLPLPVDAPVGAHCGSCRRCLDVCPTQAILAPYRLDARRCIAYLTIEFKGSIPKELRAPIGNRIFGCDDCQLVCPWNKFAQPSVERDFAPRHGLDGARLIELFAWSEETFLHRTEGMAIRRAGYEGWLRNIAVALGNAPASAAVRAALATRMEHPSALVREHVAWALERQQAAARAAA

SEQ ID NO: 80402 - protein, 358 aa, Rhodobaca barguzinensis
  REGION 1..358: note = tr|A0A2K8KGG1|A0A2K8KGG1_9RHOB Epoxyqueuosine reductase OS=Rhodobaca barguzinensis OX=441209 GN=queG; PE = 3 SV=1
MSADLKTALLTEARAVGFDACAITRPDAIPQAPERLRSFVDLGRHGQMAWMAERMSWRANPTALWPQARSIIMLAESYTPDYNPLDLLAQRERGVISAYALGRDYHDVVKKRLKRLGRWLIDQAGGEIKVFVDTAPVMEKPLAAAAGLGWQGKHTNLLSRDLGNWVFLGAIFTTHDLPPDAPAQENCGSCRACLDICPTDAFPAPFQLDARRCISYLTIEHHGPVPLDLREKMGNRIYGCDDCLAVCPWNKFARSASEAKYAAREGMVAPDLAELAGLDDAGFRAHFSGSPIKRIGRNRFVRNVLYAIGNSGAARLLPVAQALTDDPDPTVAEAARWAAERLQTRSDAAPGAPARPRS

SEQ ID NO: 80403 - protein, 292 aa, Rhodobacter aestuarii
  REGION 1..292: note = tr|A0A1N7MV40|A0A1N7MV40_9RHOB Epoxyqueuosine reductase OS=Rhodobacter aestuarii OX=453582; GN = SAMN05421580_106213 PE=4 SV=1
MHWRADPAALWPEARSVIMLAESYSPETDPRAATKVKDGGAISVYAQGKDYHDLVKRRLKRLGRWLIEQEPCEIKVFVDTAPVMEKPLAQAAGLGWQGKHTNLLARDLGNWVFLGALFTTLELPPDAPEVSHCGSCTACLDACPTGAFPAPYQIDARRCISYLTIEHHGPVAPDLRPLMGNRIYGCDDCLAACPWNKFAVAAQDIGYAHRHGTPPLAELLALDDAAFRARFAGSPIKRIGRNRMVRNALYAAGNSGLAALLPPVQALLDDPDPTVAEAARWAHGCLAGKTPQ

SEQ ID NO: 80404 - protein, 343 aa, Rhodobacter azotoformans
  REGION 1..343: note = tr|A0A2T5K8L0|A0A2T5K8L0_9RHOB Epoxyqueuosine reductase OS=Rhodobacter azotoformans OX=43057 GN=queG; PE = 3 SV=1
MNGDETLRGRLEGRAREEGFARLGICAPDATPETAGRLRAFLAAGRHGQMGWMEEREAWRGSAAALWPEARSVIMLAEPYTPAEDPRRVLEERGRGAVSVYAQGRDYHDLVKKRLKRLGRWLVAETGCEIKVFVDTAPVMEKPLAQAAGLGWQGKHTNLLSRELGNWFFLGAIFTTLELPRDAAERDHCGSCRACLDACPTGAFPAPFQLDARRCISYLTIEHRGPVAEELRERMGNRIYGCDDCLAACPWNKFAVAASEIGYAARVGAPPLAELAALDDAEFRLRFAGSPVKRIGRDRFVRNVLYAIGNSGDPALRPAAEALLADPDPAVAEAAAWALRRLA

SEQ ID NO: 80405 - protein, 356 aa, Rhodobacter blasticus
  REGION 1..356: note = tr|A0A2T4JEI0|A0A2T4JEI0_RHOBL tRNA epoxyqueuosine(34) reductase QueG OS=Rhodobacter blasticus DSM 2131 OX=1188250 GN=queG PE=4 SV=1
MKRRLHDQALAEGFSAMGICRPDAIPQAAGQLRAFLAQGRHGQMQWMAEREGWRGNPAALWPEARSVIMLAELYTPEGDPLAGHGQAGRGVVSAYAQGKDYHDLVKRRLKRLGRWLIDQAARQGTACEIKVFVDTAPVMEKPLAQAAGLGWQGKHTNLLSRDLGNWFFLGAIFTTLELEPDAPEISHCGSCTGCLDACPTAAFPAPYQLDARRCISYLTIEHDGPVAPELRALMGNRVYGCDDCLAACPWNKFARAAREIGYAPRVGLPELADLAGLDDAAFRARFAGSPVKRIGRNRMVRNALYAIGNSGEAALAPVAAGLTGDADPTVAEAARWALGQLSQPQDARVGFAGESC

SEQ ID NO: 80406 - protein, 338 aa, Rhodobacter capsulatus
  REGION 1..338: note = tr|A0A4U1JP05|A0A4U1JP05_RHOCA tRNA epoxyqueuosine(34) reductase QueG OS=Rhodobacter capsulatus OX=1061 GN=queG PE=4 SV=1
MKSRLIEEALAVGFAKARITRPDACPDLPDRLSAFVAAGHHGQMSWMAERMEWRGNPAALWPEARSVILLAESYTPEVDPREATRLPGHGAISVYAQGKDYHDLVKRRLKRLGRWLIENSACEIKVFVDTAPVMEKPLSQAAGLGWQGKHTNLLARDLGNWVFLGAIFTTLELPPDTPEISHCGSCTACLDACPTGAFVAPYQMDARRCISYLTIEHRGPVDPALRPGLGNRIYGCDDCLAACPWNKFAATARDIGYTAKQGTPALTEILSLDDAAFRARFAGSPVKRIGRDRMIRNALYALGNSARPELAAAARPHLDDPDPAVAEAAAWALARLGL

SEQ ID NO: 80407 - protein, 338 aa, Rhodobacter capsulatus
  REGION 1..338: note = tr|A0A0E2PAP7|A0A0E2PAP7_RHOCA 4Fe-4S ferredoxin; OS = Rhodobacter capsulatus Y262 OX=1415161 GN=U715_15355; PE = 4 SV=1
MKTRLIEEARAIGFAKARITRPDACPDLPDRLSAFVAAGYHGQMSWMAERMEWRGNPAALWPEARSVILLAESYTPEVDPREATRQPGHGAISVYAQGKDYHDLVKRRLKRLGRWLIENSPCEIKVFVDTAPVMEKPLSQAAGLGWQGKHTNLLARDLGNWVFLGAIFTTLDLPPDAPEISHCGSCTACLDACPTEAFVAPYQMDARRCISYLTIEHRGPVDPELRPGLGNRIYGCDDCLAACPWNKFAATARDIGYAAKQGTPALTEILALDDAAFRARFAGSPVKRIGRDRMIRNALYALGNSGRRDLAAAARPHLDDPDPAVAEAAAWALARLGL

SEQ ID NO: 80408 - protein, 348 aa, Rhodobacter johrii
  REGION 1..348: note = tr|A0A330HCM9|A0A330HCM9_9RHOB Epoxyqueuosine reductase OS=Rhodobacter johrii OX=445629 GN=queG PE=3 SV=1
MKADETLRERLEARARAEGFARLGICAPDAAPETAGRLRAFLAAGRQGQMGWMEEREAWRGSAAALWPEARSIIMLAELYTPEEDPRQVLEARGHGAVSVYAQGRDYHDLVKKRLKRLGRWLVAEAGCEIKVFVDTAPVMEKPLAQAAGLGWQGKHTNLLSRELGNWFFLGAIFTTLELPRDAPGREHCGSCRACLDACPTGAFPAPFQLDARRCISYLTIEHRGPVEEELRGRMGNRIYGCDDCLAACPWNKFAQAASEIGYAARVGAPPLEELAGLDEAGFRARFSGSPIKRIGRDRFLRNVLYAIGNSGDRRLRAAAAPHVDDPDGAVADAARWALARLDENSPQ

SEQ ID NO: 80409 - protein, 349 aa, Rhodobacter maris
  REGION 1..349: note = tr|A0A285TBA0|A0A285TBA0_9RHOB Epoxyqueuosine reductase OS=Rhodobacter maris OX=446682 GN=queG PE=3 SV=1
MEAPLERLKTRLIAQALAEGFAKARITRPDSRPDLPADLAGFVAAGHHGQMGWMAERMAWRANPAALWPEARSVIMLAENYTPEADPRAATAVKEAGAISVYAQGKDYHDLVKRRLKRLGRWLIAEEPCEIKVFVDTAPVMEKPLAEAAGLGWQGKHTNLLARDLGNWFFLGALFTTLELPPDAPDVSHCGSCTACLDACPTGAFPAPYRIDARRCISYLTIEHRGPVEPALRPLLGNRIYGCDDCLAACPWNKFAVTARDIGYATRHGTPPLAELLALDDTAFRARFASSPIKRIGRDRLVRNALYAAGNSGLPDLLPFARALTADPEPSVAEAASWACARLATIGHD

SEQ ID NO: 80410 - protein, 348 aa, Rhodobacter megalophilus
  REGION 1..348: note = tr|A0A239G7B4|A0A239G7B4_9RHOB Epoxyqueuosine reductase OS=Rhodobacter megalophilus OX=418630 GN=queG; PE = 3 SV=1
MKAYETLRERLEARARAEGFARLGICAPDATPETAGRLRAFLAAGRQGQMGWMEEREAWRGSAAALWPEARSVIMLAELYTPEEDPRQVLEARGHGAVSVYAQGRDYHDLVKKRLKRLGRWLVAETGCEIKVFVDTAPVMEKPLAQAAGLGWQGKHTNLLSRELGNWFFLGAIFTTLELPRDAPGREHCGSCRACLDACPTGAFPAPFQLDARRCISYLTIEHRGPVEEELRARMGNRIYGCDDCLAACPWNKFAQAASEIGYAARVGAPPLAELAGLDEAGFRARFSGSPIKRIGRDRFLRNVLYAIGNSGDRRLRAAAAPHVDDPDMAVADAARWALARLDEKSPQ

SEQ ID NO: 80411 - protein, 343 aa, Rhodobacter ovatus
  REGION 1..343: note = tr|A0A285CZ69|A0A285CZ69_9RHOB Epoxyqueuosine reductase OS=Rhodobacter ovatus OX=439529; GN = SAMN05878503_11248 PE=4 SV=1
MKGPEGLKQRLVARALEEGFSGVGICAPDAVPEAAGRLRAFLDAGRHGQMLWMEDREAWRGSAAALWPDARSVVMLAEVYTPEADPRAVLTQRDRGAISVYAQGKDYHDLVKRRLKRLGRWLVAEAGCEIKVFVDTAPVMEKPLAQAAGLGWQGKHTNLLSRELGNWFFLGALFTTLDLPRDRAGRERCGSCRACLDACPTGAFPAPFQLDARRCISYLTIEHRGPVDEALRGLLGNRIYGCDDCLAACPWNKFAVDAREIGYAVRVGAPPLAALAGLDDAAFRVQFAGSPIKRIGRDRFVRNVLYAIGNSGEAGLRPVAAALREDPDPAVADAARWAMARLE

SEQ ID NO: 80412 - protein, 343 aa, Rhodobacter sp.
  REGION 1..343: note = tr|A0A3D3JBP7|A0A3D3JBP7_9RHOB tRNA epoxyqueuosine(34) reductase QueG OS=Rhodobacter sp.; OX = 1062 GN=queG PE=4 SV=1
MTSVFKDLLIARAKLEGFSKLGICAPDSTPKAAPRLKAFLDDGRHGQMAWMDERVAWRGSAQALWPEARSVIMLAEPYTPNYNPLDVLKNRDLAAISAYAQGRDYHDLVKRRLKRLGGWIVGQTAAEIKVFVDTAPVMEKPLAEAAGLGWQGKHTNLLARDLGNWFFLGAIFTTLDLPKDPPEVSHCGSCTACLDICPTHAFPAPYQLDARRCISYLTIEHRGPIAIELREKMGNRIYGCDDCLAVCPWNKYAQSAHDIGYDVRVGAPPLRELALLDDVAFRSRFSGSPIKRIGRDRFLRNVLYAIGNSGEKNLQSALPAHFKDPDPTIVDAARWAMGRLDKA

SEQ ID NO: 80413 - protein, 345 aa, Rhodobacter sp.
  REGION 1..345: note = tr|C8S5E0|C8S5E0_9RHOB 4Fe-4S ferredoxin-type domain-containing protein OS=Rhodobacter sp. SW2 OX=371731; GN = Rsw2DRAFT_3269 PE=4 SV=1
MKVQGFGDLKQRLVARALEEGFSKVGICAPGAVPQAAGRLAEWLAAGHHGQMGWMADRAEWRGSAAALWPAARSVVMLAEVYTPDCDPLAVLGQRDRGAVSVYAQGKDYHDLVKRRLKRLGGWFVGVSGAEIKVFVDTAPVMEKPLAQAAGLGWQGKHTNLVARDLGSWFFLGAIFTTAELQPDAAEADHCGSCSACLDICPTRAFPAPYQLDARRCISYLTIEHRGPVDPALRGMLGNRIYGCDDCLAVCPWNKFAGAAREIGYAAKVGAPMLADLVVLDDAGFRALFAGSPVKRIGRDRFVRNVLYAMGNSGDKRLRAVAAGLQGDADAAVADAAVWAVARLS

SEQ ID NO: 80414 - protein, 348 aa, Rhodobacter sphaeroides
  REGION 1..348: note = tr|A0A3G6W767|A0A3G6W767_RHOSH Epoxyqueuosine reductase OS=Rhodobacter sphaeroides OX=1063 GN=queG PE=3; SV = 1
MKADETLRERLEARARAEGFARLGICAPDATPETAGRLRAFLAAGRQGQMGWMEEREAWRGSAAALWPEARSVIMLAELYTPEEDPRQLLEARGHGAVSVYAQGRDYHDLVKKRLKRLGRWLVAETGCEIKVFVDTAPVMEKPLAQAAGLGWQGKHTNLLSRELGNWFFLGAIFTTLELPRDAPGREHCGSCRACLDACPTGAFPAPFQLDARRCISYLTIEHRGPVEEELRARMGNRIYGCDDCLAACPWNKFAQAASEIGYAARVGAPPLAELAGLDEAGFRARFSVSPIKRIGRDRFLRNVLYAIGNSGDRRLRAAAAPHVDDPDMAVADAARWALARLDEKSPQ

SEQ ID NO: 80415 - protein, 348 aa, Rhodobacter sphaeroides
  REGION 1..348: note = tr|A0A370XZB7|A0A370XZB7_RHOSH Epoxyqueuosine reductase OS=Rhodobacter sphaeroides f. sp. denitrificans; OX = 39723 GN=queG PE=3 SV=1
MKADETLRERLEARARAEGFARLGICAPDAAPETAGRLRAFLAAGRQGQMGWMEEREAWRGSAAALWPEARSIIMLAELYTPEEDPRQVLEARGHGVVSVYAQGRDYHDLVKKRLKRLGRWLVAEAGCEIKVFVDTAPVMEKPLAQAAGLGWQGKHTNLLSRELGNWFFLGAIFTTLELPRDAPGREHCGSCRACLDACPTGAFPAPFQLDARRCISYLTIEHRGPVEEELRGRMGNRIYGCDDCLAACPWNKFAQAASEIGYAARVGAPPLEELAGLDEAGFRARFSGSPIKRIGRDRFLRNVLYAIGNSGDRRLRAAAEPHVDDPDGAVADAARWALARLDEKSPQ

SEQ ID NO: 80416 - protein, 348 aa, Rhodobacter veldkampii
  REGION 1..348: note = tr|A0A2T4JLD5|A0A2T4JLD5_9RHOB Epoxyqueuosine reductase OS=Rhodobacter veldkampii DSM 11550 OX=1185920; GN = queG PE=3 SV=1
MMAEMKDRLVRRALEEGFYKVRVCRPDAIPDAAARLAAFVAAGRHGQMGWMTERMGWRGDPVALWPEARSVIMLAEVYSPGFDPMAVLTQRDRGAVSVYAQGKDYHDLVKRRLKRLGRWLIDEAGGEIKVFVDTAPVMEKPLAQAAGLGWQGKHTNLLARDLGSWFFLGAIFTTLDLPPDAPEVSHCGACTACLEACPTGAFPAPYQLDARRCISYLTIEHRGPVDSELRGLMGNRIYGCDDCLAVCPWNKFAQAAREIGYAPREAGAPALADLAGLDDAGFRARFAGSPIKRIGRDRMVRNVLYAIGNSGIPALRAVAEGLCTDPDPAVADAACWAVARLSSGTGAR

SEQ ID NO: 80417 - protein, 362 aa, Rhodobacter vinaykumarii
  REGION 1..362: note = tr|A0A1N7MNV8|A0A1N7MNV8_9RHOB Epoxyqueuosine reductase OS=Rhodobacter vinaykumarii OX=407234 GN=queG; PE = 3 SV=1
MRSLTSDLAARLKAQALAEGFTAARLTTPDAIPHADAALRAFVAAGYHGQMRWMEDRMNWRGNPAALWPEARSILMLAESYSPAEDPRAVTACPDLGAVSVYARGRDYHDLVKKRLKRLGRWLIAEAGGEIKVFVDTAPVMEKPLAQAAGLGWQGKHTNVVSREIGNWFFLGAIFTSLALPPDAPETDHCGSCRSCLDACPTAAFVAPGRMDARRCISYLTIEHRGPVDPDLRPALGNRIYGCDECLAACPWNKFAAPMTEPGYAPRADALLADAPRLADLVTLDEAAFRAAFSGSPIKRIGHARFLRNVLYAIGNSGQPALAPLAAAHRDADDRAVADAARWALARLGGPAYRAIPGASEA

SEQ ID NO: 80418 - protein, 345 aa, unidentified
  source 1..345: note = Rhodobacter viridis
  REGION 1..345: note = tr|A0A318TZ75|A0A318TZ75_9RHOB Epoxyqueuosine reductase OS=Rhodobacter viridis OX=1054202 GN=queG PE=3; SV = 1
MEAHLETLKTRLFEEALAVGFAKARITRPDACPDLPERLSAFVAAGYHGQMGWMAERMAWRGNPAALWPEARSVIMLAESYSPEVDPRDATAQPECGAISVYAQGKDYHDLVKRRLKRLGRWLIEQSPCEIKVFVDTAPVMEKPLAQAAGLGWQGKHTNLLARDLGNWVFLGAIFTTLELPPDAPEISHCGSCTACLDACPTGAFPAPYRLDARRCISYLTIEHKGPVDPALRPGLGNRIYGCDDCLAACPWNKFAVAAQDIGYAAKQGTPELTEILALDDAAFRARFAGSPVKRIGRDRMIRNALYALGNSGRPDLAEAARPHLTDPDPAVAEAAAWALARLAL

SEQ ID NO: 80419 - protein, 384 aa, unidentified
  source 1..384: note = Rhodobacteraceae bacterium
  REGION 1..384: note = tr|A0A353V176|A0A353V176_9RHOB Epoxyqueuosine reductase OS=Rhodobacteraceae bacterium OX=1904441 GN=queG; PE = 3 SV=1
MVCADQVPPVLPALAGGSDPGLSATNPLCGSRLLTGAEAAALTARLKARARAEGFAAAGICAPDAIPRAPARLARFLALGWHGQMGWMERRADWRGDPRVLWAEARSVIMLADLYTPDGDPLATLGQADRATISVYARGRDYHDVIKKRLKRLGRWLIEQAPGARIKVFVDTAPLMEKPLAQAAGLGWQGKHTNLLARDLGNWFFLGAILTTLELPRDDPAEAHCGRCRACLDICPTDAFPAPFTLDARRCISYLTIEHRGPVDPALRPALGNRIYGCDDCLAVCPWNKFAQSAQEAKYTARDDLRAPHLAALAGLDDAGFGARFAGSPIKRIGRDRFLRNVLYAIGNSADPTLGAAAAPHCDDPDPAVADAARWALNRLRATA

SEQ ID NO: 80420 - protein, 347 aa, unidentified
  source 1..347: note = Rhodobacteraceae bacterium
  REGION 1..347: note = tr|A0A2V1P4Z2|A0A2V1P4Z2_9RHOB Epoxyqueuosine reductase OS=Rhodobacteraceae bacterium WDS4C29 OX=1914409; GN = queG PE=3 SV=1
MADLKARLIERARAEGFAKVGVCRPDAVPEMAARLDRFVAEGRHGQMGWMAERMGWRGDPSALWPEARSVIMLAEPYTPDHDPLEVLTQRDRAAISVYAQNRDYHDIVKKRLKRVGRWLVEEEGCEIKVFVDTAPVMEKPLAQAAGLGWQGKHTNLLSRDLGNWFFLGAIFTTVALAPDDPGQENCGSCTACLDICPTDAFPAPFQLDARRCISYLTIEHKGPVDEELRPLMGNRIYGCDDCLAICPWNKFAQQATEMRYVGREDLRGPKLAELAKLDDAGFRTMFSGSPIKRIGRDRFVRNVAYAIGNSGDPTLLEAVRALCTDPDDTVADAAQWAVGRLTERRFE

SEQ ID NO: 80421 - protein, 352 aa, unidentified
  source 1..352: note = Rhodobacterales bacterium
  REGION 1..352: note = tr|A0A2P6G6Y4|A0A2P6G6Y4_9RHOB tRNA epoxyqueuosine(34) reductase QueG OS=Rhodobacterales bacterium OX=1948890 GN=queG PE=4 SV=1
  VARIANT 184: note = Xaa can be any naturally occurring amino acid
  VARIANT 234: note = Xaa can be any naturally occurring amino acid
  VARIANT 237: note = Xaa can be any naturally occurring amino acid
  VARIANT 241: note = Xaa can be any naturally occurring amino acid
  VARIANT 262: note = Xaa can be any naturally occurring amino acid
  VARIANT 271..273: note = Xaa can be any naturally occurring amino acid
  VARIANT 276: note = Xaa can be any naturally occurring amino acid
  VARIANT 281: note = Xaa can be any naturally occurring amino acid
  VARIANT 284: note = Xaa can be any naturally occurring amino acid
  VARIANT 288: note = Xaa can be any naturally occurring amino acid
  VARIANT 333: note = Xaa can be any naturally occurring amino acid
  VARIANT 347: note = Xaa can be any naturally occurring amino acid
MVIKPHKSLKQKISDVAHKEGLSDIGFTNPKLDPEEFKNFKDFINKGYHGQMYWLNNNIGWRENPKLMWEDVETIIVFAENYYKGGNPLADINIKDKANISIYARGDDYHNVLKKKLKAVASQIIKLVDKSEVKVFVDTAPIMEKNFAQKAGIGWQGKHTNVLSKKLGNWIFLGLIFTNIKIEXDNPEINHCGNCSRCLEVCPTNAFIAPYKLNAKKCISYLTIEHKGPVDIEXRSXLGNXIFGCDDCLAVCPWNKFSKKSXELKYSNNLXXXLDXNELAXLDXFQFXKLFRKSPIKRIGRNRFVRNVLYAIGNSGDLKFKNTLIKLTKDNDXTIVDAAYWAIREIXKNGKK

SEQ ID NO: 80422 - protein, 347 aa, unidentified
  source 1..347: note = Rhodobacterales bacterium
  REGION 1..347: note = tr|B6B5U3|B6B5U3_9RHOB Epoxyqueuosine reductase; OS = Rhodobacterales bacterium Y4I OX=439496 GN=queG PE=3; SV = 1
MKDGSGIKEKLVAQALAEGFVSCRICRPWDVPEVPGRLQAFLNAGYHGQMGWMAERTHWRGDPAQLWPEARSVIMLAESYTPEGDPMAVVGKADRGAVSVYARGKDYHDLVKKRLKRLARWLIAETGEDCEVKVFVDTAPVPEKALGQAAGLGWQGKHSNLVSRDWGNWAFLGSVFTTLDLPADMAEPDRCGSCRACLDSCPTDAFPAPYQVDARRCISYLTIEHKGPVAQELREKMGNRIYGCDDCLAACPWNKFAVAASDMRYAAREELKAPKLAELAVLDDAGFRAMFSGSPIKRIGRDRFVRNVLYAIGNSGRPELRETAQRLAEDPDPAVADAARWAVQRLA

SEQ ID NO: 80423 - protein, 388 aa, unidentified
  source 1..388: note = Rhodobiaceae bacterium
  REGION 1..388: note = tr|A0A2A4S3B7|A0A2A4S3B7_9RHIZ Epoxyqueuosine reductase OS=Rhodobiaceae bacterium OX=2026785 GN=queG; PE = 3 SV=1
  VARIANT 373: note = Xaa can be any naturally occurring amino acid
MSTKRPAKPKPPLTPELIKSMAREIGFDAIHIVRVEDVPDRTDKLQSWLGKGHHGVMEWMAETVERRGHPNALWPEARSVIVLGQNYGPDSDPLEVLNHPDHAAISVYARNRDYHDLIKKRLKRLARWLVEQCGADVKVFVDTAPVMEKPLAASAGLGWQGRHTNLVSREFGSWLFLGSIYTTVELPSDPPEVDHCGSCHACLDICPTKAFPAPYQIDARRCISYLTIEYKGHIPDEFRIPIGNRIYGCDDCLAVCPWNKFASKTDEVAFHPRESLIAPLLKELVGFDDAAFRTFFTVSPIKRIGRDRFTRNVLIAIGNSAEPDLLPHAQARLEDASPLVRAMAIWAVGRLASQAQIDQMLKGRENDPDPDVXSEWEKLKGRPLPAPH

SEQ ID NO: 80424 - protein, 369 aa, unidentified
  source 1..369: note = Rhodobiaceae bacterium
  REGION 1..369: note = tr|A0A2E9B7V8|A0A2E9B7V8_9RHIZ Epoxyqueuosine reductase OS=Rhodobiaceae bacterium OX=2026785 GN=queG; PE = 3 SV=1
MKAITKEVLQTKIEMLGFDDIGFTDITDIPDQKDSLEEYLKNGYHGDMIWLEKNKERRSHPSNIWQDAKSVIAVSKNYGPQDNPLHNIKETLKANISVYARADDYHELMKKSLKKLSIWLLNEYGIESKLFVDTAPIMEKPIAQIAGIGWQGKHSNLVSRKLGSWFFLGVILLPIKLEASSPELDHCGSCSSCIDICPTNAIVSPYKLDSRRCISYLTIEHKGHIPEEFRELIGNRIYGCDDCLAVCPWNKFASQTRDIQLKAKKILNMPDISFFLDFDYDAFNKFFKTSPIKRIGKDRFLRNVLIAAGNSGSQQISIKVKKFLRHESSIIRASAIWALKKIISKKEFQKLRKIYILEENDPLVVSEWG

SEQ ID NO: 80425 - protein, 382 aa, Rhodobium orientis
  REGION 1..382: note = tr|A0A327JSF3|A0A327JSF3_9RHIZ Epoxyqueuosine reductase OS=Rhodobium orientis OX=34017 GN=queG PE=3 SV=1
MPDKLRPALEARAKALGFDAVRIAPADIGETPGEHLADFVAAGHHGTMDWMAMTLDRRRSPRALWPEARSVVVLGLNYGPERDPREILEKPDRGAIAAYAGNRDYHDIVKGRLKQLAGWLASRADCDVKVFVDTAPVMEKPIAAHAGLGWQGKHTNLVSRDYGSWLFLGEIYTTLDLAPDPPLADHCGSCRACLDACPTGALPEPYRIDARLCISYLTIEMKGPIPRHLRPAIGNRIYGCDDCLAVCPWNKYASATREMKLAVRDDLEAPRLADLAALDDAAFRAFFSGSPAKRIGRDRFVRNVLIAIGNSGDTALLQSVRPLLADESPLVRGAAAWAFRRLAAPGAIETTRTQRLALETDTDVRAEWAAEKERERKEETGQ

SEQ ID NO: 80426 - protein, 324 aa, Rhodoblastus acidophilus
  REGION 1..324: note = tr|A0A212RZK8|A0A212RZK8_RHOAC Epoxyqueuosine reductase OS=Rhodoblastus acidophilus OX=1074; GN = SAMN06265338_109105 PE=4 SV=1
MDWLGERRDRRADPRKLWPDVRSIVMLGINYGPDLAPVEPNAGAISVYARNRDYHDVIKGKLKQLAGAFLAFARAQAGVEGEVKVFVDTAPVMEKPLAAAAGLGWQGKHTNLVSRQFGSWLFLGSIFTNLDLPADPPEADHCGKCRACVDACPTGALDSGKIDARLCVSYLTIETKGQIPAGLREKIGNRIYGCDDCLAVCPWNKFAQTAREAKFSARADLVAPPLAELAALDEAAFRQKFSGNPVKRIGHARFLRNVLLAIGNSGDGALAPLAKARLGHESALVRGMAVWALARLLPRDEFASLAAKNSDEPDPDVRSEWGTP

SEQ ID NO: 80427 - protein, 398 aa, Rhodoblastus sphagnicola
  REGION 1..398: note = tr|A0A2S6MZ47|A0A2S6MZ47_9RHIZ tRNA epoxyqueuosine(34) reductase QueG OS=Rhodoblastus sphagnicola OX=333368 GN=CCR94_19350 PE=4 SV=1
MVPAPEKPPEFSPAAGGSGAGRRGQSDLRGSGLLSFLRGEAARLGFDGCRVTKPDAIPHAPAALETFIAEGRHGDMDWLAERRDWRADPLKLWPEVRSVVMLAMNYGPEILPVPPRAGNISVYARHRDYHDVVKGKLKLLAGALLARAKILGVAGEVKVFVDTAPVMEKPLAAAAGLGWQGKHTNLVSRDFGSWLFLGSIFTTLDLASDAPETDHCGSCRACLDACPTGALDTGKIDANLCVSYLTIEAKGQIPRDLREKIGNRIYGCDDCLAVCPWNKFAQQAHEAKFRARADLVAPPLTKLATMDEGEFRAFFSGNPIKRVGSARFLRNVLLALGNSGDVSLAPLAMARLGHESALVRGMAVWALARLLPRDEFATLAAQNNEPDPSVRSEWGFYP

SEQ ID NO: 80428 - protein, 377 aa, Rhodococcus qingshengii
  REGION 1..377: note = tr|A0A4R5ZHI2|A0A4R5ZHI2_9NOCA tRNA epoxyqueuosine(34) reductase QueG OS=Rhodococcus qingshengii OX=334542 GN=queG PE=4 SV=1
MNIDQLKEEVIAYSKTIGIDKIGFTTADPFTELKNRLIRQQELGYQSGFEEPDIEKRVTPAMLLPEPRSIISIALAYPSKMKVRIEGRKGERRGFFSRASWGLDYHHILRDRLKKLEAFILEKVPEARLKSMVDTGELSDRAVAVRAGIGWSGKNCAVMTPEFGSYVYIGEMITSLPFAADTPMEDQCGSCTACIDACPTGALVQGGQINAQRCIAFLTQTKAVIPEEFRDKIGNRVYGCDSCQTSCPVNKGKDFHFHEEMEADPETAKPLLRPMLKMSNREFKNRFGPVAGSWRGKRPIQRNAIIALAHFKDESAIPDLLDVLENETSSVLKETAAWALGKIGSMEAVEALEKAAEKEDDLVVKSEINKSLLKLKN

SEQ ID NO: 80429 - protein, 438 aa, Rhodococcus sp.
  REGION 1..438: note = tr|A0A1Y5LF69|A0A1Y5LF69_9NOCA Uncharacterized protein OS=Rhodococcus sp. NCIMB 12038 OX=933800; GN = CA951_16295 PE=4 SV=1
MAGEFTRNGLQRAALKWGHQLSTLLYPVARKTLPYRPKMWWIPRLPIWAHPRRAPHGRPWSTPVPAPADELRTGPGVQLIPEAQQRAFDEAPLHDFIRLHPEMRGEHSPTGHMWISLLSTSPRVQGAARRRAQANRRPDATAPAARVTPAALTEAMKREAARLGLAAVGVTAYDIKCNYAEYHGLAVGDTIIVGIVEQNFDSTQMCPSLRSEKAALSAYAGLEDRMRLLADWIREQGYAARAEGFVGESMVIPYAVQAGLGQLGLNGQLLTPNAGSRCRIEVMSTDAPFLHDTPVDFGIEGVCDKCQICVRRCPAGAIPAIRKESRGVVKAKLNTKRCLPVMGKTAGCSVCMKVCPVQRYGLPAVLQEFEATGRVLGKDTDDLEGFDWPLDGRHYGPGERPRLAPEVFETPGFEFDPDRKVPLDWVDPTGTNTEALGY

SEQ ID NO: 80430 - protein, 438 aa, Rhodococcus sp.
  REGION 1..438: note = tr|A0A507SDT7|A0A507SDT7_9NOCA Uncharacterized protein OS=Rhodococcus sp. WS4 OX=1882742 GN=EEB14_10985; PE = 4 SV=1
MAGEFTRNGLQRAALKWGHQLSNLLYPIARKTLPYRPKMWWIPRLPIWAHPRRAPHGRPWSTPIPAPADELRTGPGVQLLPEAQQRAFDEAPLHDFIRLHPEMRGVHSPTGHMWISLLSTSPRVQGAARRRAQANLHPDATAPPARVTPAALTEAMKREAARLGLAAVGVTAYDIKYNYAEYHGLAVGDTIIVGIVEQNFDSTQMCPSLRSEKAALSAYAGLEDRMRLLADWIRAQGYAARAEGFVGESMVIPYAVQAGLGQLGLNGQLLTPDAGSRCRIEVMSTDAPFLHDAPVDFGIEGVCDKCQICVRRCPAGAIPAIRKESRGVVKAKLNTKRCLPVMGKTAGCSVCMKVCPVQRFGLPAVLQEFEATGRVLGKDTDDLEGFDWPLDGWHYGPGERPRLAPEVFETPGFEFDPGRKVPLDWVNPTGKNTEALGY

SEQ ID NO: 80431 - protein, 349 aa, unidentified
  source 1..349: note = Rhodocyclaceae bacterium
  REGION 1..349: note = tr|A0A431MII3|A0A431MII3_9RHOO Epoxyqueuosine reductase OS=Rhodocyclaceae bacterium OX=1898103 GN=queG; PE = 3 SV=1
MHGDWISLAQQIKEWGLALGFDAISISERTLKDAEQGLEQWLAQGFHGEMDYMASHGSKRARPEELVPGTRSVICVRLNYRPSAANEAANLADGERAYISRYALGRDYHKVLRNRLQKLADRIASTVGPFGYRAFTDSAPVMEVALASQSGLGWRGKHTLLLTREAGSYFFLGEIYTDLPLPTDTLVADHCGTCNACIQSCPTGAIVAPYQVDARRCISYLTIELKGSIPEALRPQIGNRVYGCDDCQLCCPWNRFAPTTKEEDFAVRNGLDSATLVELFAWDEPQFNERLAGSAIRRIGHERWLRNIAVGLGNGPRIPVAIAALKGRLDHSSALVREHVAWALARLTG

SEQ ID NO: 80432 - protein, 353 aa, unidentified
  source 1..353: note = Rhodocyclaceae bacterium
  REGION 1..353: note = tr|A0A455RGL6|A0A455RGL6_9RHOO Epoxyqueuosine reductase OS=Rhodocyclaceae bacterium SHINM1 OX=1751046; GN = queG PE=3 SV=1
MHVLPDSTSLRQLIAAEAKALGFSDVRIGPARIPESSRAELDAWLAEGCHGSMAYMERHADLRKDPALLVNGAQNVICVRLPYWPAQATDADTQLRNTEGAYVSRYALGRDYHKVIRNRLQKLADALTKKFGSFNYRACTDSAPVMEVALASQAGLGWQGKHTLALNRTGSWYFLGELICDLPIEADPPIESHCGDCTRCIDSCPTGAITSAYKVDARRCISYLTIEHKGEIPEAFRKAIGNRIYGCDDCQLVCPWNRFTTDGDTEFAPRHNLDNASLLELYAWDETEFLNKMAGSAIRRIGFEQWQRNISVALGNATPTEPIINALNDKKAHASTLVKTHIEWALAQLTAPR

SEQ ID NO: 80433 - protein, 357 aa, unidentified
  source 1..357: note = Rhodocyclales bacterium
  REGION 1..357: note = tr|A0A383X5G5|A0A383X5G5_9RHOO Epoxyqueuosine reductase OS=Rhodocyclales bacterium OX=2072421 GN=queG; PE = 3 SV=1
MILGMQNIHSIDGVELAARIRQWGQELGFDAIGIASTALDAAETELQAWLAAGFHGEMDYMASHGTKRSRPAELVPDTVSIITARMNYLPQAAPMEAVLADGTRAAISRYALGRDYHKLLRARLQKLAERIAAEIGPFGHRVFTDSAPVQEVALAEQSGLGWRGKHTLLIHREAGSYFFLGEIYTDLPLPADRPQEEHCGSCRACLDVCPTQAIVAPFTVDARRCISYLTIELKGAIPEELRPLIGNRIYGCDDCQLACPWNRFARRTVETDFAVRHGLDSASLVELFAWTEAEFKSRLAGSAIYRIGHARWLRNIAVALGNAPSSPVIVAALESRRDHPSELVREHVSWALARHRA

SEQ ID NO: 80434 - protein, 362 aa, unidentified
  source 1..362: note = Rhodocyclales bacterium
  REGION 1..362: note = tr|A0A1G3HLK8|A0A1G3HLK8_9RHOO Epoxyqueuosine reductase OS=Rhodocyclales bacterium RIFCSPLOWO2_02_FULL_63_24 OX=1802018 GN=queG PE=3 SV=1
MHGGDQKNSAELKEDIRRWSRELGFDAVGFSGTRVDAAEANLMAWLAAGCHGEMDYMAAHVTDAGNMRALPTELMPGTRSIITVRMNYRPVAADSAAALADGERAFISRYALGRDYHKLLRVRLQQLADRITAEIGQFAYRVFTDSAPVMEIGLAQNSGLGWRGKHTLLLDREAGSYFFLGEIFTDLSLSPDTPVTDHCGTCSACIEACPTQAIVAPYRIDARRCISYLSIELKGSIPEPLRLPLGNRIYGCDDCQLACPWNRFAPLTRESDFAPRRDLDQARLVELFAWEEEDFNERLAGSPIRRIGYPRWLRNIAVALGNAPSNNEVIGALRSRANHASALVREHVAWALQRHGSVPQKA

SEQ ID NO: 80435 - protein, 365 aa, Rhodoferax antarcticus
  REGION 1..365: note = tr|A0A1Q8YE98|A0A1Q8YE98_9BURK Epoxyqueuosine reductase OS=Rhodoferax antarcticus ANT.BR OX=1111071; GN = queG PE=3 SV=1
MNNFRTHNGDDARVSNIQEWGLALGFSQISVSGVDLSSAEPGLSAWLAAGFHGDMAYMAAHGMKRARPAELVPGTLSVISARMDYLPATTPEGWQAVEFDRLQRPQQAIVSLYARGRDYHKVLRNRLQKLSDRIALEFGPLGYRVFTDSAPVLEVELAARSGQGWRGKHTLLLNRDAGSMFFLGEIFVDVALPPTPAVADHCGSCSACIDICPTQAIVAPYRVDARRCISYLTIEHAGPIPLELRPLMGNHIYGCDDCQLVCPWNKFARTSALPDFDARAGLADQSLAEVFAWTEAVFLNLTEGGPIRRIGHERWLRNVAVALGNALRGAANAEVRQALQSALQTCQTHPSALVREHVAWALAQA

SEQ ID NO: 80436 - protein, 365 aa, Rhodoferax fermentans
  REGION 1..365: note = tr|A0A1T1AYK3|A0A1T1AYK3_RHOFE Epoxyqueuosine reductase OS=Rhodoferax fermentans OX=28066 GN=queG PE=3; SV = 1
MNSFRTHNKGDDWVSRIRGWARELGFSQIGVTGVDLSSAEPGLSAWLEAGWHGQMAYMAAHGLKRARPAELVPGTLSVITARMDYLPSNTPVGWQRVELDRSNEPTQGIVSLYARGRDYHKVMRQRLQTLCEQMVMELGPLGYRVFTDSAPVLEVELASRSGLGWRGKHTLALNREAGSMAFLGEIFVDMALPPTEPVRSHCGSCSACLDVCPTQAIVAPYRLDARRCLSYLSIEHAGPIPEALRVPMGNRIYGCDDCQLVCPWNKFAQTSKLPDFDARQQLVEQPLVALFAWTEDAFLRHTEGSPIRRIGHERWLRNLAVALGNALRVASSDDQRQVLMAALHSRRAHPSELVREHVVWALAQA

SEQ ID NO: 80437 - protein, 349 aa, unidentified
  source 1..349: note = Rhodoferax ferrireducens
  REGION 1..349: note = tr|A0A1W9L0X5|A0A1W9L0X5_9BURK Epoxyqueuosine reductase OS=Rhodoferax ferrireducens OX=192843 GN=queG; PE = 3 SV=1
MRDWAQALGFSQIGVAGVDLSTAEPGLSAWLAAGFQGDMAYMAAHGLKRARPAELVPGTLSVITARLDYLPAATPDGWQVLELDRLNRADEATVSLYARGRDYHKVLRNRLQKLADQMTEAFGPLGYRVFTDSAPVLEAELATRSGLGWRGKHTLVLSRDAGSMYFLGELFIDVALPPTAPVTPHCGSCRACIDICPTQAIVAPYRLDARRCISYLTIEHAGPIPVELRPLMGNHIYGCDDCQLVCPWNKFAQTSCLPDFDARASCVNPSLAEVFAWTEDAFLRLTEGSPIRRIGHERWLRNVAVALGNALRVADASGSRQAITSALQGRVNHPSALVREHVAWALAQV

SEQ ID NO: 80438 - protein, 372 aa, unidentified
  source 1..372: note = Rhodoferax ferrireducens
  REGION 1..372: note = tr|Q21T93|Q21T93_RHOFT Epoxyqueuosine reductase; OS = Rhodoferax ferrireducens (strain ATCC BAA-621 / DSM 15236 / T118) OX=338969 GN=queG PE=3 SV=1
MTNFNIHAEASQWVSKIQAWARELGFSQIGVAGVDLSSSEQGLSTWLARGFHGDMAYMAAHGLKRARPAELVPGTVSVITVRMDYLPAATKPGWQAIEFDRLRRPREGIVSVYARGRDYHKVLRKRLQQLSERIALEMGPFGHRVFTDSAPVLEAELAARSGQGWRGKHTLVLSREAGSMFFLGEIYVDLALPTSAPVLGHCGSCSACIEVCPTQAIVAPQQLDARRCISYLTIEHAGPIPLELRPLIGNRIYGCDDCQLICPWNKFAQRSALPDFDERPGLGGSQMVTLFAWTEEDFLRLTEGSPIRRIGHERWLRNIAVALGNALRADPAADLVQALALRAEHPSALVREHVAWALESRLAVPLSIDPGA

SEQ ID NO: 80439 - protein, 365 aa, unidentified
  source 1..365: note = Rhodoferax koreense
  REGION 1..365: note = tr|A0A1P8K3P9|A0A1P8K3P9_9BURK Epoxyqueuosine reductase OS=Rhodoferax koreense OX=1842727 GN=queG PE=3; SV = 1
MFDSAQNDGLQLVSQIQLWARELGFSQIGVAPVDLSSAEAGLSAWLAQGFHGEMAYMATHGLKRARPAELVPGTVSVITARMNYLPRGTPPDWQAHEFARLQRPSEGIVSVYARGRDYHKVLRTRLQKLGERIAAHLGPMGFRAFTDSAPVLEAELASRSGQGWRGKHTLVLSRDAGSMFFLGEIYVDIALPPTAPVSDHCGSCQACIDVCPTQAILGPQRLDARRCISYLTIEHPGAIPLELRPLIGNRIYGCDDCQLVCPWNKFAQRAALPDFDERRGLSGQQLGALFAWTEEEFLRLTEGSPIRRIGHERWLRNVAVALGNALRMGNGGDGRAALQARAMHESPIVREHVAWALRQGAGQMA

SEQ ID NO: 80440 - protein, 370 aa, unidentified
  source 1..370: note = Rhodoferax saidenbachensis
  REGION 1..370: note = tr|A0A1P8KFV4|A0A1P8KFV4_9BURK Epoxyqueuosine reductase OS=Rhodoferax saidenbachensis OX=1484693 GN=queG; PE = 3 SV=1
MTINSTQFDGNQLVSQIQAWARELGFSQIGVADVDLSSAEPGLLAWLARGYHGDMAYMANHGLKRARPAELVPGTLSVITARMDYLPAATPTDWQGEELARLERPGEGIVSLYARGRDYHKVLRSRLQKLTDRIAAHIGPLGHRVFTDSAPVLEAELAARSGQGWRGKHTLLLNREAGSMFFLGEIYVDIALPTSSPVQEHCGTCNACISICPTQAILAPQRLDARRCISYLTIEHAGPIPLELRPLMGNRIYGCDDCQLVCPWNKFAQRSALADFDPREGLSGQQLGALLGWTEEEFLRRTEGSPIRRIGHARWLRNVAVALGNALRQGGGDALRRESLLAALGTRLEHADAVVREHVQWAMAQAPELE

SEQ ID NO: 80441 - protein, 357 aa, Rhodoferax sp.
  REGION 1..357: note = tr|A0A5C7T554|A0A5C7T554_9BURK Epoxyqueuosine reductase OS=Rhodoferax sp. OX=50421 GN=queG PE=3 SV=1
MRAWALELGFSQIGVAGVDLSSSEPGLLAWLDQGFHGDMHYMAAHGLKRARPMELVPGTVCVLTARMDYLPRGTAPDWAEQELARLQTPTQGVVSVYARGRDYHKVLRSRLQKLADKIAEVLGPVGHRVFTDSAPVLEAELAARSGQGWRGKHTLLLSREGGSMFFLGEIYLDFALPLSEPTSHHCGQCTACISACPTGAIVSPGKLDARRCISYLTIEHAGPIPEDLRPLLGNRIYGCDDCQLVCPWNKFAQPSALPDFDARAPVQPQDLLAFFAWTEAQFLAHTEGSPIRRIGHARWIRNVAVALGNALRQPTLDADVTQRIRQALQQRLQEADAVVAEHVQWALAQGPAQEEGL

SEQ ID NO: 80442 - protein, 306 aa, Rhodoferax sp.
  REGION 1..306: note = tr|A0A2U0YV97|A0A2U0YV97_9BURK Epoxyqueuosine reductase OS=Rhodoferax sp. YR267 OX=2135500; GN = C7516_102124 PE=4 SV=1
MAYMESHGLKRARPAELVPGTVSVITARMDYLPRSTPEGWQALEFDRLQRPGEGIVSVYARGRDYHKVLRARLQKLSDRIAAELGPLGYRVFTDSAPVLEAELATRSGQGWRGKHTLVLNREAGSMFFLGEIYVDRALPPTEATSGHCGSCSACIDICPTQAIIAPQRLDARRCISYLTIEHAGPIPLEFRPLIANRIYGCDDCQLACPWNKFAQRSALPDFDERRGLSGQQLGTLFGWTEDEFLRYTEGGPIRRIGHERWLRNVAVAMGNALRQQDDPALRQALQRRAQSASPLVREHIDWALGV

SEQ ID NO: 80443 - protein, 315 aa, unidentified
  source 1..315: note = Rhodohalobacter barkolensis
  REGION 1..315: note = tr|A0A2N0VJR2|A0A2N0VJR2_9BACT Epoxyqueuosine reductase OS=Rhodohalobacter barkolensis OX=2053187; GN = queG PE=3 SV=1
MDPLKNTIHIRAKALELGFDRCGFAKAGKLDEEAYRLEEWLNSGHHGNMNWMENYFDKRTDPTKLVPGAKSVVSVIAGYRFEENEQYDQNYKVPKISKYARGRDYHKLFKNRLKHLFRYSQDLIGDINGRIFVDSAPVLDRAWGRLSGNGWIGKNSMLMNKTHGSWFFIGEMILDVPFVYDAPETDHCGTCTKCIDACPTDAIYEPQKVDGSKCISYLTIEMKETMPKEFQEQLGEWMFGCDICQDVCPWNRKAEYGNYKDLKPRENVLYPADRKWSEITEKEFDDIFEGSAVRRATHKWFVRNAKLAEQNLKSK

SEQ ID NO: 80444 - protein, 318 aa, unidentified
  source 1..318: note = Rhodohalobacter sp.
  REGION 1..318: note = tr|A0A371QP61|A0A371QP61_9BACT Epoxyqueuosine reductase OS=Rhodohalobacter sp. SW132 OX=2293433 GN=queG; PE = 3 SV=1
MDPLVITHKVRQKARELGFDGCGFSRAGKLDKEARRLEQWLNEGRHGTMDWMENNFDKRIDPTRLVPGSKSVVSLLASYRFEKNELDDKINPGPKIAKYARGRDYHKTFKSRLKKLFRYTKEQSGGLEGRIFVDSAPVMDKAWAEKSGLGWMGKNGNMLNKDLGSWFLIGEMIVDIPFVYDAPVAEHCGSCTRCIDACPTNAIYEPYRIDSERCISYLTIELKDKIPESKKAGLGEWAFGCDICQDVCPWNRKADYSSVEDFTPREQVLRPPESKNWSEITPDEFDIVFEGTPIRRAKHKWFTRNAKIAEQNIISGSG

SEQ ID NO: 80445 - protein, 385 aa, unidentified
  source 1..385: note = Rhodomicrobium udaipurense
  REGION 1..385: note = tr|A0A037UV89|A0A037UV89_9RHIZ Epoxyqueuosine reductase OS=Rhodomicrobium udaipurense JA643 OX=858455; GN = queG PE=3 SV=1
MRISTSEHARTVAAGDNLSGFVKARALAEGFDTVGIADPASIGEAGEGLMGFLAAGFHGDMGWLEANADKRADPRVLWPEVRSVILVTLSYGPDADPRIARNDPSRGAVSVYAKGADYHDIIKAKLKAVARDFASIAGADVKVFVDTAPVMEKPLAQAAGLGWQGKHTNLVSRDLGSWFFLGAIFTTAKLAPDAPERDRCGTCRACLDACPTRAFPEPHRIDARRCISYLTIEHKGQIAPEFREAIGNRIYGCDDCLAACPWNKFAQEASEMRFHARDAADNPPLRELLRLDDAAFRARFAGSPIKRIKRDRFVRNALIAAGNSDDAALLDDALPLLCDDSPLVRGMAVWAVRQLGGLELKSKLKESYSSEEKDVAVREEWERTP

SEQ ID NO: 80446 - protein, 385 aa, Rhodomicrobium vannielii
  REGION 1..385: note = tr|E3HYR5|E3HYR5_RHOVT Epoxyqueuosine reductase; OS = Rhodomicrobium vannielii (strain ATCC 17100 / ATH 3.1.1 / DSM 162 / LMG 4299) OX=648757 GN=queG PE=3 SV=1
MRISTSEHARSAAAGDNLSGVVKARALAEGFDTVGIADPASIGGAGEGLMGFLAAGFHGDMGWLEANADKRADPRVLWPDVRSVILVTLSYGPDVDPRTARNDPSRGAVSVYAKGADYHDIIKAKLKAVARDFASIAGADVKVFVDTAPVMEKPLAQAAGLGWQGKHTNLVARDLGSWFFLGAIFTTAKLAPDAPERDRCGTCRACLDACPTRAFPAPHRIDARRCISYLTIEHKGQIAPEFREAIGNRIYGCDECLAACPWNKFAQEASEMRFHARDGADNPLLRELLRLDDAAFRARFAGSPIKRIKRDRFVRNALIAAGNSGDAALLDDALSLLCDDSPLVRGMAVWAVRQLGGLELKSKLKESYSSEEKDVAVREEWERTP

SEQ ID NO: 80447 - protein, 311 aa, Rhodonellum psychrophilum
  REGION 1..311: note = tr|U5C251|U5C251_9BACT Epoxyqueuosine reductase; OS = Rhodonellum psychrophilum GCM71 = DSM 17998 OX=1123057; GN = queG PE=3 SV=1
MNVQKDKYAQIIKTQAKNLGFDFCGVAKAEFLKEEAPKLEDWLNKNHHGEMAYMANHFDKRLDPTLLVEGAKTVISLIYNYYPEKRLPDSPENLKIAKYAYGEDYHFVIKEKLKTLLTNLRTEIGEFGGRAFVDSAPVMERQWAQKSGLGWQGKNSLLLNRQMGSFFFLAELIIDLEVTPDPPMIKDYCGTCTKCVDACPTDAIVQAGVVDGSKCISYFTIELKDQIPNEMKGKFENWVFGCDICQDVCPWNSFSKPHQEAKFAPHPDLKTMGNKDWQELTEETFNKVFQKSAIKRTKFQGLLRNINFNLS

SEQ ID NO: 80448 - protein, 358 aa, Rhodopila globiformis
  REGION 1..358: note = tr|A0A2S6NI82|A0A2S6NI82_RHOGL Epoxyqueuosine reductase OS=Rhodopila globiformis OX=1071 GN=queG PE=3; SV = 1
MTETTVRKTGTTTDLKTRIRDKALQIGLDAVGFCPADLAPEARERLTHFLRAGYHGDMGWLADRKQQRSQPKALWPDVRSVIVVGMSYAPAYDPLSAAGQRNCGNISVYARNRDYHDIIKGHLKHLAQFLVSRFACQVKVFVDTAPVMEKPLAQQSGLGWQGKHTNLVSREYGSWLLLGEIYTDLELQGDDPSADHCGSCSRCLDVCPTRAFPAPYRLDASRCISYLTIEHHGPIPTELRPLMGNHIYGCDDCLAVCPWNKFATPTTHEKLVARGDLAAPALSDLAGLDDKTFRARFAGSPIKRTGRNRFVRNVLIAIGNSGDRALLPVAQRLQADQDPVVAEAAHWAAARLAAAAGC

SEQ ID NO: 80449 - protein, 384 aa, unidentified
  source 1..384: note = Rhodopirellula bahusiensis
  REGION 1..384: note = tr|A0A2G1W6L8|A0A2G1W6L8_9PLAN tRNA epoxyqueuosine(34) reductase QueG OS=Rhodopirellula bahusiensis OX=2014065 GN=queG PE=4 SV=1
MSDLVEQIRATALSEGFAAMGIAPAVTSQGFHHLVQWIESGYAGSMDYLERRLDAYRHPSGVLEGTKSIVVLAMNYDAAIREPMPSNGGSEGLAFGKTARYTWSAIDYHDVIHPKLKRIVRMIREEIPDANARGIVDTAPLMEREVAVLAGLGWRGKNTLLLNKQLGSYFFLACVLVDVELPIDQPHETSHCGTCTACLDACPTDAFPSPGVLDASKCISYLTIENSELPEQSLRAGIGDWVFGCDVCQEVCPWNRRPSRTQHDPDGLRGHRDSANPLDVDDGWLELTSLFSMTDEEFRSQFRRTPFWRSRRRGMLRNAIVVLGNQKRLKAIELLFTTLKDADPELRAIAVWAICQMQDQAAFDRLLGYRHTETDPLVLAEFPE

SEQ ID NO: 80450 - protein, 381 aa, Rhodopirellula baltica
  REGION 1..381: note = tr|Q7UQM6|Q7UQM6_RHOBA 4Fe-4S ferredoxin-type domain-containing protein OS=Rhodopirellula baltica (strain DSM 10527 / NCIMB 13988 / SH1) OX=243090 GN=RB6226; PE = 4 SV= 1
MNDLVEQIRETALSEGFAAMGIAPAVTSEGFHQLVDWIEAGYAGSMDYLERRLDAYRHPTGVLEGTKSIIVLAMNYDASNRGPAPSVEGSAYGKTARYTWSGVDYHDVIHPKLKRIVRLIREQVPEANARGIVDTAPLMEREVAVLAGLGWRGKNTLLLNKQLGSYFFLACVLVDIDLPIDQPHDSSHCGTCSACLDACPTDAFPSAGVLDASKCISYLTIENPGLPELSLRSGIDEWAFGCDVCQEVCPWNRRPSRQQNAANGLRGHREPADDSQGHDGWLELTSLFSMTEDQFRSQFRRTPYWRTKRRGMLRNAIIVLGNQKRRDAIELLFTTLNDPDPELRAIAVWAICQMQDSESLDRLRGYRQSENDPIVLAEFPG

SEQ ID NO: 80451 - protein, 381 aa, Rhodopirellula baltica
  REGION 1..381: note = tr|F2APA5|F2APA5_RHOBT Iron-sulfur cluster-binding protein OS=Rhodopirellula baltica WH47 OX=991778; GN = RBWH47_04420 PE=4 SV=1
MNDLVEQIRETALSEGFAAMGIAPAVTSEGFHQLVDWIEAGYAGSMDYLERRLDAYRHPTGVLEGTKSIIVLAMNYDASNRGPAPSVEGSAYGKTARYTWSGVDYHDVIHPKLKRIVRMIREQIPEANARGIVDTAPLMEREVAVLAGLGWRGKNTLLLNKQLGSYFFLACVLVDIDLPIDQPHDSSHCGTCSACLDACPTDAFPSAGVLDASKCISYLTIENPGLPESSLRSDIDEWAFGCDVCQEVCPWNRRPSRQQNAANGLRGHREPADEPQGHDGWLELTSLFSMTEDQFRSQFRRTPFWRTKRRGMLRNAIIVLGNQKRRDAIELLFTTLDDPDPELRAIAVWAICQMQDSESLDRLRGYRQTENDPIVLAEFPG

SEQ ID NO: 80452 - protein, 381 aa, unidentified
  source 1..381: note = Rhodopirellula europaea
  REGION 1..381: note = tr|M2AYD9|M2AYD9_9PLAN Protein putative iron-sulfur cluster binding protein OS=Rhodopirellula europaea 6C; OX = 1263867 GN=RE6C_04321 PE=4 SV=1
MNDLVEQIRETALSEGFAAMGIAPAITSEGFHQLVDWIESGYAGSMDYIERRLDAYRHPGGVLEGTKSIIVLAMNYDASDRGAAPSDEGLAFGKTARYTWSGVDYHDVIHPKLKRIVRLIRDQIPEANARGIVDTAPLMEREVAVLAGLGWRGKNTLLLNKQLGSYFFLACVLVDIDLPIDQPHDSSHCGTCTACLDACPTDAFPSAGVLDASKCISYLTIENSDLPELSLRSGIGEWAFGCDVCQEVCPWNRRPSRQKNETNGLRGHREPTSASSDHAGWLELTSLFSMTDDQFRSQFRRTPFWRTKRRGMLRNAIVVLGSQKRRDAIELLFTTLDDPDPELRAIAVWAICQMEDHDALDRLRGYRQSEDDPIVLAEFPG

SEQ ID NO: 80453 - protein, 381 aa, unidentified
  source 1..381: note = Rhodopirellula europaea
  REGION 1..381: note = tr|M5SSS7|M5SSS7_9PLAN Protein putative iron-sulfur cluster binding protein OS=Rhodopirellula europaea SH398; OX = 1263868 GN=RESH_00034 PE=4 SV=1
MNDLVEQIRETALSEGFAAMGIAPAITSEGFHQLVDWIESGYAGSMDYIERRLDAYRHPSGVLEGTKSIIVLAMNYDASDRGAAPSDEGLAFGKTARYTWSGVDYHDVIHPKLKRIVRLIRDQIPEANARGIVDTAPLMEREVAVLAGLGWRGKNTLLLNKQLGSYFFLACVLVDIDLPIDQPHDSSHCGTCTACLDACPTDAFPSAGVLDASKCISYLTIENSHLPELSLRSGIGEWAFGCDVCQEVCPWNRRPSRQKNETNGLRGHREPTSASSDHDGWLELTSLFSMTDDQFRSQFRRTPFWRTKRRGMLRNAIIVLGNQKRRDAIELLFTTLDDPDPELRAIAVWAICQMEDHDALDRLRGYRQSEDDPIVLAEFPG

SEQ ID NO: 80454 - protein, 384 aa, unidentified
  source 1..384: note = Rhodopirellula islandica
  REGION 1..384: note = tr|A0A0J1BIC1|A0A0J1BIC1_RHOIS Epoxyqueuosine (OQ) reductase QueG OS=Rhodopirellula islandica OX=595434; GN = RISK_001506 PE=4 SV=1
MRETVEQIREAALSEGFAGMGIAPAVTSQGFHQLVQWIEAGYAGTMDYLERRLDAYRHPSGVLEGAKSIIVLAMNYDASDREPIPDGDVGDDLAFGKTARYTWSGIDYHDVIHPKLKRIVRLIREQIPEANARGIVDTAPLMEREVAVLAGLGWRGKNTLLLNKQLGSYFFLACVLVDVELPIDQRHESSHCGTCTACLDACPTDAFPRPGVLDASKCISYLTIESSELPERHLRAGIGDWAFGCDVCQEVCPWNRRPARAQHDLSGLRGHRESESDSNHREGWLELTALFTMTDDEFRRRYRRTPFWRSRRRGMLRNAILVLGNQKRRDAIELLFITMGDSDAELRAIAVWAICQMQDGAALERLMAYRQSETDPRVLAEFPH

SEQ ID NO: 80455 - protein, 360 aa, unidentified
  source 1..360: note = Rhodopirellula maiorica
  REGION 1..360: note = tr|M5R791|M5R791_9PLAN Protein putative iron-sulfur cluster binding protein OS=Rhodopirellula maiorica SM1; OX = 1265738 GN=RMSM_07732 PE=4 SV=1
MRLSERGKPESVTSPADFMATFRNQASELGFIAVGVAPAIESSGFSQLARWIEAGYAGEMDYMANRLDAYKHPSGVLEGCRSVIAMAYPYDAAPTPPVASGAGRVARYAWQGVDYHDVIHPKLKRLVKSIRESFPGAAARGVVDTAPIMEREIAQLAGLGWQGKNTLLLNKQLGSYFFLACVLTDVDFPADTPHESSHCGTCTACLDACPTDAFPQAGVLDATRCISYLTIENRNEIAEDLRESIGDWAFGCDVCQEVCPWNRKPMRQYERESAPNQPLDALELRALFSLDEAEFRRRYRKTPLWRTRRRGVLRNAALVLGNQRDPASLPALRIGLTDEDALVRDASQWAIDQIQRNPLS

SEQ ID NO: 80456 - protein, 407 aa, unidentified
  source 1..407: note = Rhodopirellula sallentina
  REGION 1..407: note = tr|M5TY92|M5TY92_9PLAN Iron-sulfur cluster-binding protein OS=Rhodopirellula sallentina SM41 OX=1263870; GN = RSSM_04547 PE=4 SV=1
MPDAVENDPHAIIQAIREAAAEEGFVACGIAPAIDSQGFPDLVRWIDAGYHAEMEYFPNRLDAYRNPKGVLPGAKSVVALAWPYSALEHEHESTQTSVAGRNGQDGEAVVGGKVARYTWQATDYHDVIHPKLKRICKTILRLCPAANARGIVDTAPLMEREFAQLAGLGWRGKNTLLLNKTLGSYFFLACVLVDVELPPDTPHESDHCGTCTACLDACPTGAFVGPHVLDASRCISYLTIESREMIPEPLREGIGDWLFGCDVCQEVCPWNRKPTKRAMSNESVLQSDWRLSPDTPRGLMELSTLFQLDEETFRARFRKSPMWRTRRRGLLRNAAIVLGNVGNIEHADALILGMRDAEPIVRASSVWAGKRILAKSPSDARSGILANELKRLAIDEQNEIVRAELPS

SEQ ID NO: 80457 - protein, 382 aa, Rhodopirellula sp.
  REGION 1..382: note = tr|A0A2E4M8Z4|A0A2E4M8Z4_9PLAN tRNA epoxyqueuosine(34) reductase QueG OS=Rhodopirellula sp.; OX = 2024855 GN=queG PE=4 SV=1
MSNPADSLKRRAVELGFQFSGVAPAVTPEGMHRLVDWLDKGYAGQMSYIAERQNAYADPNLVLDGVRSVLMLGMHYSGYESIPETSPGQGRIARYANGTVDYHDLIHSRLKSLHVFHDDLLPAESSRGIVDTAPLLEREFAQLSGIGWIGKNTMLISKEQGSYFFLAALLSTADLQADNPQTTDHCGTCTACLDACPTDAFPEPFVLNANRCISYLTIEHRDEISGDLRTGMGDWLFGCDICQEVCPWNRHGDYCEEPDLQSSHELANLELYQLFNLDDDAFRNRFRKTPLWRPKRRGILRNAAIVLGNQAHLESIPALCKGLSDIEPLVRSACAWAIGKINSPDSILILETALGVESNETVLKELQKSIHELLKQTADSND

SEQ ID NO: 80458 - protein, 357 aa, Rhodopirellula sp.
  REGION 1..357: note = tr|A0A1Z8MIM8|A0A1Z8MIM8_9PLAN tRNA epoxyqueuosine(34) reductase QueG OS=Rhodopirellula sp. TMED11 OX=1986614 GN=CBB71_05485 PE=4 SV=1
MTVPETDSSHEDAPTWLASVKAQATELGLVNLGITPAVQATGFAPLTEWIESGYAASMDYFANRLDAYRHPRGVMPGVQSIMVFAWPYPTNPSQETAPGNGQVARYAWSGVDYHDSIHRMLKTLARTIKQSAPELRSRGCVDTAPLLERELGQAAGLGWTGKNTLLLNRNLGSYFFLCCLMVDCELPYDDAFESSHCGTCTACLDHCPTDAFVEPGLMDAGKCISYLTIEHRGSIDHDLRPGIGNWVFGCDVCQEVCPWNRKPAKQPRQSQQHYPLHELDLLGLFSLDEDSFRAKYRKSPFWRTRLQGMQRNAAIVLGNQKAKHALPVLTQAAKSDDAVVAEACQWAINEINSPPTD

SEQ ID NO: 80459 - protein, 395 aa, Rhodoplanes elegans
  REGION 1..395: note = tr|A0A327K0X9|A0A327K0X9_9RHIZ tRNA epoxyqueuosine(34) reductase QueG (Fragment); OS = Rhodoplanes elegans OX=29408 GN=queG PE=3 SV=1
MTDASAPDSSALLVALRAEAKALGFDAVAVAAPDAIGDAGARFEKFLAAGMHGDMDWLADRPERRTSLRGLWADVQAVVMLGVNYGPERDPRDVLAQRDRGAISVYARGDDYHEVIKPRLKALARWLIGAAGGDAKVFVDTAAVMEKPLAAAAGLGWQGRHTNLVSRDFGSWLFLGALFTTLPLPPDAPADDCCGSCRACLDACPTEAFVAPYRLDARRCVSYLTIEHKGPIPREFREKLGNRIYGCDDCLAACPWNKFAQAGRDAKLAAREVLNAPSLRDLAGLDDAAFRALFRKTAIKRTGRDRVVRNVMIAIGNSGDAALADAAQARLADASSLVRGAAVWALSRLLPVDAFATLAACHRDHEPDPQVREEWTLGVSQNDAPSPLPARGERS

SEQ ID NO: 80460 - protein, 368 aa, unidentified
  source 1..368: note = Rhodoplanes piscinae
  REGION 1..368: note = tr|A0A327JZY0|A0A327JZY0_9RHIZ tRNA epoxyqueuosine(34) reductase QueG (Fragment); OS = Rhodoplanes piscinae OX=444923 GN=queG PE=3 SV=1
MTGPPAPDSSATDPSALVTALRAEATALGFDAVAIAAPDAIGRAAERLADFLAAGLHGDMDWLADRPERRASPRGLWPEVRAVVMLGVNYGPADDPRAATARRDRAAVSVYAQGDDYHEVIKPRLKALARWLVATAGGDVKVFVDTAAVMEKPLAAAAGLGWQGKHTNLVSRDFGSWLFLGAVFTTLPLPPDAAAADHCGDHCGSCRACLDACPTAAFPAPYRLDARRCISYLTIEHKGPIPRDLRPAIGNRVYGCDDCLAACPWNKFAKAGRDAKLAARQELTAPALADLAELDDAAFRALFRKTAVKRVGRDRFVRNVLVAIGNSGDPHLADAAAARLADASPLVRGAAVWALARLLPTTDISILA

SEQ ID NO: 80461 - protein, 350 aa, unidentified
  source 1..350: note = Rhodoplanes piscinae
  REGION 1..350: note = tr|A0A447CQC2|A0A447CQC2_9RHIZ Epoxyqueuosine reductase OS=Rhodoplanes piscinae OX=444923 GN=queG PE=4; SV = 1
MDWLADRPERRASPRGLWPEVRAVVMLGVNYGPADDPRAATARRDRAAVSVYAQGDDYHEVIKPRLKALARWLVATAGGDVKVFVDTAAVMEKPLAAAAGLGWQGKHTNLVSRDFGSWLFLGAVFTTLPLPPDMPAADHCGDHCGSCRACLDACPTAAFPAPYRLDARRCISYLTIEHKGPIPRDLRLAIGNRVYGCDDCLAACPWNKFAKAGRDAKLAARQELTAPALADLAELDDAAFRALFRKTAVKRVGRDRFVRNVLVAIGNSGDPHLAGAAAARLADASPLVRGAAVWALARLMPAADFSNLADRHAAGETDPQVREEWAAALLFTSPRSRGEVDIHAAGMDIG

SEQ ID NO: 80462 - protein, 339 aa, Rhodoplanes sp.
  REGION 1..339: note = tr|A0A127ENT8|A0A127ENT8_9RHIZ 4Fe-4S ferredoxin; OS = Rhodoplanes sp. Z2-YC6860 OX=674703 GN=RHPLAN_03240; PE = 4 SV=1
MRLQQFLAEGAHGDMAWMEATAERRASPQALWPQVRSVIMLGLNYGPDHDPLEILKARERGAISVYAKGEDYHEVIKPRLKDIARWLIAEAGGDVKVFVDTAAVMEKPLAAAAGLGWQGKHTNMVSRQFGSWLFLGAIFTTLELPADEPERDSCGTCHACLDICPTAAFPAPYRLDARRCISYLTIEHKGPIPREMRAMIGNRIYGCDDCLAVCPWNKFAQEGRNAKLAAREVARAPKLEELARLDDAAFRKMFAKTAVKRTGRDRFIRNVLIAIGNSGDAALAPAAERLLSDASPLARGAAVWALTRLDPARAAAVAPQYAGEPDPAVAEEWALTPNA

SEQ ID NO: 80463 - protein, 392 aa, Rhodopseudomonas faecalis
  REGION 1..392: note = tr|A0A318TJQ0|A0A318TJQ0_9BRAD Epoxyqueuosine reductase OS=Rhodopseudomonas faecalis OX=99655 GN=queG; PE = 3 SV=1
MAGRGAGVADLCGPRLLTRPNDLSPQLAEQARALGFDAFGIVAPDAIPFAAARLEAFLESGAHGTMEWLAAHRDRRADPRVLWPQVRSIIMLGMNYGPDVDPRPLLQMRERGAISVYAKGDDYHDLIKPRLKTLARWLIAQAGGDVKVFVDTAPVMEKPLAQAAGLGWQGKHTNLVSRDRGSWLLLGAIFTTLELPRDAGMDERCGSCRACLDACPTGAFPAPYQLDARRCVSYLTIEHKGPIAPELRPLLGNRIYGCDDCLAACPWNKFAEIGREAKLAAREALRAPTLAELVTLDDPGFRALFSKSPIKRIGQARFIRNVLIAIGNSGSAELVASARSRLADPEPMIRGAAVWALSRLLPPEEFAALAAAHCSCESDDSVVQEWRLAVAS

SEQ ID NO: 80464 - protein, 417 aa, Rhodopseudomonas palustris
  REGION 1..417: note = tr|A0A418VIV5|A0A418VIV5_RHOPL Epoxyqueuosine reductase OS=Rhodopseudomonas palustris OX=1076 GN=queG; PE = 3 SV=1
MARGRAGVADLRGSRLLSAADPAPDPAETSYGKLKTELAAQARALGFGAIGVCAPDAIPEALGRLREYLASDYHGQMAWLADRPERRADPRVMWSEVRSVIMLSVNYGPSTDPLALTAATDRGAISVYAQGDDYHDVIKARLKQLARWLIAAAGGEVKVFVDTAAVMEKPLAHAAGIGWQGKHSNLVSREFGSWLFLGAIFTTLELPRDDAERDHCGSCRNCLDACPTAAFPAPYRLDARRCISYLTIEHKGPIPHEFRQRLGNRIYGCDDCLAVCPWNKFAQAGREAKLASREAQRAPALAELVRLDDAAFRALFSKSPVKRIGRDRFVRNVLIAIGNSGDARLAAEAERLLGDADPAVRGAAVWALGRLVAGDQFAALRDGHLGGEVDESVREEWAGALPSPLVGEGGADAVRAG

SEQ ID NO: 80465 - protein, 370 aa, Rhodopseudomonas palustris
  REGION 1..370: note = tr|B3Q5X6|B3Q5X6_RHOPT 4Fe-4S ferredoxin-type domain-containing protein OS=Rhodopseudomonas palustris (strain TIE-1) OX=395960 GN=Rpal_0043 PE=4 SV=1
MKARLAEQARALGFDAFGICAPDSIPEAPARLRAFLDAGYHGEMAWLADRPERRSDPRVMWSEVQSVILLGFNYGPDADPRAVLTQKDRGAISVYAQGDDYHDVIKARLKQFARWLVATGGGDVKVFIDTAAVMEKPLAQAAGLGWQGRHTNLVSKGRGSWMFLGAVFTTLDLPRDAAEGDHCGSCRACLDACPTAAFPAPYQLDARRCISYLTIEHKGPIPREFRARLGNRIYGCDDCLAACPWNKFAQAGREAKLAARDALRAPALGELVRLDDPSFRALFTKSPVKRIGRDRFIRNALIAIGNSGDAELAPEAERLLADPSPTIRGAAAWALAQLLPPERVATLKAVHLAAEVDDGVRAEWGGFAAE

SEQ ID NO: 80466 - protein, 366 aa, unidentified
  source 1..366: note = Rhodopseudomonas pentothenatexigens
  REGION 1..366: note = tr|A0A336JJB2|A0A336JJB2_9BRAD Epoxyqueuosine reductase OS=Rhodopseudomonas pentothenatexigens OX=999699; GN = SAMN05892882_10349 PE=4 SV=1
MADQARALGFDAFGICAPDSIPEAPARLRAFLDAGYHGDMAWLADRPERRSDPRVMWSEVRSVILLGFNYGPDVDPRTVLARKDRGAISVYAQGDDYHDVIKARLKLFGRWLVATAGGDVKVFIDTAAVMEKPLAQAAGLGWQGRHTNLVSTSRGSWMFLGAVFTTLDLPRDASERDHCGSCRACLDACPTAAFPAPYQLDARRCISYLTIEHKGAIPHEFRPRLGNRIYGCDDCLAACPWNKFAQAGREAKLAARQGLRAPELGELVRLDDPSFRALFTKSPVKRVGRDRFIRNVLIAIGNSGDVELAVEAERLLADPSATIRGAAAWALAQLLPPERFAALKASHLAGEPHQGVRAEWGGVAAE

SEQ ID NO: 80467 - protein, 380 aa, unidentified
  source 1..380: note = Rhodopseudomonas pseudopalustris
  REGION 1..380: note = tr|A0A1H8MI53|A0A1H8MI53_9BRAD Epoxyqueuosine reductase OS=Rhodopseudomonas pseudopalustris OX=1513892; GN = SAMN05444123_101531 PE=4 SV=1
MAKQGQTLGFDAIGICAPDSIPHALDRLRDYLASGFHGEMAWLADRPERRADPRVMWSEVRSVIMLGVNYGPQSDPRHILGAKDRGAISVYAQGDDYHDVIKARLKQLARWLVATAGGEVKVFVDTAAVMEKPLAQAAGLGWQGKHSNLVSRELGSWLFLGAIFTTLELPRDAAERDHCGSCRACLDSCPTAAFPEPYRLDARRCISYLTIEHKGPIPHEFRQPIGNHIYGCDDCLAACPWNKFAQVGREAKLAARDALRAPSLGELVRLDDPSFRALFTKSPVKRIGRDRFIRNVLIAIGNSGDAELAREAERLLGDGSAVVRGAAVWALAQLLPGDQFAALKAARLGDEPDESVRAEWVGALPSPLVGEGGTDAVRAG

SEQ ID NO: 80468 - protein, 393 aa, Rhodopseudomonas sp.
  REGION 1..393: note = tr|A0A0N0KHR6|A0A0N0KHR6_9BRAD Epoxyqueuosine reductase OS=Rhodopseudomonas sp. AAP120 OX=1523430; GN = IP86_14910 PE=4 SV=1
MKAALTDQARALGFAPLGVCAPDAIPDALGYLREYLASDYHGQMAWLADRPERRADPRVMWSEVRSVIMLGVNYGPTSDPRAILEATDRGAISVYAQGDDYHDVIKARLKQLARWLVGAAGGEVKVFVDTAAVMEKPLAQAGGLGWQGKHSNLVSREFGSWLFLGAIFTTLDLPRDQAERDHCGSCRNCLDACPTAAFPAPYRLDARRCISYLTIEHKGPIPREFRRPLGNRIYGCDDCLAACPWNKFAQAGREAKLASREALRAPPLGELVRLDDAAFRALFTKSPVKRIGRARFIRNVLIAIGNSGDARLAAEAGRLLGDADPAVRGAAVWALGQLVAEEQFGALREQHLGEEADESVRAEWCGVNVARDPAPSSDVIPRASEGPSIPERG

SEQ ID NO: 80469 - protein, 345 aa, unidentified
  source 1..345: note = Rhodosalinus sediminis
  REGION 1..345: note = tr|A0A3D9BRQ8|A0A3D9BRQ8_9RHOB Epoxyqueuosine reductase OS=Rhodosalinus sediminis OX=1940533 GN=queG; PE = 3 SV=1
MGRDLKERLIEEARAAGFDAAGVCHPDAVPELPARLAAFLEAGYHGQMRWMAERAHWRADPAALWPEARSVIMLAMSYTPESDPLATLSEPEVGTISVYARGGDYHDLIKKRLKRVARWLIGTAGGEVKVFVDTAPVMEKPLAQAAGLGWQGKHTNLLSRDLGNWIFLGAIFTTLDLPPDAAEAEHCGSCRRCLDVCPTDAFPEPFRLDARRCISYLTIEHEGPVDESLRPLLGNRIYGCDDCLAVCPWNKFAVEAREAKLKARDALDAPRLAELARLDDAGFRAMFSGSPIKRIGRDRFVRNVLYAIGNSGRAELRAVAEGLTGDPDPAVADAAAWAVRRLDGV

SEQ ID NO: 80470 - protein, 345 aa, unidentified
  source 1..345: note = Rhodosalinus sp.
  REGION 1..345: note = tr|A0A365UAL0|A0A365UAL0_9RHOB Epoxyqueuosine reductase OS=Rhodosalinus sp. E84 OX=2259333 GN=queG PE=3; SV = 1
MGRELKDRLIEEARAAGFDAVGVCRPDAVPELPARLRAFLEAGYHGQMGWMAEREAWRADPATLWPEARSVVMLAMSYTPESDPLATLSQPEVGTISVYARGGDYHDVIKKRLKRVARWLIGAAGGEVKVFVDTAPVMEKPLAQAAGLGWQGKHTNLLSRELGNWIFLGAIFTTLELAPDAPGEAHCGSCRKCLDICPTDAFPAPFQLDARRCISYLTIEHAGPVDEALRPLLGNRIYGCDDCLAVCPWNKFAVEAREAKLAAREELGAPPLAELARLDDAGFRAMFSGSPIKRIGRDRFVRNVLYAIGNSGRAELRPVAAELTGDPDPAVADAARWAVRRLQGV

SEQ ID NO: 80471 - protein, 375 aa, unidentified
  source 1..375: note = Rhodospirillaceae bacterium
  REGION 1..375: note = tr|A0A2E7HFF4|A0A2E7HFF4_9PROT Epoxyqueuosine reductase OS=Rhodospirillaceae bacterium OX=1898112; GN = queG PE=3 SV=1
MPSAADAFSAIREKAHELGFNACRVTDAEADPAWRRSLQELTTAGRHGDMDWLERRADERSDPRQLWSDVRSVITLAMSYGPDHDPLDDLKRTDRGVVSVYARGRDYHDVVKKRLKALARWIVETSGAEVKVFVDTAPVMEKPLAQRSGLGWQGKHSNLVSRELGSWFFLGEIYTTLVFEPDPPEPDHCGSCRACQDICPTDAFPQPYQLDPSRCISYLTIEHKGHIAPEFREPMGNRIYGCDDCLAVCPWNKFAVVAREAALAPRDSLAGPRLTDLAALDDSAFRELFRASPVKRTGRDRFVRNVMIALGNSGDPDSLNAVRTRLDDASPLVRAMAVWALSRLGAAHEVAEARATHYVAEQDAAVRREWDALES

SEQ ID NO: 80472 - protein, 368 aa, unidentified
  source 1..368: note = Rhodospirillaceae bacterium
  REGION 1..368: note = tr|A0A1Z8LLL3|A0A1Z8LLL3_9PROT tRNA epoxyqueuosine(34) reductase QueG OS=Rhodospirillaceae bacterium TMED8 OX=1986645 GN=CBB68_10600 PE=4 SV=1
MNKVAREAIRQHALNQGFDAVGFTSAHSDPKDHAALAKFLKKNWHGDMSWMAEVGYSNVNPRGKPRALMPEAQTIIVLGSNYTPSDDPMFAVKNPKVGAISVYARPKRDYHYTIKKRLKKFGRWLVKNYAAKGIKVFVDTAPIMEKPLAARSGIGWQGKHTNLVSRDFGSWLFLSEVFTTLRIAPDLPEPDHCGSCTACMDACPTDAFPAPYQLDARRCISYLTIEHKAMIAPSLMTKMGNHIFGCDDCLTACPWNKFAMVTKDPVFEPREDLSSPLLSKLLKLDDDAFRSKFAGSSIKRLGRSRFIRNVLIAVANSGDHNLISTVELLFQDTDKLVAKTANWAHAQLSTLDQNKGSDNHFNNNKSQN

SEQ ID NO: 80473 - protein, 390 aa, unidentified
  source 1..390: note = Rhodospirillales bacterium
  REGION 1..390: note = tr|A0A2D9WDY9|A0A2D9WDY9_9PROT Epoxyqueuosine reductase OS=Rhodospirillales bacterium OX=2026786 GN=queG; PE = 3 SV=1
  VARIANT 62: note = Xaa can be any naturally occurring amino acid
MEFNIVNTLLKNQIRDFALKSGFIAVGFAPATLSKKNKDSMAEFIERGYHGDMGWLSAKADXRAAPHALWPEVKSVITLGISYAPSEDPLANLSNPEVGNISVYSRGRDYHEVFKKRLRVLGRWITDNFSCDIKIFVDTAPVMEKPIAEQAGIGWQGKHTNLVSRIHGSWLFLGEIFTTLDLSTSEIQENSVGKYCGNCERCLDVCPTNAFPSPYKLDARRCISYLTIEHKGLIDRDLRPLIGNRIYGCDDCLAVCPWNKFASAAADPDFESNEQFNSPKLIQLAKLTDEEFRKLFSKTAIKRIGRDRFIRNVLIALGNLKKAEAIPVILSLLTDPAPIVRGSAIWALSRTANIETFLVHKTMLLPKEDSTDVISEWNNSQRELELNLKS

SEQ ID NO: 80474 - protein, 399 aa, unidentified
  source 1..399: note = Rhodospirillales bacterium
  REGION 1..399: note = tr|A0A1H8XZ58|A0A1H8XZ58_9PROT Epoxyqueuosine reductase OS=Rhodospirillales bacterium URHD0017; OX = 1380357 GN=queG PE=3 SV=1
MSRHPPVPKRKPRPASPGELRDAIRDEALRLGFDAVGFAPANLAPEARDQRLQRLGEFLDAGWQGDMGWLGERTAERADPQALWREAKTVVSLAINYAPANDPLEILEHDERAAISVYAQGRDYHEVMKSKLKALGRFIWDTYRHDLKVFVDTAPLMEKPAAQAVGHGWQGKHTNLVSRQFGSWLFLGELLLSVELPADQAETDHCGQCRACLDICPTNAFAGPYRLEARRCISYLTIEHEGPIDRELRPLLGNRIYGCDDCLAVCPWNKFAQEARETALMPRPALSAPSLAELATLDDQAFRKRFTGTAIKRIGRDRFVRNVAYALGNSQARATALPAVEALLGDFSPLVRGAAVWALSRLAPHQVAQRQRATREDDADVRAEWQDALQTAQRRDNGR

SEQ ID NO: 80475 - protein, 375 aa, Rhodospirillum rubrum
  REGION 1..375: note = tr|Q2RXR1|Q2RXR1_RHORT Epoxyqueuosine reductase; OS = Rhodospirillum rubrum (strain ATCC 11170 / ATH 1.1.1 / DSM 467 / LMG 4362 / NCIB 8255 / S1) OX=269796 GN=queG; PE = 3SV=1
MAKAKPTPAEIKDAIRAKAVELGFSACAFARAELPDRVRADLNAFLDAGHHGSMAWLSETAERRGDPKVLWPSAVSVIALAVNYASGGDPKALAAQADRGVISVYAHNRDYHDVAKGRAKMLGQWMAARLGGAIKVFVDTAPVMEKPLAHAAGLGWQGKHTNLVSRAHGSWLFLAEVFSTLDLPADEAEADHCGSCRRCLDICPTAALPAPYRIDARRCISYLTIEHAGPIPRDLRPLMGNHIYGCDDCLAICPWNRFAVPTREQAFYPRVELTAPRLADLAGLDDATFRGIFSGSPIKRIGRDRFVRNVLIALGNSADGALLPAVAARLDDPSPLVRGAGAWAFRRLAGAEDQRREKNRRLAIEDDPQVRAEWD

SEQ ID NO: 80476 - protein, 388 aa, Rhodothalassium salexigens
  REGION 1..388: note = tr|A0A4R2P7J1|A0A4R2P7J1_RHOSA Epoxyqueuosine reductase OS=Rhodothalassium salexigens DSM 2132; OX = 1188247 GN=queG PE=3 SV=1
MTPAPAASSAPIPPVTADAVRAEARALGFDAVGLARPDAVPALLAHAGTALDRFLAQGHHGGMAWMAERADQRRHPQALWPEMRTAVMVGLNYGPAVDPMILRDHPTKGAVSVYARGKDYHDVLKKRLKRLARWLHERSGQPVKVFVDTAPVMEKPLAEAAGIGWRGKHTNLVSRDLGNWLFLGALFTPLALDADAPERDHCGSCRRCLDACPTNAFVAPYQLDARRCISYLAIEHKGPIPHALRPALGNRIYGCDDCLAVCPWNKFAECATEAQFFARAELGAPDLADLALLDDADFRALFSGSPIKRTGRARFVRNVLIAIANSGDAGLMGLVEGLLDDAEPAVRGAAVWAVAQLAPADRVRALKARRADRETDPDVIAEWAHLPD

SEQ ID NO: 80477 - protein, 318 aa, unidentified
  source 1..318: note = Rhodothermaceae bacterium
  REGION 1..318: note = tr|A0A2E3QXY6|A0A2E3QXY6_9BACT Epoxyqueuosine reductase OS=Rhodothermaceae bacterium OX=2026787 GN=queG; PE = 3 SV=1
MYDSARLARDLKAQARRIGFDGVGIARAERLDVEARRLEAWLTAGRHGGSDGAMTWMERNVEKRVDPRALVPGAESVVSVFVSYVQPGRRPGEDGGAKISRYAWGDDYHDVLKEKLAELFDWLDTRTGGAGGRAFVDSAPVMDKAWAQRAGLGWQGKNTNLLTTTHGSFVFLGELIVDVPLEPDVPFQADHCGSCTRCLDACPTGALDAPYQIDATRCISYWTIEHRGPDLPEIASEFGAWAFGCDICQDVCPWTKFSQPTRDARFLPRPGVTDTPAREWAEIDIEAWRERFRRSPVKRVKYEGFLRNMENAARNATS

SEQ ID NO: 80478 - protein, 317 aa, unidentified
  source 1..317: note = Rhodothermaceae bacterium
  REGION 1..317: note = tr|A0A424HMA9|A0A424HMA9_9BACT tRNA epoxyqueuosine(34) reductase QueG OS=Rhodothermaceae bacterium TMED105 OX=1986665 GN=queG PE=4 SV=1
  VARIANT 240: note = Xaa can be any naturally occurring amino acid
MDPLLLTRQIRQKAEELGFGACRFAKAEPLVEEARHLEEWLSRGHHGSMAWMEHYFDKRIDPTKLVEGAKTVVCLMAGYHFQERWESPQSRVPRVAKYAQSRDYHKVLKKACHGIINHLHETISPDIHARAFVDSAPVMERAWAQRSGIGWLGKNGNILNRTHGSWFLLAEIILDQETIPDQPMQDHCGSCTACIDACPTEAIVKPSVIDSRKCISYLTIEHKQELSNETVKQLDGWLFXCDICQDVCPWNRKAVPHRMPGLETREAFSPLPSLKEWSEFTEDTFFEQFQGSPLMRAGWQRLTTTARAINNLDRSIS

SEQ ID NO: 80479 - protein, 314 aa, unidentified
  source 1..314: note = Rhodothermaeota bacterium
  REGION 1..314: note = tr|A0A2A5XY19|A0A2A5XY19_9BACT Epoxyqueuosine reductase OS=Rhodothermaeota bacterium MED-G12 OX=1986237; GN = queG PE=3 SV=1
MITQEQARWTQFIRNTALEMGFDAIGFAQATYLEDDDRRLSTWLEQGRNGTMSWMENNHDKRVDPRLLVPGTQSVISLLVSYHRKDDHSQSNKGVSFARYAQGRDYHRVIKKKLKLLYQRIQQEIPFVEGRYFVDSAPVLERSWAQRSGLGWIGKNGNLLNKQLGSYFFIADILLNIPLLYDHPTTDHCGTCRRCIDACPTDAIYEPQKVDGAKCISHWNIEHDGEIPSFFQEKIGNWIFGCDICQEVCPWNRKALLGHWPEFQPNDNWMSLTPLEWSQLQEEEYEEYFNGTAVRRVKYKDFLRNATIVLKNHQ

SEQ ID NO: 80480 - protein, 317 aa, unidentified
  source 1..317: note = Rhodothermaeota bacterium
  REGION 1..317: note = tr|A0A368D496|A0A368D496_9BACT tRNA epoxyqueuosine(34) reductase QueG OS=Rhodothermaeota bacterium MED-G64 OX=2164156 GN=queG PE=4 SV=1
MDPLLLTRQIRQKAEELGFGACRFAKAEPLVEEARHLEEWLSRGHHGSMAWMEHYFDKRIDPTKLVEGAKTVVCLMAGYHFQERWESPQSRVPRVAKYAQSRDYHKVLKKACHGIINHLHETISPDIHARAFVDSAPVMERAWAQRSGIGWLGKNGNILNRTHGSWFLLAEIILDQETIPDQPMQDHCGSCTACIDACPTEAIVKPSVIDSRKCISYLTIEHKQELSNETVKQLDGWLFGCDICQDVCPWNRKAVPHRMPGLETREAFSPLPSLKEWSEFTEDTFFEQFQGSPLMRAGWQRLTTTARAINNLDRSIS

SEQ ID NO: 80481 - protein, 326 aa, Rhodothermus marinus
  REGION 1..326: note = tr|D0MDL6|D0MDL6_RHOM4 Epoxyqueuosine reductase; OS = Rhodothermus marinus (strain ATCC 43812 / DSM 4252 / R-10) OX=518766 GN=queG PE=3 SV=1
MPGFDEHAQQRLAQALKAEARRLGFDACGISKAEPLDEEARRLEAWLKAGYHGTMYWMERHFDKRIDPTRLVEGARSVISVLHNYYQPVAHDPSPETGKISRYAWGDDYHEVLKEKLYQLFAWLEAQVGEVHGRAFVDSAPVMDKAWARRSGLGWIGKNTNLINRRMGSFFFIGELIVDVPLPPDGPIPDYCGTCTRCIDACPTGALVQPYVLDARRCISYLTIEHRGDDIPPELQEKMGNWIFGCDICQDVCPWNKFKYATSEPRFMPRPGLPDTPLERWEELDLEAFRQKFRKNAVKRTKFEGFKRNVRIALQNVRRDTLQTPE

SEQ ID NO: 80482 - protein, 326 aa, Rhodothermus marinus
  REGION 1..326: note = tr|G2SFR3|G2SFR3_RHOMG Epoxyqueuosine reductase; OS = Rhodothermus marinus (strain SG0.5JP17-172) OX=762570; GN = queG PE=3 SV=1
MPGFDEHAQQRLAQALKAEARRLGFDACGISKAEPLDEEARRLEAWLKAGYHGTMYWMERHFDKRIDPTRLVEGARSVISVLHNYYQPVAHDPSPETGKISRYAWGDDYHEVLKEKLYQLFAWLEAQVGEVHGRAFVDSAPVMDKAWARRSGLGWIGKNTNLINRRMGSFFFIGELIVDVPLPPDGPIPDYCGTCTRCIDACPTGALVQPYVLDARRCISYLTIEHRGDDIPPELQEKMGNWIFGCDICQDVCPWNKFKYATSEPRFMPRPGLPDTPLERWEELDLEAFRQKFRKSAVKRAKFEGFKRNVRIALQNVRRATLQTPE

SEQ ID NO: 80483 - protein, 326 aa, Rhodothermus profundi
  REGION 1..326: note = tr|A0A1M6VXQ5|A0A1M6VXQ5_9BACT Epoxyqueuosine reductase OS=Rhodothermus profundi OX=633813 GN=queG PE=3; SV = 1
MPGFDQHAQERLARALKAEARRLGFDACGISKAEVLDEEARRLEAWLKAGFHGTMHWMERHFDKRIDPTKLVEGARSVISVLHNYYQPLSPDPSPETGKISRYAWGDDYHEVLKEKLYQLFAWLEAQVGEVHGRAFVDSAPVMDKAWARRSGLGWIGKNTNLINRRMGSFFFIGELIVDVPLPPDGPIPDYCGSCTRCLDACPTGALVQPYVLDARRCISYLTIEHRGDDIPPELQEKMGNWIFGCDICQDVCPWNKFKYATNEPRFLPRPGLPDTPLDRWEELDLEAFRQKFRKSAVKRAKFEGFKRNVRIALQNVRRTMLHTSE

SEQ ID NO: 80484 - protein, 344 aa, Rhodovarius sp.
  REGION 1..344: note = tr|A0A437MM20|A0A437MM20_9PROT Epoxyqueuosine reductase OS=Rhodovarius sp. CCP-6 OX=1979269 GN=queG PE=3; SV = 1
MLKQAITDRARTLGFDAIGFTTATLPPEARARLDAFVAEGAHGAMGWMETRMEQRAHPQALWPEAVTVISLGLNYGPEEDPLAILAHRHRGAISVYAQGRDYHDVVKKKLKALGQWMVHAFKGSELKVFVDTAPVMEKPLAAQAGLGWQGKHTNLVSRTHGSWLFLGEIYTTLSIEPDAPEGEHCGRCTACLTACPTNAFPAPFRLDARRCISYLTIEQAGPIPHEFRAAMGNRIYGCDDCLAVCPWNKFAARAREAELHARETAANPPLAELATLEDASFRTRFSGSPIKRIGVNRFLRNVMIAIGNSGDPALRASAEAHTQAEDPVLAEAARWAVERLNDAR

SEQ ID NO: 80485 - protein, 335 aa, Rhodovulum adriaticum
  REGION 1..335: note = tr|A0A4V6NQM2|A0A4V6NQM2_RHOAD Epoxyqueuosine reductase OS=Rhodovulum adriaticum OX=35804; GN = EV656_101678 PE=4 SV=1
MARAEGLARMGVCRPDAIPQAPARLASFVGQGRHGQMDWMERRMEWRGNPAALWPAARSILTFAEPYTQDHDPLAVLDRPDCGAVSVYAQHRDYHDVLKKRLKRVGRWFLDQAPGHEIKVFVDTAPVMEKPLAQAGGLGWQGKHTNLLGRDLGNWFFLGLIFTTVDLPPDPPEGEHCGSCTACLDACPTGAFPAPFQLDARRCISYLTIEHKGPVDPDLRAALGNRIYGCDDCLGACPWNKYAVAATEAKYAARPDLIAPPLAELAALDDAGFRARFSGSPIKRIGRDRFVRNVCYAIGNSGDAALLPAVQALVDDPDATVADAARWAVDRLRRA

SEQ ID NO: 80486 - protein, 346 aa, unidentified
  source 1..346: note = Rhodovulum bhavnagarense
  REGION 1..346: note = tr|A0A4R2RAM4|A0A4R2RAM4_9RHOB Epoxyqueuosine reductase OS=Rhodovulum bhavnagarense OX=992286 GN=queG; PE = 3 SV=1
MSAALKARLAETARDEGFAAMGVCRPDAIPHAPARLAEFVAQGRQGQMAWMAERMGWRGNPAALWPEARAIISFAEPYTPAHDPLAVLDRPDRGAISVYAQNRDYHDVLKKRLKRVGRWLLEQAPEHQIKVFVDTAPVMEKPLAQAAGLGWQGKHTNLLGRDLGNWFFLGLIFTTLDLPPDAPEAEHCGSCTACLDACPTGAFPAPFQLDARRCISYLTIEHKGPVDGELRALMGNRIYGCDDCLGVCPWNKFAVAAREVKYLARPDLIEPPLAELAALDDAAFRARFSGSPVKRIGRGRFVRNVCYAIGNSGDPTLSSVVAALTDDQDAAVADAARWALARLGGA

SEQ ID NO: 80487 - protein, 346 aa, Rhodovulum euryhalinum
  REGION 1..346: note = tr|A0A4R2K960|A0A4R2K960_9RHOB Epoxyqueuosine reductase OS=Rhodovulum euryhalinum OX=35805 GN=queG PE=3; SV = 1
MSAALKDRLAARARDEGFAAMGVCRPDAIPEAAGRLAEFVALGRHGQMGWMAERMDWRGNPAALWPAARSVIMLAEPYTQDHDPLAVLARGDRGAISVYAQNRDYHDVLKKRLKRLGRWLLEQAPGEAIKVFVDTAPVMEKPLAQAAGLGWQGKHTNLLGQGLGNWFFLGSIFTTLDLPPDAPAAEHCGSCTACLDICPTRAFPAPFRLDARRCISYLTIEHKGPVNEALRPLLGNRIYGCDDCLAACPWNKFAVAASETKYAARPELVAPPLADLARLDDAAFRTLFAGSPIKRIGRDRFVRNVCYAIGNSGDPALTGAARGLTDDPAPTVADAARWAVARLSRP

SEQ ID NO: 80488 - protein, 369 aa, Rhodovulum imhoffii
  REGION 1..369: note = tr|A0A2T5BP83|A0A2T5BP83_9RHOB Epoxyqueuosine reductase OS=Rhodovulum imhoffii OX=365340 GN=queG PE=3; SV = 1
MPISTSEPLKARLRNRAQQEGFAACRVCSPDSIPKAPARLARFVALGRHGQMGWMADRMGWRANPAALWPEARSIVMLAEPYTQAHDPLAVLKRPDRGAISVYAQNRDYHDVLKKRLKRVGRWFLEQAPGEQIKVFVDTAPVMEKPLAQAAGLGWQGKHTNLLARDLGNWFFLGVIFTTVALPPDPPEHEHCGSCTACLDACPTGAFPAPFQLDARRCVSYLTIEHKGPVPADLRHLLGNRIYGCDDCLGVCPWNKFAAAAYEVKYKARPDLIAPPLAELCALDDAAFRARFSGSPIKRLGRGRFVRNVCYAIGNSGDQALYPAVRALVADADPVVADAACWALDRLSRCPSARGVQGGASFPPGEGKV

SEQ ID NO: 80489 - protein, 346 aa, Rhodovulum kholense
  REGION 1..346: note = tr|A0A2T5TWZ0|A0A2T5TWZ0_9RHOB Epoxyqueuosine reductase OS=Rhodovulum kholense OX=453584 GN=queG PE=3; SV = 1
MNAALKDRLGARARDEGLAAMGVCRPDAIPEAAGRLAEFVARGRHGQMGWMAERMGWRGDPAALWPEARSVVMVAEPYTQTHDPLAALDRPDRAAISVYAQNRDYHDVLKKRLKRLGRWLLDEAPGHQIKVFVDTAPVMEKPLAQAAGLGWQGKHTNLLGRSLGNWFFLGAIFTTIELPPDEPETQHCGQCTACLDACPTGAFPAPFQLDARRCISYLTIEHKGPVDPALRPLLGNRIYGCDDCLGVCPWNKFAVAATEAKYAARPDLVEPPLADLAALDDAAFRDRFSGSPIKRIGRNRFVRNVCYAIGNSGDPALAAAVRRLTDDPDATVAEAARWALARLKDA

SEQ ID NO: 80490 - protein, 346 aa, Rhodovulum marinum
  REGION 1..346: note = tr|A0A4R2PYE1|A0A4R2PYE1_9RHOB Epoxyqueuosine reductase OS=Rhodovulum marinum OX=320662 GN=queG PE=3 SV=1
MSAGLKDRLKARALDEGFAAMGVCRPDAIPQAPARLAAFVGQGRHGQMTWMAERMAWRGDPAALWPAAQSVVMLAEPYTPEHDPLDVLARRDRAAISVYAQNRDYHDVVKKRLKRLGRWLIDQAPGAEIKVFVDTAPVMEKPLAQAAGLGWQGKHTNLLSRDLGNWVFLGAMFTTVNLPPDPPETDHCGRCTACLDICPTRAFPAPFQLDARRCISYLTIEHKGPVDEALRPGLGNRIYGCDDCLAVCPWNKFAVAATEAKYAARDDLCAPPLAELAALDDAAFRARFSGSPIKRIGRDRFVRNVCYAIGNSGDKTLIGPVQRLIHDPDPAVADAARWAVGRLSDP

SEQ ID NO: 80491 - protein, 346 aa, Rhodovulum robiginosum
  REGION 1..346: note = tr|A0A3R9MGD3|A0A3R9MGD3_9RHOB Epoxyqueuosine reductase OS=Rhodovulum robiginosum OX=68292 GN=queG PE=3; SV = 1
MGAGLKSRLLTQAGAEGFAKCRVCRPDAIPQAAGRLAAFVGGGRHGQMAWMEQRMGWRGDPAALWPEARSVVMLAELYTPEADPLAVLERRDRGAISVYAQNRDYHDIVKKRLKRLGRWLIEAAPGAEIKVFVDTAPVMEKPLAEAAGLGWQGKHTNLLARDLGNWFFLGAIFTTVEIAPDAPEGEHCGTCTACLDICPTDAFPAPFQLDARRCISYLTIEHKGPVDEALRPGLGNRIYGCDDCLAVCPWNKFAMTAREARYAARPDLVAPPLAELAALDDAGFRARFSGSPIKRIGRGRFVRNVCYAIGNSDDPGLIGAVRALVDDADPAVADAARWAVRRLGSG

SEQ ID NO: 80492 - protein, 346 aa, Rhodovulum sp.
  REGION 1..346: note = tr|A0A2E2JVK4|A0A2E2JVK4_9RHOB Epoxyqueuosine reductase OS=Rhodovulum sp. OX=34009 GN=queG PE=3 SV=1
MMERLKERLAAKAVEEGFSAMRVTRPDAIPEAMGRLQAFLEAGHHGQMSWMADRVHWRGDPAALWPEARSVIMLAEAYTPEHDPREVVGMPDRAAISVYAQNRDYHDLVKKRLKRVGRWLIDQAPEAEIKVFVDTAPVMEKPLAEAAGLGWQGKHTNLLSRELGNWFFLGSIFTTVELPVDAPEVSHCGSCRACLDACPTGAFPAPYQLDARRCISYLTIEHHGPVDPALRPALGNRIYGCDDCLAACPWNKFAVEAREMRYLARPEFVAPKLAELVALDDAAFRALFSGSPIKRIGRDRFVRNVLYAIGNSGDASLRDAAGALVDDPDEAVADAARWAVGRLTNL

SEQ ID NO: 80493 - protein, 392 aa, Rhodovulum sp.
  REGION 1..392: note = tr|J6UGG8|J6UGG8_9RHOB Epoxyqueuosine reductase; OS = Rhodovulum sp. PH10 OX=1187851 GN=queG PE=3 SV=1
MTDQSALLSASCEKTGAEPDLVAALREKAAALGFDAVAIAPPDLPPETGARLRDFLVQGLHGDMGWLADRPERRTSPCGLWADVRAVVMLGANYGPGHDPRALQAQKDRAAISVYARGDDYHDVIKPRLKELARWLIGSAGGDAKVFVDTAAVMEKPLAMRAGLGWQGKHTNLVSRDLGSWLFLGALFTTLPLPPDPPGRDHCGSCKACLDACPTKAFPAPWRLDPRRCVSYLTIEHKGSIPRDLRPLIGNRVYGCDDCLAACPWNKFARMGRDAKLSARDELTGPALAELAKLDDAAFRALFRKTAVKRVGREKFLRNVMIAIGNSGDPSLVPAAEARLTDAAAPVRGAAVWALSKLLPERDLSALAERHRGENDPTVRDEWRAALRSDEG

SEQ ID NO: 80494 - protein, 347 aa, Rhodovulum steppense
  REGION 1..347: note = tr|A0A4R1YSC8|A0A4R1YSC8_9RHOB Epoxyqueuosine reductase OS=Rhodovulum steppense OX=540251 GN=queG PE=3; SV = 1
MSGALKDRLAAQARAEGFAAMGVCRPDAIPQAPARLAAFVERGWHGQMAWMAERMGWRGDPAALWPAARSVVMLAEPYSPAHDPLAVLDRPDRGAISVYAQNRDYHDVLKARLKRLGRWLIDAAPGAEIKVFVDTAPVMEKPLAQAAGLGWQGKHTNLLGQGLGNWFFLGAIFTTVELPPDAAGQEHCGSCTACLEACPTGAFPAPFQLDARRCISYLTIEHKGPVDEGLRPLMGNRIYGCDDCLGVCPWNKFAAAAREVKYAARPDLVAPRLADLAGLDDAGFRALFAGSPIKRIGRDRFVRNVCYAIGNSGDRALIGPVQRLVCDPDPTVAEAARWAVARLSRAQ

SEQ ID NO: 80495 - protein, 346 aa, Rhodovulum sulfidophilum
  REGION 1..346: note = tr|A0A1Q9QS65|A0A1Q9QS65_RHOSU Epoxyqueuosine reductase OS=Rhodovulum sulfidophilum OX=35806 GN=queG; PE = 3 SV=1
MTAALKDRLAARAREEGLAAMGVCRPDAIPEAAGRLAEFVAKERHGQMGWMAERMSWRGNPAALWPEARSVVMFAEPYTQAHDPLAALDRPDRAAISVYAQNRDYHDVLKKRLKRLGRWFLDQAPGHEIKVFVDTAPVMEKPLAQAAGLGWQGKHTNLLGRNLGNWFFLGVIFTTVELPVDAPETGHCGNCTACLDACPTGAFPAPFQLDARRCISYLTIEHKGPVDPELRPLLGNRIYGCDDCLGICPWNKFAVAATETKYAARPDLIEPPLAELAGLDDAAFRARFSGSPIKRIGRGRFVRNVCYAIGNSGDSRLRDAVARLSEDADPVVAEAARWAVARLSRG

SEQ ID NO: 80496 - protein, 346 aa, Rhodovulum sulfidophilum
  REGION 1..346: note = tr|A0A0D6B7J6|A0A0D6B7J6_RHOSU Epoxyqueuosine reductase OS=Rhodovulum sulfidophilum OX=35806 GN=queG; PE = 3 SV=1
MTAALKDRLAARAREEGLAAMGVCRPDAIPEAAGRLAEFVAKERHGQMGWMAERMSWRGNPAALWPEARSVVMFAEPYTQAHDPLAALDRPDRAAISVYAQNRDYHDVLKKRLKRLGRWFLDQAPGHEIKVFVDTAPVMEKPLAQAAGLGWQGKHTNLLGRNLGNWFFLGVIFTTVELPADAPETGHCGNCTACLDACPTGAFPAPFQLDARRCVSYLTIEHKGPVDPELRPLLGNRIYGCDDCLGSCPWNKFAVAATETKYAARPDLIEPPLAELAGLDDAAFRARFSGSPIKRIGRGRFVRNVCYAIGNSGDSRLRGAVARLAEDADPVVAEAARWAVARLSRG

SEQ ID NO: 80497 - protein, 346 aa, Rhodovulum visakhapatnamense
  REGION 1..346: note = tr|A0A4R8FQN9|A0A4R8FQN9_9RHOB Epoxyqueuosine reductase OS=Rhodovulum visakhapatnamense OX=364297; GN = queG PE=3 SV=1
MSAALKDRLAARARDEGLAAMGVCRPDAIPEAAGRLAEFVARGRHGQMGWMAERMGWRGDPAALWPEVRSVVMVAEPYTQTHDPLAALDRPDRAAISVYAQNRDYHDVLKKRLKRLGRWLLDEAPGHRIKVFVDTAPVMEKPLAQAAGLGWQGKHTNLLGRSLGNWFFLGAIFTTIELPPDAPETQHCGQCTACLDACPTGAFPAPFQLDARRCISYLTIEHKGPVDPALRPLLGNRIYGCDDCLGVCPWNKFAVAATEAKYAARPDLVEPPLADLAALDDTAFRERFSGSPIKRIGRDRFVRNVCYAIGNSGDPVLAAAVGPLTDDPDATVAEAARWALARLKDA

SEQ ID NO: 80498 - protein, 315 aa, unidentified
  source 1..315: note = Richelia intracellularis
  REGION 1..315: note = tr|M1WTN3|M1WTN3_9NOST Epoxyqueuosine reductase; OS = Richelia intracellularis HH01 OX=1165094 GN=queG PE=3; SV = 1
MNFYSDLVKQKALELGFHLVGIAAVEGLDVNNQERLAKWIALGFHASMGWMDSPKRHSPELIMPEVQSVICVALNYYTPHQHSQEDEYGKISRYAWGRDYHKIMHKSLKALTNWLESLEPGIKGRYYADTGPVQDKVWAQRAGIGWISKNSNLITRKYGSWVFLGEVLTNLRLAPDKPHTQHCGSCNLCLQACPTNAITQPFIVDANRCIAYHTIENQDEQLPEMIIPHLHGWVAGCDICQDVCPWNQRFAQETNVVDFQPYAGNLAPKLEELASISDKDWDRQFTASALRRVKPKMLRRNARANIKKSSNTSKT

SEQ ID NO: 80499 - protein, 265 aa, unidentified
  source 1..265: note = Richelia intracellularis
  REGION 1..265: note = tr|M1X3Y3|M1X3Y3_9NOST Iron-sulfur cluster-binding protein OS=Richelia intracellularis HM01 OX=1165095; GN = RINTHM_7480 PE=4 SV=1
MESPKRYSPELIMPEVQSVICVALNYYTPHQHSQEDEYGKISRYAWGRDYHKIMHKSLKALTNWLESLEPGIKGRYYADTGPVQDKVWAQKAGIGWISKNSNLITRKYGSWVFLGEVLTNLRLAPDKPHTQHCGSCNLCLQACPTNAITQPFIVDANRCIAYHTIENQDEQLPEMIIPHLHGWVAGCDICQDVCPWNQRFAQETNVVDFQPYTGNLAPKLEELASISDKDWDRQFTASALRRVKPKMLRRNARANIKKSSNTSET

SEQ ID NO: 80500 - protein, 318 aa, unidentified
  source 1..318: note = Richelia sp.
  REGION 1..318: note = tr|A0A3B9F5P6|A0A3B9F5P6_9NOST Epoxyqueuosine reductase OS=Richelia sp. OX=2053605 GN=queG PE=3 SV=1
MTIVNFYSDLVKQKALELGFHLVGIAAVEGLDVNNQERLAKWIALGFHASMGWMDSPKRHSPELIMPEVQSVICVALNYYTPHQHSQEDEYGKISRYAWGRDYHKIMHKSLKALTNWLESLEPGIKGRYYADTGPVQDKVWAQRAGIGWISKNSNLITRKYGSWVFLGEVLTNLRLAPDKPHTQHCGSCNLCLQACPTNAITQPFIVDANRCIAYHTIENQDEQLPEMIIPHLHGWVAGCDICQDVCPWNQRFAQETNVVDFQPYAGNLAPKLEELASISDKDWDRQFTASALRRVKPKMLRRNARANIKKSSNTSKT

SEQ ID NO: 80501 - protein, 368 aa, unidentified
  source 1..368: note = Rickettsiales bacterium
  REGION 1..368: note = tr|A0A2E4WSS9|A0A2E4WSS9_9RICK tRNA epoxyqueuosine(34) reductase QueG OS=Rickettsiales bacterium OX=2026788 GN=queG PE=4 SV=1
  VARIANT 182: note = Xaa can be any naturally occurring amino acid
  VARIANT 193: note = Xaa can be any naturally occurring amino acid
  VARIANT 216: note = Xaa can be any naturally occurring amino acid
  VARIANT 218: note = Xaa can be any naturally occurring amino acid
  VARIANT 226: note = Xaa can be any naturally occurring amino acid
  VARIANT 237: note = Xaa can be any naturally occurring amino acid
  VARIANT 239: note = Xaa can be any naturally occurring amino acid
  VARIANT 241: note = Xaa can be any naturally occurring amino acid
  VARIANT 246: note = Xaa can be any naturally occurring amino acid
  VARIANT 249: note = Xaa can be any naturally occurring amino acid
  VARIANT 256: note = Xaa can be any naturally occurring amino acid
  VARIANT 258..259: note = Xaa can be any naturally occurring amino acid
  VARIANT 268: note = Xaa can be any naturally occurring amino acid
  VARIANT 274..275: note = Xaa can be any naturally occurring amino acid
  VARIANT 277: note = Xaa can be any naturally occurring amino acid
  VARIANT 289: note = Xaa can be any naturally occurring amino acid
  VARIANT 305: note = Xaa can be any naturally occurring amino acid
  VARIANT 309: note = Xaa can be any naturally occurring amino acid
  VARIANT 333: note = Xaa can be any naturally occurring amino acid
MRNLKKIIEDKILSTGFDVVGFSDTCVDKNTKENYFNFLKKNHHGDMKWLESHYEKKINPKKVWDEVQTIVMIGMNYCPKQNPLQYNNYQNTSNISVYAKNEDYHNVIKKKLLILQKWFENCLSIKSKIFVDTSPILEKYFAEKCGIGWQGKHTNLVSKDYGSWLFLSGIFLPLKLSFNSKXKENCGKCIKCXDICPTNAIISENEIDARKCISYXTXEYKGPFPXSLRKSIGNKIXGXDXCLAIXPWXKFSNPTXNXXFIQTENDKXLNFFLXXDXIKFKNYFKNSPXKRIGYTSFIRNVLIAXGNSXHQGLKKNIYAYLKNPDPIIRGASXWSLGQLLDKNDKKILKNTLKNTEKNKYVLYELNLL

SEQ ID NO: 80502 - protein, 350 aa, unidentified
  source 1..350: note = Rickettsiales bacterium
  REGION 1..350: note = tr|A0A1Z9TFN7|A0A1Z9TFN7_9RICK Epoxyqueuosine reductase OS=Rickettsiales bacterium TMED269 OX=1986872; GN = queG PE=3 SV=1
  VARIANT 8: note = Xaa can be any naturally occurring amino acid
  VARIANT 12: note = Xaa can be any naturally occurring amino acid
  VARIANT 35: note = Xaa can be any naturally occurring amino acid
  VARIANT 45: note = Xaa can be any naturally occurring amino acid
  VARIANT 54: note = Xaa can be any naturally occurring amino acid
  VARIANT 75: note = Xaa can be any naturally occurring amino acid
  VARIANT 85: note = Xaa can be any naturally occurring amino acid
  VARIANT 194..195: note = Xaa can be any naturally occurring amino acid
  VARIANT 226: note = Xaa can be any naturally occurring amino acid
  VARIANT 236: note = Xaa can be any naturally occurring amino acid
  VARIANT 245: note = Xaa can be any naturally occurring amino acid
  VARIANT 276: note = Xaa can be any naturally occurring amino acid
  VARIANT 302: note = Xaa can be any naturally occurring amino acid
  VARIANT 322: note = Xaa can be any naturally occurring amino acid
  VARIANT 326: note = Xaa can be any naturally occurring amino acid
  VARIANT 345: note = Xaa can be any naturally occurring amino acid
MTNLKKLXNDIXKWSLELGFDQMGVSGIEIKDDEXRLIEWLKNNXHGSMKYMEXHGKKRARPDELINGALRVISXRMTYHFFDKXLSERKLNNSHNAYIANYALGRDYHKTIRSKLKRLITRISQHSNIKEKNYFVDSAPVLERALARNAGLGWIGKNTNLINKKDGSWFFIAEIITDIELEIDPPATNHCGTXXECIDVCPTSAIIAPYELDARKCISYLTIENXNSIPEEMRKXIGNRIFGCXDCQIFCPWNKFAKKPVIDDFKPRDEFEDASXESLFKWSEEEWDEKTRGSAIRRTGYXGWLRNIAVALGNSKKERSTXDLLXSRKGQTGSMVDEHIDWALXQQLSD

SEQ ID NO: 80503 - protein, 312 aa, Riemerella anatipestifer
  REGION 1..312: note = tr|A0A3T0TLC6|A0A3T0TLC6_RIEAN Epoxyqueuosine reductase OS=Riemerella anatipestifer OX=34085 GN=queG; PE = 3 SV=1
MNKKAHYTQLIKNKAKAFGFQSCGISQAAFLEEESPRLEVWLKKGYHGKMSYMENHFDKRLDPRLLVEGSRSVISLSYNYFPQEELPTIDNFKISKYAYGRDYHEVIKDILRDMVAELQEEIGAFGFRVFVDSAPVLERAWAKKSGIGWVGKNANLISKKSGSFFFLAEIICDLELEPDAPTTDHCGRCTRCIDACPTNAIVNEKIIDGSRCISYATIELKEEIPAAFRSNMQDWMFGCDICQEVCPWNRFSKPHNQPLFNPNPALKNFTKREWRELTQDLFSEIFRKSPVKRTKFAGLQRNISFLDQELSD

SEQ ID NO: 80504 - protein, 312 aa, Riemerella anatipestifer
  REGION 1..312: note = tr|J9R396|J9R396_RIEAN Epoxyqueuosine reductase; OS = Riemerella anatipestifer RA-CH-1 OX=1228997 GN=queG; PE = 3 SV=1
MNKKAHYTQLIKNKAKAFGFQSCGISQAAFLEEEAPRLEAWLKKGYHGKMSYMENHFDKRLDPRLLVEGSRSVISLSYNYFPQEELPTIDNFKISKYAYGRDYHEVIKDILRDMVAELQEEIGAFGFRVFVDSAPVLERAWAKKSGIGWVGKNANLISKKSGSFFFLAEIICDLELEPDAPTTDHCGRCTRCIDACPTNAIVNEKIIDGSRCISYATIELKEEIPVAFRSNMQDWMFGCDICQEVCPWNRFSKPHNQPLFNPNPALKNFTKKEWRELTQELFSEIFRKSPVKRTKFAGLQRNISFLDQELPD

SEQ ID NO: 80505 - protein, 312 aa, Riemerella sp.
  REGION 1..312: note = tr|A0A496P2S0|A0A496P2S0_9FLAO Epoxyqueuosine reductase OS=Riemerella sp. OX=2382126 GN=queG PE=3 SV=1
MGQNAKKYSEIIKQKAEKYGFQGCGISKAGFLEEEAPAFERWLKAGFNGEMGYMENYFDKRLDPTLLVEGAKSVISLSYNYYPEYKLNTENNFKISKYAYGEDYHEVIKDILREMIVELQEEIGEFGFRVFTDSAPILERAWARKSGIGWVGKNANLITKKHGSFFFLCEIICDLELEEDGATTDHCGKCTKCIDACPTQAIVGDRVIDGSKCISYATIELKSQIPDFFEGKMDDWIFGCDVCQDVCPWNRFSAPHSQPKFALKEQLSELRKPEWRELTQELFSEVFRKSPVKRTKFAGLMRNIKFIEENKK

SEQ ID NO: 80506 - protein, 315 aa, Riemerella sp.
  REGION 1..315: note = tr|A0A496P1M4|A0A496P1M4_9FLAO Epoxyqueuosine reductase OS=Riemerella sp. OX=2382126 GN=queG PE=3 SV=1
MAQTAEKYAKIIKQKAEKFGFQGCGISKAGFLEEDATALEKWLKAGYNGEMAYMENYFDKRTDPRLLVEGAKSVISLSYNYFPQYKLETENNFKISKYAYGEDYHDVIKDILRQMIAELQEEIGEFGFRVFTDSAPVLDRAWARKSGIGWVGKNANLITKKHGSFFFLAEIICDLELEEDGATTDHCGSCRKCIDACPTQAIVNERIIDGSKCISYATIELKNEIPDYFEGKMDDWIFGCDVCQDVCPWNRFAAPNTEPKFALKEFSQLRKPDWQDLTQEIFSEIFRKSPVKRTKFSGLMRNIKFLEKTKLDSED

SEQ ID NO: 80507 - protein, 328 aa, Rikenella microfusus
  REGION 1..328: note = tr|A0A379MNF4|A0A379MNF4_9BACT Epoxyqueuosine reductase OS=Rikenella microfusus OX=28139 GN=queG PE=4; SV = 1
MGSAGTGEESPGNSRNIGMYGLQEIVEREYRACGFSAAGVAAFALLEEEKERFVQWLGQGYGADMGYLERSAGYRHDLRRLFPAVRSVVVTLTSYRRPPEVRQPDGAPRIARFAWGDDYHDVLKRNLRRLLEAIRGYEGFGAAKGRPVTDSAPAFERAWAVRAGLGWIGRSSMLIHPRLGSFTLIGMLLLDMPLPDGCLPAQRVPDGCGNCRRCMEACPTKAIVAPRVVNAGRCLSYQTIERPGAVESAVRPFLDGRIFGCDRCMEVCPYNNRPDMPLAPENAGLEAVAERLELTADGWREMTGEEFEARFARSPLLRAGLEKIKSSL

SEQ ID NO: 80508 - protein, 315 aa, unidentified
  source 1..315: note = Rikenellaceae bacterium
  REGION 1..315: note = tr|A0A3D0F391|A0A3D0F391_9BACT tRNA epoxyqueuosine(34) reductase QueG OS=Rikenellaceae bacterium OX=2049048 GN=queG PE=4 SV=1
MSPDELHIKINDLANRLGFAGYGAVAVEKMSAERAHLESFVSKSYHGSMRYLAANMDIREDPSLLLDSAKSIMVLLVPYKPLQRQQEHYPKISSYAYGLDYHYFIKSRLRVLAESIKELYPQMSYRVFTDSAPIFERALAVKAGLGFIGKNTFLISKTQGLHTLIGIIITDIPLKYNQQKVSNGCGKCTRCMEACPNGALTAPFVLDARRCISYNTIESPVGERLCDFSVLREDNIFGCEICLDVCPWSGKGETTSWQEFLPIETKQGRSSIEIAAREWLQMEEEEFKIYFSKSPLSRAGLSKIKESVTCVNLKK

SEQ ID NO: 80509 - protein, 314 aa, unidentified
  source 1..314: note = Rikenellaceae bacterium
  REGION 1..314: note = tr|A0A359H1Z2|A0A359H1Z2_9BACT tRNA epoxyqueuosine(34) reductase QueG OS=Rikenellaceae bacterium OX=2049048 GN=queG PE=4 SV=1
MNTDKFHEIICDLSLKAGFIDYGAAPVKKLTADCKYLNEYIRKGHNAGMNYMARNISLREDPGLLVEDAKSVLCFLAPYKPSENQESSLPQISSYAFGLDYHHVIKEKLYKILEEIISLMPDAKARVFTDSAPVFERAWAARAGLGFIGKNTFLISKSHGLHTLIGLIILNKEVKYGKQVSQGCGNCTKCLDCCPTGALYRPFGLDARKCISYHTIESKPDSHEEFMVDLNNSIFGCEICLRACPWSGKGKPGEWPEFMPLNIVGYSKKITELSSADWENMDEKTFNLNFSDSPLFRAGLRKIKISLGTKKDSL

SEQ ID NO: 80510 - protein, 311 aa, unidentified
  source 1..311: note = Rippkaea orientalis
  REGION 1..311: note = tr|B7JV32|B7JV32_RIPO1 Epoxyqueuosine reductase; OS = Rippkaea orientalis (strain PCC 8801) OX=41431 GN=queG; PE = 3 SV=1
MTPSQWTGIIKQKALELGFHKVGIADVDDNFDDRATNHLNTWLALGYHSDMAWMANPKRFNIRDCWPEVKSVICVALNYYTPHQHPQGQEYGKISRYGWGRDYHKVMGKKLKALSQWLESQDNSIKTRYYVDTGPIQDKVWAQRSGIGWIAKNSNVITREYGSWVFLGEVLTNLSLIPDKPHTQHCGTCKSCLDACPTRAIPQPFVVDANRCIAYHTIENKADTLPEPIAAKLEGWVAGCDICQEVCPWNQRFAQETDVADFQPYPDNIAPKLRDLANMSLEEWDRRFRGSALRRIKLERWQRNANANLEK

SEQ ID NO: 80511 - protein, 373 aa, Rivibacter subsaxonicus
  REGION 1..373: note = tr|A0A4Q7V9U7|A0A4Q7V9U7_9BURK Epoxyqueuosine reductase OS=Rivibacter subsaxonicus OX=457575 GN=queG; PE = 3 SV=1
MHAVPLAPSPRDFDPATNGEVLVAQLRLWARSLGFSQIGIAGVDLAAAEPGLQAWLEAGFHGSMDYMAAHGLKRARPAELVPGTLRVVTARMDYLPAAMPEGWQAIGFERLQRPDAASVSLYARGRDYHKVLRSRLQKLADQLADVVGPFGHRVFTDSAPVLEVELAQRSGIGWRGKHTLVLSREAGSMFFLGEIYVDLALPETAPVVAHCGTCSACIDVCPTQAIVAPYRLDARRCISYLTIEHDGPIPEPLRAAIGNRIYGCDDCQLVCPWNKYAQRATLADFDVRETLAEPTLLQLWAWSEADFLRLTEGSAIRRIGYGRWRRNLAVALGNAWRDSGDERIAQALTGARDAATPLVQEHIDWALAQREVD

SEQ ID NO: 80512 - protein, 358 aa, unidentified
  source 1..358: note = Rivicola pingtungensis
  REGION 1..358: note = tr|A0A318KMV2|A0A318KMV2_9NEIS Epoxyqueuosine reductase OS=Rivicola pingtungensis OX=1054498 GN=queG; PE = 3 SV=1
MLPEPAQNRDYPELARQIKAWARDLGFSGATIGRAELPVEVGQRLLDWLAAGHHGEMDYMVRHGLLRARPAELVPGALSVVSVRLPYRDPAARDMHAVLADGDKAAIARYALGRDYHKTVRNRLQKLADRLHAAAGPLGYRVFSDSAPLMEVALAAQSGLGWRGKHTLLIHRDEGSFFFLGELLTDLPLPADAPVDAHCGRCTRCLDVCPTQAIVAPYQVDARRCISYLTIELAGAIPEPLRPLIGNRVYGCDDCQLVCPWNRFAVPTAEADFAVRHGLDDASLVSLFAWEADEFAQRMAGSPIYRIGHERWLRNLAVGLGNAPSSQAVTAALLARREHPSALVREHVAWALARHGVL

SEQ ID NO: 80513 - protein, 313 aa, Rivularia sp.
  REGION 1..313: note = tr|K9R7T4|K9R7T4_9CYAN Epoxyqueuosine reductase; OS = Rivularia sp. PCC 7116 OX=373994 GN=queG PE=3 SV=1
MNQSSSLCSTQIKEKALELGFHKVGITTANVTDKQAQRLQAWLALGYHADMEWMRNPKRQNIKLVMPEVRSLICVALNYYTPHQRSEQKEYGKISRYAWGRDYHKVVQKKLKALSIWLQSLDEKIKTRHYIDTGPIQDKVWAQQAGIGWIAKNGNLITREYGSWVFLGEILTNLELTPDIPHTQHCGSCTKCIESCPTDAITEPFVIDANRCIAYHTIENRDEKLPPHIASKLDGWVAGCDICQDVCPWNQRFAKTTDVEEFQPYPGNISPKLIELSRITDENWDKQFPASALRRIKPQMLRRNARANLEASP

SEQ ID NO: 80514 - protein, 469 aa, unidentified
  source 1..469: note = Robbsia sp.
  REGION 1..469: note = tr|A0A494XFJ2|A0A494XFJ2_9BURK Epoxyqueuosine reductase OS=Robbsia sp. DHC34 OX=2419776 GN=queG PE=3 SV=1
MNPLNTESALDPCAVETGHAPHAALDADALATLAARIRQWGRELGFDAVGITDTDLSDAEQALQAWLAAGFHGEMDYMAKHGLKRARPAELVPGTLRVISLRMAYLPVDLTASDASGAGPERAETTRRPPGQPRSGWRAAQLARAERPGDAVVSVYARGRDYHKVLRNRLQKLSERIATEIGPFGYRVFTDSAPVLEVALAARADIGWRGKHTLLLERDAGSFFFLGEIFVDLPLPVDSADREPHARDASRLSATAAEPAPQTTAQTLVSNGAGATAASPTPATSDDVATVASGGRVARAPASGHCGSCTRCIDVCPTQAIIAPYTLDARRCISYLTIELAGSIPEPLRPLIGNRIYGCDDCQLVCPWNKFAQPARVDDFETRNGLDRATLLELWQWTSRDFEDRLAGTAIRRIGYERWVRNLAVGLGNAVRATAHGAQRDAYIEALRSRADDASPLIREHVEWALREA

SEQ ID NO: 80515 - protein, 312 aa, unidentified
  source 1..312: note = Robertkochia marina
  REGION 1..312: note = tr|A0A4S3M394|A0A4S3M394_9FLAO Epoxyqueuosine reductase OS=Robertkochia marina OX=1227945 GN=queG PE=3; SV = 1
MGKAEKYSRIIKEEAKRLGFLSCGISRAGFLEEEAPRLESWLNANMHGEMGYMANHFDKRLDPTLLVDGARSVVSMLLNYYPAEGQKDPEAPKLSKYAYGTDYHFVIKDKLKSLLQFIRDEIGEINGRAFVDSAPVLDKAWAARSGLGWIGKNANLLTKQQGSFYFIAELIIDLELEYDTPVTDHCGSCTACIDACPTEAIVSPYVVDGSKCISYLTIELKNELPGQFRDQMDNWMFGCDVCQDVCPWNRFARPHQEKAFEPHPELLDMTREDWFELTEETFKKVFKKSAVKRTKYSGLRRNLDFLLPPEKE

SEQ ID NO: 80516 - protein, 318 aa, Robiginitalea biformata
  REGION 1..318: note = tr|A4CG98|A4CG98_ROBBH Epoxyqueuosine reductase; OS = Robiginitalea biformata (strain ATCC BAA-864 / HTCC2501 / KCTC 12146) OX=313596 GN=queG PE=3 SV=1
MGADAHAKLIKAEAKRLGFLSCGISRAGFLEEEAPRLERWLKAGMHGEMGWMENHFDKRLDPTLLVPGAKSVVSLLLNYYPAEQQPESTYQVSKYAYGEDYHRVIKDRLRELLHVIRTEIGEVEGRAFVDSAPVLDKAWAARSGLGWMGKHSNLLTKEVGSYYFIAELILDLELPPDAPVTDHCGTCTACIDACPTQAITEPYVVDGSKCISYYTIELKSEIPASASGQWADWIFGCDICQDVCPWNRFATPHSEPRFNAHPELMEMTRADWEELTEEVFRQVFPKSAVKRTKFSGLKRNIAFLSDGDTASENDFERE

SEQ ID NO: 80517 - protein, 309 aa, Robiginitalea myxolifaciens
  REGION 1..309: note = tr|A0A1I6FTG3|A0A1I6FTG3_9FLAO Epoxyqueuosine reductase OS=Robiginitalea myxolifaciens OX=400055 GN=queG; PE = 3 SV=1
MSNGGKYAVLIKAEAKRLGFLSCGISRADFLEEEAPRLEQWLKHGMHGEMAYMENHFDKRLDPRKLVPGAQSVISLLYNYYPSEELSAEGYKISKYAYGEDYHKVIKDKLRELMVIIQEEIGEVGGRIFVDSAPVLDKAWAARSGLGWIGKHSNLLTQQVGSFYFIAELILDLELPEDSPVTDHCGSCTACLDACPTQAIVAPYVVDGSKCISYYTIELKNEIPPEMSGAWDDWIFGCDVCQDVCPWNRFSKPHGEPRFQPSEALKGMRREDWQELTEEVFRQVFPKSAVKRTKFSGLQRNIQFLEPGT

SEQ ID NO: 80518 - protein, 347 aa, Robiginitomaculum sp.
  REGION 1..347: note = tr|A0A2G2FV17|A0A2G2FV17_9RHOB Epoxyqueuosine reductase OS=Robiginitomaculum sp. OX=2030823 GN=queG PE=3; SV = 1
MPTLISKTEIDAFAREAGFTAMGVCRPDAIPQAAERLATYVDEGRHGQMGWMAERMAWRGNPAALWPDARSVIMLAEAYTPEHDPLAVLDQPSKGAVSVYAQGRDYHDIVKKRLKRVGRWLIEQAPEAQIKVFVDTAPVMEKPLAAAAGLGWQGKHTNLVGRDLGNWVFLGAIFTTLELEPDKPARDNCGNCSACLDICPTKAFVAPYQLDARRCISYLTIEHNGPVPEELRPALGNRIYGCDDCLAICPWNKFAKQAHEMRYIGSGEAPDLAALAGLDDAAFRLWFAGSPVKRTGRDRMMRNVLYAIGNSGRQELVAPAQALLDDPDAVVVDAARWALARLSAAKG

SEQ ID NO: 80519 - protein, 344 aa, Robiginitomaculum sp.
  REGION 1..344: note = tr|A0A2G2GJ48|A0A2G2GJ48_9RHOB tRNA epoxyqueuosine(34) reductase QueG OS=Robiginitomaculum sp.; OX = 2030823 GN=queG PE=4 SV=1
MFALSKNLQTRIQKLGFSTFGIVDLGDVGKQNGAWLNEFINNQYHGTMDWMKETAFRRAHPHNLWPEARSALVLGFNYGPDTDPMASLSQTDKATISVYARNKDYHSLIKGKLKEVAGLLARDTTKDVKVFVDTAPLMEKPLAAMSGIGWQGKHTNLVSREFGSWLFLGVILSEEQLTPTILKTGDCGSCTACLDVCPTDAFPAPYKLDARLCISYLTIEHKDPIPKNLRAKLGNRIYGCDDCLSVCPWNKFAQAASEQKLIARPDLNAPDLAMLAKLTDQNFRTHFSGSPIKRIGLPRFLRNVLYAIGNSGDANFGDIISPHLSHSDPVVRDAAEWALAQISN

SEQ ID NO: 80520 - protein, 342 aa, Robinsoniella peoriensis
  REGION 1..342: note = tr|A0A4U8QAG0|A0A4U8QAG0_9FIRM Epoxyqueuosine reductase OS=Robinsoniella peoriensis OX=180332 GN=queG; PE = 4 SV=1
MITAEELVNQAINLGYDKCGIIPLDALSGYTEKLTKRILRFPETTGRYQKLFQLANPKESFPWAKAVVVCSFYYGKYRIPQNLQGYIARYYLTDSRKNTLTEGYQTSVDFERFLCSQGFQIAFDRDFGIVPLRWAAVEAGLGIFRKNNFFYTEKGSWQHIEAFLIDQPLVYQNTHSLRPCSNACTLCATACPTASLCAPYAMNRNTCISDLTTWSGWDLDKEPLNKMMGDWIYGCDACQDVCPYNKHAWTGEKESKSLEMIAPGISLIKLIEAEYSWLEQVLNPLLWYIPKNKCWRYKTNALNAMRNSWKPEYMPAVRRACQDEKAQVRRMARWVSNLVSQE

SEQ ID NO: 80521 - protein, 340 aa, Robinsoniella sp.
  REGION 1..340: note = tr|A0A0J1GA44|A0A0J1GA44_9FIRM Uncharacterized protein OS=Robinsoniella sp. RHS OX=1504536 GN=RHS_1650; PE = 4 SV=1
MITAEELVNQAINLGYDKCGIIPLDALSGYTEKLTKRILRFPETTGRYQKLFQLANPKESFPWARAVVVCSFYYGKYRIPQNLQGYIARYYLTDSRKNTLTEGYQTSVDFERFLCSQGFQIAFDRDFGIVPLRWAAVEAGLGIFRKNNFFYTEKGSWQHIEAFLIDQPLVYRNTHSLRPCSDACTLCATACPTASLCAPYAMNRNTCISDLTTWSGWDLDKEPLNKMMGDWIYGCDACQDVCPYNKHAWTGEKESKSLEMIAPGISLIKLVEAEYSWLEEVLNPLLWYIPKNKCWRYKTNALNAMRNSWKPEYMATVRRACQDEKAQVRRMARWVSNLVS

SEQ ID NO: 80522 - protein, 299 aa, unidentified
  source 1..299: note = Romboutsia hominis
  REGION 1..299: note = tr|A0A2P2BUJ8|A0A2P2BUJ8_9FIRM Epoxyqueuosine reductase OS=Romboutsia hominis OX=1507512 GN=FRIFI_2522; PE = 4 SV=1
MNKEKLKEYFKSLGLDTVGITGVNVNYELEKKLKERIEKEHITGMEEPILENRINPKNIMKDAKSIIVCAFPYHIDNEKESNLSRYCRGLDYHIVAKELLQKVCDYLDENIEGFEYKIFVDNGPLVDRELAYLSGIGYFGINNNIITDKYGSYVFIGYIINNYEFSLDKPLDKECMKCGKCVKYCPGNALLGNYDMNPRKCLSYITQKKEELSLEEVKAIKNSGKIFGCDICQEVCPHNKNIKETHIEEFMKDLILNLDFEEIDEISNKEFKRRYGNRAFSWRGKKIIKRNIEIILEKS

SEQ ID NO: 80523 - protein, 301 aa, unidentified
  source 1..301: note = Romboutsia ilealis
  REGION 1..301: note = tr|A0A1V1I3X0|A0A1V1I3X0_9FIRM Iron-sulfur cluster protein OS=Romboutsia ilealis OX=1115758 GN=CRIB_2206 PE=4; SV = 1
MKKEELKDFCKSIGIDCVGIAGVGPYYDLEKIIKQRLLNGYITGMEEPIIENRVNPKETMENVKSIIVCAFPYYIGDFDECNLSKYCYGEDYHIVVKDMLQQICNYLSDNIDNFEYKIFADNGPLVDRYLAYLSGIGYFGINNNIITDEYGSYVFIGYIMSNYEFKSDTPLEKTCIKCGKCVKYCPGNAILGNYEMNPKRCLSYITQKKGELEEEEEKILKENKKVFGCDICQDICPHNKNIPITSIERFKQEAIFKLDIEEINDISNKEFKRKYGNRAFSWRGKNIIKRNINIVSEEPNE

SEQ ID NO: 80524 - protein, 301 aa, unidentified
  source 1..301: note = Romboutsia lituseburensis
  REGION 1..301: note = tr|A0A1G9R1W5|A0A1G9R1W5_9FIRM Epoxyqueuosine reductase OS=Romboutsia lituseburensis DSM 797 OX=1121325; GN = SAMN04515677_10645 PE=4 SV=1
MNKKELKEFCASLGLKCVGIAGVGPYDTLEKIIKHRLSNGHTTGMEEPILEKRINPKLTMENAKSIIVCAFPYYVEDDRDSNLSKYCRGKDYHIITKEFLQKICNYLEKSIKGFEYKIFVDNGPLVDRHLAQISGVGYFGINNNIITDEYGSYVFIGYIINNYEFYPDEPLPKTCINCGECVKYCPANALLGNYEMNPKRCISYLTQKKETLSDEEKESIRNNGKVFGCDVCQDVCPHNKNISKTEIEGFMKDLIYNLEYETISLMSNKEFKRTYGERAFSWRGKNLIKRNLEIVNDLEQS

SEQ ID NO: 80525 - protein, 302 aa, unidentified
  source 1..302: note = Romboutsia maritimum
  REGION 1..302: note = tr|A0A255HY79|A0A255HY79_9FIRM tRNA epoxyqueuosine(34) reductase QueG OS=Romboutsia maritimum; OX = 2020948 GN=queG PE=4 SV=1
MNNEKLIEFCKSIGLKCVGIAGIGPYDNLKKIIKNKLVNGHFTGMEEEVIENRIEPKLIMEDAKSIIVCAFPYYTGEINDSNISKYCYGKDYHIVVKEILQQICDYISNELDGFKYKIFADNGPLVDRHLAYLAGIGYFGINNNIITDEYGSYIFIGYIINNFEFNVNEPSPKTCIKCNKCVKYCPGNAILGNYELNPKRCLSYITQKKGDLSEEETRILKENKKVFGCDICQEVCPHNRKIPITDIKEFKENLITNLDYKEIESISNKEFKRRYNDRAFSWRGKNIIKRNIEIILEESDHI

SEQ ID NO: 80526 - protein, 301 aa, unidentified
  source 1..301: note = Romboutsia weinsteinii
  REGION 1..301: note = tr|A0A371IZW9|A0A371IZW9_9FIRM tRNA epoxyqueuosine(34) reductase QueG OS=Romboutsia weinsteinii OX=2020949 GN=queG PE=4 SV=1
MDNKKLKEFCHSIGIKCVGIAGIGPYHNLEKIIKNKLANGHFTGMEEAIVENRIDPRKTMENVKSIIVCAFPYYIGENERSNLSKYCQVKDYHIVVKEYLQKICNHIESSVENFEYKIFADNGPLVDRHLAYLAGIGYFGINNNIITDEYGSYIFIGYIMSNYEFKTDEPLPRTCIKCGKCVKYCPGNALLGNYEMNPRRCLSYMTQKKGELSEEEIKLINKNKKVFGCDICQEVCPHNKKVPITNLEEFREDVIDELDYEEINSISNKEFKRRYSDRAFNWRGRPLIKRNMEIILEKPIE

SEQ ID NO: 80527 - protein, 354 aa, Roseateles aquatilis
  REGION 1..354: note = tr|A0A246JHI7|A0A246JHI7_9BURK Epoxyqueuosine reductase OS=Roseateles aquatilis OX=431061 GN=queG PE=3; SV = 1
MVEVRAWAHGLGFSQIGVAHVDLSDAEAGLQAWLDAGFHGDMQYMAAHGLKRARPAELVPGTISILTARMDYLPGSVGPDWQDREWAAMRDPARAQVSLYARGRDYHKVLRQRLQQLADRIQAAVGPMGHRVFTDSAPVLEVELASRSGIGWRGKHTLTLHRDSGSMFFLGEIYLDLELPPSEPVTAHCGQCRACIDACPTGAIVGPYRLDARRCISYLTIEQDGPIPLEFREAIGNRIYGCDDCQLACPWNKFARTNALPDFDWREPLGQASLLELWAWDEATFLRRTEGSAIRRIGHQRWRRNIAVAMGNALRQDLAPSLRARMRAALTAELAGATAMVAEHIDWALSQGVE

SEQ ID NO: 80528 - protein, 352 aa, Roseateles depolymerans
  REGION 1..352: note = tr|A0A2W5D946|A0A2W5D946_9BURK Epoxyqueuosine reductase OS=Roseateles depolymerans OX=76731 GN=queG PE=3; SV = 1
MRGWARELGFSQIAVAGIDLSSAEPGLLAWLDAGHHGSMQYMAAHGLKRARPAELVPGTLSIITARMDYLPRDTGPDWRAVEWSGLAQPGQAQLSLYARGRDYHKVLRQRLQKLAERLADEVGPLGHRVFTDSAPVLEVELAARSGLGWRGKHTLALHREAGSMFFLGEIFVDLALPPTEPVSSHCGACNACSDACPTGAITAPYRVDARRCVSYLTIEHDGPIPEDLRPLLGNRIYGCDDCQLACPWNKFAQPAVLADFDARPGLAGSRIEQLLGWSEAEFLRRTEGSAIRRIGFERWQRNLAVAAGNALRSRDDAALRAALMRAGEGASVLVREHVEWALSAPAEPDALS

SEQ ID NO: 80529 - protein, 374 aa, Roseateles depolymerans
  REGION 1..374: note = tr|A0A0U3N5Z8|A0A0U3N5Z8_9BURK Epoxyqueuosine reductase OS=Roseateles depolymerans OX=76731 GN=queG PE=3; SV = 1
MESLLNASDRTPDSLHALTGQIRTWALELGFSQIGVAHVDLGDAEAGLQAWLDAGFHGEMQYMAAHGMKRARPAELVPGTLCVLTARMDYLPPSLQADWQQREYDALADPARAQVSLYARGRDYHKVLRQRLQQLADRIQSAVGPLGHRVFTDSAPVLEVELASRSGIGWRGKHTLTLHREAGSMFFLGEIYLDLPLPPSEPVSAHCGQCRACLDACPTQAIVAPYRLDARRCISYLTIEQDGPIPEALRPAMGNRIYGCDDCQLACPWNKFARRQALPDFDWREPLGHASLLQLWAWDEPTFLKRTEGSAIRRIGHARWRRNLAVAMGNALRQPLAPSLRRELREALCAVQHTASPLLAEHIDWALRQTCDHT

SEQ ID NO: 80530 - protein, 374 aa, Roseateles sp.
  REGION 1..374: note = tr|A0A1H7FLD3|A0A1H7FLD3_9BURK Epoxyqueuosine reductase OS=Roseateles sp. YR242 OX=1855305 GN=queG PE=3; SV = 1
MESLLNAPDRTPEALNALPGQIRAWALELGFSQIGVAHVDLADAEAGLQAWLDAGFHGEMHYMAAHGMKRARPAELVPGTICVLTARMDYLPATLAADWQQQELAALADPARAQVSLYARGRDYHKVLRQRLQQLADRIQAAVGPLGHRVFTDSAPVLEVELASRSGIGWRGKHTLTLHREVGSMFFLGEIYLDLALPPSEPVTAHCGQCRACLDACPTGAIVAPYRLDARRCISYLTIEQDGPIPEALRPAMGNRIYGCDDCQLACPWNKFAQRNALPDFDWREPLGHATLLDLWAWDEAAFLKRTEGSAIRRIGHARWRRNIAVAIGNALRQTLPADLRADLRAALTTALPDASPLLAEHIEWALRQSCDHT

SEQ ID NO: 80531 - protein, 385 aa, unidentified
  source 1..385: note = Roseiarcus fermentans
  REGION 1..385: note = tr|A0A366F5F2|A0A366F5F2_9RHIZ Epoxyqueuosine reductase OS=Roseiarcus fermentans OX=1473586 GN=queG PE=3; SV = 1
MIEPARSRTIASSLALKARALGFDVCRVASAEPPPEMAGRLAAWLGAGAHGEMAWMADTAERRSDPRALMGDAKSLVMLGLNYGPEEDPLAATRRRDRGAISVYARHRDYHDVVKGKLKALAAHLAAAARPEKPDVKVFVDTAPLMEKPFAARAGIGWQGKHTNLVSRRFGSWLFLGAILTNLDLEPDAPERDHCGTCRACLDACPTGAFPAPYRLDARRCVSYLTIELKGPIPPELRAAIGNRIYGCDDCLAACPWNRFAEAGREAKLAARADLNAPPLAELARLDDAAFRARFAGSPIKRIGRARFVRNVLIAIGNSGDAELIVAARERLDDDAPIVRGAAVWALARLVSGPEFAAVADARARDEPDVGVAQEWRSGLGASDR

SEQ ID NO: 80532 - protein, 343 aa, unidentified
  source 1..343: note = Roseibaca calidilacus
  REGION 1..343: note = tr|A0A0P7X245|A0A0P7X245_9RHOB Epoxyqueuosine reductase OS=Roseibaca calidilacus OX=1666912 GN=queG PE=3; SV = 1
MAENLTSELRATALVYGFTACAITHPGAIPQAPERLGAFVKAGYHGQMGWMAERMGWRGNPAALWPEARSIIMLAEAYTPDHNPLDLLDLRESAVISAYAQGRDYHDVVKKRLKRLGRWLIDRAGGEIKVFVDTAPVMEKPLAQAAGLGWQGKHTNLLSRELGNWFFLGAIFTTHALTPDAPAVGHCGSCRACLDICPTNAFPAPYQLDARRCISYLTIEHHGPVPEEFRANMGNRIYGCDDCLAVCPWNKFAAEAREAKYAARDGMIAPDLGELAQLDDAAFRARFSGSPIKRIGRGRFVRNVLYAIGNSGSARLRAVAQGLCDDADPVVADAARWAVARLA

SEQ ID NO: 80533 - protein, 343 aa, Roseibaca ekhonensis
  REGION 1..343: note = tr|A0A3B0M4I4|A0A3B0M4I4_9RHOB Epoxyqueuosine reductase OS=Roseibaca ekhonensis OX=254356 GN=queG PE=3; SV = 1
MPEDLKSELLNRAREFGFTACAVTRPDAIPHAPERLRAFVEAGHHGQMGWMAERMHWRGDPTALWPEARSVIMLAEAYTPDHNPLDLLALRDRGVVSAYAQGRDYHDVVKKRLKRLGRWLIETAGGEIKVFVDTAPVMEKPLAEAAGLGWQGKHTNLLSRELGNWFFLGAIFTTHALPPDAPAEERCGSCRACLDVCPTNAFPAPYQLDARRCISYLTIEHHGPVPEELRSKMGNRIYGCDDCLAVCPWNKFAAEAREVKYAARDGMIAPDLAELAGLDDAAFRARFSGSPIKRIGRGRFVRNVLYAIGNSGTPRLQPVAQGLCEDADPVVADAAKWAVAQLG

SEQ ID NO: 80534 - protein, 354 aa, Roseibacillus sp.
  REGION 1..354: note = tr|A0A2D6DUH1|A0A2D6DUH1_9BACT tRNA epoxyqueuosine(34) reductase QueG OS=Roseibacillus sp.; OX = 2024856 GN=queG PE=4 SV=1
MDPVIAKRNVKFIATKLGFDDCRVAPARRARHADEFLRWAAEGKAGDMKWLERDPERRTDPRNILPGAQAVVCLALNYYPGPADPNPAYQIARYSWNEDYHDIIEEKLRDLDLAMKELGGTQRYYVDTGPVLERDMATESGLGWNGKSCVQIHRRLGAWFFLAELITTLPLEPDTPTQNYCGKCIACIDTCPTNAITRPHHVDAPRCISYLTIEHKGSIPEELRPLIGNRLYGCDDCLAVCPWNRFAKASRDIRFHARTEVFEHQLRDFLALTDEQFRSLFRKSPIKRIKRNRFLRNVCVVLGNVGDSGDLPALEAAVETEDPLIAEHAAWAISQIKERMDPTTCTSGARNLPA

SEQ ID NO: 80535 - protein, 354 aa, Roseibacillus sp.
  REGION 1..354: note = tr|A0A424HZM9|A0A424HZM9_9BACT tRNA epoxyqueuosine(34) reductase QueG OS=Roseibacillus sp. TMED18 OX=1986590 GN=queG PE=4 SV=1
  VARIANT 54: note = Xaa can be any naturally occurring amino acid
  VARIANT 104: note = Xaa can be any naturally occurring amino acid
  VARIANT 142: note = Xaa can be any naturally occurring amino acid
  VARIANT 314: note = Xaa can be any naturally occurring amino acid
  VARIANT 333: note = Xaa can be any naturally occurring amino acid
  VARIANT 338: note = Xaa can be any naturally occurring amino acid
  VARIANT 346: note = Xaa can be any naturally occurring amino acid
  VARIANT 350: note = Xaa can be any naturally occurring amino acid
MDPVIAKRNVKFIATKLGFDDCRVAPARRARHADEFLRWAAEGKAGDMKWLERXPERRTDPRNILPGAQAVICLALNYYPGPVDPNPAYQIARYSWNEDYHDIXEEKLRDLDLAMQELGGTQRYYVDTGPVLERDMATESGXGWNGKSCVQIHRRMGAWFFLAELITTLPLEPDKPTQNYCGKCTACIDTCPTNAITRPHHVDAPRCISYLTIEHKGSIPEELRPLIGNRLYGCDDCLAVCPWNRFAKASRDIRFHARAEVFEHQLRDFLALTDEEFRSLFRKSPIKRIKRNRFLRNVCVVLGNVGDSGDLSAXEAAVETEDSLIAEHASWAXSQIKXRMDPTKYXSGAXNLPA

SEQ ID NO: 80536 - protein, 345 aa, Roseibacterium elongatum
  REGION 1..345: note = tr|W8RQN2|W8RQN2_9RHOB Epoxyqueuosine reductase; OS = Roseibacterium elongatum DSM 19469 OX=1294273 GN=queG; PE = 3 SV=1
MTDLKTALAAEARAAGFAAMGVCRPDAIPQAADRLAAFVEQGRHGQMQWMAERMAWRGNPAALWPEARSVVMLAEPYTPAQDPLEALTHRDRAAISVYAQNRDYHDIVKKRLKRVGRWLLEQRPEHAIKVFVDTAPVMEKPLAQAAGLGWQGKHTNLLSRDLGNWFFLGAIFTTVELAPDPPEAEHCGSCTACLDICPTRAFPAPFQLDARRCISYLTIEHKGPVDPALRDGLGNRIYGCDDCLAVCPWNKFATEARELRYAARPEFLCAPLETLAMLDDAEFRAMFSGSPIKRIGRDRFVRNVLYAIGNSGEARLCAVAQRLLDDPDAAVADAAAWAMEKLRCA

SEQ ID NO: 80537 - protein, 338 aa, Roseibium hamelinense
  REGION 1..338: note = tr|A0A562T223|A0A562T223_9RHOB Epoxyqueuosine reductase OS=Roseibium hamelinense OX=150831 GN=JM93_02362; PE = 4 SV=1
MAWMEETADRRSAPKDLWPEVRSVLMLAMNYGQGPAPEDAPLYNLDKPERAEISVYARHRDYHDVIKGRLKELAGYLISRAPHDLRPDVKVFVDTAPVMEKPLAQAAGLGWQGKHTNLVSRDIGSWFFLGAIFTTLELPLSQTETDHCGSCRACLDNCPTHAFPAPYQLDARRCISYLTIEHPGPIPHEFREAIGNRIYGCDDCLAACPWNKFARTANEAKLLARDDLKSPALADLLTLDDAAFRNLFSGSPIKRIGRNRFVRNVLIAAGNSGSDRLADKVRHLLSDPDETVRSSAVWAFSKLAAASDFQSERNERLAGETSSQVRQEWFLTADSQSS

SEQ ID NO: 80538 - protein, 384 aa, Roseibium sp.
  REGION 1..384: note = tr|E2CEW5|E2CEW5_9RHOB Epoxyqueuosine reductase; OS = Roseibium sp. TrichSKD4 OX=744980 GN=queG PE=3 SV=1
MSSDRSDKKRQKLVNALRSRAEQLGFDGLEITTPDAIPHAPDRLRQFLNEGYHASMEWMAQTEDRRAAPLVLWPEVRSVIMLAMNYGPDEGVDPLSHLSAPDTGGISVYARHRDYHDVIKGRLKELASFLVSWAKDFAEPDVKVFVDTAPVMEKPLAAAAGLGWQGKHTNLVSRDLGSWFFLGSIFTTLDLPEGTEEADHCGSCRACLDGCPTDAFPAAYQLDARRCISYLTIEHTGPIPAEFREKMGNRIYGCDDCLAACPWNKFARAAKEAKLKAREDLISPKLADFLVLDNKTFRSLFSGSPIKRIGRNRFLRNVLIAAGNSGDESLSVLVKPHLSDLDPMVRGAAVWALSRLLSDTDYAELKRSLLQTETDEFVRLEWGP

SEQ ID NO: 80539 - protein, 348 aa, Roseicitreum antarcticum
  REGION 1..348: note = tr|A0A1H2QUK8|A0A1H2QUK8_9RHOB Epoxyqueuosine reductase OS=Roseicitreum antarcticum OX=564137 GN=queG; PE = 3 SV=1
MDPAALKTQIAAQARLEGFASMGVCRPDAIPQAPAQLKAFVDAGYHGQMGWMAERMTWRSDPAALWPDARSVIMLAEPYTPDHNPLDALALRDRAAISVYAQHRDYHDVAKKRLKRLGRWLIDTAGGEIKVFVDTAPVMEKPLAAAAGLGWQGKHTNLLSRDLGNWFFLGALFTTHALPPDTPGAEACGSCTACLDICPTNAFPAPFQLDARRCISYLTIEHHGPVDPELRALMGNRIYGCDDCLAICPWNKFAVEASEAKYHARPDLQAPPLAELALLDDAGFRARFSGSPIKRIGRNRFVRNVLYAIGNSARPDLRATAQGLCNDPDETVRDAARWAALRLDGAGA

SEQ ID NO: 80540 - protein, 343 aa, Roseicyclus mahoneyensis
  REGION 1..343: note = tr|A0A316GM67|A0A316GM67_9RHOB Epoxyqueuosine reductase OS=Roseicyclus mahoneyensis OX=164332 GN=queG; PE = 3 SV=1
MSDLKAALLTEARAAGFAKMGVCRPDAIPQAAGRLAGFVEGGRHGQMGWMAERMGWRGDPAALWPEARSVIMLAEVYTPDADPLEALTHRDRATISVYAQNRDYHDLVKKRLKRVGRWLLDQAPGHQIKVFVDTAPVMEKPLAEAAGLGWQGKHTNLLSRDLGNWFFLGAIFTTVDLPPDTPEAEHCGSCTACLDICPTDAFPAPFQLDARRCISYLTIEHKGPVDADLRPLMGNRIYGCDDCLAVCPWNKFAQTATEMRYAARPELVSPRLVDLARLDDAGFRALFAGSPIKRIGRDRFVRNVLYAIGNSADAGLAPVAQSLTEDADATVADAARWAVERLR

SEQ ID NO: 80541 - protein, 379 aa, unidentified
  source 1..379: note = Roseimaritima ulvae
  REGION 1..379: note = tr|A0A5B9QVQ0|A0A5B9QVQ0_9PLAN Epoxyqueuosine reductase OS=Roseimaritima ulvae OX=980254 GN=queG PE=4; SV = 1
MTDDRRALTEWLREQARELGFHLFGVAPAVTPQGFHHLVQWIDSGYHAQMDYIPDRLTAYQHPSGVMEGVCSLVMLGFPYRTVEPPPSQPLHGRVARYAWGAADYHDLIHGRFKQLKRDLRERAPQVKARGVVDSAPLLEREFARLAGLGWSGKNTLTINKLEGSYFFLACLLLDIDLPADAPHVSDHCGTCTRCLDACPTDAFVSPGVLDSRRCISYLTIEHRDPIPIELRQPIGDWLFGCDVCQDVCPWNRRGSPATDASLNPPPQSLPTDLPSLFDLDEDAFRQRFRKTPLWRTRRRGILRNAAIVLGNQRDPHSIAALLKGLHDEEALVRGASAWALGQIAGSDALHALDKRLTVEEDSIVQAEITAALRSAETA

SEQ ID NO: 80542 - protein, 349 aa, unidentified
  source 1..349: note = Roseimicrobium gellanilyticum
  REGION 1..349: note = tr|A0A366HTF3|A0A366HTF3_9BACT Epoxyqueuosine reductase OS=Roseimicrobium gellanilyticum OX=748857; GN = DES53_101360 PE=4 SV=1
MNSLLKAELQALAAQLGFSDCRIAPALPAAHRHLYAQWVAEGKYGDMAWMARNLDRRSDPRVVLPGAQSVVMFAMNYFQGAEEPGELEGRIARYAWNDDYHDMIEKKLREVDAFLISRGGSQRFYVDTGPVLERDFASESGLGWNGKSTMQIHRKLGTWFFLADILTTLELPPDTPAHDLCGKCTRCIDACPTNAITGPRRMDARRCISYLTIESKGSIPLEFRKAIGDHLYGCDDCLNACPWNRFAQVSREATFAARESVFSMKLREMLALTDEQFRALFSKSPIKRIKRPAFLRNVCVVLGNIGTEEDLPALRIAEADEHPIISEHAQWAIAEIEARVGDGFSRSAV

SEQ ID NO: 80543 - protein, 358 aa, Roseinatronobacter monicus
  REGION 1..358: note = tr|A0A543KF56|A0A543KF56_9RHOB Epoxyqueuosine reductase OS=Roseinatronobacter monicus OX=393481 GN=queG; PE = 3 SV=1
MTADLKSELIRQAREMGFDACAITRPDAIAQAPERLRAFVDQGRHGQMGWMAERMHWRANPAALWPQARSIIMLAESYTPDYNPLDLLAQRENGVISAYALGRDYHDVVKKRLKRLGRWLIDHAGGEIKVFVDTAPVMEKPLAAAAGLGWQGKHTNLLSRDLGNWMFLGSIFTTLDLPPDAPAQENCGSCTACLDICPTDAFPAPFQLDARRCISYLTIEHHGPVPLELRAKMGNRIYGCDDCLAVCPWNKFARDASEVKYAARDGMVAPDLAELATLDDAGFRARFSGSPVKRIGRNRFVRNVLYAIGNSGATRLLPVARGLTDDPDPTVAEAASWAVQRLDATPEAGPGAPARPRS

SEQ ID NO: 80544 - protein, 360 aa, Roseinatronobacter thiooxidans
  REGION 1..360: note = tr|A0A2W7PP41|A0A2W7PP41_9RHOB Epoxyqueuosine reductase OS=Roseinatronobacter thiooxidans OX=121821; GN = queG PE=3 SV=1
MGMTDDLKSELVHEARAMGFDACALTRPDAIPFAPERLRAFVEGGRHGQMGWMAERMTWRANPAALWPQARSVIMLAESYTPEYNPLDLLDQRENGVISAYALGRDYHDVVKKRLKRLGRWLIDRAGGEIKVFVDTAPVMEKPLAAAAGLGWQGKHTNLLSRDLGNWFFLGSIFTTLELAPDAPAQENCGSCRACLDICPTDAFPAPFQLDARRCISYLTIEHHGPVPLDLREKMGNRIYGCDDCLAVCPWNKFARDASEVKYAARDGMVAPDLAELAGLDDAAFRARFSGSPIKRIGRNRFVRNVLYAIGNSGAARLLPAAQALLADPDAPVADAAQWAAQRLVAPPATGAGAAPRPRS

SEQ ID NO: 80545 - protein, 349 aa, Roseisalinus antarcticus
  REGION 1..349: note = tr|A0A1Y5TSJ2|A0A1Y5TSJ2_9RHOB Epoxyqueuosine reductase OS=Roseisalinus antarcticus OX=254357 GN=queG; PE = 3 SV=1
MDPLKERLREFAIEAGFSAMGICRPDAIPESAGRLAAFVADGRHGQMGWMAERMGWRGDPTALWPEARSVVMLAEAYTPEHDPLAVLDRPELGAISVYAQGRDYHDLVKKRLKRVGRWLLEQADQDAESAHQIKVFVDTAPVMEKPLAQAAGLGWQGKHTNVLGRELGNWVFLGAIFTTIDLPPDEAEAEHCGTCTRCLDICPTEAFPAPFQLDARRCISYLTIEHRGPVAEDLREKMGNRIYGCDDCLAVCPWNKFATEAREMRYLRQDGPPALAELAALDDAAFRARFSGSPIKRIGIARFLRNVLYAIGNSGDPGLLPAARAHLASDDATVTDAARWAVARLRNHM

SEQ ID NO: 80546 - protein, 386 aa, unidentified
  source 1..386: note = Roseitalea porphyridii
  REGION 1..386: note = tr|A0A4V1A3J2|A0A4V1A3J2_9RHIZ Epoxyqueuosine reductase OS=Roseitalea porphyridii OX=1852022 GN=queG; PE = 3 SV=1
MPHAVRQRPTDAEIARDALERDLKTLGFDAVGFAPADGIDRAAEGLARFLAEGRHGMMGWMEETRARRADPQTLWPAARTAIMVAMNYGPGDDYDPLAALDRPDRATISCYAHNRDYHDVIKGRLKQAAGRFAAKTGADVKVFVDTAPLMEKPLAERAGLGWQGKHTNLLSRELGSWFFLGSILTDMVLPTDAPETDHCGSCRACLDICPTDAFPAPYQLDARRCISYLTIEHKGPIPHPFREPIGNRIYGCDDCLAVCPWNKFARTAREAKLRARDDMISPPLAELLDLDDAAFRVRFSGSPIKRIGRARFVRNCLIAAGNSGAPALIGPVEALLDDVEPVVRGAAVWALGRLAPDRIADARAARYGREPDISVREEWDRIDGGH

SEQ ID NO: 80547 - protein, 309 aa, Roseivirga echinicomitans
  REGION 1..309: note = tr|A0A150XUG7|A0A150XUG7_9BACT Epoxyqueuosine reductase OS=Roseivirga echinicomitans OX=296218 GN=queG; PE = 3 SV=1
MQNISKNTAIIKQTAHKLGFDFCGISKAEFLADEAPRLEAWLKRGNHGEMSYMENHFDKRLDPSKLVPGAKSVVSLLYNYYPEKDLSEEHPAHLKLAKYAYGEDYHFVIKDRLKTFMSVLKEEIGEVEGRVFVDSAPVMERQWAAKSGLGWLGKNTLLINKGQGSYFFLAELIIDLELEPDGPIKDYCGTCTRCIDACPTDAITPYEVNANKCISYLTIELKDQIPDSFQGKMGNWIFGCDICQEVCPWNRFSKPHSEAAFRPKNELLELFNNNWQDLTEEVFRVVFKGSAVKRTKIEGLKRNIKMAKK

SEQ ID NO: 80548 - protein, 309 aa, Roseivirga ehrenbergii
  REGION 1..309: note = tr|A0A150XNA8|A0A150XNA8_9BACT Epoxyqueuosine reductase OS=Roseivirga ehrenbergii OX=279360 GN=queG PE=3; SV = 1
MHNITANTTIVKQTAQKLGFDFCGISKAEFLADEAPRLEAWLKKGNHGEMRYMENHFDKRLDPSKLVPGAKSVVSLLYNYYPEKDLAEEHPDHLKLAKYAYGEDYHFVIKDRLKTFISILKEEIGDVEGRVFVDSAPVMERQWAAKSGLGWLGKNTLLINKGQGSYFFLAELIIDLELEPDGPIKDYCGTCTRCIDACPTDAITPYEVDANKCISYLTIELKDQIPDTFQGKMNNWIFGCDICQEVCPWNRFSKPHSEPTFHPKNELLELFNNNWQDLTEEVFRSVFKGSAVKRTKLEGLKRNIIMAKK

SEQ ID NO: 80549 - protein, 309 aa, unidentified
  source 1..309: note = Roseivirga seohaensis
  REGION 1..309: note = tr|A0A150XL60|A0A150XL60_9BACT Epoxyqueuosine reductase OS=Roseivirga seohaensis OX=1914963 GN=queG PE=3; SV = 1
MQNINTNTTIVKQTAQKLGFDFCGISKAEFLADEAPRLEAWLKKGNHGEMHYMENHFDKRLDPSKLVPGAKSVVSLLYNYYPEKDLAEQHPDHLKLAKYAYGEDYHFVIKDRLKTFMSILKEEIGDVEGRVFVDSAPVMERQWAAKSGLGWLGKNTLLINKGRGSYFFLAELIIDLELESDGPIKDYCGTCTRCIDACPTDAITPYEVNANKCISYLTIELKDQIPDTFQGKMDNWVFGCDICQEVCPWNRFSKPHSEPAFHPKNELLELFNNNWQDLTEEVFRSVFKGSAVKRTKLEGLKRNIIMAKK

SEQ ID NO: 80550 - protein, 309 aa, unidentified
  source 1..309: note = Roseivirga seohaensis
  REGION 1..309: note = tr|A0A0L8AMZ7|A0A0L8AMZ7_9BACT Epoxyqueuosine reductase OS=Roseivirga seohaensis subsp. aquiponti; OX = 1566026 GN=queG PE=3 SV=1
MQNINTNTTIVKQTAQKLGFDFCGISKAEFLADEAPRLEAWLKKGNHGEMCYMENHFDKRLDPSKLVPGAKSVVSLLYNYYPEKDLAEQHPDHLKLAKYAYGDDYHFVIKDRLKTFMSTLKEEIGEVEGRVFVDSAPVMERQWAAKSGLGWLGKNTLLINKGQGSYFFLAELIIDLELEPDGPIKDYCGTCTRCIDACPTDAITPYEVDANKCISYLTIELKDQIPDSFQGKMDNWVFGCDICQEVCPWNRFSKPHSEPAFHPKNELLELFNNNWQDLTEEVFRSVFKGSAVKRTKLEGLKRNIKMAKK

SEQ ID NO: 80551 - protein, 311 aa, Roseivirga sp.
  REGION 1..311: note = tr|A0A316K9V7|A0A316K9V7_9BACT Epoxyqueuosine reductase OS=Roseivirga sp. XM-24bin3 OX=2133949 GN=queG; PE = 3 SV=1
MNPSVSKNTQLLKQMAQNHGFDFCGISKAEFLEEEAPRLESWLKKGAHGKMSYMENHFDKRLDPTKLVSGAKSVVSLLYNYYPETDLAKTHPNQSKIAKYAYGKDYHFVIKDKLKTLLLDLQKEIGEIEGRVFVDSAPVMERQWAEKSGLGWTGKNTLLITKNQGSFFFLAELIIDLELEADGPIKDYCGTCTRCVDACPTDAITPYEVDASKCISYLTIELKEGIPEEFKGKMENWAFGCDICQDVCPWNRFSKPHQEEAFLPPKELLELLNNNWQDLTDEVFGKAFRKSAVKRTKLQGLERNLEFLKNI

SEQ ID NO: 80552 - protein, 311 aa, Roseivirga spongicola
  REGION 1..311: note = tr|A0A150XHW1|A0A150XHW1_9BACT Epoxyqueuosine reductase OS=Roseivirga spongicola OX=333140 GN=queG PE=3; SV = 1
MNPSVSKNTQLLKQMAKNHGFDFCGISKAEFLEDEAPRLESWLKKGAHGKMSYMENHFDKRLDPTKLVPGAKSVISLLYNYYPETDLAKTYPNQSKIAKYAYGKDYHFVIKDKLKTLLLDLQKEIGEIEGRAFVDSAPVMERQWAEKSGLGWTGKNTLLITKNQGSFFFLAELIIDLELEADGPIKDYCGTCTRCVDACPTDAITPYEVDASKCISYLTIELKEGIPEEFKGKMENWAFGCDICQDVCPWNRFSKPHQEEAFLPPKELLELLNNNWQDLTEEVFGKAFRKSAVKRTKLKGLERNLEFLKNI

SEQ ID NO: 80553 - protein, 353 aa, Roseivivax halodurans
  REGION 1..353: note = tr|X7EHL5|X7EHL5_9RHOB Epoxyqueuosine reductase; OS = Roseivivax halodurans JCM 10272 OX=1449350 GN=queG PE=3; SV = 1
MADDARAALKDRLESAAGAEGFALMRVCRPWDVPLVPERLRAFLAEGRHGQMGWLAERVHWREAPQVLWPEAQSVIMLGESYTPGYDPLELLERRERGAVSVYAQNKDYHDVLKKKLKRLARWLIAEGGGEVKVFVDTAPVPEKPLGEAAGLGWQGKHTNLVSRDMGSWFFIGSIFTTLDLPADQAEGDHCGSCRKCLDICPTEAFPAPYQLDARRCISYLTIEHRGPVDHELRAKMGNRIYGCDDCLAVCPWNKFAAEAREARYHARDDLVAPDLAELAELDDAGFRARFSGSPIKRIGRDRFVRNVLYAIGNSGSERLRPVAQGLAEDADETVREAARWAAERLPSGRAPG

SEQ ID NO: 80554 - protein, 347 aa, Roseivivax halotolerans
  REGION 1..347: note = tr|A0A1I5US75|A0A1I5US75_9RHOB Epoxyqueuosine reductase OS=Roseivivax halotolerans OX=93684 GN=queG PE=3; SV = 1
MSLTARLKAEAEAAGFTMCRICGPGDIPKVPERLGAFLEKGRHGQMGWLEDRASWRGDPQVLWPEARSIIMLGESYTPDHDPMAILGAPERAAISVYAQNRDYHDIVKKRLKRLGRWLIAEAEAAGEEAEIKVFVDTAPVAEKPLGEAAGLGWQGKHTNLVSREMGSWFFLGSIFTTLDLERDAPETDHCGSCRRCLDICPTDAFPAPYQLDARRCISYLTIEHRGPVPEELREGLGNRIYGCDDCLAVCPWNKFAAEASDIRYAAREDLLAPDLAELASLDDAGFRARFSGSPIKRIGRDRFVRNVAYAIGNSGSARLRPAAAALAEDPDETVRDAALWALARLPA

SEQ ID NO: 80555 - protein, 350 aa, Roseivivax isoporae
  REGION 1..350: note = tr|X7FC44|X7FC44_9RHOB Epoxyqueuosine reductase; OS = Roseivivax isoporae LMG 25204 OX=1449351 GN=queG PE=3; SV = 1
MDAGDEAARLKERLVAQAEAEGFARARICRPWDVPEVPERLRAFLAAGYHGQMDWLADRVAWREAPQVLWPEARSVLMLGESYTPGHDPRAVLARREAGAVSVYAQHRDYHDVLKKKLKRLARWLVAEGGGAVKVFVDTAPVPEKPLGQAAGLGWQGKHTNLVSRQMGSWFFLGSVFTTLDLPADAAETDHCGSCRACLDICPTDAFPEPYRLDARRCISYLTIEHRGPVDEALRPALGNRIYGCDDCLAVCPWNKFAAEAREAKYHAREDLLAPDLAELARLDDAGFRARFSGSPIKRIGRDRFVRNVLYAIGNSGSARLAAVARTLCEDADPAVRDAARWAVARLGAA

SEQ ID NO: 80556 - protein, 352 aa, unidentified
  source 1..352: note = Roseivivax jejudonensis
  REGION 1..352: note = tr|A0A1X7A2T2|A0A1X7A2T2_9RHOB Epoxyqueuosine reductase OS=Roseivivax jejudonensis OX=1529041 GN=queG; PE = 3 SV=1
MDGDADRLKAGLVAEAGAAGFAMARICRPWDVPQVPARLRDFLDRGRHGQMAWLAERVAWREAPQVLWPEARSVLMLGESYTPDHDPLEALAARERGTVSVYAQNRDYHDVLKKKLKRLARWLVAEGGGDVKVFVDTAPVPEKPLGEAAGLGWQGKHTNLVSRQMGSWFFLGSVFTTLDLPVDRAESDHCGSCRACLDICPTDAFPAPYQLDARRCISYLTIEHRGPVAPELRAKMGNRIYGCDDCLAVCPWNKFAAEAREARYHARDDLRAPDLAALATLDDAGFRARFSGSPIKRIGRDRFVRNVLYAIGNSGAARLRPVAQDLCEDPDATVRDAARWAAARLPSGREPG

SEQ ID NO: 80557 - protein, 346 aa, Roseivivax lentus
  REGION 1..346: note = tr|A0A1N7K784|A0A1N7K784_9RHOB Epoxyqueuosine reductase OS=Roseivivax lentus OX=633194 GN=queG PE=3 SV=1
MDLTQRLKAEAEAVGFTACRITGPDAIPEVPERLRAFLDKGYHGQMGWLADRAAWRGDPQALWPEARSVIMLGEAYTPGHDPLAVLETPDRAAISVYAQNRDYHNVVKKRLKRLGRWLIDAAEGAPEIKVFVDTAPVAEKPLGQAAGLGWQGKHTNLVSREMGSWFFLGAIFTTLDLARDAPEDDHCGSCRACLDICPTDAFPAPYRLDARRCISYLTIEHKGPVAEDLRAKMGNRIYGCDDCLAVCPWNKFAAEAREVKYHARPDLLAPDLAELAALDDAGFRARFSGSPIKRIGRDRFVRNVLYAIGNSGRPDLRRAAAALADDPDATVRDAASWALGQLPQTE

SEQ ID NO: 80558 - protein, 355 aa, unidentified
  source 1..355: note = Roseivivax marinus
  REGION 1..355: note = tr|W4HL55|W4HL55_9RHOB 4Fe-4S ferredoxin; OS = Roseivivax marinus OX=1379903 GN=ATO8_05451 PE=4 SV=1
MSQTDTDPGELRARLVAQAEAEGFALARTCRPWDVPQVPHRLTEFLARDRHGQMNWLADRAHWRGAPQVLWPEARTVLMLGESYTPDTDPLAALERCESGTVSVYAQNRDYHDVLKKKLKRIARWLIAEAGGEVKVFVDTAPVPEKPLGEAAGLGWQGKHTNLVSRDMGSWFFIGSIFTTLDLPVDAAERDHCGSCRACLDICPTNAFPAPYQLDARRCISYLTIEHHGPVDPELRPALGNRIYGCDDCLAVCPWNKFAAEAREAKYHARPDLVSPDLGELAMLDDARFRARFSGSPIKRIGRNRFVRNVLYAIGNSGSERLRAVAQGLCEDPDETVADAARWAVARLSSGPAAR

SEQ ID NO: 80559 - protein, 351 aa, unidentified
  source 1..351: note = Roseivivax pacificus
  REGION 1..351: note = tr|A0A2T6AZE5|A0A2T6AZE5_9RHOB Epoxyqueuosine reductase OS=Roseivivax pacificus OX=1267769 GN=queG PE=3; SV = 1
MERLKARLVARAAEEGFDDCRICRPGDVPQVMARLQQFLREGYHGQMGWLAERSHWRGDPTALWPEARSVIMLAENYGPTHDPLEVLDHPDRAAISVYAQNRDYHDVVKKRLKRLGRWLIGEAEKQGEAPEIKVFVDTAPVPEKPLAQAAGLGWQGKHTNLLSRRLGSWFFLGSIFTTLELPTDAPEGEHCGSCRACLDICPTEAFPAPFQLDATRCISYLTIEHRGPVDEELRAKMGNRIYGCDDCLAVCPWNKFASEAREVKYHAREDLLAPPLEELAGLDDAGFRARFSGSPIKRIGRDRFVRNVLYAIGNSGKARLRPVAQGLCEDGDETVRDAARWAAIRLPEGDV

SEQ ID NO: 80560 - protein, 346 aa, unidentified
  source 1..346: note = Roseivivax roseus
  REGION 1..346: note = tr|A0A1H9UK73|A0A1H9UK73_9RHOB Epoxyqueuosine reductase OS=Roseivivax roseus OX=641238 GN=queG PE=3 SV=1
MSADLKARLDAEARQAGFAAMGVTTPDAVPQAAGRLEAFVGAGRHGQMQWMAERMGWRGDPAALWPAARSVVMLAESYTPERDPLAVLGQRERGAVSVYAQGKDYHDLVKKRLKRVGRWLLEQCPEAEIKVFVDTAPVMEKPLAQAAGLGWQGKHTNLLGRGIGNWVFLGAIFTTVELPPDPAEGEHCGSCTRCLDVCPTDAFPAPFQLDARRCISYLTIEHRGPVDEALRGKMGNRIYGCDDCLAVCPWNKFAAEARETRYAARDDLRAPPLEELAALDDAGFRARFSGSPIKRIGRDRMVRNVLYAIGNSGAARLRPVAQGLTGDADPAVADAARWAALRLEAA

SEQ ID NO: 80561 - protein, 348 aa, unidentified
  source 1..348: note = Roseivivax sediminis
  REGION 1..348: note = tr|A0A1I2AXW9|A0A1I2AXW9_9RHOB Epoxyqueuosine reductase OS=Roseivivax sediminis OX=936889 GN=queG PE=3; SV = 1
MDAVKAALVREAQEIGFAQARICRPWDVPQVPARLRAFLAQGRHGQMGWLAERAHWREAPQVLWPAARSVIMLGESYTPGHDPLAVLEEREAGAVSVYAQNRDYHDVLKKKLKRLARWLIAEAGGEVKVFVDTAPVPEKPLGEAAGIGWQGKHTNLVSRSMGSWFFIGSIFTTLDLPADAAEGDHCGSCRACLDICPTDAFPAPYQLDARRCISYLTIEHRGPVEEELRGKMGNRIYGCDDCLAVCPWNKFAAEAREAKYHAREDLVAPDLAGLAGLDDAGFRARFSGSPIKRIGRDRFVRNVLYAIGNSGLARLRPVAQARAEDADETVRDAARWAAARLPSGGPAG

SEQ ID NO: 80562 - protein, 347 aa, Roseobacter denitrificans
  REGION 1..347: note = tr|Q16DZ9|Q16DZ9_ROSDO Epoxyqueuosine reductase; OS = Roseobacter denitrificans (strain ATCC 33942 / OCh 114); OX = 375451 GN=queG PE=3 SV=1
MSGLKEKLVARALEEGFIACRICRPDAVPDVAARLKAFVDAGHHGQMTWMADRIHWRGDPTQLWPQARSVIMLAESYGPEHDPMAVLQQPERGAISVYAQGRDYHDVVKKRLKRLARWLMAEAADADLQVKVFVDTAPVPEKALGQAAGLGWQGKHTNLLSREWGNWAFLGAVFTTLDIAPDAPEVDHCGSCRACLDVCPTDAFPAPYQLDARRCISYLTIEHKGPVPTDLRPLLGNRIYGCDDCLAVCPWNKFATTARDMRLSARPELTAPRLADLAALDDAAFRALFSGSAVKRIGRNRFVRNVLYAIGNSGEASLRQTASELMDDPDDAVADAARWAVAQLGRK

SEQ ID NO: 80563 - protein, 346 aa, Roseobacter litoralis
  REGION 1..346: note = sp|F7ZDR3|QUEG_ROSLO Epoxyqueuosine reductase; OS = Roseobacter litoralis (strain ATCC 49566 / DSM 6996 / JCM 21268 / NBRC 15278 / OCh 149) OX=391595 GN=queG PE=3; SV = 1
MSGLKEKLVARALEEGFIACRICRPDAVPDVAARLKAFVDAGYHGQMTWMADRMHWRGDPTQLWPQARSVIMLAESYGPEHDPMAVLQQPERGAISVYAQGRDYHDVVKKRLKRLARWLMAEAADADPQVKVFVDTAPVPEKALGQAAGLGWQGKHTNLLSREWGNWAFLGAVFTTLDIAPDAAEVDHCGSCRACLDVCPTDAFPAPYKLDARRCISYLTIEHKGPVPTDLRPLLGNRIYGCDDCLAVCPWNKFATAARDMRLSARPELTAPRLADLAALDDAAFRALFSGSAVKRIGRNRFVRNVLYAIGNSGEASLRQIASELTDDPDDAVADAARWAVAQLGG

SEQ ID NO: 80564 - protein, 344 aa, Roseobacter sp.
  REGION 1..344: note = tr|A0A2E9YXJ6|A0A2E9YXJ6_9RHOB tRNA epoxyqueuosine(34) reductase QueG OS=Roseobacter sp.; OX = 1907202 GN=queG PE=4 SV=1
MDTAGLKDRLVSQASIEGFVSCRVCRPWDVPDVPARLAAFVDAGYHGQMEWMADRMAWRGDPAALWPEAKSVIMLAESYTPLYDPTSVLDETENAAVSVYAQGRDYHDIVKKRLKRLARWLIEQQPCEVKVFVDTAPVPEKALGQAAGLGWQGKHTNLVSRDWGNWAFLGAIFTTLDLDVDRAEKDHCGSCRSCLAACPTDAFPAPYRLDARRCISYLTIEHSGPVDPELRSKLGNRIYGCDDCLAACPWNKFAVQASDMRYHGGVGSPPLAELATLDDAAFRARFSGSPIKRIGRNRFIRNVLYAIGNSGQADLVPTAQGLVGDPDPTIVEAAQWAIEQLAGK

SEQ ID NO: 80565 - protein, 348 aa, Roseobacter sp.
  REGION 1..348: note = tr|A4ET76|A4ET76_9RHOB Epoxyqueuosine reductase; OS = Roseobacter sp. SK209-2-6 OX=388739 GN=queG PE=3 SV=1
MTRELKDRLVTQALEEGFVSCRICRPWDVPQVPDRLQQFLDAGLHGQMGWMADRSHWRGDPSVLWPEARSVIMLAESYTPDADPMEVVGCPDRGAVSVYARNKDYHDLVKKRLKRLARWLIDQAKKQGEEAQVKVFVDTAPVPEKPLGMAAGLGWQGKHTNLVSRDWGNWAFLGSIFTTLDLPADSAEPDRCGSCSSCLSACPTEAFLAPYQLDARRCISYLTIEHKGPIDEELRSKLGNRIYGCDDCLAACPWNKFAVAASDMRYAARDELQAPRLAELAQLDDAAFRAFFSGSPIKRIGRDRFVRNVLYAIGNSNLPELRSIAQDLIDDPDPTVADAALWAVQQLS

SEQ ID NO: 80566 - protein, 347 aa, Roseococcus sp.
  REGION 1..347: note = tr|A0A4R0YC43|A0A4R0YC43_9PROT Epoxyqueuosine reductase OS=Roseococcus sp. SYP-B2431 OX=2496640 GN=queG; PE = 3 SV=1
MNRPPNEATEAVRAEAIAQGFDVARFTQALLPETARARLDAFLDAGAHGSMGWLEGRRAQRAQPRMLWPEAVSVIALGLNYGPAYDPLASLAERGRATISAYAQGRDYHDLVKKRLKALGGWMVRRFKGSELKVFVDTAPVMEKPLAAQAGLGWQGKHTNLVSRTHGSWLFLGEIYTTLDLAPDRPETDHCGNCRACLESCPTAAFPAPYRLDARRCISYLTIEHHGPIPHEFREAMGNRIYGCDDCLAACPWNKFARASAEMQLAPRSEIAPPLSVLAALDDAAFRARYSGSPIKRIGRDRFTRNVLNAIGNSGDAALLPTARALCEDADPTVAEAARWAVERLQA

SEQ ID NO: 80567 - protein, 317 aa, unidentified
  source 1..317: note = Roseofilum reptotaenium
  REGION 1..317: note = tr|A0A1L9QPL6|A0A1L9QPL6_9CYAN Epoxyqueuosine reductase OS=Roseofilum reptotaenium AO1-A OX=1925591; GN = queG PE=3 SV=1
MSEESTTLTSEKVKEKAIDLGFSQAGIAVFDRAIAQQGTQGLQNWLAQGYHADMDWMANPKRQDIRRAFPQVASIISLSLNYYTPYSQPQASEYGKISRYAWGRDYHRVIGKKLRVFTVWLQEQGQDIQLKAYLDTGPVQDKLWAQTAGLGWVGKNGNLITRKFGSWVFLAEILTNLTLEPDKPHREHCGTCQRCIQACPTGAIAKPFVVDANRCIAYHTIENRAEELPEAIAENLNGWVAGCDICQEVCPWNQRFAQPTHIQEFHPYPENLAPKLIDLANLSEQEWDRRFRASALRRIKPQMWRRNARANQLKIKN

SEQ ID NO: 80568 - protein, 340 aa, Roseomonas aestuarii
  REGION 1..340: note = tr|A0A2U1VAC7|A0A2U1VAC7_9PROT Epoxyqueuosine reductase OS=Roseomonas aestuarii OX=568898 GN=queG PE=3; SV = 1
MRDQALALGFDAVGFAPAHLGPEVRARLDAFLAAGMQGEMGWLAERAEQRAHPRALWPEAVSVIALGMNYGPAEDPLALLERRDRGAISVYARNRDYHDIVKKRLKALARWMVERWQDSALKVFVDTAPVAEKPLAQAAGLGWQGKHSNLVSRAHGSWLFLGEVYTTLDLAPTGAEADHCGRCTRCLTACPTDAFAAPYRLDARRCISYLTIEHHGPIPHEFRAAMGNRIYGCDDCLAVCPWNKFAAAAREPGLMPREDLTAPRLAELAVLDDAGFRALFSGSPIKRIGRDRFVRNVLNAIGNSGDATLRPVAEALRADPSAVVAEAAAWAAERLAGTAG

SEQ ID NO: 80569 - protein, 363 aa, Roseomonas cervicalis
  REGION 1..363: note = tr|D5RRW0|D5RRW0_9PROT Epoxyqueuosine reductase; OS = Roseomonas cervicalis ATCC 49957 OX=525371 GN=queG PE=3; SV = 1
MLLFLQKKKESEIDTPSTRAAAIRDEALRLGFDAVGFAPARLGPEVRARLDAFLAAGMQGEMGWLADRAEQRAHPQALWPEAVSVIALGMNYGPDHDPRDLQAQREVGAISVYARHKDYHDIVKKRLKALARWMVERWRGSELKVFVDTAPVAEKPLAQQAGLGWQGKHTNLVSRSHGSWLFLGEVYTTLDLAPSTPGQDHCGGCTRCLSACPTAAFPAPYRLDARRCISYLTIEHKGPIPEEFRAAIGNRIYGCDDCLAACPWNKFAQAAREPGLIPREDLTAPRLAELAALDDAGFRALFSGSPIKRIGRDRFLRNVLIAIGNSAEPALRPVAERLCADPSEIVAEAARWALARLPAAAST

SEQ ID NO: 80570 - protein, 342 aa, unidentified
  source 1..342: note = Roseomonas deserti
  REGION 1..342: note = tr|A0A1V2GX91|A0A1V2GX91_9PROT Epoxyqueuosine reductase OS=Roseomonas deserti OX=1817963 GN=queG PE=3; SV = 1
MAAAIRDQALALGFDAVGFAPAHLGPEVRARLDAFLSAGMQGEMGWLADRVEQRAHPQSLWPAAVSVIALGMNYGPELDPLSVLEQRDRAAISVYARNRDYHDIVKKKLKALARWMAESWRGSDVKVFVDTAPVSEKPLGQAAGLGWQGKHSNLVSRDFGSWLFLGEVFTTLDLTPTGAEVDHCGRCSRCLSACPTQAFVGPYKLDARRCISYLTIEHKGPIPEEFRVAMGNRIYGCDDCLAVCPWNKFASVTAEPGLVARDDLTAPRLAELAVLDDAAFRALFSGSPIKRIGRDRFVRNVLNAIGNSGDASLLPVAARLMGDEAEVVADAARWAVSRLSAF

SEQ ID NO: 80571 - protein, 344 aa, Roseomonas gilardii
  REGION 1..344: note = tr|A0A1L7AK94|A0A1L7AK94_9PROT Epoxyqueuosine reductase OS=Roseomonas gilardii OX=257708 GN=queG PE=3; SV = 1
MRDEALRLGFDAVGFARAHLGPEVRERLAAFLGAGMHGEMGWMAERAEQRSHPRALWPEAVSVISLGMNYGPEDDPLASLSRPDRGTISVYARHRDYHDVVKKRLKALARWMMARFAGGEAAMELKVFVDTAPVAEKPLAQQAGIGWQGKHSNLVSRQHGSWLFLGEVYTTLDLAPDAAETDHCGQCRRCLDACPTGAFLGPYRLDARRCVSYLTIEHKGPVPEALRPRLGNRIYGCDDCLAACPWNKFAHTATEPALIGREDLAAPRLAELAALDDATFRAHFSGSPIKRIGRDRFVRNVLYAIGNSADPALLPEARRLAGDPDPVVAEAAAWAVSRLENITP

SEQ ID NO: 80572 - protein, 364 aa, Roseomonas gilardii
  REGION 1..364: note = tr|A0A379NB24|A0A379NB24_9PROT Epoxyqueuosine reductase OS=Roseomonas gilardii subsp. rosea OX=243956; GN = queG PE=3 SV=1
MSATLATSRPGTAPACPPDAARDAIRDEALRLGFDAVGFARAHLGPEVRERLAAFLEAGMHGEMGWMAERAEQRSHPRALWPEAVSVISLGMNYGPEDDPLASLSRPDRGTISVYARHRDYHDVVKKRLKALARWMVERFAGTELKVFVDTAPVAEKPLAQQAGIGWQGKHSNLVSRAHGSWLFLGEVYTTLDLAPDAAETDHCGQCRRCLDACPTGAFLGPYRLDARRCVSYLTIEHKGPVPEALRPRLGNRIYGCDDCLAACPWNKFAHAATEPALIGREDLAAPRLAELAALDDATFRALFSGSPIKRIGRDRFVRNVLYAIGNSADPALLPEARRLAGDPDPVVAEAAAWAVSRLENITP

SEQ ID NO: 80573 - protein, 367 aa, Roseomonas mucosa
  REGION 1..367: note = tr|A0A379N403|A0A379N403_9PROT Epoxyqueuosine reductase OS=Roseomonas mucosa OX=207340 GN=queG PE=3 SV=1
MPVTLAPSRPAAAPPAPDAARDAIRNEALRLGFDAVGFARAHLGPEVRERLAAFLEAGMHGEMGWMAERAEQRSHPRALWPEAVSVVSLGMNYGPEDDPLASLSRPDRGTVSVYARHRDYHDVVKKRLKALARWMVDRFAGGESAMALKVFVDTAPVAEKPLAQQAGIGWQGKHSNLVSRAHGSWLFLGEVYTTLDLAPDRPETDHCGQCRRCLDACPTGAFLGPYRLDARRCVSYLTIEHKGPVPEALRPRLGNRIYGCDDCLAACPWNKFAHTATEPALIGREDLAAPRLAELAALDDATFRALFSGSPIKRIGRDRFVRNVLYAIGNSADPALLPEARRLAGDPDPVVAEAAAWAVSRLEDITP

SEQ ID NO: 80574 - protein, 367 aa, Roseomonas mucosa
  REGION 1..367: note = tr|A0A1S8D960|A0A1S8D960_9PROT Epoxyqueuosine reductase OS=Roseomonas mucosa OX=207340 GN=queG PE=3 SV=1
MPVTLAPSRPAAAPPAPDAARDAIRNEALRLGFDAVGFARAHLGPEVRERLAAFLEAGMHGEMGWMAERAEQRSHPRALWPEAVSVVSLGMNYGPEDDPLASLSLPDRGTVSVYARHRDYHDVVKKRLKALARWMVDRFAGGESAMALKVFVDTAPVAEKPLAQQAGIGWQGKHSNLVSRAHGSWLFLGEVYTTLDLAPDRPETDHCGQCRRCLDACPTGAFLGPYRLDARRCVSYLTIEHKGPVPEALRPRLGNRIYGCDDCLAACPWNKFAHTATEPALIGREDLAAPRLAELAALDDATFRALFSGSPIKRIGRDRFVRNVLYAIGNSADPALLPEARRLAGDPDPVVAEAAAWAVSRLEDITP

SEQ ID NO: 80575 - protein, 352 aa, unidentified
  source 1..352: note = Roseomonas nepalensis
  REGION 1..352: note = tr|A0A502FQW7|A0A502FQW7_9PROT Epoxyqueuosine reductase OS=Roseomonas nepalensis OX=1854500 GN=queG PE=3; SV = 1
MTDPRAPIRDEALRLGFDAVGFARAELGPEVRDRLADFLAAGLHGEMGWMEGRAEQRAHPRALWPEALSVVSLGLSYAPADDPLASLAQPDRGTISVYARHRDYHDLVKSRLKALARWMVARFDAPGVKVFVDTAPVSEKPLAQQAGLGWQGKHTNLVSRAHGSWLFLGEIYTTLALEPDAPHADRCGRCTRCQVACPTDAFPAPYRLDARRCVSYLTIEHRGPIPEELRPRLGNRIYGCDDCLAVCPWNRFATPTAVPGLVAREDLVAPRLAELAALDDAAFRARFSGSPIKRVGRGRFVRNVLNAIGNSGDASLLPLARSLADDEDPVVADSARWAAARLASAPQVSSTA

SEQ ID NO: 80576 - protein, 357 aa, unidentified
  source 1..357: note = Roseomonas oryzae
  REGION 1..357: note = tr|A0A5B2TG91|A0A5B2TG91_9PROT Epoxyqueuosine reductase OS=Roseomonas oryzae OX=1608942 GN=queG PE=3 SV=1
MEAGPASPAPSPDAASAAIRDEALRLGFDAVGFAPAHLGPEVRQRLDAFLAAGMQGGMGWLADRAEQRAHPRALWPEAVSVIALGMNYGPEEDPLSILGQRDRAAISVYARNKDYHDIVKKRLKALARWMVDRWRGSELKVFVDTAPVAEKPLAQQAGLGWQGKHSNLVSRTHGSWLFLGEIYTTLDLAPSAPEVDHCGRCTRCLSACPTDAFVGPYRLDARRCVSYLTIEHKGPIPEEFRAAMGNRIYGCDDCLAVCPWNKFAQAAREPGLMPREDLNTPRLAALAALDDAAFRALFSGSPVKRIGRDRFVRNVLIAIGNSGDAGLRPVAKQLTADPDPVVAEAAQWAVRRLNTPA

SEQ ID NO: 80577 - protein, 382 aa, unidentified
  source 1..382: note = Roseomonas rhizosphaerae
  REGION 1..382: note = tr|A0A2C6Y645|A0A2C6Y645_9PROT Epoxyqueuosine reductase OS=Roseomonas rhizosphaerae OX=1335062 GN=queG; PE = 3 SV=1
MRRRASGCPPRTCRTTVGAGKKALPSAATTPEGRAAEIRDAALALGFDAVGFAPAHLGPEVRARLDAFLAAGMQGEMGWLAERVEQRAHPQGLWPEAVSVIALGMNYGPEDDPLALLERRDRGAISVYARNRDYHDIVKKRLKALARWMVERWKGSELKVFVDTAPVAEKPLAQAAGLGWQGKHSNLVSREHGSWLFLGEIYTTLDLAPSGAEVDHCGRCTRCLSACPTDAFTGPYRLDARRCISYLTIEHHGPIPHEFRAAMGNRIYGCDDCLAVCPWNKFAHAAREPGLMPREDLSAPRLAELARLDDAGFRALFSGSPIKRIGRDRFVRNVLNAIGNSGDPALLDVAAALRADPSPVVAEAAEWAARRMDEAARQQGSR

SEQ ID NO: 80578 - protein, 354 aa, unidentified
  source 1..354: note = Roseomonas rosea
  REGION 1..354: note = tr|A0A1M6LVD4|A0A1M6LVD4_9PROT Epoxyqueuosine reductase OS=Roseomonas rosea OX=198092 GN=queG PE=3 SV=1
MTEGARAAIRDEALRLGFDAVGFARADLGPEVRDRLADFLAQGLHGEMGWMETRAEQRAHPQALWPEALSVISLGLSYAPEDDPLSYLQMPDRGTISVYARHRDYHDLVKSRLKALARWMVARFAGSQAEAPGVKVFVDTAPVSEKPLAQQAGLGWQGKHTNLVSRSHGSWLFLGEVYTTLALEPDAPHADRCGSCTRCQTACPTDAFPAPYQLDPRRCVSYLTIEHRGPIPEDLRPRLGNRIYGCDDCLAVCPWNRFATPTTIPGLIAREDLVAPRLAELAELDDAAFRAHFSGSPIKRIGRNRFVRNVLNAIGNSGDPNLLPVALRLRDDEDPVVADSARWAASRLQAISTA

SEQ ID NO: 80579 - protein, 346 aa, Roseomonas sp.
  REGION 1..346: note = tr|A0A317F7L7|A0A317F7L7_9PROT Epoxyqueuosine reductase OS=Roseomonas sp. CQN31 OX=2184016 GN=queG PE=3; SV = 1
MTASSPRELIRAQALALGFDAVGFARAHLAEEVRERLAAFLAEGHHGSMGWMQDRAAQRAHPRALWPEAVSVISLGVNYAPERDPLATLARRDSATISVYARNRDYHDVVKGRLKRLGQWMAHRFKGTELKVFVDTAPVMEKPLAQQAGLGWQGKHTNLVSRAHGSWLFLGEIFCTLELEPDGAESDHCGSCDACLRICPTDAFPAPYRLDARRCISYLTIEHRGPIPEGLRARMGNRIYGCDDCLAVCPWNKFAHAHEEPAFAPRAALQAPKLAELAALDDAGFRALFSGSPIKRIGRDRFVRNVLVAIGNSGDPSLKPAAQALCEDADPVVADCARWAAARLPA

SEQ ID NO: 80580 - protein, 371 aa, Roseomonas sp.
  REGION 1..371: note = tr|A0A3A9JMU5|A0A3A9JMU5_9PROT Epoxyqueuosine reductase OS=Roseomonas sp. Z24 OX=2382222 GN=queG PE=3; SV = 1
MSSGRRARHRPACGFRRRTCPTTVAAADTTALIRAKALEIGFDAVGFAPAHLGPEVRARLDAFLAAGMQGEMGWLADRAEQRAHPQALWPEAASVIALGMNYGPEEDPLSILSQPDRGGISVYARHKDYHDIVKKRLKVLGRWMMDQWREQQIKVFVDTAPVAEKPLAQQAGLGWQGKHSNLVSREFGSWLFLGEIYTTLDLAPDAAEVDHCGKCTRCLRACPTDAFVGPYRLDARRCISYLTIEHKGPIPEEFRAKMGNRIYGCDDCLSVCPWNKFAQHGREPGLIAREDLTAPRLAELAVLDDTAFRALFSGSPVKRIGRDRFVRNVLIAIGNSGIPALRDVAAGLCEDPAEVVADAARWAVARLETRE

SEQ ID NO: 80581 - protein, 346 aa, Roseomonas stagni
  REGION 1..346: note = tr|A0A1I4C8G9|A0A1I4C8G9_9PROT Epoxyqueuosine reductase OS=Roseomonas stagni DSM 19981 OX=1123062; GN = queG PE=3 SV=1
MGGAEARDAIRARALALGFDAVGFARAALAAEARERLGAFLAAGHHGSMGWMEARADQRADPKALWPEAVSVISLGLNYGPDRDPMESLGWRDRGTISVYARNRDYHDLVKGRLKQLGGWIAGRFKGSGIKVFVDTAPVMEKPLAQQAGIGWQGKHTNLVSRDFGSWLFLGEVFTTLDLVPDEAERDHCGRCDACLRACPTEAFPAPYRLDARRCISYLTIEHHGPIPAELRARMGNRIYGCDDCLAVCPWNKFARAHEEPAFAPRAALTAPRLAELAALDDAGFRALFSASPIKRIGRNRFVRNVLVAIGNSGDPALRATAQGLCDDADESVAECARWASERLLG

SEQ ID NO: 80582 - protein, 349 aa, Roseovarius aestuarii
  REGION 1..349: note = tr|A0A1X7BTS7|A0A1X7BTS7_9RHOB Epoxyqueuosine reductase OS=Roseovarius aestuarii OX=475083 GN=queG PE=3; SV = 1
MDELKQQLVAQAISEGFDLARICRPWDVPQVPERLVAFLDKGYHGQMSWLAERTHWRGAPEVLWPEAKSVIMLGESYAPGFDPLATLSRADVGTVSVYARNRDYHDTVKKRLKRLARWLIDQAGGEVKVFVDTAPVPEKPLGQAAGLGWQGKHTNLVSRDLGSWFFIGSIFTTLELETDSAETDHCGNCRACLDVCPTDAFPAPYQLDARRCISYLTIEHHGPVDEDLRRLMGNRIYGCDDCLAVCPWNKFAVAAREVKYHARDNLMAPRLVELAALDDAAFRAFFSGSPIKRIGRNRFVRNVLYAIGNSEDAGLLPVVQRLCDDPDATVADAARWAVQQLKSAANGLV

SEQ ID NO: 80583 - protein, 217 aa, unidentified
  source 1..217: note = Roseovarius albus
  REGION 1..217: note = tr|A0A1X6ZUI1|A0A1X6ZUI1_9RHOB Epoxyqueuosine reductase OS=Roseovarius albus OX=1247867 GN=queG_2 PE=4; SV = 1
MATVSKTVTYAAAEAAAKLNGLGIMGALHEDGSTILLLGPGKEFWEIFKLSPELNDGAEDPFNRWSERIIGHMADTLGAKARFPFGGPPYEPFLRWAMDSGRAWQSPVGMLVHDEAGMMISFRGALHFSYEIDLPAPPAASPCETCETQPCVSACPVGALSDQHFYKIDACHAYLDTPAGQSCMSHGCIARRACPVSQSFDRNPAQSAIHMRYFHRS

SEQ ID NO: 80584 - protein, 351 aa, unidentified
  source 1..351: note = Roseovarius albus
  REGION 1..351: note = tr|A0A1X6YR39|A0A1X6YR39_9RHOB Epoxyqueuosine reductase OS=Roseovarius albus OX=1247867 GN=queG_1 PE=3; SV = 1
MESLKQALVAQALSEGFDACRVCRPWDVPRVPERLAEFLKQGYQGQMGWLEERSHWRGDPSMLWPEARSVIVLGESYTPNEDPMATVDQPDIGTISVYARNKDYHDLVKKRLKRLARWLIAEGGGEVKVFVDTAPVPEKPLGQAAGLGWQGKHTNLVSRHLGSWFFIGSVFTTLEVPTDRSEVDHCGRCRACLDACPTDAFPAPYQLDARRCISYLTIEHKGPIDPKLRSLMGNRIYGCDDCLAACPWNKFAVEARELRYHAREDLIAPELADLVQLDDTAFRAKFSGSPIKRIGRDRFVRNVLYAIGNSGRADLRRFAQDLCEDPDETIADAARWAVLRLENDAKGMESP

SEQ ID NO: 80585 - protein, 349 aa, unidentified
  source 1..349: note = Roseovarius atlanticus
  REGION 1..349: note = tr|A0A0T5NXZ1|A0A0T5NXZ1_9RHOB Epoxyqueuosine reductase OS=Roseovarius atlanticus OX=1641875 GN=queG; PE = 3 SV=1
MDGLKQRLVAQALAEGFDLCRVCRPGDVPQVPARLAAFLDRGYHGQMNWLADRAHWRGAPDVLWPEARSVIMLGESYTPQSDPMATLDDPEVGTVSVYARNRDYHDVVKKRLKRLARWLIAEAGGEVKVFVDTAPVPEKPLGEAAGLGWQGKHTNLVSRDMGSWFFIGSVFTTLEIDTDPAEVDHCGSCRACLDVCPTDAFPAPYQLDARRCISYLTIEHKGPVDEDLRAKMGNRIYGCDDCLAVCPWNKFAVKATELRYHARDDLVAPPLAELAQLDDAGFRARFSGSPIKRIGRDRFVRNVLYAIGNSGRPALRPVAQDLCDDPDATVADAAHWAVKRLSDAANGRE

SEQ ID NO: 80586 - protein, 343 aa, unidentified
  source 1..343: note = Roseovarius azorensis
  REGION 1..343: note = tr|A0A1H7K3N8|A0A1H7K3N8_9RHOB Epoxyqueuosine reductase OS=Roseovarius azorensis OX=1287727 GN=queG PE=3; SV = 1
MENGLKQRLVEQARAEGFDACRLCRPWDVGHVPERLAAFLGHGYHGQMGWLAERSHWRGAPQVLWPEARTVIVLGESYTPEDDPLAVLGQKDRGNISVYARGRDYHDTVKKRLKRLARWLIAEGGGEVKVFVDTAPVPEKPLGQAAGLGWQGKHTNLVSRDLGSWFFIGSVFTTLELETDPAESDHCGSCRACLDICPTDAFPAPYRLDARRCISYLTIEHDGPVDEALRPLLGNRIYGCDDCLAVCPWNKFAVAAREVKYHAREDLIAPRLAELAALDDAAFRARFSGSPIKRIGRNRFLRNVLYAIGNSGDMSLREVAQRHCGDPDATVADAARWAVGRLA

SEQ ID NO: 80587 - protein, 349 aa, unidentified
  source 1..349: note = Roseovarius gaetbuli
  REGION 1..349: note = tr|A0A1X7A5K4|A0A1X7A5K4_9RHOB Epoxyqueuosine reductase OS=Roseovarius gaetbuli OX=1356575 GN=queG PE=4; SV = 1
MITLKQRLVQQAMFEGFDACKLCRPWDVSQVPERLVAFIDRGYHGQMSWLGERQAWRGNPAALWPEARTVIMLGESYTPEGDPMATLAQKDVGTVSVYARNKDYHDTVKKRLKRLARWLIAEGGGEVKVFVDTAPVPEKPLGQAAGLGWQGKHTNLVSRDLGSWFFIGSVFTTLDLESDPAEIDHCGSCRACLDVCPTDAFPAPYQLDARRCISYLTIEHKGPVDDDLRALMGNRIYGCDDCLAVCPWNKFAVEAREVKYHARDDLMAPKLADLAVLDDAAFREKFSVSPIKRIGRDRFVRNVLYAVGNSGDPTLSAVAGDLCNDPDPTVAEAARWAMKRLKDAANGLA

SEQ ID NO: 80588 - protein, 349 aa, Roseovarius halotolerans
  REGION 1..349: note = tr|A0A1X6Z4W1|A0A1X6Z4W1_9RHOB Epoxyqueuosine reductase OS=Roseovarius halotolerans OX=505353 GN=queG; PE = 3 SV=1
MDMLKDKLIAQARAEGFDMARICRPWDVRHVPPRLQAFLDKGYHGQMGWLAERSHWRGDPSVLWPEARSVIVLGESYTPDSDPRATLAQVDVGTVSVYARNKDYHDIVKKRLKRLARWLIAEAGGEVKVFVDTAPVPEKPLGQAAGLGWQGKHTNLVSRDLGSWFFIGSVFTTLDLEADMAETDHCGSCRACLDVCPTDAFPAPYQLDARRCISYLTIEHKGPVDPELRPLMGNRIYGCDDCLAVCPWNKFAQEASEVRYHARDDLEAPKLADLAALDDAGFRAMFSGSPIKRIGRDRFVRNVLYAIGNSGDPALRDVAQGLRDDPDETVADAARWAAMRLAHDANGMD

SEQ ID NO: 80589 - protein, 352 aa, Roseovarius indicus
  REGION 1..352: note = tr|A0A0T5PE82|A0A0T5PE82_9RHOB Epoxyqueuosine reductase OS=Roseovarius indicus OX=540747 GN=queG PE=3; SV = 1
MKNGLKQRLVSQALAEGFDACRVCRPWDVPQVPGRLAEFLDKGRHGQMGWLAERSHWRGAPQVLWPEARSVIVLGESYTPDVNPMATLGQPEVGTVSVYARNKDYHDTVKKRLKRLARWLIAEGGGDVKVFVDTAPVPEKPLGQAAGLGWQGKHTNLLSRELGNWFFIGSVFTTLELETDPAESDHCGSCRACLDVCPTEAFPAPYQLDARRCISYLTIEHKGPVDEELRAKMGNRIYGCDDCLAVCPWNKFAVEAREVRYHAREDLTAPRLAELAVLDDAAFRERFSGSPIKRIGRDRFVRNVLYAIGNSGVPGLRPVAQDLCEDPDATVADAARWAVGRLADAANGMDRG

SEQ ID NO: 80590 - protein, 349 aa, unidentified
  source 1..349: note = Roseovarius litoreus
  REGION 1..349: note = tr|A0A1M7B6J0|A0A1M7B6J0_9RHOB Epoxyqueuosine reductase OS=Roseovarius litoreus OX=1155722 GN=queG PE=3; SV = 1
MPGLKDRLVARALEEGFDLARLCRPWDVGHVPERLKAFLDKGYHGQMGWLAERAEWRGDPSVLWPEARAIVMLGESYTPEEDPLACLGQGDVGAVSVYARNRDYHDLVKKRLKRLARWLIAEAGGEVKVFVDTAPVPEKALGQAAGLGWQGKHTNLVSRDLGSWFFIGSIFTTLDLEPDPAEIDHCGSCRACLDICPTDAFPAAYQLDARRCISYLTIEHKGPVDLGLRGLMGNRIYGCDDCLAVCPWNKFAREAREVRYHARDDLKAPKLAELAGLDDAAFRARFSGSPIKRIGRDRFVRNVLYAIGNSGMPGLRPVAQSLCEDPDPTVADAARWAVLRLDGDANGMA

SEQ ID NO: 80591 - protein, 349 aa, unidentified
  source 1..349: note = Roseovarius lutimaris
  REGION 1..349: note = tr|A0A1I4ZXX2|A0A1I4ZXX2_9RHOB Epoxyqueuosine reductase OS=Roseovarius lutimaris OX=1005928 GN=queG PE=3; SV = 1
MITLKQRLVQQAMSEGFDACKLCRPWDVPQVPGRLKAFVDKGYHGQMDWLAERQNWRGNPAALWPEARSVIMLAESYTPKDDPMAMLAERDIGTVSVYARNKDYHDTVKKRLKRLARWLIGEGGGEVKVFVDTAPVPEKPLGQAAGLGWQGKHTNLVSRDLGSWFFIGSVFTTLDLEPDPAEIDHCGSCRACLDICPTDAFPAPHQLDARRCISYLTIEHKGPVDEELRARMGNRIYGCDDCLAVCPWNKFAVEAREVKYHARDDLKAPKLADLAMLDDTAFRARFSGSPIKRIGRDRFVRNVLYAIGNSGEPSLWSVAQGLCEDPDPTVADAARWAAKRLENAANRLA

SEQ ID NO: 80592 - protein, 349 aa, unidentified
  source 1..349: note = Roseovarius marisflavi
  REGION 1..349: note = tr|A0A1M6XUA0|A0A1M6XUA0_9RHOB Epoxyqueuosine reductase OS=Roseovarius marisflavi OX=1054996 GN=queG; PE = 3 SV=1
MATLKQRLVQQAMSEGFDACKLCRPWDVPLVPERLAAFIDRGYHGQMDWLAERQTWRANPAALWPEARTVIMLAESYTPKDDPMATLGQRDVGTVSVYAQNKDYHDTVKKRLKRLARWLIAEAGGEVKVFVDTAPVPEKPLGQASGLGWQGKHTNLVSRDLGSWFFIGSVFTTLDLETDPAEVDHCGSCRACLDICPTDAFPAPHQLDARRCISYLTIEHKGPVDEDLRTRMGNRIYGCDDCLAVCPWNKFAVEAREVKYHARDDLKAPKLADLAMLDDAAFREKFSGSPIKRIGRDRFVRNVLYAVGNSGDPTLSAVAGELCNDPDPTVAEAARWAVKRLRDAANGLA

SEQ ID NO: 80593 - protein, 350 aa, Roseovarius mucosus
  REGION 1..350: note = tr|A0A1V0RPC9|A0A1V0RPC9_9RHOB Epoxyqueuosine reductase OS=Roseovarius mucosus OX=215743 GN=queG PE=3; SV = 1
MNIGLKQRLIDQALAEGFDACRMCRPWDVGHVPERLAAFLGQGYHGQMGWLAERSEWRGAPEALWPEARTVIMLGESYTPEEDPLAGLKRPECGNISVYARNRDYHDTVKKRLKRLARWLIDAGGGEVKVFVDTAPVPEKPLGQAAGLGWQGKHTNLVSRALGSWFFLGSVFTTLDLETDPAEIDHCGSCRACLDICPTDAFPAPYQLDARRCISYLTIEHKGPVDEALRPGLGNRIYGCDDCLAVCPWNKFAVTAREVKYHARDDLVAPRLAELAMLDDTAFRARFSGSPIKRIGRDRFLRNVLYAIGNSADPSLRAVAQSQCEDADAAVADAARWAVKRLDRDANGLA

SEQ ID NO: 80594 - protein, 350 aa, Roseovarius mucosus
  REGION 1..350: note = tr|A0A0A0HNX1|A0A0A0HNX1_9RHOB Epoxyqueuosine reductase OS=Roseovarius mucosus DSM 17069 OX=1288298; GN = queG PE=3 SV=1
MTIGLKQRLIAQAKAEGFDACRLCRPWDVGHVPERLAAFLGRGYHGQMGWLAERSAWRGAPDLLWPEARTVIMLGESYTPEEDPLAGLKRPDCGNISVYARNRDYHDTVKKRLKRLARWLIEAGGGEVKVFVDTAPVPEKPLGQAAGLGWQGKHTNLVSRNLGSWFFIGSVFTTLEIETDPAEVDHCGSCRACLDVCPTRAFPAPYQLDARRCISYLTIEHKGPVDEELRPGLGNRIYGCDDCLAVCPWNKFAVAAREVKYHARDDLLAPRLADLAALDDTAFRERFSGSPIKRIGRDRFLRNVLYAIGNSGDGSLRRVAQGHCDDPDAAVADAARWAVLRLDRDANGLE

SEQ ID NO: 80595 - protein, 353 aa, Roseovarius nanhaiticus
  REGION 1..353: note = tr|A0A1N7EG73|A0A1N7EG73_9RHOB Epoxyqueuosine reductase OS=Roseovarius nanhaiticus OX=573024 GN=queG; PE = 3 SV=1
MDDIKSRLIAHAQAEGFDLARICRPGDVPQVPARLSEFLDKGRHGQMGWLAERSHWRADPTALWPEARSVIMLGESYTPEHDPLEVLERPALGAISVYAQNKDYHDLVKKRLKRVARWLIAETGQDTEVKVFVDTAPVPEKPLGEAAGLGWQGKHTNLVSRDLGSWFFIGSIFTTLEIETDTGESDHCGSCRACLDICPTAAFPAPYQLDARRCISYLTIEHHGPVDPDLRALMGNRIYGCDDCLAVCPWNKFAQEARETRYHARDDLRAPPLAELAQLDDAAFRTKFSGSPIKRIGRNRFLRNVLYAIGNSGQPDLAEAARPHVNDPDETVVDAARWALERLQDAAKGMEQP

SEQ ID NO: 80596 - protein, 304 aa, Roseovarius nubinhibens
  REGION 1..304: note = tr|A0A348WA59|A0A348WA59_9RHOB tRNA epoxyqueuosine(34) reductase QueG (Fragment); OS = Roseovarius nubinhibens OX=314263 GN=queG PE=4 SV=1
MDALKHKLIAQAEAEGFDLLRVCRPGDVPQVPARLAEFLAEGRHGQMGWLAERSHWRGDPAALWPEARSVIMLGESYTPEEDPTATLEQPEIGTVSVYARNRDYHDLVKKRLKRLARWLIAEAEKAGVETPQVKVFVDTAPVPEKPLGEAAGLGWQGKHTNLVSRDLGNWFFIGSVFTTLEIDPDRAEKDHCGSCRACLDACPTDAFPAPYQLDARRCISYLTIEHHGPVDEELRPLLGNRIYGCDDCLAACPWNKFAVTAREARYHARADLIAPPLADLAALDDAGFRARFSGSPIKRIGRDR

SEQ ID NO: 80597 - protein, 358 aa, Roseovarius nubinhibens
  REGION 1..358: note = tr|A3SLF3|A3SLF3_ROSNI Epoxyqueuosine reductase; OS = Roseovarius nubinhibens (strain ATCC BAA-591 / DSM 15170 / ISM) OX=89187 GN=queG PE=3 SV=1
MDALKHKLIAQAEAEGFDLLRVCRPGDVPQVPARLAEFLAEGRHGQMGWLAERSHWRGDPAALWPEARSVIMLGESYTPEEDPTATLEQPEIGTVSVYARNRDYHDLLKKRLKRLARWLIAEAEKAGVETPQVKVFVDTAPVPEKPLGEAAGLGWQGKHTNLVSRDLGNWFFIGSVFTTLEIDPDTAEKDHCGSCRACLDACPTDAFPAPYQLDARRCISYLTIEHHGPVDEELRPLLGNRIYGCDDCLAACPWNKFAVTAREARYHARADLIAPPLADLAALDDAGFRARFSGSPIKRIGRDRFLRNVLYAIGNSARPDLLPAARAHLDDPDPTVADAARWSVARLEIAANRLDSDA

SEQ ID NO: 80598 - protein, 349 aa, Roseovarius pacificus
  REGION 1..349: note = tr|A0A1M7DVM4|A0A1M7DVM4_9RHOB Epoxyqueuosine reductase OS=Roseovarius pacificus OX=337701 GN=queG PE=3; SV = 1
MGSLKDKLVARAIEEGFDLARVCRPWDVGHVPDRLAAFLGKAYHGQMGWLAERSHWRGDPHALWPEARSILMLGESYTPADDPTATLAQGDVGTVSVYARNRDYHDVLKKRLKRLARWLIAEAGGEVKVFVDTAPVPEKPLGQAAGLGWQGKHTNLVSRDLGSWFFIGSIFTTLELETDPAEIDHCGSCRACLDACPTDAFPAPYQLDARRCISYLTIEHKGPVDEELRARMGNRIYGCDDCLAACPWNKFAVAAREVKYHAREDLIAPKLAELAVLDDAGFRARFSGSPIKRIGRDRFVRNVLYAIGNSGDPALSDVAQGLCEDANETVADAARWAVLRLRHAANGMD

SEQ ID NO: 80599 - protein, 358 aa, Roseovarius sp.
  REGION 1..358: note = tr|A0A2E2S3Z3|A0A2E2S3Z3_9RHOB Epoxyqueuosine reductase OS=Roseovarius sp. OX=1486281 GN=queG PE=3 SV=1
MDALKHKLIAQAEAEGFDLLRVCRPGDVPQVPARLAEFLAEGRHGQMGWLAERSHWRGDPAALWPEARSVIMLGESYTPEEDPTATLEQPEIGTVSVYARNRDYHDLVKKRLKRLARWLIAEAEKSGGETPQVKVFVDTAPVPEKPLGEAAGLGWQGKHTNLVSRDLGNWFFIGSVFTTLEIDPDLAEKDHCGSCRACLDACPTDAFPAPYQLDARRCISYLTIEHHGPVDEALRPLLGNRIYGCDDCLAACPWNKFAVTAREARYHARADLIAPPLDELAALDDAGFRARFSGSPIKRIGRDRFLRNVLYAIGNSARPDLLPAARAHLDDPDPTVADAARWSVARLEIAANRLDSDA

SEQ ID NO: 80600 - protein, 350 aa, Roseovarius sp.
  REGION 1..350: note = tr|A6E4R6|A6E4R6_9RHOB Epoxyqueuosine reductase; OS = Roseovarius sp. TM1035 OX=391613 GN=queG PE=3 SV=1
MNVGLKQRLIDQALAEGFDACRMCRPWDVGHVPERLAAFLGQGYHGQMGWLAERSEWRGAPEALWPEARTVIMLGESYTPEEDPLAGLKRSDCGNISVYARNRDYHDTVKKRLKRLARWLIDAGGGEVKVFVDTAPVPEKPLGQAAGLGWQGKHTNLVSRELGSWFFLGSVFTTLDLETDPAEIDHCGSCRACLDICPTDAFPAPYQLDARRCISYLTIEHKGPVDEALRPGLGNRIYGCDDCLAVCPWNKFAVAAREVKYHARDDLVAPRLAELAMLDDTAFRARFSGSPIKRIGRDRFLRNVLYAIGNSADPSLRAVAQSQCEDADAAVADAARWAVKRLDRDANGLA

SEQ ID NO: 80601 - protein, 350 aa, Roseovarius tolerans
  REGION 1..350: note = tr|A0A0L6CYZ5|A0A0L6CYZ5_9RHOB Epoxyqueuosine reductase OS=Roseovarius tolerans OX=74031 GN=queG PE=3; SV = 1
MKNGLKQRLVAQARAEGFDACRLCRPWDVGHVPERLAAFLEQGYHGQMGWLEERAHWRGAPEVLWPEARTVIVLGESYTPEEDPLAGLAQRDRGNVSVYARGRDYHDTVKKRLKRLARWLISEAGGEVKVFVDTAPVPEKPLGEAAGLGWQGKHTNLVSRDLGSWFFIGSVFTTLDLETDPAEIDHCGSCRACLDICPTDAFPAPYQLDARRCISYLTIEHKGPVDEALRPLLGNRIYGCDDCLAVCPWNKFAVEAREVKYHARDDLVAPKLADLAALDDAGFRARFSGSPIKRIGRDRFLRNVLYAIGNSGDASLCAVAQGHCEDADEAVADAARWAVKRLDRDANGLE

SEQ ID NO: 80602 - protein, 350 aa, Roseovarius tolerans
  REGION 1..350: note = tr|A0A1H7WJU8|A0A1H7WJU8_9RHOB Epoxyqueuosine reductase OS=Roseovarius tolerans OX=74031 GN=queG PE=3; SV = 1
MKNGLKQRLVAQARAEGFDACRLCRPWDVGHVPERLAAFLQKGYHGQMGWLEERAHWRGAPEVLWPEARTVIVLGESYTPEEDPLAGLAQRDRGNVSVYARGRDYHDTVKKRLKRLARWLISEAGGEVKVFVDTAPVPEKPLGEAAGLGWQGKHTNLVSRDLGSWFFIGSVFTTLNLETDPAEIDHCGSCRACLDICPTNAFPAPYQLDARRCISYLTIEHKGPVDEALRPLLGNRIYGCDDCLAVCPWNKFAVEAREVKYHARDDLVAPELAELAALDDAGFRARFSGSPIKRIGRDRFLRNVLYAIGNSGDASLCAVAQGHCEDPDEAVADAARWAVKRLDRDANGLE

SEQ ID NO: 80603 - protein, 385 aa, unidentified
  source 1..385: note = Rouxiella badensis
  REGION 1..385: note = tr|A0A1X0WEB3|A0A1X0WEB3_9GAMM Epoxyqueuosine reductase OS=Rouxiella badensis OX=1646377 GN=queG PE=3; SV = 1
MTHLLDLDQLAQHIKQWGQSLGFQQVGICDTDLSAEEPKLQEWLDKQYHGEMDWMARHGMMRARPHELLPGTLRVISVRMNYLPAKAAFAKTLNNPMLGYVSRYALGRDYHKVLRQRLKKLGDMIQTYCTEAQPDSALSFRPFVDSAPIMERPLAEKAGLGWVGKHSLILNRESGSWFFLGELLIDLPLPVDKPQEEQCGRCVACITTCPTGAIVAPYQVDARRCISYLTIELEGAIPEEFRPLMGNRIYGCDDCQLICPWNRYSQLTDEDDFSPRAALHAPQLVELFNWKEEKFLRITEGSPIRRIGYLRWLRNISVALGNAPYDESIVLALESRKGENSMLDEHIEWAIAQQLTRRSEHQIEVQSSQKKRLIRAVEKGLPRDA

SEQ ID NO: 80604 - protein, 385 aa, unidentified
  source 1..385: note = Rouxiella silvae
  REGION 1..385: note = tr|A0A1X0VYM0|A0A1X0VYM0_9GAMM Epoxyqueuosine reductase OS=Rouxiella silvae OX=1646373 GN=queG PE=3 SV=1
MTHLLDLEQLAQHIKQWGQSLGFQQVGICDTDLSAEEPKLQAWLDKQYHGEMEWMARHGMLRARPHELLPGTLRVISVRMNYLPAKAAFAKTLNNPTLGYVSRYALGRDYHKVLRQRLKKLGDMIQTFCTESQPDLALSFRPFVDSAPIMERPLAEKAGLGWVGKHSLILNRESGSWFFLGELLIDLPLPVDKPQEEQCGRCVACITICPTGAIVAPYQVDARRCISYLTIELEGAIPEEFRPLMGNRIYGCDDCQLICPWNRYSQLTDEDDFSPRAALHAPELIALFNWKEEKFLRITEGSPIRRIGHLRWLRNISVALGNAPYDENIVLTLQSRKGENSMLDEHIEWAIAQQLARRSEHQVEVQSSQKKRLIRAVEKGLPRDA

SEQ ID NO: 80605 - protein, 355 aa, Rubellimicrobium mesophilum
  REGION 1..355: note = tr|A0A017HJJ4|A0A017HJJ4_9RHOB Epoxyqueuosine reductase OS=Rubellimicrobium mesophilum DSM 19309; OX = 442562 GN=queG PE=3 SV=1
MDARPLKERLAEEARAAGFAAMGICRPDAIPEAMGRLQAFLAEERHGQMEWMADRAHWRGDPTALWPEARSVIMLADSYAPEHDPLDVLGHPDRAAVSVYAQGRDYHDSVKPRLKRVLRWLLEQEPGAQGKVFVDTAPVMEKPLAQAAGLGWQGKHTNLLGRDFGNWVFLGAIFTTVDLPPDAPEVSHCGSCRRCLDACPTGAFPAPYRLDATRCISYLTIEHKGPIPEELRGKLGNRIYGCDDCLAACPWNKFAVQASELRYLRQDGPPRLAELATLDDATFRARFPGSPVKRIGIARFLRNVLYAIGNSGDPALLPAAQGHLNAEDPTVAEAAAWACSRLARADVGGRDMPTP

SEQ ID NO: 80606 - protein, 367 aa, unidentified
  source 1..367: note = Rubellimicrobium roseum
  REGION 1..367: note = tr|A0A5C4NIE1|A0A5C4NIE1_9RHOB Epoxyqueuosine reductase OS=Rubellimicrobium roseum OX=687525 GN=queG; PE = 3 SV=1
MRTSTSDRGRGASPPPAHLHEVDGPALKARLAEEARAAGFAALGICRPDAIPEAMGRLRTFLAEGRHGQLDWMADRAHWRGDPAALWPEARSVVMLADSYAPAQDPLDVLRHPDRGAVSVYAQGKDYHDTVKPRLKRLLRWLLEQVPEAQGKVFVDTAPVMEKPLAQAAGLGWQGKHTNLLGRDFGNWVFLGAIFTTVDLPPDAPEVSHCGSCRRCLDACPTDAFPAPYQLDARRCISYLTIEHRGPVPEEFRPALGNRIYGCDDCLAVCPWNKFAVAASELRYLRQDEAPALADLAALDDATFRARFAGSPVKRIGLARFLRNVLYAIGNSGDPALLPSAQAHLEAGDPAVADAAAWAVSRLREGT

SEQ ID NO: 80607 - protein, 363 aa, Rubellimicrobium sp.
  REGION 1..363: note = tr|A0A5C4MX98|A0A5C4MX98_9RHOB Epoxyqueuosine reductase OS=Rubellimicrobium sp. YIM 131921 OX=2585369; GN = queG PE=3 SV=1
MRTSTSERPDGAALKARLAEEARAAGFAAMGVCRPDAIPEAMGRLRTFLDEGRHGQLDWMADRAHWRGDPSALWPEARSVVMLVDSYAPEHDPLEVLAHPDRGGVSVYAQGKDYHDTVKPRLKRVLRWMLEQAPGEQGKVFVDTAPVMEKPLAQAAGLGWQGKHTNLLGRDFGNWVFLGAIFTTLDLPPDAPEVSHCGSCRRCLDACPTAAFPAPYQLDARRCISYLTIEHKGPVPEEFRAALGNRIYGCDDCLAVCPWNKFAVAASELRYLRDEEAPRLADLAALDDPAFRARFAGSPVKRIGLARFLRNVLYAIGNSGDPALIPSARAHLGAEDPAVAEAAAWACSRLARADVEGRAATVR

SEQ ID NO: 80608 - protein, 351 aa, Rubellimicrobium thermophilum
  REGION 1..351: note = tr|S9QNZ5|S9QNZ5_9RHOB Epoxyqueuosine reductase; OS = Rubellimicrobium thermophilum DSM 16684 OX=1123069; GN = queG PE=3 SV=1
MRISTSEAEALKAGLRAEAEAAGFAAMGVCRPDAIPQAGERLRVFLEAGMHGTMGWMADRASWRASPAALWPAARSVVMLADSYAPRTDPLAVLARRDHAAISVYAKGRDYHDSVKPRLKRLLRWLLAQAPGAEGKVFVDTAPVMEKPLAQAAGLGWQGKHTNLLGRGFGNWVFLGAIMTTLELPPDRPERDHCGSCTRCLDSCPTRAFPAPFRLDARRCLSYLTIEHRGAWPEEFRLATGNRIFGCDDCLAVCPWNKFAVAARELRYRPDAPAPPLAELAALDEAGFRARFAGTPVKRIGHARFLRNVLYAIGNSGDPALIPAAAAHRDAADPVVADAAAWALSRLHKAM

SEQ ID NO: 80609 - protein, 326 aa, unidentified
  source 1..326: note = Rubidibacter lacunae
  REGION 1..326: note = tr|U5DH20|U5DH20_9CHRO Epoxyqueuosine reductase; OS = Rubidibacter lacunae KORDI 51-2 OX=582515 GN=queG PE=3; SV = 1
MLVDATAVKAKARALGFHLVGIAAISSDNDGAAEHLQAWLALGYHADMAWMASPKRLDARACLPGARSVICVALNYYTPHAHPEGRDRAKISRYGWGRDYHRELHKRLKALALWLEACGHDIHTRYYADTGPVQDKVWAQRAGLGWIAKNGNLISRDFGSWIFLGEVLTDLELTPDTPHAQHCGTCTRCLDACPTDAIVAPFVVDANRCIAYHTIENRAEELPDAIAANLNGWVAGCDICQDVCPWNQRFARPTDIAAFAPYPDNRAPSLDDLATLDDTEWNRRFPASALRRIKPAMWRRNARANLRSIQRRAERAARPYSPPADA

SEQ ID NO: 80610 - protein, 376 aa, unidentified
  source 1..376: note = Rubinisphaera brasiliensis
  REGION 1..376: note = tr|F0SP23|F0SP23_RUBBR 4Fe-4S ferredoxin-type domain-containing protein OS=Rubinisphaera brasiliensis (strain ATCC 49424 / DSM 5305 / JCM 21570 / NBRC 103401 / IFAM1448) OX=756272 GN=Plabr_3529 PE=4 SV=1
MELAEAVRRRAIEIGFDLCGITSALTPTTLPQFHDWLDAGHAGEMGYLERRRDAYDHPERVLPSVRSVIMCGVCYDPERSHPVVENETASPVGRIARYARIAGDYHDSVKKMLRELASVLHELQPGCQSRAVVDTAPLLERDAARQAGLGWFGKNTMLINKGRGSYFFLGGVLTSVELSPDEPHKTDHCGTCTRCLEVCPTDALIEPHQLDARRCISYLTIELRERPIPRELRSGMQDWMFGCDLCQEVCPWNRHAPQPAAEKFQTQWSPSHAAEMLMLSEEEFREQYRKTPLSRPGRVGMARNAAIVLGNSGDAQFVPVLEQATWDSSPLVRGAAIWALGELVDAQSSRRLVELRQTETDSGVVEELDAIFASRI

SEQ ID NO: 80611 - protein, 385 aa, unidentified
  source 1..385: note = Rubinisphaera sp.
  REGION 1..385: note = tr|A0A2E9VJC7|A0A2E9VJC7_9PLAN tRNA epoxyqueuosine(34) reductase QueG OS=Rubinisphaera sp.; OX = 2024857 GN=queG PE=4 SV=1
MSESLTEQIKKSARELGFELVGIAPAISPVSLPHFESWVEAGYAGDMKYIPGRREAYQHPRHILPVVRSVIMTAMCYDPQRNVKQNESRIGQIARYARGEKDYHDVMKVSLKTLAQQIHEEVPDSKTRAVVDTTPLLERDFAQQAGLGWFGKNTMLLNKSIGSYFFLGALLTDVELTPDEPHNTSHCGTCTICLDACPTDAFVQPYILNATRCISYYTIEMRDQSIPEEIRPGLKDWMFGCDICQEVCPWNRKAPPTREEKFESQTDLPDAIEFLTMSPETFKAKFRGTPLERTGRNALARNAAIVIGNSGSRATVQLLIEALQDESPLVREAVVWALGKLGNAKIKADLQSQLSDEKEELVVNQLKTSISQLDRNSYEIDSEAV

SEQ ID NO: 80612 - protein, 337 aa, Rubricoccus marinus
  REGION 1..337: note = tr|A0A259U1M9|A0A259U1M9_9BACT Epoxyqueuosine reductase OS=Rubricoccus marinus OX=716817 GN=queG PE=3; SV = 1
MTASGVRSCLSREVKAQALRLGFDLVGIARAERLDAEARRLEAWLDAGRHGGEAGAMPWMDQNFDKRIDPRELVPGAKSVVSVAHTYLAHAPEPLADADALARGVGKVSRYAWGDDYHDVLKEKLAELFDWLDTASGGAGGRAFVDSAPVMDKAWAQRAGIGWIGKNTNLLTRSHGSFVFLGELIVDVDLEPDDPFAADHCGSCTRCLDACPTDALDQPYQIDATRCISYHTIEQRGAAWPPQAQELAKEFGPWIFGCDICQDVCPWNKFARETRDARFQARPEVAETPLATWQEMDLEAFRQRLRKSPLKRTTPEGMARNAANAEANARRWREQNG

SEQ ID NO: 80613 - protein, 372 aa, Rubrimonas cliftonensis
  REGION 1..372: note = tr|A0A1H4C5P2|A0A1H4C5P2_9RHOB Epoxyqueuosine reductase OS=Rubrimonas cliftonensis OX=89524 GN=queG PE=3; SV = 1
MAAPDLRAALEAEARSLGFAGFGVCAPEATRPAGEALRAWVGAGLHGEMAWMAERLAWRADASALWPEARSVVMLAEPYPPGDDPMVALVMRDRAAISVYAQGADYHDVVKRKLKRLGRWLIDRAGGDIKVFVDTAPVMEKPLAEAAGLGWRGRHTNLVSRELGSWFFLGALFTTLELARDAPHADRCGSCRACLDICPTAAFPASGVLDARRCVSYLTIELKGPIPREMRPLIGNRIYGCDDCLAVCPWNKFAGRAREIAYAARPELARPRLADLAALDDAAFREVFAGSPVKRIGRDRFLRNVLVAIGNSSDPDLAESACARLADASALVRGAAVWALWRLWPAARLAALRADDPDPDVAAEWAAALGPS

SEQ ID NO: 80614 - protein, 373 aa, unidentified
  source 1..373: note = Rubripirellula obstinata
  REGION 1..373: note = tr|A0A5B1CI11|A0A5B1CI11_9PLAN Epoxyqueuosine reductase OS=Rubripirellula obstinata OX=406547 GN=queG; PE = 4 SV=1
MDPNDAASLIREAVYQEGFDLCGIAPAVTSSGYHQLVQWIDAGYAAGMNYFAERRDAYQHPSGVLAGAKSIVVMSFPYPSESENSVSAGHGKIARYAWPGDDYHDVIHPKLKRICRLIKSSFPESNCRGVVDTAPIMEREIAELAGLGWRGKNTLLLNKKRGSYFLLACVLVDIELPADQPHPSDHCGTCTACLDACPTDAFPKPGVLDASRCISYLTIEHRDSIDVELRPKMADWFFGCDVCQEVCPWNRKPSRSPMVKANELATIDLHELFQLDDEQFRERFRKTPLWRTRRRGVLRNAAIVLGNQGSSESLSHLKIGLADEDPLVRGTSAWAIGKIGGDQASSILTTRLSIESDAEVIQEIQQASSALGR

SEQ ID NO: 80615 - protein, 342 aa, unidentified
  source 1..342: note = Rubritalea profundi
  REGION 1..342: note = tr|A0A2S7U2R3|A0A2S7U2R3_9BACT tRNA epoxyqueuosine(34) reductase QueG OS=Rubritalea profundi; OX = 1658618 GN=BSZ32_12775 PE=4 SV=1
MELTPETTKNNIQLIANRLGFSDCRIARVKRATHADRYLDWVEQGCAGEMSWLERNKDKRVHPGEVLEGAQSIITLALNYFPGSQAADSDYKIARYAWNDDYHDIIEGKLKDFDLALSDMGGKQRYYVDTGPILERDFANDAGLGWNGKSTVQIHKGFGTWFFICELISTLKIEADQPSADHCGKCTRCIDHCPTQAITGPREMDARRCISYLTIEHAGSIPFELRPMMGDRIYGCDVCLEVCPWNRFAKLSRETKLHARSEIFDHKLRDFLNMDIESFRKTFAKSPIKRIKHNRFIRNVCVAIGNTGTTEDIQLLEPFATGDDPLIAEHAQWAIDEIQRRS

SEQ ID NO: 80616 - protein, 346 aa, Rubritalea squalenifaciens
  REGION 1..346: note = tr|A0A1M6RI17|A0A1M6RI17_9BACT Epoxyqueuosine reductase OS=Rubritalea squalenifaciens DSM 18772; OX = 1123071 GN=queG PE=3 SV=1
MQPNADILKSNIQHIAKQLGFSDCRIAAAKTATHADDYLQWVEDGCAGDMAWLERNQHRRVDPREVLPGAKSIVTLALNYYPGDQPAEHDFKIARYSWNEDYHDIIDEKLRDLNLAMEEMGGQQRYYVDTGPVLERDFATDAGLGWNGKSTVQIHRKFGTWFFLCELITTLDLTPDSPFGDHCGKCTRCIDNCPTGAITGPHRVDARKCISYLTIEHLGSIPQDLRPLMGNRIYGCDVCLEVCPWNRFAQISRHTQLHAKQEIFQHSLRDLVQIDEDDFRRIFAKSPIKRIKHPRFIRNVCIALGNTGTEADIDLLRPLAQGDNELVSEHATWAIEQIKKRTQAKA

SEQ ID NO: 80617 - protein, 324 aa, unidentified
  source 1..324: note = Rubrivirga marina
  REGION 1..324: note = tr|A0A271IXZ5|A0A271IXZ5_9BACT Epoxyqueuosine reductase OS=Rubrivirga marina OX=1196024 GN=queG PE=3 SV=1
MPGYDPARLARDLKAEARRIGFDGVGIARAEKLDTEARRLEAWLEAGRHGGSDGAMTWMERNFDKRVDPRELVPGAESVVSVFVSYFQPGRRPGGGNAEAAKISRYAWGDDYHDVLKEKLAELFDWLDRRTGGAGGRAFVDSAPVLDKAWAQRAGLGWQGKNTNLLTRTHGSFVFLGELIVDVPLEPDEPFRADHCGSCTRCLDACPTGALDAPYQIDGSRCISYWTIEHRGPDLPEDLAAEFGTWAFGCDICQDVCPWTKFSQPTRDARFLPRPGVTNTPAREWAEIDVEAWRGRFRRSPVKRTKVEGFLRNMENAALNADRA

SEQ ID NO: 80618 - protein, 318 aa, unidentified
  source 1..318: note = Rubrivirga sp.
  REGION 1..318: note = tr|A0A271J7I9|A0A271J7I9_9BACT Epoxyqueuosine reductase OS=Rubrivirga sp. SAORIC476 OX=1961794 GN=queG; PE = 3 SV=1
MYDSARLARDLKAQARRIGFDGVGIARAERLDVEARRLEAWLTAGRHGGSDGAMTWMERNVEKRVDPRELVPGAESVVSVFVSYVQPGRRPGEDGGAKISRYAWGDDYHDVLKEKLAELFDWLDTRTGGAGGRAFVDSAPVMDKAWAQRAGLGWQGKNTNLLTTTHGSFVFLGELIVDVPLEPDVPFQADHCGSCTRCLDACPTGALDAPYQIDATRCISYWTIEHRGPDLPEIASEFGAWAFGCDICQDVCPWTKFSQPTRDARFLPRPGVTDTPAREWAEIDIEAWRERFRRSPVKRVKYEGFLRNMENAARNATS

SEQ ID NO: 80619 - protein, 357 aa, Rubrivivax benzoatilyticus
  REGION 1..357: note = tr|F3LRY9|F3LRY9_9BURK Iron-sulfur cluster-binding protein OS=Rubrivivax benzoatilyticus JA2 = ATCC BAA-35; OX = 987059 GN=RBXJA2T_12302 PE=4 SV=1
MADIDLASAEPGLLAWLEAGFHGSMAYMAAHGLKRARPAELVPGTVRVITARMDYLPRDLAQDWREAEQRRLAAPGEAVISVYARGRDYHKVLRTRLQRLADRLAAEIGPFGHRVFVDSAPVLEVELASRSGIGWRGKHTLTLSREAGSTFFLGEIYVDLALPVTAPEAPHCGSCTACLDACPTRAIVAPWRVDARRCISYLTIETDDPVPVELRPALGQRIYGCDDCQTACPWNKYARRASLPDFDWRADLAAPTLLSLWSWGEADFLKRTEGSPIRRIGWRRWRRNLAVAAGNSLRVADDPVLAAALATGRDAAGEIVAEHVDWALAQRSAASAASASGSPAIATSVDSVTRPAT

SEQ ID NO: 80620 - protein, 375 aa, Rubrivivax gelatinosus
  REGION 1..375: note = tr|A0A4R2M7Z7|A0A4R2M7Z7_RUBGE Epoxyqueuosine reductase OS=Rubrivivax gelatinosus OX=28068 GN=queG PE=3; SV = 1
MLARLRIWAHEAGFSQIGVADIDLTSAEPGLLAWLAAGFHGSMAYMAAHGLKRARPAELVPGTVRVITARMDYLPRGLADDWRDAEQRRLATAGEAVISVYARGRDYHKVLRTRLQRLADRLSAEIGPFGHRVFVDSAPVLEVELASRSGIGWRGKHTLTLSREAGSTFFLGEIYVDLALPVTAPEAPHCGNCTACVDACPTRAIVAPYRVDARRCISYLTIETDEPIPVELRPALGQRVYGCDDCQTACPWNKYARRAELADFDWRADLAAPSLLALWSWSEAEFLKRTEGSPIRRIGWQRWRRNLAVAAGNSLRAADDPALAAALAAGRDAAGDVAAEHVDWALAQRSAASAASASGSPAIATSVDSVTRPAT

SEQ ID NO: 80621 - protein, 386 aa, Rubrivivax gelatinosus
  REGION 1..386: note = tr|I0HP85|I0HP85_RUBGI Epoxyqueuosine reductase; OS = Rubrivivax gelatinosus (strain NBRC 100245 / IL144); OX = 983917 GN=queG PE=3 SV=1
MRTERHVDGPSVLARLRTWAHEVGFSQIGVADIDLASAEPGLLAWLEAGFHGSMAYMAAHGLKRARPAELVPGTVRVITARMDYLPRDLAEDWRDAERRRLATPGEAVVSVYARGRDYHKVLRTRLQRLADRLAAEIGPFGHRVFVDSAPVLEVELASRSGIGWRGKHTLTLSREAGSTFFLGEIYVDLALPVTAPEAPHCGSCTACLDACPTQAIVAPYRVDARRCISYLTIETDDPVPVELRPALGLRVYGCDDCQTACPWNKYARRATVPDFDWRPELAAPSLLSLWAWTETEFLKRTEGSPIRRIGWRRWRRNLAVAAGNSLRAADDPALAAALAAGRDAAGEIVAEHVDWALAQRSAASAASASGSPAIATSVDSVTRPAT

SEQ ID NO: 80622 - protein, 359 aa, Rubrivivax sp.
  REGION 1..359: note = tr|A0A519ZD69|A0A519ZD69_9BURK Epoxyqueuosine reductase OS=Rubrivivax sp. OX=50259 GN=queG PE=3 SV=1
MKIALDTAQLVSQIQAWGQELAFSQIGVADVDLSSAEPGLQAWLSAGWHGDMAYMAAHGMKRARPAELVPGTVSVITARMDYLPRDTPEGWQALEFARLERPREAVVSMYARGRDYHKVLRHRLQTLADRIQAAVGPLGHRVFTDSAPVLEVELAQRSGQGWRGKHTLVLNREGGSMFFLGEIYVDLGLPPTPAVSEHCGACSACIDVCPTQAITAPQRLDARRCISYLTIEHAGAIPEALRPLMGNRIYGCDDCQLICPWNKFAQRSPLADFDAREGLGGATLATLFAWSETEFLRRTEGSPIRRIGHERWLRNIAVALGNALRAGSDADLRGVLQTRAGHPSALVREHVAWALSQAV

SEQ ID NO: 80623 - protein, 382 aa, Rubrivivax sp.
  REGION 1..382: note = tr|A0A1E4IAH5|A0A1E4IAH5_9BURK Epoxyqueuosine reductase OS=Rubrivivax sp. SCN 71-131 OX=1660138 GN=queG; PE = 3 SV=1
MSHSRDIDGPRLVQQLRAWAHELGFSQIGIAGIDLASAEPGLQAWLDAGFHGRMGYMAAHGLKRARPAELVPGTLSVITLRMDYLPAATPDGWQARERQRLQEPARAQVSLYARGRDYHKVVRPRLQQLADRLQAEVGAIGHRAFCDSAPVLEVELASRSGNGWRGRHTLALHRDAGSMFFLGELFVDVALPPTAPVTAHCGQCRACIDACPTHAIVAPYRVDARRCISYLTIENDGPIPVELRADIGNRVYGCDDCQLACPWNKYARRALLPDFEPRPWLAEAPLLELWAWSEGEFLNRTEGNPIRRIGWSRWRRNLAVGLGNAWRASGDAAIAEALVAARPGADDMVREHIDWALAQGAAATPAASAVDTSSRGDPLKAC

SEQ ID NO: 80624 - protein, 381 aa, Rubrobacter radiotolerans
  REGION 1..381: note = tr|A0A023X741|A0A023X741_9ACTN TIGR00276: epoxyqueuosine reductase OS=Rubrobacter radiotolerans; OX = 42256 GN=RradSPS_2733 PE=4 SV=1
MTPALKTSPKENRETVLRLARAAGFDLVGVTSAEPLEKGGERLRRWQEAGMSADLGYMQRPVELLSNPKKLQKSARSVISLGVSYYGGDHPENIGAGHVARYAWGRDYHDSIKERLLRLRGDIEAELGTRVKARAFTDAVPLLERSAAQRAGLGFFGRNACLISREVGSYFFIADLIIDLDIEPDAPGEGTCGRCSRCMDACPTGAIREPGVVDARLCISYLTIENRGDIPPDLRERIGDRAFGCDICQEVCPYNKTKARKTGWSDFLPEAGAGPYLDLREVIAVRTEEEFERRFGGTALTRPGRAGLVRNCCVVAGNLRLGSVLPALEEALRSDDSPVVRGHAAWALGRIDGGRRALTEALEEEPDGGVREEIEAALGRS

SEQ ID NO: 80625 - protein, 386 aa, Rubrobacter taiwanensis
  REGION 1..386: note = tr|A0A4R1B9S7|A0A4R1B9S7_9ACTN tRNA epoxyqueuosine(34) reductase QueG OS=Rubrobacter taiwanensis OX=185139 GN=queG PE=4 SV=1
MSGSAKEIIAEKARALGFDLVGVSRAEPLEAGGERLREWQAAGMAGEMAYMNRPVELLSDPRKLQKSARSVISLGVSYYPGEHPENPGSGGRVARYAWGRDYHEVIKERLFRLRRELEEELGVKIKARAFTDAVPLLERSAAQRAGLGFFGRNSCLINGEIGSYFFIADLIVDLELEPDEPGSGTCGRCTRCMSACPTGAIKAPGVVDARLCISYLTIENRGEIPRKLRPLVGDWAFGCDVCQEVCPYNKRKAQKSRWPEFSAEAGAGEYLDLLEVLEIRDEEAFERHFAGTPLTRPGRAGLVRNCCVVAGNLRLEAAVPALIRCLTEDESPVVRAHAAWALGEIGGAAAGAALRRAAEAEGDPRCREEIRAAETSCAKKSAPRSP

SEQ ID NO: 80626 - protein, 402 aa, Rubrobacter xylanophilus
  REGION 1..402: note = tr|A0A510HKL6|A0A510HKL6_9ACTN Epoxyqueuosine reductase OS=Rubrobacter xylanophilus OX=49319 GN=queG; PE = 4 SV=1
MRLYTRGGPATHAPGILEAVETAEPAREHRKVVEELARAAGFELVGVTSAEPLAGGGERLRRWQEAGMAGEMGYMRRPPELLSDPRRLQKSARSVISLGVSYYPGEHPENPGDGGRVARYAWGRDYHRVIKERLFGLRRELEEALGCRIRARAFTDAVPLLERSAAQRAGLGFFGRNSCLINPAMGSYFFIAELLVDLKIEPNLPGEGTCGRCTRCIDRCPTGAIKAPGVVDARLCISYLTIENRGEIPRSLRPLVGDWAFGCDLCQEVCPYNRRKARKSRWPEFSAEAGAGPYLKIAEVLAIRSEEEFERRFAGTPLTRPGRAGLLRNCCVVAGNLRLEEAVPALVGCLREDPSPLVRGHAAWALGEIGGAEEELSGAAHRERDPWCRREMELALSRATVG

SEQ ID NO: 80627 - protein, 380 aa, Rubrobacter xylanophilus
  REGION 1..380: note = tr|Q1AR96|Q1AR96_RUBXD Uncharacterized protein; OS = Rubrobacter xylanophilus (strain DSM 9941 / NBRC 16129); OX = 266117 GN=Rxyl_3176 PE=4 SV=1
MEDPARARRVVEELARAAGFELVGVTGAEPLAEGGERLRRWQEAGMAAGMGYMRRPAELLCDPRRLQKSARSVISLGVSYYPGEHPENPGDGGRVARYAWGRDYHRAIKQRLLGLRRDLEARLGCRVRARAFTDAVPLLERSAAQRAGLGFFGRNSCLINRDMGSYFFIAELLVDLELEPDGPGEGTCGRCTRCMDRCPTGAIKAPGVVDARLCISYLTIENRGEIPRPLRPLVGDWAFGCDLCQEVCPYNRRKAKRSRWPEFSAEAGAGPYLEITEVLGIRSEEEFERRFAGTPLTRPGRAGLLRNCCVAAGNLRLEAAVPALAGCLREDPSPLVRGHAAWALGEIGGAERELSEAARREADPWCRREIELALARAGVG

SEQ ID NO: 80628 - protein, 348 aa, unidentified
  source 1..348: note = Ruegeria arenilitoris
  REGION 1..348: note = tr|A0A238KLL2|A0A238KLL2_9RHOB Epoxyqueuosine reductase OS=Ruegeria arenilitoris OX=1173585 GN=queG PE=3; SV = 1
MGQMNSATALKDRLVAQARAEGFVSCRICRPWDVPEVPARLEAFLAAGYHGQMGWMAERTHWRGDPAQLWPEARSVIMLAESYTPDHDPTEVLGRPDRGAISVYAQNRDYHDLVKKRLKRLARWLIAEAGGEVKVFVDTAPVPEKALGHAAGLGWQGKHTNLVSRDWGNWAFLGSVFTTLNLPADPPEVDHCGSCRACLDACPTDAFPAPYQLDARRCISYLTIEHKGPVDQELRGKLGNRIYGCDDCLAACPWNKFAVAASDIRYAAHQDLMAPPLAELAGLDDLAFRARFSGSPIKRIGRDRFVRNVLYAIGNSGSAELIPVAQALTEDPDPTVADAARWAVEQLS

SEQ ID NO: 80629 - protein, 345 aa, Ruegeria atlantica
  REGION 1..345: note = tr|A0A0P1EI03|A0A0P1EI03_9RHOB Epoxyqueuosine reductase OS=Ruegeria atlantica OX=81569 GN=queG PE=4 SV=1
MKSGSGLKEKLVAQALSAGFVSCRICRPWDVPEVPSRLKAFLDAGFHGQMGWMAERTHWRGDPAALWHEARSVIMLAESYTPEHDPTDILNHPDKAAISVYAQNKDYHDLVKKRLKRLARWLIAEAGGEVKVFVDTAPVPEKALGHAAGLGWQGKHTNLVSRDWGNWAFIGSVFTTLDLSADMAETDHCGKCRACLDSCPTDAFPAPYQLDARRCISYLTIEHKGPVNEELRDKLGNRIYGCDDCLAACPWNKFAVAASDVRYAARDDLKAPALAELAVLDDAAFRAKFSGSPIKRIGRDRFVRNVLYAIGNSEQSDLMPVAQSLADDPDPTVADAARWAVKRLS

SEQ ID NO: 80630 - protein, 345 aa, Ruegeria atlantica
  REGION 1..345: note = tr|A0A0P1E912|A0A0P1E912_9RHOB Epoxyqueuosine reductase OS=Ruegeria atlantica OX=81569 GN=queG PE=3 SV=1
MKSGSGLKEKLVAQALSEGFVSCRVCRPWDVPDVPSRLQAFLDAGYHGQMGWMAERTHWRGDPAALWPEARSVIMLAESYTPDHDPTEVLQHPDKAAVSVYAQNKDYHDLVKKRLKRLARWLIAEAGGEVKVFVDTAPVPEKALGHAAGLGWQGKHTNLVSRDWGNWAFIGSVFTTLDLPADMAETDHCGNCRACLSACPTEAFPAPYQLDARRCISYLTIEHKGPVDEELRQKLGNRIYGCDDCLAACPWNKFAIAASDVRYAARDDLKAPPLAELAVLDDAAFRAKFSGSPIKRIGRDRFVRNVLYAIGNSEQSDLMPVAQSLADDPDPTVADAARWAVKRLS

SEQ ID NO: 80631 - protein, 345 aa, unidentified
  source 1..345: note = Ruegeria conchae
  REGION 1..345: note = tr|A0A497ZFF4|A0A497ZFF4_9RHOB Epoxyqueuosine reductase OS=Ruegeria conchae OX=981384 GN=queG PE=3 SV=1
MKNGSELKARLVEQALVEGFVACRVCRPWDVPQVPERLEAFLQAGYHGQMGWMAERSHWRGDPSVLWPEARSVIMLAESYTPEHDPTEVLSYPELGAISVYAQNKDYHDLVKKRLKRLARWLIAEGGGEVKVFVDTAPVPEKSLGEAAGLGWQGKHTNLVSQDWGNWAFLGSVFTTLDLPTDVAEVDHCGSCRACLNACPTNAFPAPYQLDARRCISYLTIEHKGPVDEELRGLLGNRIYGCDDCLAACPWNKFAVAASDIRYAAREELKAPSLAELAMLDDTAFRAMFSGSPIKRIGRDRFVRNVLYAIGNSGVPALLPVAQTLTDDPDPTVTDAARWAASRLS

SEQ ID NO: 80632 - protein, 345 aa, unidentified
  source 1..345: note = Ruegeria denitrificans
  REGION 1..345: note = tr|A0A0P1II94|A0A0P1II94_9RHOB Epoxyqueuosine reductase OS=Ruegeria denitrificans OX=1715692 GN=queG; PE = 3 SV=1
MKSGSSLKDKLVTQALSEGFVSCRICRPWDVPQVPPRLEAFLQAGFHGQMGWMAERTHWRGDPTALWPEAQSVIMLAESYAPEHDPTEVLDYPDRAAISVYAQNKDYHDLVKKRLKRLARWLIAEAGGEVKVFVDTAPVPEKALGHAAGLGWQGKHTNLVSRDWGNWAFIGSIFTTLDLPADMAEVDHCGSCRACLDSCPTNAFPAPYQLDARRCISYLTIEHKGPVDEELRAKLGNRIYGCDDCLAACPWNKFAVAASDIRYAARDDFKAPSLAELAVLDDAAFRAKFSGSPIKRIGRDRFVRNVLYAIGNSGMASLRPVAQGLVEDPDPTVADAARWAVKQLS

SEQ ID NO: 80633 - protein, 345 aa, Ruegeria faecimaris
  REGION 1..345: note = tr|A0A521FDV2|A0A521FDV2_9RHOB Epoxyqueuosine reductase OS=Ruegeria faecimaris OX=686389 GN=queG PE=3; SV = 1
MKSGSGLKDRLVAQALSEGFVSCRICRPWDVPEVPARLEAFLQAEYHGQMGWMAERTHWRGDPAALWPEAKSVIMLAESYAPEHDPTEILDHPEKGAISVYAQNKDYHDLVKKRLKRLARWLIAEAGGEVKVFVDTAPVPEKALGHAAGLGWQGKHTNLVSRDWGNWAFIGSVFTTLDLPSDQAEVDHCGSCRACLAACPTDAFPAPYQLDARRCISYLTIEHKGPVDEDLRAKLGNRIYGCDDCLAACPWNKFAVTASDMRYAAREDLKAPRLAELAGLDDPEFRTKFSGSPIKRIGRDRFVRNVLYAIGNSGLQGLIPIAQDLTEDPDSAVADAARWAVKQLS

SEQ ID NO: 80634 - protein, 345 aa, Ruegeria halocynthiae
  REGION 1..345: note = tr|A0A1H3B2Z9|A0A1H3B2Z9_9RHOB Epoxyqueuosine reductase OS=Ruegeria halocynthiae OX=985054; GN = SAMN05444358_10518 PE=4 SV=1
MKSGSDLKAKLVEQALSEGFVSCRICHPWDVPQVPARLDAFLQAGYHGQMGWMAERSHWRGDPSVLWPDARSVIMLAESYKPEHNPIEILQHPQLGAISVYAQNKDYHDLVKKRLKRLARWLIAEGGGEVKVFVDTAPVPEKALGQAAGLGWQGKHTNLVSQDWGNWAFLGSVFTTLDLPVDGAEVDHCGSCRACLTACPTDAFPAPYQLDARRCISYLTIEHNGPVAEELRSLLGNRIYGCDDCLAACPWNKFAVAASDLRYAAREELKAPALAELAMLDDTAFRAMFSGSPIKRIGRDRFVRNVLYAIGNAAELALLPVVQELTGDPDPTVADAARWAASRLS

SEQ ID NO: 80635 - protein, 348 aa, unidentified
  source 1..348: note = Ruegeria intermedia
  REGION 1..348: note = tr|A0A1M5AXA5|A0A1M5AXA5_9RHOB Epoxyqueuosine reductase OS=Ruegeria intermedia OX=996115 GN=queG PE=3; SV = 1
MGQMNSATALKDRLVAQARAEGFVSCRICRPWDVPEVPARLETFLAAGYHGQMDWMAERTHWRGDPAELWPEARSVIMLAESYTPDHDPTEVLGRPDRGAISVYAQNRDYHDLVKKRLKRLARWLIAEAGGEVKVFVDTAPVPEKALGHAAGLGWQGKHTNLVSREWGNWAFLGSVFTTLDLPTDPPEVDHCGSCRACLDACPTDAFPAPYQLDARRCISYLTIEHKGPVDQELRSKLGNRIYGCDDCLAACPWNKFAVAASDIRYAARQDLMAPPLAELAGLDDAAFRARFSGSPIKRIGRDRFVRNVLYAIGNSGSAALIPVAQALTEDPDPTVADAARWAVEQLS

SEQ ID NO: 80636 - protein, 357 aa, Ruegeria lacuscaerulensis
  REGION 1..357: note = tr|D0CSF8|D0CSF8_RUELI Epoxyqueuosine reductase; OS = Ruegeria lacuscaerulensis (strain DSM 11314 / KCTC 2953 / ITI-1157) OX=644107 GN=queG PE=3 SV=1
MGQFTPEDILGQMNSAAALKDRLVAQARAEGFVSCRICRPWDVPEVPARLEAFLAAGYHGQMGWMAERTHWRGNPAELWAEARSVIMLAESYTPDHDPTEVLGRPDRGAISVYAQNRDYHDLVKKRLKRLARWLIAEAGGEVKVFVDTAPVPEKALGHAAGLGWQGKHTNLVSREWGNWAFLGSVFTTLDLPADSSEVDHCGSCRACLDACPTDAFPAPYQLDARRCISYLTIEHKGPVDQELRGKLGNRIYGCDDCLAACPWNKFAVAASDIRYAARQDLMAPPLAELAGLDDAAFRARFSGSPIKRIGRDRFVRNVLYAIGNSGSAALIPVAQALTEDPDPTVADAARWAVEQLS

SEQ ID NO: 80637 - protein, 345 aa, unidentified
  source 1..345: note = Ruegeria litorea
  REGION 1..345: note = tr|A0A1Y5TQX8|A0A1Y5TQX8_9RHOB Epoxyqueuosine reductase OS=Ruegeria litorea R37 OX=1200284 GN=queG PE=3; SV = 1
MTTDPDLKQRLTQQALDEGFVSCRICRPWDIPQVPERLAAFVEAGYHGQMGWMGERMHWRGNPAALWPEAQSVIMLAESYAPDHDPRAILDHPDKGAISVYAQNKDYHDLVKKRLKRLARWLIAEGGGEVKVFVDTAPVSEKALGQAAGLGWQGKHTNLVSRDWGNWAFIGSVFTTLDLPADAPEIDHCGSCRSCLAACPTDAFPAPYQLDARRCISYLTIEHKGPVDEELRGKLGNRIYGCDDCLAACPWNKFAVAASDMRYAAREELKAPGLAELATLDDTTFRAFFSGSPIKRIGRDRFVRNVLYAIGNSGDAALMPTAQGLTEDADATVADAARWAVEQLQ

SEQ ID NO: 80638 - protein, 353 aa, Ruegeria marina
  REGION 1..353: note = tr|A0A1G7C2B4|A0A1G7C2B4_9RHOB Epoxyqueuosine reductase OS=Ruegeria marina OX=639004 GN=queG PE=3 SV=1
MSRELKQKLVAMALQEGFVACRICRPWDVPEVPARLASFVAAGYHGQMGWMAERMEWRGNPAALWPEARSVIMLAESYTPQEDPMAVVGRPDRGAISVYARNRDYHDLVKKRLKRLARWLIAEAGGEVKVFVDTAPVPEKPLGQAAGLGWQGKHTNLVSRDWGNWAFLGSVFTTLDLPADEPERDNCGSCRACLDVCPTGAFPAPYRLDARRCISYLTIEHKGPVDEELREKLGNRIYGCDDCLAVCPWNKFAVAASDLRHAAREELTAPRLAALVQLDDAGFRAMFSGSPIKRIGRDRFVRNVLYAIGNSGMAELLPAAQGLTGDPDATVADAARWAVEKLKQVPQTGGTCR

SEQ ID NO: 80639 - protein, 345 aa, unidentified
  source 1..345: note = Ruegeria marisrubri
  REGION 1..345: note = tr|A0A0X3TXL9|A0A0X3TXL9_9RHOB Epoxyqueuosine reductase OS=Ruegeria marisrubri OX=1685379 GN=queG PE=3; SV = 1
MKSEMGLKERLVAQALAEGFVACRICRPWDVPQVPERLEAFLAAGYHGQMGWMAERTHWRSDPAALWPEARSVIMLAESYAPEHDPTEILNHPDRGAISVYAQNKDYHDLVKKRLKRLARWLIAEAGGEVKVFVDTAPVPEKALGHAAGLGWQGKHTNLVSRDWGNWAFLGSVFTTLDLPADAPEVDHCGSCRSCLDSCPTEAFPAPYQLDARRCISYLTIEHKGPVAEDLRAKLGNRIYGCDDCLAACPWNKFAVAASDMRYAAREELKAPKLAELAALDDAAFRAVFSGSPIKRIGRNRFVRNVLYAIGNSGLPELLPAARALVDDPDPAVADAARWAVKRLS

SEQ ID NO: 80640 - protein, 345 aa, unidentified
  source 1..345: note = Ruegeria mediterranea
  REGION 1..345: note = tr|A0A2R8C410|A0A2R8C410_9RHOB Epoxyqueuosine reductase OS=Ruegeria mediterranea M17 OX=1200281 GN=queG; PE = 3 SV=1
MTTDPDLKQRLIQQALDEGFVSCRICRPWDIPQVPDRLAAFVEAGYHGQMGWMAERMHWRGNPAELWPEAKSVIMLAESYAPDHDPRAILDHPDKGAISVYAQNKDYHDLVKKRLKRLARWLIAEGGGEVKVFVDTAPVSEKALGMAAGLGWQGKHTNLVSRDWGNWAFIGSVFTTLDLPADAPEINHCGSCRSCLAACPTDAFPAPYQLDARRCISYLTIEHKGPVDEELRGRLGNRIYGCDDCLAACPWNKFAVAASDMRYAAREELKAPALAELATLDDTAFRAFFSGSPIKRIGRDRFVRNVLYAIGNSGDAALMPTAQGLTKDADATVADAARWAVEQLQ

SEQ ID NO: 80641 - protein, 335 aa, unidentified
  source 1..335: note = Ruegeria meonggei
  REGION 1..335: note = tr|A0A1X6Z6S8|A0A1X6Z6S8_9RHOB Epoxyqueuosine reductase OS=Ruegeria meonggei OX=1446476 GN=queG PE=4 SV=1
MVAQALNEGFVSCRVCRPWDVPEVPDRLEAFLQAGYHGQMGWMAERTHWRGDPAALWPEARSVIMLAESYTPEHDPTAVLDHPECGAISVYAQNKDYHDLVKKRLKRLARWLIGEAGGEVKVFVDTAPVPEKALGHAAGLGWQGKHTNLVSRDWGNWAFIGSVFTTLELPSDMAEVDHCGTCRACLDACPTDAFLAPYQLDARRCISYLTIEHKGPVDEDLRAKLGNRIYGCDDCLAACPWNKFAVAASDLRYAARDDLKAPALAELAALDDAAFRAKFSGSPIKRIGRDRFVRNVLYAIGNSGAQGLKPVAQGLAEDSDPTVADAARWAVKQLS

SEQ ID NO: 80642 - protein, 346 aa, Ruegeria pomeroyi
  REGION 1..346: note = tr|Q5LM00|Q5LM00_RUEPO Epoxyqueuosine reductase; OS = Ruegeria pomeroyi (strain ATCC 700808 / DSM 15171 / DSS-3) OX=246200 GN=queG PE=3 SV=1
MSGELKDRLVARALEEGFVSCRVCRPWDVPEMPARLGAFVEAGYHGQMGWMAERMEWRGDPAALWPEARSVIMLAESYAPDTDPMEVVGQPDRGAISVYARGKDYHDLVKKRLKRLARWLIEAGGGEVKVFVDTAPVPEKALGQAAGLGWQGKHTNLVSRDWGNWAFLGSVFTTLDLPSDPVGRDNCGSCSACLTACPTDAFPAPYRLDARRCISYLTIEHKGPVDEELRAKLGNRIYGCDDCLAACPWNKFAVAASDLRYGARPELSAPALADLARLDDAGFREMFSGSPIKRIGRDRFVRNVLYAIGNSGLPALRPVAQDLAQDSDPTVADAARWAAAKLAMSR

SEQ ID NO: 80643 - protein, 345 aa, unidentified
  source 1..345: note = Ruegeria profundi
  REGION 1..345: note = tr|A0A0X3TH32|A0A0X3TH32_9RHOB Epoxyqueuosine reductase OS=Ruegeria profundi OX=1685378 GN=queG PE=3 SV=1
MTNGSSLKDKLVAQALTEGFVSCRVCRPWDVPEVPARLEAFLEAEYHGQMGWMAERTHWRGDPAALWPDARSVIMLAESYTPEHDPTEVLNHPDKAAISVYAQNKDYHDLVKKRLKRLARWLISEAGGEVKVFVDTAPVPEKALGHAAGLGWQGKHTNLVSRDWGNWAFIGSVFTTLDLPADMAEVDHCGSCRACLDACPTDAFPAPYRLDARRCISYLTIEHKGPVDEELRSKLGNRIYGCDDCLAACPWNKFAVAASDIRYAARDDLKAPSLAELAALDYTAFRAKFSGSPIKRIGRDRFVRNVLYAIGNSDTAELLPVAQELTNDPDPAVADAARWAVKQLL

SEQ ID NO: 80644 - protein, 347 aa, Ruegeria sp.
  REGION 1..347: note = tr|Q1GCS8|Q1GCS8_RUEST Epoxyqueuosine reductase; OS = Ruegeria sp. (strain TM1040) OX=292414 GN=queG PE=3 SV=1
METAAELKTRLIAQAKAEGFVSVRLCRPWDVPEVPERLRAFLEAGYHGQMKWMAERINWRENPAALWPEARSVIMLAESYTPDEDPMAVVGLPDRAAISVYARGKDYHDLVKKRLKRLARWLIEEAPDEAQVKVFVDTAPVPEKALGQASGLGWQGKHTNLVSRDWGNWAFLGSIFTTLDLPVDAPEPDRCGSCRACLTACPTDAFPAPYQLDARRCISYLTIEHKGPIEEELRTKLGNRIYGCDDCLAACPWNKFAVEASDMRYAAREGTIAPPLAELSQLDDAAFRARFSGSPIKRIGRDRFVRNVLYAIGNSGDAGLHVFAQALCDDPDPTVAEAARWAAARLP

SEQ ID NO: 80645 - protein, 350 aa, Ruegeria sp.
  REGION 1..350: note = tr|B7QTK9|B7QTK9_9RHOB Epoxyqueuosine reductase; OS = Ruegeria sp. R11 OX=439497 GN=queG PE=3 SV=1
MTDHSSLKDQLVAQALAEGFVSCRICRPWDVPEVPDRLQAFLDAGYHGQMAWMEERSHWRGDPAQLWPEARSVIMLAESYTPDVDPMEIVGQPDRGAISVYARNKDYHDLVKKRLKRLARWLIAEAQKLGHEAEVKVFVDTAPVPEKPLGQAAGLGWQGKHTNLVSRDWGNWAFIGSVFTTLDLPADPAERDHCGSCRSCIAACPTDAFPAPYQLDARRCISYLTIEHKGPIDEELRSKLGNRIYGCDDCLAACPWNKFAVAASDIRYEARPEFTAPKLAELATLDDAAFRALFSGSPIKRIGRDRFVRNVLYAIGNSAQPELRAVAQSLTTDPDPTVADAARWAAAQLA

SEQ ID NO: 80646 - protein, 323 aa, unidentified
  source 1..323: note = Rufibacter immobilis
  REGION 1..323: note = tr|A0A3M9N770|A0A3M9N770_9BACT Epoxyqueuosine reductase OS=Rufibacter immobilis OX=1348778 GN=queG PE=3; SV = 1
MFNLAPKHTQLIKQKAQELGFMYCGVSKADFLEEEAPRLENWLNQNMHGQMHYMANHFDKRLDPRLLVDGAKSVVSLLLNYYPEETQPEDTFKISKYAYGQDYHFVIKDKLKTLFQYIQEEIGEVGGRVFVDSAPVMDKVWAKKSGLGWVGKNSNLIRPGVGSFFFIAELILDLELEPDGPIKDYCGTCTKCMDACPTDAISEPYVVDGSKCISYFTIELKDQIPQEVEGKFGNWVFGCDICQDVCPWNRFSKPHREPAFAPHPELLHLSSSDWLELTQEVFGHIFKKSAVKRTGFAGLTRNLQFVAEEPAALGGHHVPEDLV

SEQ ID NO: 80647 - protein, 324 aa, unidentified
  source 1..324: note = Rufibacter sp.
  REGION 1..324: note = tr|A0A5B6T923|A0A5B6T923_9BACT Epoxyqueuosine reductase OS=Rufibacter sp. NBS58-1 OX=2595005 GN=queG; PE = 3 SV=1
MFNLAPKHTHLIKQKAQELGFMYCGVSKADFLEEEAPRLEHWLNQNMHGQMHYMANHFDKRLDPRLLVDGAKSVVSLLLNYFPEETQAEDTFKISKYAYGQDYHFVIKDKLKTLFNYIQEEIGEVGGRVFVDSAPVMDKVWAKKSGLGWVGKNSNLIRPGVGSFFFIAELILDLELEPDGPIKDYCGTCTKCMDACPTDAISQPYVVDGSKCISYFTIELKDQIPQEVEGKFGNWVFGCDICQDVCPWNRFSKAHREPAFAPHPELLHLSKSDWLELTQDVFKDVFRKSAVKRTGFDGLTRNLHFVAKEPAAFLGSEDVAEDLI

SEQ ID NO: 80648 - protein, 324 aa, unidentified
  source 1..324: note = Rufibacter sp.
  REGION 1..324: note = tr|A0A3M9MK32|A0A3M9MK32_9BACT Epoxyqueuosine reductase OS=Rufibacter sp. R-22-1c-1 OX=2487040 GN=queG; PE = 3 SV=1
MFNLAPKHTHLIKQKAQELGFMYCGVSKADFLEEEAPRLESWLNQNMHGQMHYMANHFDKRLDPRLLVEGAKSVVSLLLNYFPEETQAEDTFKISKYAYGQDYHFVIKDKLKTLFNYIQEEIGEVGGRVFVDSAPVMDKVWAKKSGLGWVGKNSNLIRPGVGSFFFIAELILDLELEPDGPIKDYCGTCTKCMDACPTDAISEPYVVDGSKCISYFTIELKDQIPQEVEGKFGNWVFGCDICQDVCPWNRFSKAHREPAFAPHPELLHLSQNDWMELTQEVFQEVFRKSAVKRTGFQGLTRNLQFVVNEPSALRGDQHVTEDLI

SEQ ID NO: 80649 - protein, 323 aa, unidentified
  source 1..323: note = Rufibacter tibetensis
  REGION 1..323: note = tr|A0A0P0CWE4|A0A0P0CWE4_9BACT Epoxyqueuosine reductase OS=Rufibacter tibetensis OX=512763 GN=queG PE=3; SV = 1
MFNLAPKHTQIIKQKAQELGFMYCGVSKAEFLEEEAPRLESWLNQNMHGQMHYMANHFDKRLDPRLLVDGAKSVVSLLLNYFPEETQPEDTFKISKYAYGQDYHFVIKDKLKTLFQYIQEEIGEVGGRVFVDSAPVMDKVWAKKSGLGWVGKNSNLIRPGVGSFFFIAELILDLELEPDGPIKDYCGTCTKCMDACPTDAISAPYVVDGSKCISYFTIELKDQIPQEVEGKFGNWVFGCDICQDVCPWNRFSKAHREPAFAPHPELLHLTSNDWVELTQEVFRDIFRKSAVKRTGFEGLTRNLRFVANEPADLSSDRVSEDLV

SEQ ID NO: 80650 - protein, 377 aa, Rugamonas rubra
  REGION 1..377: note = tr|A0A1I4I0D0|A0A1I4I0D0_9GAMM Epoxyqueuosine reductase OS=Rugamonas rubra OX=758825 GN=queG PE=3 SV=1
MSLSESKLAELAVRIKQWGVELGFAELRVADIDLSAQEAGLQAWLDAGMHGEMDYMASHGMKRARPDELVPGTVRVICARMNYLPKDVAGGGAKAATATDAATVGDWRAAEAARLADPGAAVISVYARGRDYHKVLRARLQQLADRIRAECGEFGYRVFTDSAPVMELPLAQKAGLGWRGKHTLLINRDGGSLFFMGEILVDIPLPVDEPVGAHCGGCDACITACPTQAILGPGRLDARRCISYLTIESKSAIPVELRPLIGNRVYGCDDCQSVCPWNKFAQRAVLPDFDERHGLGSASMVELFAWSEEEFNRKMEGSPIRRIGHVSWLRNLAVGMGNAAAAGVKGDAAIVAALLSRRAHESELVREHVEWALACHE

SEQ ID NO: 80651 - protein, 359 aa, unidentified
  source 1..359: note = Rugosibacter aromaticivorans
  REGION 1..359: note = tr|A0A0C5JBR2|A0A0C5JBR2_9RHOO Epoxyqueuosine reductase OS=Rugosibacter aromaticivorans OX=1565605; GN = queG PE=3 SV=1
MMRIMHDQWHTVKENIRRWGRELGFDAIGFSRAETGEAAAQLAAWLAAGFHGEMDYMAAHVSEVGAKRALPTELVPGTQSIITVRMNYRPASADAEEVLADTQRAYISRYALGRDYHKVMRPRLQALVDRMTEAQGEFVHRVFTDSAPVMEVQLAKQSGLGWRGKHTLLLDRAVGSYFFLGEIYSELPLPPDTPVTDHCGSCTACIDSCPTEALVAPYQLDARRCISYLTIELKNSIPEPLRESLGNRIYGCDDCQLACPWNRFSPLTREADFAPRHALDEATLVELFAWTEDEFAERMAGSAIRRIGYVRWLRNIAVALGNAPTCDDVVRALRARENDSSALVREHVAWALARHQSSR

SEQ ID NO: 80652 - protein, 359 aa, unidentified
  source 1..359: note = Rugosibacter sp.
  REGION 1..359: note = tr|A0A522YBA9|A0A522YBA9_9RHOO Epoxyqueuosine reductase OS=Rugosibacter sp. OX=1914450 GN=queG PE=3 SV=1
MMRIMHDQWHTVKENIRRWGRELGFDAIGFSRAETGEAAAQLAAWLAAGFHGEMDYMAAHVSEVGAKRALPTELVPGTQSIITVRMNYRPASADAEEVLADTQRAYISRYALGRDYHKVMRLRLQALVDRMTEAQGEFVHRVFTDSAPVMEVQLAKQSGLGWRGKHTLLLDRAVGSYFFLGEIYSELPLPPDTPVTDHCGSCTACIDSCPTEALVAPYQLDARRCISYLTIELKNSIPEPLRESLGNRIYGCDDCQLACPWNRFSPLTREADFAPRHALDEATLVELFAWTEDEFAERMAGSAIRRIGYVRWLRNIAVALGNAPTCDDVVRALRARENDSSALVREHVAWALARHQSSR

SEQ ID NO: 80653 - protein, 355 aa, unidentified
  source 1..355: note = Rugosibacter sp.
  REGION 1..355: note = tr|A0A522XLX7|A0A522XLX7_9RHOO Epoxyqueuosine reductase OS=Rugosibacter sp. OX=1914450 GN=queG PE=3 SV=1
MRIMHDQWHTVKENIRRWGRELGFDAIGFARAETGDAPAQLAAWLAAGFHGEMDYMAAHVSEVGAKRALPTELVPGTQSIITVRMNYRPASADAKEALADTHCAYISRYALGRDYHKVMRARLQALADRMTETLGEFAHRVFTDSAPVMEVQLAKQGGLGWRGKHTLLLDREVGSYFFLGEIYSELPLPPDTPVTDHCGSCTACIDSCPTEAIVAPYQLDARRCISYLTIELKNSIPEPLREHLGNRIYGCDDCQLACPWNRFSPLTREADFAPRHALDEATLVELFAWTEDEFTERMAGSAIRRIGYERWLRNIAVALGNAPTCEGVIHALRARASDHSAMVREHVAWALARHQ

SEQ ID NO: 80654 - protein, 317 aa, unidentified
  source 1..317: note = Ruminiclostridium cellobioparum
  REGION 1..317: note = tr|S0FLT9|S0FLT9_RUMCE Putative Fe-S protein; OS = Ruminiclostridium cellobioparum subsp. termitidis CT1112 OX=1195236 GN=CTER_0694 PE=4 SV=1
MVERILEYLQKKGYAARIISVKHLKEFQNEIEKLNEAKYLDAGMYKLFNDFHNFNIPASANPIKSIFIVASSSPIVKINFNYNGVRFPALIPPTYTEYYKKPEEIKQHLNEMLESCGYNAVRVARLPEKLIAVRSGLAKYGANNITYIPEFGSFFLLSAFYSDLPCTGTDETWSDIRVMDVCKNCHACISKCPTAAITGDRFLIKAERCLTYYNEFKGTPEFPDWIAPESHNCLVGCLRCQLPCPLNREQIEKVEVLAEIDEAETSLILENRGFEELPPALAAKLEELNISMYYHHLSSNLKALINSKYRLPQNNIM

SEQ ID NO: 80655 - protein, 234 aa, unidentified
  source 1..234: note = Ruminiclostridium hungatei
  REGION 1..234: note = tr|A0A1V4SN53|A0A1V4SN53_RUMHU Epoxyqueuosine reductase OS=Ruminiclostridium hungatei OX=48256 GN=queG_1; PE = 4 SV=1
MTLSEELRSGLSDRGACVVGYADLSGVPEESRWGYGYGIIIAVELTPCIISGIENGPTPEYYDEYLRVNTLLNSLGEYAEGLLKNKGFEALALTQKVVEIHPETKSTRLPHKTVATRAGIGWIGKNAMLITRERGSAIRLTSVLTNCPLEAGIPINGSRCGSCTVCRDSCPGGAITGREWNVEMERAELYDAFKCRKTARERSRRIGVDESLCGLCILKCPWTQRHLEKLQHKT

SEQ ID NO: 80656 - protein, 288 aa, unidentified
  source 1..288: note = Ruminiclostridium hungatei
  REGION 1..288: note = tr|A0A1V4SHU7|A0A1V4SHU7_RUMHU Epoxyqueuosine reductase OS=Ruminiclostridium hungatei OX=48256 GN=queG_2; PE = 4 SV=1
MGTRKSSRTDIPLFERKELTNKLKLIINERSSGIGIVGVASIDRFENSPKGHGPRDFISDANAVVVLGLPILDGVADYANYEMKDSEIVTDEDIYVGKDGIKRIYNPRLALQNQVNLRSAHEALNMEIQILSIYAGAFLENEGYKSLVMPTTYGTTFSWQMNVDKDYPRNVKGIGQFSHRHAAVAAGLGSFGLNNLLLTPNWGPRNRFTTIITRAPLIADELTNISSCLGEKCSKCIDSCCAKAFGDVFEFEASGVKQKMAKFDHLKCEGAYGLCKRACISSCPVGSF

SEQ ID NO: 80657 - protein, 309 aa, unidentified
  source 1..309: note = Ruminiclostridium sp.
  REGION 1..309: note = tr|A0A3B8J3K5|A0A3B8J3K5_9FIRM 4Fe-4S ferredoxin-type domain-containing protein; OS = Ruminiclostridium sp. OX=2053608 GN=DCE11_00570 PE=4; SV = 1
MFADTVIEQMRELGYIARVVSIEHIKGIGDELNALDDRKVLDADLLSILRNFYICDYSNVPFDVKSVIVTASQCRIGKAFFNYRGKKIPVTIPPTYVEYKSDPAKIEKCLQKILAAENYHAQIAYRLPGKIIAAKCGLSLYGKNNICYVTGMGSFVLLSTYYSDLPCEDGNWGEARMMECCEACDACMNSCPTGAISSQSFLIKAERCITYHNEFSNTPDFPEWISPSAHNSIVGCMHCQTCCPANRNYLNRIVGLEEFSEDETERILQGTDKSGLSGETVEKLERLNLMVYYDKLARNIRVLLEPVKQ

SEQ ID NO: 80658 - protein, 313 aa, unidentified
  source 1..313: note = Ruminiclostridium sp.
  REGION 1..313: note = tr|A0A4U7JL10|A0A4U7JL10_9FIRM 4Fe-4S ferredoxin-type domain-containing protein; OS = Ruminiclostridium sp. MA18 OX=2488810 GN=EHE19_02125; PE = 4 SV=1
MEDTFMIEALKQEALLHGNKLQVVPIKHLQTLKKEIDLFKENDELNGFHEFIIQNMYSFDLPKVDFTIKSIILVAIPHPTYAKLEFERQGKKCSAYGIVASDFENTGKYLSDFLVPKNYHIEPVYSIPMKRMAAQCGLAVYGRNNICYIDGMGSNFGLAAYFSDIPCEEDNWNKMSYADACTDCMACVNNCPTGAIRTDRFLIDNDKCLSCLNEGVEEFPEWLPKSAHHCLYDCLKCQLICPMNEGCENNVMSPIKFDEKETNMLLDGIPYSEYSDELKMKAKILGMAEWPDITKAIPRNLRVLFEISEEKED

SEQ ID NO: 80659 - protein, 286 aa, unidentified
  source 1..286: note = Ruminococcaceae bacterium
  REGION 1..286: note = tr|A0A357WY86|A0A357WY86_9FIRM Uncharacterized protein OS=Ruminococcaceae bacterium OX=1898205; GN = DEB10_13335 PE=4 SV=1
MCVKLRKDMVFMQGSDKRKIIDDILDDCSLTLHEYCRFDALSDSLLPCRAASSLDSGFSPSSPPKTVIAVLFPYRFNDRPGNLSHYARVPDYHTAAGNALKRAAQALTCALPEHGFVSFIDNSPIPEVLAAALAGLGCVGDHGLLINPIYGSWVFIGTIVTDLDLAPHRQTVKSCSHCGVCTSSCPGSCIGDSRETCVSKISQTKGVLSLEQQAILKKSKMAWGCDRCQEVCPMNVDALIDPHPCFEGVLFEPSLQSKHLTDLRGKAYGWRGAEVLKRNLKLIDEL

SEQ ID NO: 80660 - protein, 279 aa, unidentified
  source 1..279: note = Ruminococcaceae bacterium
  REGION 1..279: note = tr|A0A417HPC8|A0A417HPC8_9FIRM DUF1730 domain-containing protein OS=Ruminococcaceae bacterium AM28-23LB OX=2292269 GN=DW741_02855 PE=4 SV=1
MDGVEKIKEILESWSGGWGITEAQPVLGRTREEKRKKALEQVPGLSALLCCVLPYYAGEEEGNLSLYARGEDYHQVAGRHLEESCKQLEELFPGHTFRGYADISPYPEVYACARSGLGKIGQNGLLITPQWGSYVFCCLIACDLPLTGGKEPEPCRGCGLCRAACPGGALTEEGKLMESRCLSALTQSRGELSPWQEDLIARSKRIWGCDICQQVCPENKGVKTSYIAEFTENITKSIKKQDLEGFSDRAFRKKYAGKAFSFRGIKPLKRNLELKEKKE

SEQ ID NO: 80661 - protein, 269 aa, Ruminococcus sp.
  REGION 1..269: note = tr|A0A355V0J6|A0A355V0J6_9FIRM tRNA epoxyqueuosine(34) reductase QueG OS=Ruminococcus sp.; OX = 41978 GN=DD392_08250 PE=4 SV=1
MTNADFHKVIKDCMNRHDIRIYGFCSFENILPLNECRAKARLPENSQTVIVCAFPYLIKEKSARNLSYYACVRDYHITVMNILKNAAAELSELTGFIFEPFSDNSPIREVSAAVKAGIGVLGDNGLLITEKYGSYVFLGEFVTDMKIDAPVYNKSCLHCGMCQKKCRGNALENGKVNEDKCISAITQKKGELSSEETELILENGLAWGCDGCQTVCPMNRNAEETYISDFIDSAHHYLKADEVNERIKTSAYNWRGKKTILRNLDIFSF

SEQ ID NO: 80662 - protein, 196 aa, Ruminococcus sp.
  REGION 1..196: note = tr|R5PWF5|R5PWF5_9FIRM Putative iron-sulfur cluster-binding protein OS=Ruminococcus sp. CAG:724; OX = 1262966 GN=BN766_00301 PE=4 SV=1
  VARIANT 161..162: note = Xaa can be any naturally occurring amino acid
MIKKVFSDENIEFFAALPFDKCEVMRPDFISRRGIDIAEVKSAVMFLVPYIAGDDGDGNISLYARSLDYHSYCDSLFSRICARLEECYGRHFWGFADKSPLSETYTAACAGLGIIGDNHLLINEKYGSFVFIGEILSEVPAEELGYDGREPVTGGCLHCGXXRLPALRQMQSRLPDDGKRHGLPFRRNTEKRRADA

SEQ ID NO: 80663 - protein, 378 aa, Rummeliibacillus sp.
  REGION 1..378: note = tr|A0A3N5ZT76|A0A3N5ZT76_9BACL tRNA epoxyqueuosine(34) reductase QueG OS=Rummeliibacillus sp. TYF005 OX=2058214 GN=queG PE=4 SV=1
MNMTELKQEFIAYAQIIGVDKIGFTSASPFMELKNHLRRQQELGYQSGFEESDIEKRTEPKLLLENAASIIAIAIAYPSKMQNAPQGKKGARRGIFCRASWGIDYHTVLREKLALLEAFLQEKVPECKIRSMVDTGELSDRAVAERAGIGWSGKNCAVITPEYGSYVYLGEMITDLPFESDEPMEDQCGECRLCLDVCPTGALVQGGQLNSQKCVAYLTQTKGFLPDEYRAKIGNRIYGCDTCQTVCPKNKGKSNWIHEAFKPDPEVAKPLLEPLLAISNRDFKETYGHISGSWRGKKPIQRNAIIALAHFKEVSALPTLIEVFQKDERPVIRGTAAWAIGKIGGKEVEEVLREGLIREKDEEVQLEIQKGLAFISGQ

SEQ ID NO: 80664 - protein, 379 aa, Rummeliibacillus stabekisii
  REGION 1..379: note = tr|A0A511C0C9|A0A511C0C9_9BACL Epoxyqueuosine reductase OS=Rummeliibacillus stabekisii OX=241244 GN=queG; PE = 4 SV=1
MKPLQLQQELIAYAKSIGVDKIGFTSAAPFSDLKNKLRIQQELGYQSGFEESDIEKRTEPKLLLEDAASIIAIAVAYPSKMKNAPQGKRGARRGIFCRASWGTDYHTVLREKLALIEAFLKEKAPGCRIRSMVDTGELSDRAVAERAGIGWSGKNCAIITPEFGSYVYLGELITDLPFMPDEPIEDQCGDCTLCLDVCPTGALVQGGQLNAQKCVAFLTQTKGFLPDEYRGKIGNRIYGCDTCQTVCPKNKGKINWLHDAFQPDPEIAKPLLEPLLTISNREFKERFGHISGSWRGKKPIQRNAIIALAHFKEEAALPTLIKVFQQDERPVIRGTAAWAIGKIGGDGAKEVLEKGALIEEDEEVQFEIQKGLDLLLAQK

SEQ ID NO: 80665 - protein, 379 aa, Rummeliibacillus stabekisii
  REGION 1..379: note = tr|A0A143HEG4|A0A143HEG4_9BACL Epoxyqueuosine reductase OS=Rummeliibacillus stabekisii OX=241244; GN = ATY39_10760 PE=4 SV=1
MKPLQLQQELIAYAKSIGVDKIGFTSAAPFRDLKNKLRIQQELGYQSGFEESDIEKRTEPKLLLEDAASIIAIAVAYPSKMKNAPQGKRGARRGIFCRASWGTDYHTVLREKLALIEAFLKEKVPGCRIRSMVDTGELSDRAVAERAGIGWSGKNCAIITPEYGSYVYLGELITDLPFMPDEPIEDQCGDCTLCLDVCPTGALVQGGQLNAQKCVAFLTQTKGFLPDEYRGKIGNRIYGCDTCQTVCPKNKGKINWLHDAFQPDPEIAKPLLEPLLTISNREFKEKFGHISGSWRGKKPIQRNAIIALAHFKEEAALPTLIKVFQQDERPVIRGTAAWAIGKIGGDGAKEVLEKGALIEKDEEVQFEIQKGLDLLLAQK

SEQ ID NO: 80666 - protein, 316 aa, Runella sp.
  REGION 1..316: note = tr|A0A3C0UL46|A0A3C0UL46_9BACT Epoxyqueuosine reductase OS=Runella sp. OX=1960881 GN=queG PE=3 SV=1
MTSNDFVQQERSRLIKAKAQELGFDFCGISTATFLEEEAPRLEQWLLKNHHGQMHYMGNHFDKRLDPRKLVEGAKSVISILLNYYPEQQLDESDNALKLSKYAYGTDYHFVLKDKLKALVDEIQIEIGEVNGRIFVDSAPVMDKVWAAKSGLGWVGKHTNLINRQMGSFFFIGEIISDLELWPDASIKDYCGTCTRCVDACPTDAITEPYVVDGSKCISYFTIELKEAIPEEVRGKFKNWIFGCDICQDVCPWNRFSRPHQTPEFNLHPDLAQFTRNDWEEITQEVFQEVFRRSPVKRTKLEGLKRTISFVTTPKE

SEQ ID NO: 80667 - protein, 314 aa, Runella sp.
  REGION 1..314: note = tr|A0A369I2C9|A0A369I2C9_9BACT Epoxyqueuosine reductase OS=Runella sp. YX9 OX=2282308 GN=queG PE=3 SV=1
MTTDDFVRQQRSQTIKAKATELGFDFCGISTATFLEEEAPRLEHWLNQHRHGQMHYMANHFDKRLDPRKLVEGAKSVISVLLNYYPEQRLPEGKNDLKLSKYAYGTDYHFVLKDKMKELVAQLQEEIGEINGRIFVDSAPVMDKVWAAKSGLGWIGKHSNLLNRDMGSFFFIGEIICDLDLWPDGPVRDYCGTCTRCVDACPTDAIVEPYVVDGSRCISYFTIELKEAIPAEVKGTFENWIFGCDICQDVCPWNRFSKPHQTPEFNLHPELAEFTNGDWKEITQEVFQEIFRRSAVKRTKLEGIQRNVAFVREE

SEQ ID NO: 80668 - protein, 654 aa, Saccharibacillus sp.
  REGION 1..654: note = tr|A0A209DI62|A0A209DI62_9BACL Methylated-DNA--protein-cysteine methyltransferase; OS = Saccharibacillus sp. O16 OX=1978120 GN=queG PE=3 SV=1
MEKRAGGEGTHTASWEALKQEIIEAAPSLGIDDIGFAAADPFLSLRVRLEQHRAKGYESGFEEPDLDKRTYPALSHEDPQSLIAIAVAYPSKLENAPKSEPGRTRGMMARSAWGRDYHHVLREAMQRLIAFIKERVPWANVVDMVDTGVLSDRAVAHRAGIGFQGKNCMIISPKYGSWIYLGELITNIPFAPDQEVQEDCGDCTRCIDACPTGALVGPGELNAQRCVSFLTQTKGLLTEEFMMKIGNRLYGCDTCQIVCPKNKGKHWPHHDQLQPDPEKAKPLLLPLLDLSNRQFKEQFGETAAAWRGRGPIQRNAVIALGNFKDEAALPKLIEVLGSDPRPVMRGTAAWSIGRIGGSAAEEALLAAQTLEQDEEVLERISLALSEVREGRRPRPAKGDPSRRGRASEPDVRLGGSEAGAGADEVAQGEAGAGADEVAQGEAGAGADEVAQGEAGSGADEVAPTQALRAAAPPAPALLVAEPLVYDEMQSPIGPLVLTASGSGLCRVDFGTFDDVSAKLTLWAKRWFGRGAEIVRRPDSIKPYKKQLFEYLTGRREGFDLPLDLRGTPFQVEVWRALGQIGYGEKVSYKHIAEAVGRPTAVRAVGGANNRNPLPLILPCHRVVGTNGKLVGYAGGLDIKEKLLAIEERVLNSRI

SEQ ID NO: 80669 - protein, 688 aa, Saccharibacillus sp.
  REGION 1..688: note = tr|A0A254NGQ7|A0A254NGQ7_9BACL Methylated-DNA--protein-cysteine methyltransferase; OS = Saccharibacillus sp. O23 OX=2009338 GN=queG PE=3 SV=1
MEKRTSSAGTNRASWETLKREIIEAAPSLGIDDIGFAAADPFLSLRVRLEQHRAKGYESGFEEPDLDKRTYPALSHEDPQSLIAIAVAYPSKLENAPKSEPGRTRGMMARSAWGRDYHHVLREAMKRLIAFIQERVPWANVVDMVDTGVLSDRAVAHRAGIGFQGKNCMIISPKYGSWIYLGELITNIPFSPDEEVQEDCGDCTRCIDACPTGALVGPGELNAQRCVSFLTQTKGLLSEEFMMKIGNRLYGCDTCQIVCPKNKGKHWPHHDQLQPDPEKAKPLLLPLLDLSNRQFKEQFGETAAAWRGRGPIQRNAVIALGNFKDETALPKLAEVLGSDPRPVMRGTAAWSIGRIGGSAAEEALLAAQALEQDAEVLERISLALSEAREGRKPRPAKGDPSRRGRVSEPDVRLGGGGADSGADIVAQSGAHSGADVVAQGGADGADSGADAVAQGEAYSSADAVAPPQGEAAIFAAESTARTAQAGGAALAVEVPAQQAGASPAPVTAEHLVYDEMQSPIGPLVLTKSGSGLCRIDFGTFEAVSAKLAPWAKRWFESAEIVRRPEAIKPYKKQLFEYLTGRRETFDLPLDLRGTPFQVEVWRALEKIGYGETASYKRIAEAVGRPAAVRAVGGANNRNPLPLILPCHRVVGADGKLVGYAGGVEVKEKLLAIEARVLGNRTLTERDDA

SEQ ID NO: 80670 - protein, 314 aa, unidentified
  source 1..314: note = Saccharicrinis carchari
  REGION 1..314: note = tr|A0A521C493|A0A521C493_9BACT Epoxyqueuosine reductase OS=Saccharicrinis carchari OX=1168039 GN=queG; PE = 3 SV=1
MQLLKTAYSDLIRQKALELGFDACGFAKAEELVPEKEILSDWLSNQMHGNMHYMANHFDKRVDPSKLVEGAKTVIVLLSNYTPKIKQSDPEAPIIARYAFGKDYHFVIKDQLKTLFGYIQEEIYPSLEGRYFVDSAPVLERSLAARAGLGWIGKNTHLIHKKLGSYVFISELIVNLDLPKGEPIKDACGGCTRCIDACPTEALLPGRTLDARKCISYLTIENKEAIPEHFVGKMENRVFGCDICQEVCPWTWKSRPHVNENMQPVAKVMQLTKKQWQHLSQEEFSAVFSKSAVKRAKFSGLRRNIDFLLSKSIK

SEQ ID NO: 80671 - protein, 312 aa, unidentified
  source 1..312: note = Saccharicrinis fermentans
  REGION 1..312: note = tr|W7XYC7|W7XYC7_9BACT Epoxyqueuosine reductase; OS = Saccharicrinis fermentans DSM 9555 = JCM 21142; OX = 869213 GN=queG PE=3 SV=1
MDVLKGTYSQLIESKAKDLGFDACGFTQAEELTAEKEILKKWLDNHMHGNMHYMANHFEKRVNPSKLVEGAKTVIVLLTNYTPKEKQSHPDAPIIARYAYGQDYHYVIKDQLKQLYSYIKDEIYPSLEGRYFVDSAPVLERSLAVRAGLGWIGKNTHLIHKKLGSYVFISELIINLTLPPSEPIKEACGGCTRCIDACPTQALTSPQTLDARKCISYLTIENKESIPQEFSGKMENRVFGCDICQEVCPWTWKSRPHTNEKLKAVTKILELTKERWQELTAEEFSEIFRKSAVKRAKYTGLKRNIEFLLSKK

SEQ ID NO: 80672 - protein, 369 aa, Saccharophagus degradans
  REGION 1..369: note = tr|Q21H96|Q21H96_SACD2 Epoxyqueuosine reductase; OS = Saccharophagus degradans (strain 2-40 / ATCC 43961 / DSM 17024) OX=203122 GN=queG PE=3 SV=1
MNQPLHTLAQLIKEWSRELGFQQAGITDTDLSNQEDRFRAWLAAGYQGSMEWMAEHADLRLDPEKLHPGACRIISVRLDYLPPDTNQIKILKSADTAYVSRYALGRDYHKLIRKRLATLAKKIEAWAVENQIDVPLSQRPFVDSAPVMERPLAEKAGLGWTGKHTLIINRHAGSYFFLGELFTNLPLPVETQTAENLCGDCTACLKVCPTDAFPTPYTLDAKRCISYLTIENKGPIPEEFREPIGNRVFGCDDCQAICPWNKYATPTDEKDFHPRHGLEAAKLNTLFSWDEATFLKNTEGSAIRRIGFEKWQRNLAVGIGNGPSSPETIDILKQKLHTSTPLVAEHIHWAIKQLQNPDRKRKRKIKAQA

SEQ ID NO: 80673 - protein, 367 aa, Saccharospirillum sp.
  REGION 1..367: note = tr|A0A2T6E3E0|A0A2T6E3E0_9GAMM Epoxyqueuosine reductase OS=Saccharospirillum sp. MSK14-1 OX=1897632; GN = queG PE=3 SV=1
MSVSASRIDALDLSALAERIKAEARALGFQAVHIGSANTEAHRPAYEDWLAEGYNGDMKWMERNLDKRFDGAQLHPGSERAISVRLDYRPDGPMQAILDDPNKAYISRYALGRDYHKVMRKRLTQLGRTIESWVGEHGFRAFVDSAPVMERQLAQQAGMGWLGKNSLLLNNTAGSWFFLGELFTNLPLPIDPPFETEHCGSCDRCMTACPTDAFVAEGVLDARRCISYLTIEHSGSIDPALRPLMGNRIYGCDDCQMVCPFNSFSQTTQESDFEPRHNLDQADLLTLFQWSEAEFFEYTEGSAIRRIGYQQWLRNLAVALGNAPTQPAIVEALMARRNEVSDLVREHLDWALERHGVNPPESVSRPD

SEQ ID NO: 80674 - protein, 335 aa, unidentified
  source 1..335: note = Saccharothrix saharensis
  REGION 1..335: note = tr|A0A543JKY9|A0A543JKY9_9PSEU Epoxyqueuosine reductase QueG OS=Saccharothrix saharensis OX=571190; GN = FHX81_5886 PE=4 SV=1
MRIEDHPTARRVRANPGTPTPPPTTAWLRDLARRAGADDVGFVPVDLPELAVDRDHARTALPNARTYIAFCVRMNRDNVRSPLRSIANTEFHHTLDDADAVGHRLAKALQQAGHRAVHPASAFPQEMDDFPGRGWVISHKLVAQAAGLGRIGIHRNLIHPKFGNFVLLGTVVVDFEVDEHSTPLDFNPCLECKLCVAACPVGAISKDGAFNVLDCYTHNYREFMSGFTDWVENVADSTDREDYRRRVSPSESASMWQSLAFRPNYKAAYCMAACPAGEDVIGPFLDDRRAFLADVVKPLQDKEEPVYVVPGSPAEAHVRKRFPHKTVRQVSNGLH

SEQ ID NO: 80675 - protein, 351 aa, Sagittula sp.
  REGION 1..351: note = tr|A0A2K8W9D3|A0A2K8W9D3_9RHOB Epoxyqueuosine reductase OS=Sagittula sp. P11 OX=2009329 GN=queG PE=3 SV=1
MQDLTAALKREAAEVGFSDCRVARVADLPEVMSRLQAFVGAGYHGQMGWLAERMHWRGDPAALWPEARSVVMLAEDYGPDEDPLAVLDRPERGAVSVYARHRDYHDVVKKRLKRLGRWLIEAAEAEGTAGPEIKVFVDTAPVMEKPLGQAAGLGWQGKHTNLVSRRLGSWFFLGCIFTTLDLTPDGAEADHCGSCRRCLDVCPTDAFPAPYRLDARRCISYLTIEHRGPVDEALRPGLGNRIYGCDDCLAVCPWNKFAGVAQEVKYHARDDLRAPPLADLAALDDAGFRARFSGSPIKRIGRDRMVRNVMYAVGNSGRAALEPVAQGLCDDPDEAVRDAARWAVGRLRGKG

SEQ ID NO: 80676 - protein, 351 aa, Sagittula stellata
  REGION 1..351: note = tr|A3K538|A3K538_9RHOB Epoxyqueuosine reductase; OS = Sagittula stellata E-37 OX=388399 GN=queG PE=3 SV=1
MQDLTAALKRQAAEVGFSECRVARVADLPEVMSRLQAFVDAGYHGQMGWLAERMHWRGDPAALWPEARSVVMLAEDYGPDEDPLAVLQQPDCGAVSVYARHRDYHDVVKKRLKRLGRWLIESAEAEGTTGPEIKVFVDTAPVMEKPLGQAAGLGWQGKHTNLVSRRLGSWFFLGCIFTTLDLSPDGAEVDHCGSCRRCLDVCPTDAFPAPYKLDARRCISYLTIEHKGPVDEALRPGLGNRIYGCDDCLAVCPWNKFAGVAQEVKYHARDDLLAPPLADLAALDDAGFRARFSGSPIKRIGRDRMVRNVMYAVGNSGRAALEPVAQRLCDDPDPGVQDAARWAVKRLRGSG

SEQ ID NO: 80677 - protein, 309 aa, Salegentibacter agarivorans
  REGION 1..309: note = tr|A0A1I2MXI9|A0A1I2MXI9_9FLAO Epoxyqueuosine reductase OS=Salegentibacter agarivorans OX=345907 GN=queG; PE = 3 SV=1
MKDTLKEAYTKLIKSEAERLGFLSCGISKAEFLEKEAPRLEEFLKKNRHGEMRWMENNFDKRLDPTKLVEGSKSVISLLLNYYPEETQRNDSYKISKYAYGRDYHFVIKDKLKQLLQFMQDEIGEIDGRAFVDSAPVMDKVWAAKSGLGWIGKHSNLLSKQTGSFYFIAELIVDLELEYDTPVTDHCGSCTACIDACPTDAIVEPYKVDGSKCISYFTIELKDELPNSYKNQFEDWMFGCDICQDVCPWNRFSKPHNEPLLNPHPELLEKDKQGWEELTKETFNEIFRKSAVKRTKFEGLKRNIEFISK

SEQ ID NO: 80678 - protein, 308 aa, unidentified
  source 1..308: note = Salegentibacter echinorum
  REGION 1..308: note = tr|A0A1M5HB13|A0A1M5HB13_9FLAO Epoxyqueuosine reductase OS=Salegentibacter echinorum OX=1073325 GN=queG; PE = 3 SV=1
MYENKAKYTNLIKTEAKRLGFLSCGISKAEFLEEEAPRLEAYLNKNWQGEMHYLENYFDKRLDPTKLVPGSKSVISLLLNYYPQEKQREDTYQVSKYAYGRDYHFVIKDKLKDLLNTMRDEIGDIEGRAFVDSAPVLDKAWAARSGLGWIGKHSNLLSKQTGSFYFIAELIVDLDLEYDTPVTDHCGSCTACIDACPTDAIVEPYKVDGSRCISYFTIELKDELPNSYKNQFEDWMFGCDICQDVCPWNRFSKPHNEPLFNPHPELLEKDRKGWEELTRETFNEIFRKSAVKRTKFQGLRRNIDFLKD

SEQ ID NO: 80679 - protein, 308 aa, Salegentibacter flavus
  REGION 1..308: note = tr|A0A1I4XNR3|A0A1I4XNR3_9FLAO Epoxyqueuosine reductase OS=Salegentibacter flavus OX=287099 GN=queG PE=3; SV = 1
MSNLKERYTSLIKAEAKRLGFLSCGVSKAEFLEEEAPRLEKYLQKGMHGEMKYMENHFDKRLDPTKLVEGSKSVISLLLNYYPQQIQNQDSYKISKYAYGRDYHFVIKDKLKDLMQFMQNEIGEIEGRAFVDSAPVLDKAWAAKSGLGWIGKHSNLLSKQTGSFYFIAELIVDLELEYDTPVTDHCGSCTACIDACPTQAIVEPYKVDGSRCISYFTIELKDELPNSFKGQFEDWMFGCDICQDVCPWNRFSKPHNEPLFNPHPGLLENDKKDWEEITKETFNEIFRKSAVKRTKFEGLKRNIDFLKK

SEQ ID NO: 80680 - protein, 307 aa, Salegentibacter holothuriorum
  REGION 1..307: note = tr|A0A1T5BIW2|A0A1T5BIW2_9FLAO Epoxyqueuosine reductase OS=Salegentibacter holothuriorum OX=241145; GN = queG PE=3 SV=1
METRSKYTNMIKSEAERLGFLSCGISKAEFLEKEAPRLEEFLNKNRHGEMRWMENNFDKRLDPTKLVEGSKSVISLLLNYYPGETQREDSYKISKYAYGRDYHFVIKDKLKQLLQFMQDEIGEIEGRAFVDSAPVMDKVWAAKSGLGWIGKHSNLLSKQTGSFYFIAELIVDLDLEYDTPVTDHCGSCTACIDACPTDAIIDAYKVDGSKCISYFTIELKDELPNSYKNQFEDWMFGCDICQDVCPWNRFSKPHNEPLFNPHPELLEKDKKGWEELTKETFNEIFRKSAVKRTKFEGLKRNIEFLRD

SEQ ID NO: 80681 - protein, 309 aa, Salegentibacter mishustinae
  REGION 1..309: note = tr|A0A0Q9ZH85|A0A0Q9ZH85_9FLAO Epoxyqueuosine reductase OS=Salegentibacter mishustinae OX=270918 GN=queG; PE = 3 SV=1
MKDTLKEAYTNMIKSEAERLGFLSCGISKAEFLEEEAPRLEEFLKKNRHGEMRWMENNFDKRLDPTKLVEGSKSVISLLLNYYPGETQREDSYKISKYAYGRDYHFVIKDKLKQLLQFMQDEIGEIDGRAFVDSAPVMDKVWAAKSGLGWIGKHSNLLSKQTGSFYFIAELIVDLELEYDTPVTDHCGSCTACIDACPTDAIVDPYKVDGSKCISYFTIELKDELPNSYKNQFEDWMFGCDICQDVCPWNRFSKPHNEPLFNPHPELLEKDKKGWEELTKETFNEIFRKSAVKRTKFEGLKRNIQFLND

SEQ ID NO: 80682 - protein, 309 aa, Salegentibacter salarius
  REGION 1..309: note = tr|A0A2N0TZ17|A0A2N0TZ17_9FLAO Epoxyqueuosine reductase OS=Salegentibacter salarius OX=435906 GN=queG; PE = 3 SV=1
MKDTLKEAYTSMIKSEAERLGFLSCGISKAEFLEEEAPRLEEFLKKNRHGEMRWMENNFDKRLDPTKLVEGSKSVISLLLNYYPGETQREDSYKISKYAYGRDYHFVIKDKLKQLLQFMQDEIGEIDGRAFVDSAPVMDKVWAAKSGLGWIGKHSNLLSKQTGSFYFIAELIVGLELEYDTPVTDHCGSCTACIDACPTDAIVDPYKVDGSKCISYFTIELKDELPNSYKNQFEDWMFGCDICQDVCPWNRFSKPHNEPLFNPHPELLEKDKKGWEELTKETFNEIFRKSAVKRTKFEGLKRNIQFLKD

SEQ ID NO: 80683 - protein, 309 aa, Salegentibacter salegens
  REGION 1..309: note = tr|A0A1M7MW87|A0A1M7MW87_9FLAO Epoxyqueuosine reductase OS=Salegentibacter salegens OX=143223 GN=queG; PE = 3 SV=1
MKDTLKEAYTNLIKSEAERLGFLSCGISKAEFLEEEAPRLEEFLKKNHQGEMRWMENNFDKRLDPTKLVEGSKSVISLLLNYYPGETQREDSYKISKYAYGRDYHFVIKDKLKQLLQFMQDEIGEISGRAFVDSAPVMDKVWAAKSGLGWIGKHSNLLSKQTGSFYFIAELIVDLELEYDTPVTDHCGSCTACIDACPTDAIIDPYKVDGSKCISYFTIELKDELPNSYKNEFEDWMFGCDICQDVCPWNRFSKPHNEPLFNPHPELLEKDKKGWEELTKETFNEIFRKSAVKRTKFEGLKRNIEFLKD

SEQ ID NO: 80684 - protein, 308 aa, Salegentibacter salinarum
  REGION 1..308: note = tr|A0A2N0TRY7|A0A2N0TRY7_9FLAO Epoxyqueuosine reductase OS=Salegentibacter salinarum OX=447422 GN=queG; PE = 3 SV=1
MYENKSKYTQLIKTEASRLGFLSCGISKAEFLEAEAPRLEEFLKKNRHGEMRWMENNFDKRLDPTKLVEGSKSVISLLLNYYPKETQREDSYKISKYAYGRDYHFVIKDKLKQLLQVMQDEIGEINGRAFVDSAPVMDKAWAAKSGLGWIGKHSNLLSKQTGSFYFIAELIVDLDLEYDAPVTDHCGSCTACIDACPTDAIVEPYKVDGSKCISYFTIELKDELPNSYKNQFEDWMFGCDICQDVCPWNRFSKPHNEPLFNPHPELLEKDKKGWEELTKETFNEIFRKSAVKRTKFEGLKRNIEFLQK

SEQ ID NO: 80685 - protein, 292 aa, Salegentibacter sp.
  REGION 1..292: note = tr|A0A4V3BWP2|A0A4V3BWP2_9FLAO Epoxyqueuosine reductase OS=Salegentibacter sp. 24 OX=2183986 GN=queG; PE = 3 SV=1
MRLGFLSCGVSKAEFLEAEAPRLEEFLNKNRHGEMRWMENNFDKRLDPTKLVEGSKSVISLLLNYYPEETQREDSYKISKYAYGRDYHFVIKNKLKQLLQFMQDEIGEISGRAFVDSAPVMDKAWAAKSGLGWIGKHSNLLSKQTGSFYFIAELIVDLELEYDTPVTDHCGSCTACIDACPTEAIVEPYKVDGSKCISYFTIELKDELPNSFKNQFEDWMFGCDICQDVCPWNRFSKPHNEPLFNPHPELLEKDKQGWEELTKETFNEIFKKSAVKRTKFEGLKRNIEFLKG

SEQ ID NO: 80686 - protein, 309 aa, Salegentibacter sp.; identical to SEQ ID NO: 80677
  REGION 1..309: note = tr|A0A1L6R1I6|A0A1L6R1I6_9FLAO Epoxyqueuosine reductase OS=Salegentibacter sp. T436 OX=1729720 GN=queG; PE = 3 SV=1

SEQ ID NO: 80687 - protein, 378 aa, unidentified
  source 1..378: note = Salibacterium halotolerans
  REGION 1..378: note = tr|A0A1I5UK48|A0A1I5UK48_9BACI Epoxyqueuosine reductase OS=Salibacterium halotolerans OX=1884432 GN=queG; PE = 3 SV=1
MTGVELKEKIIAYSKEIGIDKIGFASTDPFLTLKDRLIEQQRLQYQSGFEEPDIEKRTEPERLLPEAKTIISIALAYPSKMKNEPKSRKGDRRGLFCRASWGQDYHNVLKDRLQKLEDYIADIAPEARNQSMVDTGELSDRAVAERAGIGWSGKNCAIITPEFGSYVYLGEMITTLSLEPDKEITDQCGTCNKCVDACPTGALVQGGQLDSSKCIAFLTQTKGSLPERFRKKIGNRIYGCDTCQTVCPENKGMDHHQNEEFEPDPEVVKPRLEPLLTISNREFKEVYGPMAGSWRGKKPIQRNAVLALGTYKAEEALDSLTHVLHRDPRPVIRGSAAWSLGQIGTEEALQALYEAEQHETDESVQEEIANAKAPHFVP

SEQ ID NO: 80688 - protein, 378 aa, unidentified
  source 1..378: note = Salibacterium qingdaonense
  REGION 1..378: note = tr|A0A1I4J8P6|A0A1I4J8P6_9BACI Epoxyqueuosine reductase OS=Salibacterium qingdaonense OX=266892 GN=queG; PE = 3 SV=1
MTGAELKEKIAAYSKEIGIDKIGFASTDPFLTLKDRLIEQQRLQYHSGFEEPDIEKRTEPERLLPEAKTIISIALAYPSKMENEPKSRKGDRRGMFCRASWGVDYHNVLKDRLQKLEDYIQEIAPEARNQSMVDTGELSDRAVAERAGIGWSGKNCAIITPEFGSYVYLGEMITTLSLEPDKEITDQCGTCNKCVDACPTGALVQGGQLDAGKCIAYLTLTKGSLPERFRKKIGNRLYGCDTCQTVCPENKGMDHHQHEEFEPDPEVVKPSLEPLLTISNREFKNTFGPIAGSWRGKKPIQRNAVLALGTYKAEEALDSLVHVLHRDPRPVIRGSAAWSLGQIGTKEAVEALYEAEQHESEEDVQEEIASAKAPHAVP

SEQ ID NO: 80689 - protein, 378 aa, Salimicrobium flavidum
  REGION 1..378: note = tr|A0A1N7JCP4|A0A1N7JCP4_9BACI Epoxyqueuosine reductase OS=Salimicrobium flavidum OX=570947 GN=queG PE=3; SV = 1
MLDFHQLKQETIDYSKEIGIDKIGFASADVFGELKSRLIRQEQLGYQSGFEKGDPEERAEPERLLPTSQSIISIALAYPSKMKNPPKNEKGARRGQFARASWGEDYHTVLKEKLQLLGAFLQERMPDIDLKWMVDTGELSDRAVAERAGIGFSGKNCAIITPEFGSYVYLGEIVTNVPFEPDEPIQEGCGDCNICVDACPTDALVQGGQLNANRCIAFLTQTKGFLEDEYRTKIGNRVYGCDTCQTVCPINRGKDFHHHEEFEPDPEKVKPKLRPLLRISNREFKERFGRMAGSWRGKKPIQRNAILALGHYKETEAVDDLIHLMKNDPRPVIRGTAAYSLGKIGTPESYEAIAEALASEKDEEVTEEMEKGLDFQVT
